United States Patent Application Publication US 2010/0120627 A1 - sequence listing, part 10

SEQ ID NO: 22010 - DNA, 1692 bp, Homo sapiens
cctttcctttcagcggagcgcggcggcaagatggcagtgcaaatatccaagaagaggaagtttgtcgctgatggcatcttcaaagctgaactgaatgagtttcttactcgggagctggctgaagatggctactctggagttgaggtgcgagttacaccaaccaggacagaaatcattatcttagccaccagaacacagaatgttcttggtgagaagggccggcggattcgggaactgactgctgtagttcagaagaggtttggctttccagagggcagtgtagagcattgtggaacccaaagatgagatactgcccaccacccccatctcagaacagaagggtgggaagccagagccgcctgccatgccccagccagtccccacagcataacagggtctccttggcagctgtattctggagtctggatgttgctctctaaagacctttaataaaattttgtacaaagacacaaggtctgactagactgttcagtattcagactgaggggcatgttggcctctggagcattacatatcttcttggttttaaccatacttgtggtatttgcaagggccagaacagtaagacccaagcagagccaaccagagaaataatatttgtgtgatagagaaggctgatagcaagcaaggcagcaccttgattcgttgtcctgtagttcaggattgtaggtttagaagagggatatgtttgagtttttcctatgcataaggcgatccacgttgcacatagaaagtgaatataaatggccattatattttgtgtcatgctgtgctctaagtgttctttacatatgtactcgttaatcaacctctctaaagtgtaaaggaaatttgcttgcaccactgaaggcacataaggctcagaagtaaatttgcctaagcagtataaagctatcattagaatccacattcctaagttgtgttctcttaggggatcatggaaccagtcattggtactacaggctattatgttctggagaactgtgaagaacatttaaattgtctctgattttatctatcaatgttttgaagtattttctaccagtgtctgtacttcacaagaaattcggcactattttttcaggcaaaactagtgagggacaggttggcttgaaaatcatgagactgttgttaaatcagatgctggttgatcacagaggggacttccagggaaagctgttatcaggtggctgcttcctggtgatgcagcctggctgatgagataaccctggctccacagatggcttagcaggtgctgtgatgatttggttttcttctcaattagactgagctgcacatggtgtttatattgcttggcacatggtaagggcttaatatttgaggtaattatgtagggcgtacactgacaagtatctgacccccccttcctttttgactcataaattggtcatcttaaccatttaagtgtacacttctatagtgacagagttagccctctgtccaagggatttgcatctgtggattcaaccaactttgggtcaaaaataatcaaaaaggatggttgtgtgtgtattgaacatgtagacttatttttcttattttcaaaatactatattttcttgtcacttattttcttgtacactgcagttgtaacagctatgtagcatgtacattaggtattaaaagtaatccagtgaagattgaaagtct

SEQ ID NO: 22011 - protein, 91 aa, Homo sapiens; identical to SEQ ID NO: 21987

SEQ ID NO: 22012 - DNA, 2111 bp, Homo sapiens
cctttcctttcagcggagcgcggcggcaagatggcagtgcaaatatccaagaagaggaagtttgtcgctgatggcatcttcaaagctgaactgaatgagtttcttactcgggagctggctgaagatggctactctggagttgaggtgcgagttacaccaaccaggacagaaatcattatcttagccaccagaacacagaatgttcttggtgagaagggccggcggattcgggaactgactgctgtagttcagaagaggtttggctttccagagggcagtgtagagttgaaaataatggtgatggtaacaggatatcccttgcttcctttaaagctttatgctgaaaaggtggccactagaggtctgtgtgccattgcccaggcagagtctctgcgttacaaactcctaggagggcttgctgtgcggagggcctgctatggtgtgctgcggttcatcatggagagtggggccaaaggctgcgaggttgtggtgtctgggaaactccgaggacagagggctaaatccatgaagtttgtggatggcctgatgatccacagcggagaccctgttaactactacgttgacactgctgtgcgccacgtgttgctcagacagggtgtgctgggcatcaaggtgaagatcatgctgccctgggacccaactggtaagattggccctaagaagcccctgcctgaccacgtgagcattgtggaacccaaagatgagatactgcccaccacccccatctcagaacagaagggtgggaagccagagccgcctgccatgccccagccagtccccacagcataacagggtctccttggcagctgtattctggagtctggatgttgctctctaaagacctttaataaaattttgtacaaagacacaaggtctgactagactgttcagtattcagactgaggggcatgttggcctctggagcattacatatcttcttggttttaaccatacttgtggtatttgcaagggccagaacagtaagacccaagcagagccaaccagagaaataatatttgtgtgatagagaaggctgatagcaagcaaggcagcaccttgattcgttgtcctgtagttcaggattgtaggtttagaagagggatatgtttgagtttttcctatgcataaggcgatccacgttgcacatagaaagtgaatataaatggccattatattttgtgtcatgctgtgctctaagtgttctttacatatgtactcgttaatcaacctctctaaagtgtaaaggaaatttgcttgcaccactgaaggcacataaggctcagaagtaaatttgcctaagcagtataaagctatcattagaatccacattcctaagttgtgttctcttaggggatcatggaaccagtcattggtactacaggctattatgttctggagaactgtgaagaacatttaaattgtctctgattttatctatcaatgttttgaagtattttctaccagtgtctgtacttcacaagaaattcggcactattttttcaggcaaaactagtgagggacaggttggcttgaaaatcatgagactgttgttaaatcagatgctggttgatcacagaggggacttccagggaaagctgttatcaggtggctgcttcctggtgatgcagcctggctgatgagataaccctggctccacagatggcttagcaggtgctgtgatgatttggttttcttctcaattagactgagctgcacatggtgtttatattgcttggcacatggtaagggcttaatatttgaggtaattatgtagggcgtacactgacaagtatctgacccccccttcctttttgactcataaattggtcatcttaaccatttaagtgtacacttctatagtgacagagttagccctctgtccaagggatttgcatctgtggattcaaccaactttgggtcaaaaataatcaaaaaggatggttgtgtgtgtattgaacatgtagacttatttttcttattttcaaaatactatattttcttgtcacttattttcttgtacactgcagttgtaacagctatgtagcatgtacattaggtattaaaagtaatccagtgaagattgaaagtct

SEQ ID NO: 22013 - protein, 259 aa, Homo sapiens; identical to SEQ ID NO: 21993

SEQ ID NO: 22014 - DNA, 1808 bp, Homo sapiens
cctttcctttcagcggagcgcggcggcaagatggcagtgcaaatatccaagaagaggaagtttgtcgctgatggcatcttcaaagctgaactgaatgagtttcttactcgggagctggctgaagatggctactctggagttgaggtgcgagttacaccaaccaggacagaaatcattatcttagccaccagaacacagaatgttcttggtgagaagggccggcggattcgggaactgactgctgtagttcagaagaggtttggctttccagagggcagtgtagagctttatgctgaaaaggtggccactagaggtgtgctgggcatcaaggtgaagatcatgctgccctgggacccaactggtaagattggccctaagaagcccctgcctgaccacgtgagcattgtggaacccaaagatgagatactgcccaccacccccatctcagaacagaagggtgggaagccagagccgcctgccatgccccagccagtccccacagcataacagggtctccttggcagctgtattctggagtctggatgttgctctctaaagacctttaataaaattttgtacaaagacacaaggtctgactagactgttcagtattcagactgaggggcatgttggcctctggagcattacatatcttcttggttttaaccatacttgtggtatttgcaagggccagaacagtaagacccaagcagagccaaccagagaaataatatttgtgtgatagagaaggctgatagcaagcaaggcagcaccttgattcgttgtcctgtagttcaggattgtaggtttagaagagggatatgtttgagtttttcctatgcataaggcgatccacgttgcacatagaaagtgaatataaatggccattatattttgtgtcatgctgtgctctaagtgttctttacatatgtactcgttaatcaacctctctaaagtgtaaaggaaatttgcttgcaccactgaaggcacataaggctcagaagtaaatttgcctaagcagtataaagctatcattagaatccacattcctaagttgtgttctcttaggggatcatggaaccagtcattggtactacaggctattatgttctggagaactgtgaagaacatttaaattgtctctgattttatctatcaatgttttgaagtattttctaccagtgtctgtacttcacaagaaattcggcactattttttcaggcaaaactagtgagggacaggttggcttgaaaatcatgagactgttgttaaatcagatgctggttgatcacagaggggacttccagggaaagctgttatcaggtggctgcttcctggtgatgcagcctggctgatgagataaccctggctccacagatggcttagcaggtgctgtgatgatttggttttcttctcaattagactgagctgcacatggtgtttatattgcttggcacatggtaagggcttaatatttgaggtaattatgtagggcgtacactgacaagtatctgacccccccttcctttttgactcataaattggtcatcttaaccatttaagtgtacacttctatagtgacagagttagccctctgtccaagggatttgcatctgtggattcaaccaactttgggtcaaaaataatcaaaaaggatggttgtgtgtgtattgaacatgtagacttatttttcttattttcaaaatactatattttcttgtcacttattttcttgtacactgcagttgtaacagctatgtagcatgtacattaggtattaaaagtaatccagtgaagattgaaagtct

SEQ ID NO: 22015 - protein, 158 aa, Homo sapiens; identical to SEQ ID NO: 21989

SEQ ID NO: 22016 - DNA, 1679 bp, Homo sapiens
cctttcctttcagcggagcgcggcggcaagatggcagtgcaaatatccaagaagaggaagtttgtcgctgatggcatcttcaaagctgaactgaatgagtttcttactcgggaaactgactgctgtagttcagaagaggtttggctttccagagggcagtgtagagctttatgctgaaaaggtggccactagaggtctgtgtgccattgcccaggcagagtctctgcgttacaaactcctaggagggcttgctgtgcggagggcctgctatggtgtgctgcggttcatcatggagagtggggccaaaggctgcgaggttgtggtgtctgggaaactccgaggacagagggctaaatccatgaagtttgtggatggcctgatggtctccttggcagctgtattctggagtctggatgttgctctctaaagacctttaataaaattttgtacaaagacacaaggtctgactagactgttcagtattcagactgaggggcatgttggcctctggagcattacatatcttcttggttttaaccatacttgtggtatttgcaagggccagaacagtaagacccaagcagagccaaccagagaaataatatttgtgtgatagagaaggctgatagcaagcaaggcagcaccttgattcgttgtcctgtagttcaggattgtaggtttagaagagggatatgtttgagtttttcctatgcataaggcgatccacgttgcacatagaaagtgaatataaatggccattatattttgtgtcatgctgtgctctaagtgttctttacatatgtactcgttaatcaacctctctaaagtgtaaaggaaatttgcttgcaccactgaaggcacataaggctcagaagtaaatttgcctaagcagtataaagctatcattagaatccacattcctaagttgtgttctcttaggggatcatggaaccagtcattggtactacaggctattatgttctggagaactgtgaagaacatttaaattgtctctgattttatctatcaatgttttgaagtattttctaccagtgtctgtacttcacaagaaattcggcactattttttcaggcaaaactagtgagggacaggttggcttgaaaatcatgagactgttgttaaatcagatgctggttgatcacagaggggacttccagggaaagctgttatcaggtggctgcttcctggtgatgcagcctggctgatgagataaccctggctccacagatggcttagcaggtgctgtgatgatttggttttcttctcaattagactgagctgcacatggtgtttatattgcttggcacatggtaagggcttaatatttgaggtaattatgtagggcgtacactgacaagtatctgacccccccttcctttttgactcataaattggtcatcttaaccatttaagtgtacacttctatagtgacagagttagccctctgtccaagggatttgcatctgtggattcaaccaactttgggtcaaaaataatcaaaaaggatggttgtgtgtgtattgaacatgtagacttatttttcttattttcaaaatactatattttcttgtcacttattttcttgtacactgcagttgtaacagctatgtagcatgtacattaggtattaaaagtaatccagtgaagattgaaagtct

SEQ ID NO: 22017 - protein, 110 aa, Homo sapiens; identical to SEQ ID NO: 22005

SEQ ID NO: 22018 - DNA, 1968 bp, Homo sapiens
cctttcctttcagcggagcgcggcggcaagatggcagtgcaaatatccaagaagaggaagtttgtcgctgatggcatcttcaaagctgaactgaatgagtttcttactcgggagctggctgaagatggctactctggagttgaggtgcgagttacaccaaccaggacagaaatcattatcttagccaccagaacacagaatgttcttggtgagaagggccggcggattcgggaactgactgctgtagttcagaagaggtttggctttccagagggcagtgtagagggcctgctatggtgtgctgcggttcatcatggagagtggggccaaaggctgcgaggttgtggtgtctgggaaactccgaggacagagggctaaatccatgaagtttgtggatggcctgatgatccacagcggagaccctgttaactactacgttgacactgctgtgcgccacgtgttgctcagacagggtgtgctgggcatcaaggtgaagatcatgctgccctgggacccaactggtaagattggccctaagaagcccctgcctgaccacgtgagcattgtggaacccaaagatgagatactgcccaccacccccatctcagaacagaagggtgggaagccagagccgcctgccatgccccagccagtccccacagcataacagggtctccttggcagctgtattctggagtctggatgttgctctctaaagacctttaataaaattttgtacaaagacacaaggtctgactagactgttcagtattcagactgaggggcatgttggcctctggagcattacatatcttcttggttttaaccatacttgtggtatttgcaagggccagaacagtaagacccaagcagagccaaccagagaaataatatttgtgtgatagagaaggctgatagcaagcaaggcagcaccttgattcgttgtcctgtagttcaggattgtaggtttagaagagggatatgtttgagtttttcctatgcataaggcgatccacgttgcacatagaaagtgaatataaatggccattatattttgtgtcatgctgtgctctaagtgttctttacatatgtactcgttaatcaacctctctaaagtgtaaaggaaatttgcttgcaccactgaaggcacataaggctcagaagtaaatttgcctaagcagtataaagctatcattagaatccacattcctaagttgtgttctcttaggggatcatggaaccagtcattggtactacaggctattatgttctggagaactgtgaagaacatttaaattgtctctgattttatctatcaatgttttgaagtattttctaccagtgtctgtacttcacaagaaattcggcactattttttcaggcaaaactagtgagggacaggttggcttgaaaatcatgagactgttgttaaatcagatgctggttgatcacagaggggacttccagggaaagctgttatcaggtggctgcttcctggtgatgcagcctggctgatgagataaccctggctccacagatggcttagcaggtgctgtgatgatttggttttcttctcaattagactgagctgcacatggtgtttatattgcttggcacatggtaagggcttaatatttgaggtaattatgtagggcgtacactgacaagtatctgacccccccttcctttttgactcataaattggtcatcttaaccatttaagtgtacacttctatagtgacagagttagccctctgtccaagggatttgcatctgtggattcaaccaactttgggtcaaaaataatcaaaaaggatggttgtgtgtgtattgaacatgtagacttatttttcttattttcaaaatactatattttcttgtcacttattttcttgtacactgcagttgtaacagctatgtagcatgtacattaggtattaaaagtaatccagtgaagattgaaagtct

SEQ ID NO: 22019 - protein, 117 aa, Homo sapiens; identical to SEQ ID NO: 21995

SEQ ID NO: 22020 - DNA, 896 bp, Homo sapiens
ctttcctttcagcggagcgcggcggcaagatggcagtgcaaatatccaagaagaggaagtttgtcgctgatggcatcttcaaagctgaactgaatgagtttcttactcgggagctggctgaagatggctactctggagttgaggtgcgagttacaccaaccaggacagaaatcattatcttagccaccagaacacagaatgttcttggtgagaagggccggcggattcgggaactgactgctgtagttcagaagaggtttggctttccagagggcagtgtagaggtgagtgattctggcatatgccagaggtaatggctcttcagaatgatacttctaaaaactctcaacttggagactttaattgtttgttcattacaaatggactggtataactgttgaaattctcttaatgaataatgggcttaactttgtaagcctattctgctaatggctgatggttaaaggattttacattcaacttgggtatagaaatgatgcatatgatggattaactgtccccattggtgtacttggcatggccaaaggagccagggtgggagggcaaggaacctgcattgtgtgtaggtggtagaagtgctttaggaattgagggatactgaaattatatgctgtatatgatggtggtgtccgatcttttggcctccgtaggctacgttggaagaagaaatgtcttgggccacactactactggtagcgcaaaaaatcacgatgttgaatttgtgttgggccacaatcaaagccatctcctgggcagcatgcggcccgtgggttgggcaagcttggtgtagaaagtgatacttgtgtggcaaatgccaaattttcaactttcagttgaaaataatggtgatggtaacaggatatcccttgcttcct

SEQ ID NO: 22021 - protein, 94 aa, Homo sapiens
MAVQISKKRKFVADGIFKAELNEFLTRELAEDGYSGVEVRVTPTRTEIIILATRTQNVLGEKGRRIRELTAVVQKRFGFPEGSVEVSDSGICQR

SEQ ID NO: 22022 - DNA, 798 bp, Homo sapiens
ctttcctttcagcggagcgcggcggcaagatggcagtgcaaatatccaagaagaggaagtttgtcgctgatggcatcttcaaagctgaactgaatgagtttcttactcgggagctggctgaagatggctactctggagttgagaacacagaatgttcttggtgagaagggccggcggattcgggaactgactgctgtagttcagaagaggtttggctttccagagggcagtgtagagctttatgctgaaaaggtggccactagaggtctgtgtgccattgcccaggcagagtctctgcgttacaaactcctaggagggcttgctgtgcggagggcctgctatggtgtgctgcggttcatcatggagagtggggccaaaggctgcgaggttgtggtgtctgggaaactccgaggacagagggctaaatccatgaagtttgtggatggcctgatgatccacagcggagaccctgttaactactacgttgacactgctgtgcgccacgtgttgctcagacagggtgtgctgggcatcaaggtgaagatcatgctgccctgggacccaactggtaagattggccctaagaagcccctgcctgaccacgtgagcattgtggaacccaaagatgagatactgcccaccacccccatctcagaacagaagggtgggaagccagagccgcctgccatgccccagccagtccccacagcataacagggtctccttggcagctgtattctggagtctggatgttgctctctaaagacctttaataaaattttgtacaaagacacaagg

SEQ ID NO: 22023 - protein, 206 aa, Homo sapiens
MSFLLGSWLKMATLELRTQNVLGEKGRRIRELTAVVQKRFGFPEGSVELYAEKVATRGLCAIAQAESLRYKLLGGLAVRRACYGVLRFIMESGAKGCEVVVSGKLRGQRAKSMKFVDGLMIHSGDPVNYYVDTAVRHVLLRQGVLGIKVKIMLPWDPTGKIGPKKPLPDHVSIVEPKDEILPTTPISEQKGGKPEPPAMPQPVPTA

SEQ ID NO: 22024 - DNA, 1108 bp, Homo sapiens
ctttcctttcagcggagcgcggcggcaagatggcagtgcaaatatccaagaagaggaagtttgtcgctgatggcatcttcaaagctgaactgaatgagtttcttactcgggagctggctgaagatggctactctggagttgagaacacagaatgttcttggtgagaagggccggcggattcgggaactgactgctgtagttcagaagaggtttggctttccagagggcagtgtagagctttatgctgaaaaggtggccactagaggtctgtgtgccattgcccaggcagagtctctgcgttacaaactcctaggagggcttgctgtgcggagggcctgctatggtgtgctgcggttcatcatggagagtggggccaaaggctgcgaggttgtggtgtctgggaaactccgaggacagagggctaaatccatgaagtttgtggatggcctgatgatccacagcggagaccctgttaactactacgttgacactgctgtgcgccacgtgttgctcagacagggtgtgctgggcatcaaggtgaagatcatgctgccctgggacccaactggtaagattggccctaagaagcccctgcctgaccacgtgagcattgtggaacccaaagatgagatactgcccaccacccccatctcagaacagaagggtgggaagccagagccgcctgccatgccccagccagtccccacagcataacagggtctccttggcagctgtattctggagtctggatgttgctctctaaagacctttaataaaattttgtacaaagacacaaggtctgactagactgttcagtattcagactgaggggcatgttggcctctggagcattacatatcttcttggttttaaccatacttgtggtatttgcaagggccagaacagtaagacccaagcagagccaaccagagaaataatatttgtgtgatagagaaggctgatagcaagcaaggcagcaccttgattcgttgtcctgtagttcaggattgtaggtttagaagagggatatgtttgagtttttcctatgcataaggcgatccacgttgcacatagaaagtgaatataaatggccattatattttgtgtc

SEQ ID NO: 22025 - protein, 206 aa, Homo sapiens; identical to SEQ ID NO: 22023

SEQ ID NO: 22026 - DNA, 2015 bp, Homo sapiens
ctttcctttcagcggagcgcggcggcaagatggcagtgcaaatatccaagaagaggaagtttgtcgctgatggcatcttcaaagctgaactgaatgagtttcttactcgggagctggctgaagatggctactctggagttgagaacacagaatgttcttggtgagaagggccggcggattcgggaactgactgctgtagttcagaagaggtttggctttccagagggcagtgtagagctttatgctgaaaaggtggccactagaggtctgtgtgccattgcccaggcagagtctctgcgttacaaactcctaggagggcttgctgtgcggagggcctgctatggtgtgctgcggttcatcatggagagtggggccaaaggctgcgaggttgtggtgtctgggaaactccgaggacagagggctaaatccatgaagtttgtggatggcctgatgatccacagcggagaccctgttaactactacgttgacactgctgtgcgccacgtgttgctcagacagggtgtgctgggcatcaaggtgaagatcatgctgccctgggacccaactggtaagattggccctaagaagcccctgcctgaccacgtgagcattgtggaacccaaagatgagatactgcccaccacccccatctcagaacagaagggtgggaagccagagccgcctgccatgccccagccagtccccacagcataacagggtctccttggcagctgtattctggagtctggatgttgctctctaaagacctttaataaaattttgtacaaagacacaaggtctgactagactgttcagtattcagactgaggggcatgttggcctctggagcattacatatcttcttggttttaaccatacttgtggtatttgcaagggccagaacagtaagacccaagcagagccaaccagagaaataatatttgtgtgatagagaaggctgatagcaagcaaggcagcaccttgattcgttgtcctgtagttcaggattgtaggtttagaagagggatatgtttgagtttttcctatgcataaggcgatccacgttgcacatagaaagtgaatataaatggccattatattttgtgtcatgctgtgctctaagtgttctttacatatgtactcgttaatcaacctctctaaagtgtaaaggaaatttgcttgcaccactgaaggcacataaggctcagaagtaaatttgcctaagcagtataaagctatcattagaatccacattcctaagttgtgttctcttaggggatcatggaaccagtcattggtactacaggctattatgttctggagaactgtgaagaacatttaaattgtctctgattttatctatcaatgttttgaagtattttctaccagtgtctgtacttcacaagaaattcggcactattttttcaggcaaaactagtgagggacaggttggcttgaaaatcatgagactgttgttaaatcagatgctggttgatcacagaggggacttccagggaaagctgttatcaggtggctgcttcctggtgatgcagcctggctgatgagataaccctggctccacagatggcttagcaggtgctgtgatgatttggttttcttctcaattagactgagctgcacatggtgtttatattgcttggcacatggtaagggcttaatatttgaggtaattatgtagggcgtacactgacaagtatctgacccccccttcctttttgactcataaattggtcatcttaaccatttaagtgtacacttctatagtgacagagttagccctctgtccaagggatttgcatctgtggattcaaccaactttgggtcaaaaataatcaaaaaggatggttgtgtgtgtattgaacatgtagacttatttttcttattttcaaaatactatattttcttgtcacttattttcttgtacactgcagttgtaacagctatgtagcatgtacattaggtattaaaagtaatccagtgaagattgaaagtct

SEQ ID NO: 22027 - protein, 206 aa, Homo sapiens; identical to SEQ ID NO: 22023

SEQ ID NO: 22028 - DNA, 703 bp, Homo sapiens
gcggagcgcggcggcaagatggcagtgcaaatatccaagaagaggaagaacacagaatgttcttggtgagaagggccggcggattcgggaactgactgctgtagttcagaagaggtttggctttccagagggcagtgtagagctttatgctgaaaaggtggccactagaggtctgtgtgccattgcccaggcagagtctctgcgttacaaactcctaggagggcttgctgtgcggagggcctgctatggtgtgctgcggttcatcatggagagtggggccaaaggctgcgaggttgtggtgtctgggaaactccgaggacagagggctaaatccatgaagtttgtggatggcctgatgatccacagcggagaccctgttaactactacgttgacactgctgtgcgccacgtgttgctcagacagggtgtgctgggcatcaaggtgaagatcatgctgccctgggacccaactggtaagattggccctaagaagcccctgcctgaccacgtgagcattgtggaacccaaagatgagatactgcccaccacccccatctcagaacagaagggtgggaagccagagccgcctgccatgccccagccagtccccacagcataacagggtctccttggcagctgtattctggagtctggatgttgctctctaaagacctttaataaaattttgtacaaagacacaagg

SEQ ID NO: 22029 - protein, 117 aa, Homo sapiens; identical to SEQ ID NO: 21995

SEQ ID NO: 22030 - DNA, 1013 bp, Homo sapiens
gcggagcgcggcggcaagatggcagtgcaaatatccaagaagaggaagaacacagaatgttcttggtgagaagggccggcggattcgggaactgactgctgtagttcagaagaggtttggctttccagagggcagtgtagagctttatgctgaaaaggtggccactagaggtctgtgtgccattgcccaggcagagtctctgcgttacaaactcctaggagggcttgctgtgcggagggcctgctatggtgtgctgcggttcatcatggagagtggggccaaaggctgcgaggttgtggtgtctgggaaactccgaggacagagggctaaatccatgaagtttgtggatggcctgatgatccacagcggagaccctgttaactactacgttgacactgctgtgcgccacgtgttgctcagacagggtgtgctgggcatcaaggtgaagatcatgctgccctgggacccaactggtaagattggccctaagaagcccctgcctgaccacgtgagcattgtggaacccaaagatgagatactgcccaccacccccatctcagaacagaagggtgggaagccagagccgcctgccatgccccagccagtccccacagcataacagggtctccttggcagctgtattctggagtctggatgttgctctctaaagacctttaataaaattttgtacaaagacacaaggtctgactagactgttcagtattcagactgaggggcatgttggcctctggagcattacatatcttcttggttttaaccatacttgtggtatttgcaagggccagaacagtaagacccaagcagagccaaccagagaaataatatttgtgtgatagagaaggctgatagcaagcaaggcagcaccttgattcgttgtcctgtagttcaggattgtaggtttagaagagggatatgtttgagtttttcctatgcataaggcgatccacgttgcacatagaaagtgaatataaatggccattatattttgtgtc

SEQ ID NO: 22031 - protein, 117 aa, Homo sapiens; identical to SEQ ID NO: 21995

SEQ ID NO: 22032 - DNA, 1920 bp, Homo sapiens
gcggagcgcggcggcaagatggcagtgcaaatatccaagaagaggaagaacacagaatgttcttggtgagaagggccggcggattcgggaactgactgctgtagttcagaagaggtttggctttccagagggcagtgtagagctttatgctgaaaaggtggccactagaggtctgtgtgccattgcccaggcagagtctctgcgttacaaactcctaggagggcttgctgtgcggagggcctgctatggtgtgctgcggttcatcatggagagtggggccaaaggctgcgaggttgtggtgtctgggaaactccgaggacagagggctaaatccatgaagtttgtggatggcctgatgatccacagcggagaccctgttaactactacgttgacactgctgtgcgccacgtgttgctcagacagggtgtgctgggcatcaaggtgaagatcatgctgccctgggacccaactggtaagattggccctaagaagcccctgcctgaccacgtgagcattgtggaacccaaagatgagatactgcccaccacccccatctcagaacagaagggtgggaagccagagccgcctgccatgccccagccagtccccacagcataacagggtctccttggcagctgtattctggagtctggatgttgctctctaaagacctttaataaaattttgtacaaagacacaaggtctgactagactgttcagtattcagactgaggggcatgttggcctctggagcattacatatcttcttggttttaaccatacttgtggtatttgcaagggccagaacagtaagacccaagcagagccaaccagagaaataatatttgtgtgatagagaaggctgatagcaagcaaggcagcaccttgattcgttgtcctgtagttcaggattgtaggtttagaagagggatatgtttgagtttttcctatgcataaggcgatccacgttgcacatagaaagtgaatataaatggccattatattttgtgtcatgctgtgctctaagtgttctttacatatgtactcgttaatcaacctctctaaagtgtaaaggaaatttgcttgcaccactgaaggcacataaggctcagaagtaaatttgcctaagcagtataaagctatcattagaatccacattcctaagttgtgttctcttaggggatcatggaaccagtcattggtactacaggctattatgttctggagaactgtgaagaacatttaaattgtctctgattttatctatcaatgttttgaagtattttctaccagtgtctgtacttcacaagaaattcggcactattttttcaggcaaaactagtgagggacaggttggcttgaaaatcatgagactgttgttaaatcagatgctggttgatcacagaggggacttccagggaaagctgttatcaggtggctgcttcctggtgatgcagcctggctgatgagataaccctggctccacagatggcttagcaggtgctgtgatgatttggttttcttctcaattagactgagctgcacatggtgtttatattgcttggcacatggtaagggcttaatatttgaggtaattatgtagggcgtacactgacaagtatctgacccccccttcctttttgactcataaattggtcatcttaaccatttaagtgtacacttctatagtgacagagttagccctctgtccaagggatttgcatctgtggattcaaccaactttgggtcaaaaataatcaaaaaggatggttgtgtgtgtattgaacatgtagacttatttttcttattttcaaaatactatattttcttgtcacttattttcttgtacactgcagttgtaacagctatgtagcatgtacattaggtattaaaagtaatccagtgaagattgaaagtct

SEQ ID NO: 22033 - protein, 117 aa, Homo sapiens; identical to SEQ ID NO: 21995

SEQ ID NO: 22034 - DNA, 148 bp, Homo sapiens; identical to SEQ ID NO: 2846

SEQ ID NO: 22035 - DNA, 420 bp, Homo sapiens
agtttgtcgctgatggcatcttcaaagctgaactgaatgagtttcttactcgggagctggctgaagatggctactctggagttgagcggagaccctgttaactactacgttgacactgctgtgcgccacgtgttgctcagacagggtgtgctgggcatcaaggtgaagatcatgctgccctgggacccaactggtaagattggccctaagaagcccctgcctgaccacgtgagcattgtggaacccaaagatgagatactgcccaccacccccatctcagaacagaagggtgggaagccagagccgcctgccatgccccagccagtccccacagcataacagggtctccttggcagctgtattctggagtctggatgttgctctctaaagacctttaataaaattttgtacaaagacaca

SEQ ID NO: 22036 - protein, 100 aa, Homo sapiens
MSFLLGSWLKMATLELSGDPVNYYVDTAVRHVLLRQGVLGIKVKIMLPWDPTGKIGPKKPLPDHVSIVEPKDEILPTTPISEQKGGKPEPPAMPQPVPTA

SEQ ID NO: 22037 - DNA, 732 bp, Homo sapiens
agtttgtcgctgatggcatcttcaaagctgaactgaatgagtttcttactcgggagctggctgaagatggctactctggagttgagcggagaccctgttaactactacgttgacactgctgtgcgccacgtgttgctcagacagggtgtgctgggcatcaaggtgaagatcatgctgccctgggacccaactggtaagattggccctaagaagcccctgcctgaccacgtgagcattgtggaacccaaagatgagatactgcccaccacccccatctcagaacagaagggtgggaagccagagccgcctgccatgccccagccagtccccacagcataacagggtctccttggcagctgtattctggagtctggatgttgctctctaaagacctttaataaaattttgtacaaagacacaaggtctgactagactgttcagtattcagactgaggggcatgttggcctctggagcattacatatcttcttggttttaaccatacttgtggtatttgcaagggccagaacagtaagacccaagcagagccaaccagagaaataatatttgtgtgatagagaaggctgatagcaagcaaggcagcaccttgattcgttgtcctgtagttcaggattgtaggtttagaagagggatatgtttgagtttttcctatgcataaggcgatccacgttgcacatagaaagtgaatataaatggccattatattttgtgt

SEQ ID NO: 22038 - protein, 100 aa, Homo sapiens; identical to SEQ ID NO: 22036

SEQ ID NO: 22039 - DNA, 1640 bp, Homo sapiens
agtttgtcgctgatggcatcttcaaagctgaactgaatgagtttcttactcgggagctggctgaagatggctactctggagttgagcggagaccctgttaactactacgttgacactgctgtgcgccacgtgttgctcagacagggtgtgctgggcatcaaggtgaagatcatgctgccctgggacccaactggtaagattggccctaagaagcccctgcctgaccacgtgagcattgtggaacccaaagatgagatactgcccaccacccccatctcagaacagaagggtgggaagccagagccgcctgccatgccccagccagtccccacagcataacagggtctccttggcagctgtattctggagtctggatgttgctctctaaagacctttaataaaattttgtacaaagacacaaggtctgactagactgttcagtattcagactgaggggcatgttggcctctggagcattacatatcttcttggttttaaccatacttgtggtatttgcaagggccagaacagtaagacccaagcagagccaaccagagaaataatatttgtgtgatagagaaggctgatagcaagcaaggcagcaccttgattcgttgtcctgtagttcaggattgtaggtttagaagagggatatgtttgagtttttcctatgcataaggcgatccacgttgcacatagaaagtgaatataaatggccattatattttgtgtcatgctgtgctctaagtgttctttacatatgtactcgttaatcaacctctctaaagtgtaaaggaaatttgcttgcaccactgaaggcacataaggctcagaagtaaatttgcctaagcagtataaagctatcattagaatccacattcctaagttgtgttctcttaggggatcatggaaccagtcattggtactacaggctattatgttctggagaactgtgaagaacatttaaattgtctctgattttatctatcaatgttttgaagtattttctaccagtgtctgtacttcacaagaaattcggcactattttttcaggcaaaactagtgagggacaggttggcttgaaaatcatgagactgttgttaaatcagatgctggttgatcacagaggggacttccagggaaagctgttatcaggtggctgcttcctggtgatgcagcctggctgatgagataaccctggctccacagatggcttagcaggtgctgtgatgatttggttttcttctcaattagactgagctgcacatggtgtttatattgcttggcacatggtaagggcttaatatttgaggtaattatgtagggcgtacactgacaagtatctgacccccccttcctttttgactcataaattggtcatcttaaccatttaagtgtacacttctatagtgacagagttagccctctgtccaagggatttgcatctgtggattcaaccaactttgggtcaaaaataatcaaaaaggatggttgtgtgtgtattgaacatgtagacttatttttcttattttcaaaatactatattttcttgtcacttattttcttgtacactgcagttgtaacagctatgtagcatgtacattaggtattaaaagtaatccagtgaagattgaaagtct

SEQ ID NO: 22040 - protein, 100 aa, Homo sapiens; identical to SEQ ID NO: 22036

SEQ ID NO: 22041 - DNA, 618 bp, Homo sapiens
ttcgggaactgactgctgtagttcagaagaggtttggctttccagagggcagtgtagagctttatgctgaaaaggtggccactagaggtctgtgtgccattgcccaggcagagtctctgcgttacaaactcctaggagggcttgctgtgcggagggcctgctatggtgtgctgcggttcatcatggagagtggggccaaaggctgcgaggttgtggtgtctgggaaactccgaggacagagggctaaatccatgaagtttgtggatggcctgatgatccacagcggagaccctgttaactactacgttgacactgctgtgcgccacgtgttgctcagacagggtgtgctgggcatcaaggtgaagatcatgctgccctgggacccaactggtaagattggccctaagaagcccctgcctgaccacgtgagcattgtggaacccaaagatgagatactgcccaccacccccatctcagaacagaagggtgggaagccagagccgcctgccatgccccagccagtccccacagcataacagggtctccttggcagctgtattctggagtctggatgttgctctctaaagacctttaataaaattttgtacaaagacacaa

SEQ ID NO: 22042 - protein, 117 aa, Homo sapiens; identical to SEQ ID NO: 21995

SEQ ID NO: 22043 - DNA, 930 bp, Homo sapiens
ttcgggaactgactgctgtagttcagaagaggtttggctttccagagggcagtgtagagctttatgctgaaaaggtggccactagaggtctgtgtgccattgcccaggcagagtctctgcgttacaaactcctaggagggcttgctgtgcggagggcctgctatggtgtgctgcggttcatcatggagagtggggccaaaggctgcgaggttgtggtgtctgggaaactccgaggacagagggctaaatccatgaagtttgtggatggcctgatgatccacagcggagaccctgttaactactacgttgacactgctgtgcgccacgtgttgctcagacagggtgtgctgggcatcaaggtgaagatcatgctgccctgggacccaactggtaagattggccctaagaagcccctgcctgaccacgtgagcattgtggaacccaaagatgagatactgcccaccacccccatctcagaacagaagggtgggaagccagagccgcctgccatgccccagccagtccccacagcataacagggtctccttggcagctgtattctggagtctggatgttgctctctaaagacctttaataaaattttgtacaaagacacaaggtctgactagactgttcagtattcagactgaggggcatgttggcctctggagcattacatatcttcttggttttaaccatacttgtggtatttgcaagggccagaacagtaagacccaagcagagccaaccagagaaataatatttgtgtgatagagaaggctgatagcaagcaaggcagcaccttgattcgttgtcctgtagttcaggattgtaggtttagaagagggatatgtttgagtttttcctatgcataaggcgatccacgttgcacatagaaagtgaatataaatggccattatattttgtgtc

SEQ ID NO: 22044 - protein, 117 aa, Homo sapiens; identical to SEQ ID NO: 21995

SEQ ID NO: 22045 - DNA, 1837 bp, Homo sapiens
ttcgggaactgactgctgtagttcagaagaggtttggctttccagagggcagtgtagagctttatgctgaaaaggtggccactagaggtctgtgtgccattgcccaggcagagtctctgcgttacaaactcctaggagggcttgctgtgcggagggcctgctatggtgtgctgcggttcatcatggagagtggggccaaaggctgcgaggttgtggtgtctgggaaactccgaggacagagggctaaatccatgaagtttgtggatggcctgatgatccacagcggagaccctgttaactactacgttgacactgctgtgcgccacgtgttgctcagacagggtgtgctgggcatcaaggtgaagatcatgctgccctgggacccaactggtaagattggccctaagaagcccctgcctgaccacgtgagcattgtggaacccaaagatgagatactgcccaccacccccatctcagaacagaagggtgggaagccagagccgcctgccatgccccagccagtccccacagcataacagggtctccttggcagctgtattctggagtctggatgttgctctctaaagacctttaataaaattttgtacaaagacacaaggtctgactagactgttcagtattcagactgaggggcatgttggcctctggagcattacatatcttcttggttttaaccatacttgtggtatttgcaagggccagaacagtaagacccaagcagagccaaccagagaaataatatttgtgtgatagagaaggctgatagcaagcaaggcagcaccttgattcgttgtcctgtagttcaggattgtaggtttagaagagggatatgtttgagtttttcctatgcataaggcgatccacgttgcacatagaaagtgaatataaatggccattatattttgtgtcatgctgtgctctaagtgttctttacatatgtactcgttaatcaacctctctaaagtgtaaaggaaatttgcttgcaccactgaaggcacataaggctcagaagtaaatttgcctaagcagtataaagctatcattagaatccacattcctaagttgtgttctcttaggggatcatggaaccagtcattggtactacaggctattatgttctggagaactgtgaagaacatttaaattgtctctgattttatctatcaatgttttgaagtattttctaccagtgtctgtacttcacaagaaattcggcactattttttcaggcaaaactagtgagggacaggttggcttgaaaatcatgagactgttgttaaatcagatgctggttgatcacagaggggacttccagggaaagctgttatcaggtggctgcttcctggtgatgcagcctggctgatgagataaccctggctccacagatggcttagcaggtgctgtgatgatttggttttcttctcaattagactgagctgcacatggtgtttatattgcttggcacatggtaagggcttaatatttgaggtaattatgtagggcgtacactgacaagtatctgacccccccttcctttttgactcataaattggtcatcttaaccatttaagtgtacacttctatagtgacagagttagccctctgtccaagggatttgcatctgtggattcaaccaactttgggtcaaaaataatcaaaaaggatggttgtgtgtgtattgaacatgtagacttatttttcttattttcaaaatactatattttcttgtcacttattttcttgtacactgcagttgtaacagctatgtagcatgtacattaggtattaaaagtaatccagtgaagattgaaagtct

SEQ ID NO: 22046 - protein, 117 aa, Homo sapiens; identical to SEQ ID NO: 21995

SEQ ID NO: 22047 - DNA, 845 bp, Homo sapiens
cgggaactgactgctgtagttcagaagaggtttggctttccagagggcagtgtagagctttatgctgaaaaggtggccactagaggtctgtgtgccattgcccaggcagagtctctgcgttacaaactcctaggagggcttgctgtgcggagggcctgctatggtgtgctgcggttcatcatggagagtggggccaaaggctgcgaggttgtggtgtctgggaaactccgaggacagagggctaaatccatgaagtttgtggatggcctgatgatccacagcggagaccctgttaactactacgttgacactgctgtgcgccacgtgttgctcagacagggtgtgctgggcatcaaggtgaagatcatatactgcccaccacccccatctcagaacagaagggtgggaagccagagccgcctgccatgccccagccagtccccacagcataacagggtctccttggcagctgtattctggagtctggatgttgctctctaaagacctttaataaaattttgtacaaagacacaaggtctgactagactgttcagtattcagactgaggggcatgttggcctctggagcattacatatcttcttggttttaaccatacttgtggtatttgcaagggccagaacagtaagacccaagcagagccaaccagagaaataatatttgtgtgatagagaaggctgatagcaagcaaggcagcaccttgattcgttgtcctgtagttcaggattgtaggtttagaagagggatatgtttgagtttttcctatgcataaggcgatccacgttgcacatagaaagtgaatataaatggccattatattttgtgt

SEQ ID NO: 22048 - protein, 106 aa, Homo sapiens
MESGAKGCEVVVSGKLRGQRAKSMKFVDGLMIHSGDPVNYYVDTAVRHVLLRQGVLGIKVKIIYCPPPPSQNRRVGSQSRLPCPSQSPQHNRVSLAAVFWSLDVAL

SEQ ID NO: 22049 - DNA, 1753 bp, Homo sapiens
cgggaactgactgctgtagttcagaagaggtttggctttccagagggcagtgtagagctttatgctgaaaaggtggccactagaggtctgtgtgccattgcccaggcagagtctctgcgttacaaactcctaggagggcttgctgtgcggagggcctgctatggtgtgctgcggttcatcatggagagtggggccaaaggctgcgaggttgtggtgtctgggaaactccgaggacagagggctaaatccatgaagtttgtggatggcctgatgatccacagcggagaccctgttaactactacgttgacactgctgtgcgccacgtgttgctcagacagggtgtgctgggcatcaaggtgaagatcatatactgcccaccacccccatctcagaacagaagggtgggaagccagagccgcctgccatgccccagccagtccccacagcataacagggtctccttggcagctgtattctggagtctggatgttgctctctaaagacctttaataaaattttgtacaaagacacaaggtctgactagactgttcagtattcagactgaggggcatgttggcctctggagcattacatatcttcttggttttaaccatacttgtggtatttgcaagggccagaacagtaagacccaagcagagccaaccagagaaataatatttgtgtgatagagaaggctgatagcaagcaaggcagcaccttgattcgttgtcctgtagttcaggattgtaggtttagaagagggatatgtttgagtttttcctatgcataaggcgatccacgttgcacatagaaagtgaatataaatggccattatattttgtgtcatgctgtgctctaagtgttctttacatatgtactcgttaatcaacctctctaaagtgtaaaggaaatttgcttgcaccactgaaggcacataaggctcagaagtaaatttgcctaagcagtataaagctatcattagaatccacattcctaagttgtgttctcttaggggatcatggaaccagtcattggtactacaggctattatgttctggagaactgtgaagaacatttaaattgtctctgattttatctatcaatgttttgaagtattttctaccagtgtctgtacttcacaagaaattcggcactattttttcaggcaaaactagtgagggacaggttggcttgaaaatcatgagactgttgttaaatcagatgctggttgatcacagaggggacttccagggaaagctgttatcaggtggctgcttcctggtgatgcagcctggctgatgagataaccctggctccacagatggcttagcaggtgctgtgatgatttggttttcttctcaattagactgagctgcacatggtgtttatattgcttggcacatggtaagggcttaatatttgaggtaattatgtagggcgtacactgacaagtatctgacccccccttcctttttgactcataaattggtcatcttaaccatttaagtgtacacttctatagtgacagagttagccctctgtccaagggatttgcatctgtggattcaaccaactttgggtcaaaaataatcaaaaaggatggttgtgtgtgtattgaacatgtagacttatttttcttattttcaaaatactatattttcttgtcacttattttcttgtacactgcagttgtaacagctatgtagcatgtacattaggtattaaaagtaatccagtgaagattgaaagtct

SEQ ID NO: 22050 - protein, 106 aa, Homo sapiens; identical to SEQ ID NO: 22048

SEQ ID NO: 22051 - DNA, 289 bp, Homo sapiens
aagctttatgctgaaaaggtggccactagaggtctgtgtgccattgcccaggcagagtctctgcgttacaaactcctaggagggcttgctgtgcggagggcctgctatggtgtgctgcggttcatcatggagagtggggccaaaggctgcgaggttgtggtgtctgggaaactccgaggacagagggctaaatccatgaagtttgtggatggcctgatgatccacagcggagaccctgttaactactacgttgacactgctgtgcgccacgtgttgctcagacagggtg

SEQ ID NO: 22052 - protein, 53 aa, Homo sapiens
MESGAKGCEVVVSGKLRGQRAKSMKFVDGLMIHSGDPVNYYVDTAVRHVLLRQ

SEQ ID NO: 22053 - DNA, 965 bp, Homo sapiens
agggcctgctatggtgtgctgcggttcatcatggagagtggggccaaaggctgcgaggttgtggtgtctgggaaactccgaggacagagggctaaatccatgaagtttgtggatggcctgatgatccacagcggagaccctgttaactactacgttgacactgctgtgcgccacgtgttgctcagacagggtgtgctgggcatcaaggtgaagatcatgctgccctgggacccaactggtaagattggccctaagaagcccctgcctgaccacgtgagcattgtggaacccaaagatgagatactgcccaccacccccatctcagaacagaagggtgggaagccagagccgcctgccatgccccagccagtccccacagcataacagcctcttccatgagtggggagcccgctgcttgtctccagctcctagcagtgagtcctgataatctcaaatttaaggacagtaactttgtctgggatgagtgtgggaaaggatgtgtttgggaacagacgcgagcctgcagaggtgtttgtaaccatctctttctaagtggtgggaagcagacattttattctttaactgttaatatatatagtgtgtgttttttatgcatgaaatattttatagtttttaaaaatgcccacactactattttgaaagtaaatgaggtaatgtatgtgtcagaacccaatacccaaagcgatcgtagtaagaggtggggcctttgggaaggcattaaattgcttagggaatgagggtggaaccctcatgaatgagattagagccttataggagaggttggagggagttgcctggcctccctctcccatgtgaagactcagcaagaaaacattatttaggaagcagagagccctcatcaaacaccagatctgctggccacctgatctggcactttccagccttcagaactgtgagaaataaatttctgttgtctataaatc

SEQ ID NO: 22054 - protein, 117 aa, Homo sapiens; identical to SEQ ID NO: 21995

SEQ ID NO: 22055 - DNA, 518 bp, Homo sapiens
cttcagtgatgacacgatgacgagtcagaaaggtcacgtcctgctcttggtccttgtcagtgccatgttctgtggtgctgtgcacgagttcctttggcagaagtgtcctatttattgatcgatttagaggcatttgtctgagaagggtccagacccaggggtgcttgagtaaactgcttgctctctttggtcttgtgtgatgggggcctttgagaccccagctgtgtgctaacaactgtggtgtcctctaggtgtgctgggcatcaaggtgaagatcatgctgccctgggacccaactggtaagattggccctaagaagcccctgcctgaccacgtgagcattgtggaacccaaagatgagatactgcccaccacccccatctcagaacagaagggtgggaagccagagccgcctgccatgccccagccagtccccacagcataacaggtatgtctgcaagggcaggggcctcttggggcataatagggtccttccgagtctttctgttaatacttgt

SEQ ID NO: 22056 - protein, 55 aa, Homo sapiens
MLPWDPTGKIGPKKPLPDHVSIVEPKDEILPTTPISEQKGGKPEPPAMPQPVPTA

SEQ ID NO: 22057 - DNA, 1477 bp, Homo sapiens
aacagcctagcgctgcgccgcgtggccgccgccttctcgctggccccgctggccgagcgctgcggccgcgtcctgcgtcaggccttcgccgaggtggcgcgccacgccgacttcctggagctggcgcctgacgaggtggtggcgctgctggcggaccccgcgctgggcgtggcgcgcgaggaggccgtgtttgaagcggccatgcgctgggtgcgccacgacgcgccggcccgccgcggccagctgcgacgcctgctggagcacgtgcgcctgccgctactggcgcccgcttacttcctggagaaggtggaggcggacgagctgctgcaggcctgcggcgagtgccgcccgctgctgctcgaggctcgcgcctgcttcatcctgggccgcgaggccggtgcgctgcggacccggccgcggagattcatggacctagctgaagtgatcgtggtcatcggcggttgcgaccgcaaaggtctcctgaagctgcccttcgccgatgcctaccatccagagagccagcggtggaccccactgcccagcctgcccggctacactcgctcagaattcgccgcctgtgctctccgcaatgacgtctacgtctccggaggccacatcaacagtcatgatgtgtggatgtttagctcccatctgcacacctggatcaaggtagcctctctgcacaagggcaggtggaggcacaagatggcagttgtgcaggggcagctgttcgcggtgggtggcttcgacggcctgaggcgcctgcacagcgtggagcgctacgaccccttctccaacacctgggcggccgccgcgcccctcccggaggccgtgagctcggcggcggtggcgtcctgcgcgggcaagctcttcgtgattgggggcgccaggcagggcggcgtcaacacggacaaggtgcagtgctttgaccccaaggaggaccggtggagcctgcggtcaccagcacccttctcacagcggtgtctcgaggctgtctcccttgaggacaccatctatgtcatggggggtctcatgagcaaaatcttcacctatgatccaggcacagatgtgtggggggaggcagctgtcctccccagccctgtggaaagctgtggagtcactgtgtgtgacgggaaggtccacatccttggcgggcgggatgatcgcggagaaagcaccgataaggtcttcacctttgaccccagcagtgggcaggtggaggtccagccatccctgcagcgctgcaccagctcccacggctgtgtcaccatcatccagagcttgggcaggtgattcagatttggacagcctgagccaggaggcggagaggcaggcggagctcagatgcacactctgctccctcatggcacctccacgcaaacagcccttaacttaatggtcccttttcttgtataaataaaatcttgttgggtctgtgttccagctgcagtctgccctgcctggagatggaatgtct

SEQ ID NO: 22058 - protein, 363 aa, Homo sapiens; identical to SEQ ID NO: 2849

SEQ ID NO: 22059 - DNA, 2436 bp, Homo sapiens
gagggccgcctgcgcgccgccaacagcctagcgctgcgccgcgtggccgccgccttctcgctggccccgctggccgagcgctgcggccgcgtcctgcgtcaggccttcgccgaggtggcgcgccacgccgacttcctggagctggcgcctgacgaggtggtggcgctgctggcggaccccgcgctgggcgtggcgcgcgaggaggccgtgtttgaagcggccatgcgctgggtgcgccacgacgcgccggcccgccgcggccagctgcgacgcctgctggagcacgtgcgcctgccgctactggcgcccgcttacttcctggagaaggtggaggcggacgagctgctgcaggcctgcggcgagtgccgcccgctgctgctcgaggctcgcgcctgcttcatcctgggccgcgaggccggtgcgctgcggacccggccgcggagattcatggacctagctgaagtgatcgtggtcatcggcggttgcgaccgcaaaggtctcctgaagctgcccttcgccgatgcctaccatccagagagccagcggtggaccccactgcccagcctgcccggctacactcgctcagaattcgccgcctgtgctctccgcaatgacgtctacgtctccggaggccacatcaacagtcatgatgtgtggatgtttagctcccatctgcacacctggatcaaggtagcctctctgcacaagggcaggtggaggcacaagatggcagttgtgcaggggcaggtaggcacgagctgcagcggctgccctgggacacaaggtacagatctgtggatgtgctggagggaggttctctaaaaccctctctttgtaagaaggggtctgaagccccccaaaaaaggagacttgtccaaggtcacataataatggctgatgctaataataatagcaattactgtaatagtaacagcctgatggtcaagggtatgggctctggggccatagagtctaggtttgaatcttgactgtgccactcaagaataaaagaatctgtcggccgggcgcagtggctgtaatcccagcactttgggaggccaaggcgggcggatcacgaggtcaggagatccagaccatcctggctaacacggtgaaaccccgtctctactaaaaatacaaaaaattagctcggcgtggtggctggtgcctgtagtcccagctactcaggaggctgaggcaggagaatggcatgaacctgggaggcggagcttgcagtgagcccagattgcaccactacactccagcctgggcaacagagcgagactttgtctcaaaaaaaaaaaaaaaagtcaattatctttgtaagctacatcccgaattcagaaacaaagatgcttcttagaatcaattaagtggggtggtaaagtctcaatactagctattattattaagcatcagcttggtgccaggtattttacagctgtaaccatgcaggttaaggtctcatccccgctaaatgagaggaaaccggctcagggaggtacagcaactgggtggaggctgcccaggtggtggcagcactgggctcgggggtcagtttggtcctgaaactgggttggggacagggatagtttccagctcaaagactgtaaggactgaagcgatgaggccgagggccctaaggccctggcacccggctccccggcccatgtcctcacttgcagctgttcgcggtgggtggcttcgacggcctgaggcgcctgcacagcgtggagcgctacgaccccttctccaacacctgggcggccgccgcgcccctcccggaggccgtgagctcggcggcggtggcgtcctgcgcgggcaagctcttcgtgattgggggcgccaggcagggcggcgtcaacacggacaaggtgcagtgctttgaccccaaggaggaccggtggagcctgcggtcaccagcacccttctcacagcggtgtctcgaggctgtctcccttgaggacaccatctatgtcatggggggtctcatgagcaaaatcttcacctatgatccaggcacagatgtgtggggggaggcagctgtcctccccagccctgtggaaagctgtggagtcactgtgtgtgacgggaaggtccacatccttggcgggcgggatgatcgcggagaaagcaccgataaggtcttcacctttgaccccagcagtgggcaggtggaggtccagccatccctgcagcgctgcaccagctcccacggctgtgtcaccatcatccagagcttgggcaggtgattcagatttggacagcctgagccaggaggcggagaggcaggcggagctcagatgcacactctgctccctcatggcacctccacgcaaacagcccttaacttaatggtcccttttcttgtataaataaaatcttgttgggtctgtgttccagctgcagtctgccctgcctggagatggaatgtct

SEQ ID NO: 22060 - protein, 199 aa, Homo sapiens
MRWVRHDAPARRGQLRRLLEHVRLPLLAPAYFLEKVEADELLQACGECRPLLLEARACFILGREAGALRTRPRRFMDLAEVIVVIGGCDRKGLLKLPFADAYHPESQRWTPLPSLPGYTRSEFAACALRNDVYVSGGHINSHDVWMFSSHLHTWIKVASLHKGRWRHKMAVVQGQVGTSCSGCPGTQGTDLWMCWREVL

SEQ ID NO: 22061 - DNA, 1459 bp, Homo sapiens
gagggccgcctgcgcgccgccaacagcctagcgctgcgccgcgtggccgccgccttctcgctggccccgctggccgagcgctgcggccgcgtcctgcgtcaggccttcgccgaggtggcgcgccacgccgacttcctggagctggcgcctgacgaggtggtggcgctgctggcggaccccgcgctgggcgtggcgcgcgaggaggccgtgtttgaagcggccatgcgctgggtgcgccacgacgcgccggcccgccgcggccagctgcgacgcctgctggagcacgtgcgcctgccgctactggcgcccgcttacttcctggagaaggtggaggcggacgagctgctgcaggcctgcggcgagtgccgcccgctgctgctcgaggctcgcgcctgcttcatcctgggccgcgaggccggtgcgctgcggacccggccgcggagattcatggacctagctgaagtgatcgtggtcatcggcggttgcgaccgcaaaggtctcctgaagctgcccttcgccgatgcctaccatccagagagccagcggtggaccccactgcccagcctgcccggctacactcgctcagaattcgccgcctgtgctctccgcaatgacgtctacgtctccggaggccacatcaacagtcatgatgtgtggatgtttagctcccatctgcacacctggatcaaggtagcctctctgcacaagggcaggtggaggcacaagatggcagttgtgcaggggcagctgttcgcggtgggtggcttcgacggcctgaggcgcctgcacagcgtggagcgctacgaccccttctccaacacctgggcggccgccgcgcccctcccggaggccgtgagctcggcggcggtggcgtcctgcgcgggcaagctcttcgtgattgggggcgccaggcagggcggcgtcaacacggacaaggtgcagtgctttgaccccaaggaggaccggtggagcctgcggtcaccagcacccttctcacagcggtgtctcgaggctgtctcccttgaggacaccatctatgtcatggggggtctcatgagcaaaatcttcacctatgatccaggcacagatgtgtggggggaggcagctgtcctccccagccctgtggaaagctgtggagtcactgtgtgtgacgggaaggtccacatccttggcgggcgggatgatcgcggagaaagcaccgataaggtcttcacctttgaccccagcagtgggcaggtggaggtccagccatccctgcagcgctgcaccagctcccacggctgtgtcaccatcatccagagcttgggcaggtgattcagatttggacagcctgagccaggaggcggagaggcaggcggagctcagatgcacactctgctccctcatggcacctccacgcaaacagcccttaacttaatggtcccttttcttgtataaataaaatcttgttgggtctgtg

SEQ ID NO: 22062 - protein, 363 aa, Homo sapiens; identical to SEQ ID NO: 2849

SEQ ID NO: 22063 - DNA, 433 bp, Homo sapiens
gagggtcgtaactcagacattcccaccacttattcaaagcacactgggtcacaggtccagagtcttacaccagctcaagaagtcctcctgctgccttcccttaacccttcctttggatctgggggccctagtttctagctctttgggggtgcttgggatagcaagagagccgatgggcaacagctgcttctctctccctaggaggccacatcaacagtcatgatgtgtggatgtttagctcccatctgcacacctggatcaaggtagcctctctgcacaagggcaggtggaggcacaagatggcagttgtgcaggggcaggtaggcacgagctgcagcggctgccctgggacacaagctgttcgcggtgggtggcttcgacggcctgaggcgcctgcacagcgtggagcgctacgaccccttctccaacacct

SEQ ID NO: 22064 - protein, 66 aa, Homo sapiens
MFSSHLHTWIKVASLHKGRWRHKMAVVQGQVGTSCSGCPGTQAVRGGWLRRPEAPAQRGALRPLLQ

SEQ ID NO: 22065 - DNA, 4146 bp, Homo sapiens
agctctggaaaggtccctggagaggatgtggaaagatccccagtaggtagcagagccaggattcgactgaagaccgtgattcaagtgaggctcttaaccctgggccagctgtctgccatttggactgcaaaacccagaggccagatacccctaagaggccagctgttgcacctctgcaaggcggggttccacctcctctcgggtcccggcacctaggccagactcatcgaatgaatgaaagactctgttgtatcccctgtacccaccatggctatcacaagccacagtcccatgaagacagagaacccaaggccactttctcagaggaggacggtgatctgtctctgggcctctagggtgggattcatccttctcagtcagatttcaggagcgatggtggttgcgtttttgggtgtcagtgctattgctataacttaatgatgcaaggtagggaagtcccacagacactgaacatgcagtgatgctgctgagtgtgttgattagcaccaaagcaactgtggaactcagagataataacatttttaattgtattagggtttggggaatcagttttattgcaagtcgtttccattaataggtattgtgatgagatgctcctggaaaccatccttaactcactgtgtgcagggccacctcccacgatggccacaagggggagctgcgcgccgggggcagccgggagaaggggcctgagtgccgagggcggggttctcaggggttcggaggcgcagctgggcctcccagagactgcgcagcctctctgacaccagcgtgctgtctgtccgagaaagcgcacacccccttaccccctgagatgggcagaaggtgttcgtttctggttctgccccttcaaagctccgtgacccagccagctgttcctctccccgaacctcgcttcccgtgtgtgagatgaggatgctcgtgcctccgcggaaccaacctggggaccacgcgaagcgcccccacaggcccaggctgatgggctggaatgaaaagcctccaaagggaaacttcatcccaggcgagactcagcattccccgccggcgagtgaaggtccctgggtagggagcggagatgctggccaccgccccaccctcatcgtctagaaatgccactgtccctgctcggcatcagagggccctggccgctgctgcctctgggaaaggttgcctcgggagaaagggggtgaaggccctgccagcagctagaacggctccagggaggcagggcggccggcagtgctgtgggagaaggacaggcctttggagggagatgggagacgagtctggagaaactagggggacggaggtggcggctttgactgacccttccagagactgggatctgcgggaggctttggaggagagccacaacctgggcttcggggaggcacgcctgggggtgtggaggggggtgggtggagtgagatccacggctaggggcgaggggctgggggccgaggagccgaaaacctctgccgagcttcacgtggttaaagatttcaggtcttacctgtcaccagagatctctgtcccgtagaggtgccacctcatcctccatgagagctgtgctttgctttcttctggaggctgcaaggaggatggcccccatcacggcggacctagatgctgggagtccgggagagggcaggccgtggagatggggcaggtggcgatgtgtttcaccacccactcccgcctgaagtgccactgtgagcccagcccagggtgccaggctgggctgcactccaggctcctgcagcagacccagttcctcagcctccttcccctgaggcctgggcatggcctggacaaatcgggctggtggtcatcctggcttccacggtggtggccatgtcggccgtggcccagctgtgggaggacgagtgggaggtgctgctgatctccctgcagggcacagcgccattcctgcatgtgggggctgtggcagcagtcaccatgctctcctggatcgtggcaggacagttcgcccgcgcagagcggacctcctcccaggtgaccattctctgtaccttcttcaccgtggtgtttgccctctacctggcccctctcaccatctcctctccctgcatcatggagaagaaagacctcggccccaagcctgctctcattggccaccgcggggcccccatgctggctccagagcacacgctcatgtccttccggaaggccctcgagcagaagctgtacgggctccaggctgacattaccatcagcctggacggcgtgcccttcctcatgcatgacaccaccctgcggcgcaccaccaacgtggaggaggagttcccggagctggcccgcaggcctgcctccatgcttaactggaccaccctgcagagactcaacgctggccagtggttcctgaagactgaccccttctggacagccagctccctgtcaccctccgaccacagagaggcccagaaccagtccatctgcagcctggcagagctcctggagctggccaagggcaatgccacactgctgctcaacctgcgtgacccgccccgggagcacccctaccgcagcagttttatcaacgtgactctggaggccgtgctgcactccggcttcccccagcaccaggtcatgtggctgcctagcaggcagaggcccctggtgcggaaggtggctcccggcttccaacagacatcaggctccaaggaggcagtcgccagcctgcggagaggccacatccagcggctgaacctgcgctacactcaggtgtcccgccaggagctcagggactacgcgtcctggaacctgagtgtgaacctctacacagtcaacgcaccgtggctcttctccctgctgtggtgtgcgggggtcccatccgtcacctctgacaactcccacgccctgtcccaggtgccttcccccctctggatcatgcccccggacgagtactgtctcatgtgggtcactgccgacctggtctccttcaccctcatcgtgggcatcttcgtgctccagaagtggcgcctgggtggcatacggagctacaaccctgagcagatcatgctgagtgctgcggtgcgccggaccagccgggacgtcagcatcatgaaggagaagcttattttctcagagatcagcgatggtgtagaggtctccgatgtgctctccgtatgttcagacaacagttatgacacatatgccaacagcaccgccacccctgtgggcccccgagggggtggcagccacaccaagaccctcatagagcggagtgggcgttagctgaagacatgtctgtcccacctgtacctgacacagaagctggggagcctaggagagctggtggaagtgtgtctgaactcggagtgctctgggagcgggctccacagcctccttgtgggctccagccccttgtcagccgcagcctctcttgagggggactccctgtctcctgaggcccagctgggccaggactccatcctttcagatgcccctgcaggcctggggctccttctgggaagtatggggcctagggcttggtccccctcttctgaggccctctcctgtatcccgacctggaagctttgatgggtcatgggccatgccataccccctgtggcaatggagtgtgtggatgctcacctgtgccatctgtcctcctgtctgtgccaggaggcacctgagttctctgctgttatcctgccccaagggcctgggccgagcctctacctgaagcaactctgctcttcctgtcagtctcaaagcacaaggaggttcagcccaggaggaagccagctgcaatgtggagacacgtcctcctccccaacccacctcatgccaccgccaaccccctgccccaggagcgggcctgagccacgtcctctaggagcagctggagatggccaaaagagtgagctcaggactactggatcccatgcccaggtgtccagcagacctcaaggcagaagggtcacctaacccaggagtccacagactgatgtgacctcaggttcccacatcagtggccacagggcagggcccacctggtagaagtgttctggatatggccagggtgggtgtgtggctaagtgggcctgaacagagggaacctagggcccttggccaatgtgattaaagctgccatcttga

SEQ ID NO: 22066 - protein, 467 aa, Homo sapiens
MSAVAQLWEDEWEVLLISLQGTAPFLHVGAVAAVTMLSWIVAGQFARAERTSSQVTILCTFFTVVFALYLAPLTISSPCIMEKKDLGPKPALIGHRGAPMLAPEHTLMSFRKALEQKLYGLQADITISLDGVPFLMHDTTLRRTTNVEEEFPELARRPASMLNWTTLQRLNAGQWFLKTDPFWTASSLSPSDHREAQNQSICSLAELLELAKGNATLLLNLRDPPREHPYRSSFINVTLEAVLHSGFPQHQVMWLPSRQRPLVRKVAPGFQQTSGSKEAVASLRRGHIQRLNLRYTQVSRQELRDYASWNLSVNLYTVNAPWLFSLLWCAGVPSVTSDNSHALSQVPSPLWIMPPDEYCLMWVTADLVSFTLIVGIFVLQKWRLGGIRSYNPEQIMLSAAVRRTSRDVSIMKEKLIFSEISDGVEVSDVLSVCSDNSYDTYANSTATPVGPRGGGSHTKTLIERSGR

SEQ ID NO: 22067 - DNA, 3222 bp, Homo sapiens
ggctgctttagaagaacaagctggtttggcagctacctcagagaagcaggaccctgggcagcgtgaaagggcctctgcccccagggtggctgggctttggatcctggatccgtgggtcctggaggggcaggagtggttcaggaaacagctctcccagtgaagtgatatcactgcctctgtggacaagacacctccaggagcccagctcacagccaccggtaccttcttccagggctgctgttatagtttctgcatggaaagcacttggaacaatgcctggctgttcccctctttggccctctcagggccctaggagcctttgtgtgtcctgctcacattgtctccagggcctcggacagggcctggtacagaacatatgactgagtttctggagtcccacaggccagcgttggagtcctgacacctcagtatagctgtgcacctctgggcaaatagtttctctgctctgagccccaggacaagctgggggcctccatgggcgcctgagggccaggcgccagggccgtgggcacgagtatggtgagacaccagcccctgcagtactacgagccacagctgtgcctctcctgcctcacgggcatctacggctgccgttggaagcgctaccagcgctcccatgatgataccacaccgtgggagcgcctctggttcctgctcctcaccttcacctttggcctcacgctcacctggctttacttctggtgggaagtccacaatgactatgatgaattcaactggtacctctacaaccgcatgggctactggagcgactggcccgtacccatccttgtgaccacagctgctgccttcgcatacatcgctggcctcctggtcctggcactatgtcacattgccgtggggcagcagatgaacctgcactggctgcacaagatcgggctggtggtcatcctggcttccacggtggtggccatgtcggccgtggcccagctgtgggaggacgagtgggaggtgctgctgatctccctgcagggcacagcgccattcctgcatgtgggggctgtggcagcagtcaccatgctctcctggatcgtggcaggacagttcgcccgcgcagagcggacctcctcccaggtgaccattctctgtaccttcttcaccgtggtgtttgccctctacctggcccctctcaccatctcctctccctgcatcatggagaagaaagacctcggccccaagcctgctctcattggccaccgcggggcccccatgctggctccagagcacacgctcatgtccttccggaaggccctcgagcagaagctgtacgggctccaggctgacattaccatcagcctggacggcgtgcccttcctcatgcatgacaccaccctgcggcgcaccaccaacgtggaggaggagttcccggagctggcccgcaggcctgcctccatgcttaactggaccaccctgcagagactcaacgctggccagtggttcctgaagactgaccccttctggacagccagctccctgtcaccctccgaccacagagaggcccagaaccagtccatctgcagcctggcagagctcctggagctggccaagggcaatgccacactgctgctcaacctgcgtgacccgccccgggagcacccctaccgcagcagttttatcaacgtgactctggaggccgtgctgcactccggcttcccccagcaccaggtcatgtggctgcctagcaggcagaggcccctggtgcggaaggtggctcccggcttccaacagacatcaggctccaaggaggcagtcgccagcctgcggagaggccacatccagcggctgaacctgcgctacactcaggtgtcccgccaggagctcagggactacgcgtcctggaacctgagtgtgaacctctacacagtcaacgcaccgtggctcttctccctgctgtggtgtgcgggggtcccatccgtcacctctgacaactcccacgccctgtcccaggtgccttcccccctctggatcatgcccccggacgagtactgtctcatgtgggtcactgccgacctggtctccttcaccctcatcgtgggcatcttcgtgctccagaagtggcgcctgggtggcatacggagctacaaccctgagcagatcatgctgagtgctgcggtgcgccggaccagccgggacgtcagcatcatgaaggagaagcttattttctcagagatcagcgatggtgtagaggtctccgatgtgctctccgtatgttcagacaacagttatgacacatatgccaacagcaccgccacccctgtgggcccccgagggggtggcagccacaccaagaccctcatagagcggagtgggcgttagctgaagacatgtctgtcccacctgtacctgacacagaagctggggagcctaggagagctggtggaagtgtgtctgaactcggagtgctctgggagcgggctccacagcctccttgtgggctccagccccttgtcagccgcagcctctcttgagggggactccctgtctcctgaggcccagctgggccaggactccatcctttcagatgcccctgcaggcctggggctccttctgggaagtatggggcctagggcttggtccccctcttctgaggccctctcctgtatcccgacctggaagctttgatgggtcatgggccatgccataccccctgtggcaatggagtgtgtggatgctcacctgtgccatctgtcctcctgtctgtgccaggaggcacctgagttctctgctgttatcctgccccaagggcctgggccgagcctctacctgaagcaactctgctcttcctgtcagtctcaaagcacaaggaggttcagcccaggaggaagccagctgcaatgtggagacacgtcctcctccccaacccacctcatgccaccgccaaccccctgccccaggagcgggcctgagccacgtcctctaggagcagctggagatggccaaaagagtgagctcaggactactggatcccatgcccaggtgtccagcagacctcaaggcagaagggtcacctaacccaggagtccacagactgatgtgacctcaggttcccacatcagtggccacagggcagggcccacctggtagaagtgttctggatatggccagggtgggtgtgtggctaagtgggcctgaacagagggaacctagggcccttggccaatgtgattaaagctgccatcttga

SEQ ID NO: 22068 - protein, 605 aa, Homo sapiens
MVRHQPLQYYEPQLCLSCLTGIYGCRWKRYQRSHDDTTPWERLWFLLLTFTFGLTLTWLYFWWEVHNDYDEFNWYLYNRMGYWSDWPVPILVTTAAAFAYIAGLLVLALCHIAVGQQMNLHWLHKIGLVVILASTVVAMSAVAQLWEDEWEVLLISLQGTAPFLHVGAVAAVTMLSWIVAGQFARAERTSSQVTILCTFFTVVFALYLAPLTISSPCIMEKKDLGPKPALIGHRGAPMLAPEHTLMSFRKALEQKLYGLQADITISLDGVPFLMHDTTLRRTTNVEEEFPELARRPASMLNWTTLQRLNAGQWFLKTDPFWTASSLSPSDHREAQNQSICSLAELLELAKGNATLLLNLRDPPREHPYRSSFINVTLEAVLHSGFPQHQVMWLPSRQRPLVRKVAPGFQQTSGSKEAVASLRRGHIQRLNLRYTQVSRQELRDYASWNLSVNLYTVNAPWLFSLLWCAGVPSVTSDNSHALSQVPSPLWIMPPDEYCLMWVTADLVSFTLIVGIFVLQKWRLGGIRSYNPEQIMLSAAVRRTSRDVSIMKEKLIFSEISDGVEVSDVLSVCSDNSYDTYANSTATPVGPRGGGSHTKTLIERSGR

SEQ ID NO: 22069 - DNA, 3523 bp, Homo sapiens
cggggatgacagcggaggtggcagcggcgcggcgctgagcgagcggcgagggagcaggggaagaggaggaagtggagccgcggccgggagctcgggagtcggccgccgcgccgaggttcgccccgttttgcagagagagccgagtcgggacctggaaagacttccccgcggggctccggccgccgcgcctccccgccggcgcctgccctgccctgcccgtcccagccccgcggttcggggcgtgcggccgggacgcgcggagccccggccctgacccgctgcgccgggacgggacgctcctaacgccgccgtaccggtccgtggttgcagggtcgctccgcgcctttccgtcagtgagggtcggaaccccagctccagggctagcgcagtgtggccccaggccctcgcctccggtgcacgggaccccggacccccccagcctctggcttcacgagaccccaaccttcagttggaacagcttggaacagcgcgagcgcccgggaagccctggccgggtcgtgcgctcggtgaggggtcctaggcgggcaggacagtcggaccgaaccgccgggctggtgccgcgagcccaggctgtcaccttcgtcccgcctcaggtgaggggttcagcgcctgccccgaagataacacaggggtccccttctgtcccggcggcctgcgagagccaaggctgcagctctcccagtgaagtgatatcactgcctctgtggacaagacacctccaggagcccagctcacagccaccggtaccttcttccaggacaagctgggggcctccatgggcgcctgagggccaggcgccagggccgtgggcacgagtatggtgagacaccagcccctgcagtactacgagccacagctgtgcctctcctgcctcacgggcatctacggctgccgttggaagcgctaccagcgctcccatgatgataccacaccgtgggagcgcctctggttcctgctcctcaccttcacctttggcctcacgctcacctggctttacttctggtgggaagtccacaatgactatgatgaattcaactggtacctctacaaccgcatgggctactggagcgactggcccgtacccatccttgtgaccacagctgctgccttcgcatacatcgctggcctcctggtcctggcactatgtcacattgccgtggggcagcagatgaacctgcactggctgcacaagatcgggctggtggtcatcctggcttccacggtggtggccatgtcggccgtggcccagctgtgggaggacgagtgggaggtgctgctgatctccctgcagggcacagcgccattcctgcatgtgggggctgtggcagcagtcaccatgctctcctggatcgtggcaggacagttcgcccgcgcagagcggacctcctcccaggtgaccattctctgtaccttcttcaccgtggtgtttgccctctacctggcccctctcaccatctcctctccctgcatcatggagaagaaagacctcggccccaagcctgctctcattggccaccgcggggcccccatgctggctccagagcacacgctcatgtccttccggaaggccctcgagcagaagctgtacgggctccaggctgacattaccatcagcctggacggcgtgcccttcctcatgcatgacaccaccctgcggcgcaccaccaacgtggaggaggagttcccggagctggcccgcaggcctgcctccatgcttaactggaccaccctgcagagactcaacgctggccagtggttcctgaagactgaccccttctggacagccagctccctgtcaccctccgaccacagagaggcccagaaccagtccatctgcagcctggcagagctcctggagctggccaagggcaatgccacactgctgctcaacctgcgtgacccgccccgggagcacccctaccgcagcagttttatcaacgtgactctggaggccgtgctgcactccggcttcccccagcaccaggtcatgtggctgcctagcaggcagaggcccctggtgcggaaggtggctcccggcttccaacagacatcaggctccaaggaggcagtcgccagcctgcggagaggccacatccagcggctgaacctgcgctacactcaggtgtcccgccaggagctcagggactacgcgtcctggaacctgagtgtgaacctctacacagtcaacgcaccgtggctcttctccctgctgtggtgtgcgggggtcccatccgtcacctctgacaactcccacgccctgtcccaggtgccttcccccctctggatcatgcccccggacgagtactgtctcatgtgggtcactgccgacctggtctccttcaccctcatcgtgggcatcttcgtgctccagaagtggcgcctgggtggcatacggagctacaaccctgagcagatcatgctgagtgctgcggtgcgccggaccagccgggacgtcagcatcatgaaggagaagcttattttctcagagatcagcgatggtgtagaggtctccgatgtgctctccgtatgttcagacaacagttatgacacatatgccaacagcaccgccacccctgtgggcccccgagggggtggcagccacaccaagaccctcatagagcggagtgggcgttagctgaagacatgtctgtcccacctgtacctgacacagaagctggggagcctaggagagctggtggaagtgtgtctgaactcggagtgctctgggagcgggctccacagcctccttgtgggctccagccccttgtcagccgcagcctctcttgagggggactccctgtctcctgaggcccagctgggccaggactccatcctttcagatgcccctgcaggcctggggctccttctgggaagtatggggcctagggcttggtccccctcttctgaggccctctcctgtatcccgacctggaagctttgatgggtcatgggccatgccataccccctgtggcaatggagtgtgtggatgctcacctgtgccatctgtcctcctgtctgtgccaggaggcacctgagttctctgctgttatcctgccccaagggcctgggccgagcctctacctgaagcaactctgctcttcctgtcagtctcaaagcacaaggaggttcagcccaggaggaagccagctgcaatgtggagacacgtcctcctccccaacccacctcatgccaccgccaaccccctgccccaggagcgggcctgagccacgtcctctaggagcagctggagatggccaaaagagtgagctcaggactactggatcccatgcccaggtgtccagcagacctcaaggcagaagggtcacctaacccaggagtccacagactgatgtgacctcaggttcccacatcagtggccacagggcagggcccacctggtagaagtgttctggatatggccagggtgggtgtgtggctaagtgggcctgaacagagggaacctagggcccttggccaatgtgattaaagctgccatcttga

SEQ ID NO: 22070 - protein, 605 aa, Homo sapiens; identical to SEQ ID NO: 22068

SEQ ID NO: 22071 - DNA, 776 bp, Homo sapiens
ccgaggttcgccccgttttgcagagagagccgagtcgggacctggaaagacttccccgcggggctccggccgccgcgcctccccgccggcgcctgccctgccctgcccgtcccagccccgcggttcggggcgtgcggccgggacgcgcggagccccggccctgacccgctgcgccgggacgggacgctcctaacgccgccgtaccggtccgtggttgcagggtcgctccgcgcctttccgtcagtgagggtcggaaccccagctccagggctagcgcagtgtggccccaggccctcgcctccggtgcacgggaccccggacccccccagcctctggcttcacgagaccccaaccttcagttggaacagcttggaacagcgcgagcgcccgggaagccctggccgggtcgtgcgctcggtgaggggtcctaggcgggcaggacagtcggaccgaaccgccgggctggtgccgcgagcccaggctgtcaccttcgtcccgcctcaggtgaggggttcagcgcctgccccgaagataacacaggggtccccttctgtcccggcggcctgcgagagccaaggctgcagtcccccatttatgcttcctgttgggtgtacctctctgaaagccagcagcatggagcccattacattccacagaggtcagttcccagggccccaaacaaggtagagagtggctctggagaagcaaaccaaagacacttcctcactctgtccatcaaaagcccgggagtccactgaatacactgtccttaggac

SEQ ID NO: 22072 - protein, 30 aa, Homo sapiens
MLPVGCTSLKASSMEPITFHRGQFPGPQTR

SEQ ID NO: 22073 - DNA, 361 bp, Homo sapiens
cgagcggcgagggagcaggggaagaggaggaagtggagccgcggccgggagctcgggagtcggccgccgcgccgagggtcgctccgcgcctttccgtcagtgagggtcggaaccccagctccagggctagcgcagtgtggccccaggccctcgcctccggtgcacgggaccccggacccccccagcctctggcttcacgagaccccaaccttcagttggaacagcttggaacagcgcgagcgcccgggaagccctggccgggtcgtgcgctcggtgaggggtcctaggcgggcaggacagtcggaccgaaccgccgggctggtgccgcgagcccaggctgtcaccttcgtcccgcctcagg

SEQ ID NO: 22074 - protein, 119 aa, Homo sapiens
RAAREQGKRRKWSRGRELGSRPPRRGSLRAFPSVRVGTPAPGLAQCGPRPSPPVHGTPDPPSLWLHETPTFSWNSLEQRERPGSPGRVVRSVRGPRRAGQSDRTAGLVPRAQAVTFVPP

SEQ ID NO: 22075 - DNA, 2345 bp, Homo sapiens
gtgcatttagtcttgccaagatggagagtctcaggcgggcattctgagctgcttcttgtcactggggaaaaccacgtgcacgcagtgctgaggcgccccacgcgcgtcctcaggggaagccaggcactgagaacaaaggttgtgggaccgctctttgaggaactcaccagctccgcgagctcgcggccgccagcgcggtccacccattggcgggagaggactcacagaccgcagctcctcaccccgcctgctccgcagcgggaccgcgtagacctcagctccccgagcagcgcaggtgggccagggaaggagaggaccgaggcaagccaccacgcgggattaggggtctgccaaggaccatgggtgccgcgctggggacaggcacgcggctggctccctggccgggccgggcctgcggcgccctcccgcgctggacacccaccgcgcccgcccaaggctgccactccaagcctggcccggcgcgccctgtgcccctgaagaagcgcggatacgatgtcaccaggaaccctcatctcaacaaggggatggcctttacccttgaagaaaggctgcagcttggaatccacggcctaatcccgccctgctttctgagccaggacgtccagctcctccgaatcatgagatattacgagcggcagcagagtgacctggacaagtacatcattctcatgacactccaagaccggaacgagaagctcttctaccgagtgctgacttcggacgtggagaagttcatgccaatcgtgtacacgcctaccgtggggctggcctgtcagcactatggcctgactttccgcaggccccgtggactgttcatcaccattcatgacaaaggtcatcttgcaacaatgctgaattcttggccagaagacaatattaaggccgtggtggtgactgatggggagcgcatcctgggcctgggagacctgggctgctacggcatgggcatccctgtgggcaagctggccctgtacacggcatgcggaggggtgaacccgcagcagtgcctccctgtgctgctggacgtcggcaccaacaatgaggagctgctcagagaccctctgtacatcggcctgaaacaccagcgcgtgcacgggaaggcatacgatgacttgctggatgagttcatgcaggctgtgacagacaagtttggaataaattgcctcatccaatttgaagacttcgccaatgccaatgccttccgcctgctcaacaaataccgtaacaagtactgcatgttcaatgatgacatccaaggcacagcctccgttgctgtggcagggatcttggctgctctgcgaatcaccaagaacaagctttccaatcacgtgtttgttttccaaggtgcaggcgaggcagctatgggcattgcccacctccttgtcatggccctagagaaagaaggtgtaccgaaggcagaggccacaagaaagatctggatggtggactctaaagggctcattgtcaaggggaggagccacctgaaccatgaaaaggagatgtttgcccaagaccatcctgaagtcaactccctggaggaggtggtgaggctggtgaagcccacagccatcataggtgttgctgccatcgcaggagccttcacggagcagattctgagggacatggcctccttccacgagcgccctatcatctttgccctgagcaaccccaccagcaaggccgagtgcacggctgagaagtgctaccgggtcaccgagggccgagggatttttgccagtggaagtccttttaagagtgtgactctggaagatggcaagaccttcattcctgggcagggaaacaatgcttacgtgttccccggggtggcactgggagtcatcgccggcgggatccggcacatcccagatgagatcttcctcctgacagcagagcaaattgcccaggaagtctctgagcagcatctgtcccaggggagactctacccaccactcagcaccatccgagacgtgtctttgagaattgccatcaaagttctcgactacgcgtacaaacacaacctggcttcctactacccagagcctaaggacaaggaggcttttgtaagatccctggtctacactccagactatgactcctttacactggacagctacacttggcccaaggaagccatgaatgttcagacggtctgaggcagtctcagaggctagtatggggctagatgaagcccagagtaacacccacaatataaatgggttccaaaatggcccaagtgaatccttgtcgctgtgttttttcttttaaactttctggtgtgagaggagatgccaaggcatacagtgaataaaagccttgtctctgaa

SEQ ID NO: 22076 - protein, 604 aa, Homo sapiens; identical to SEQ ID NO: 2853

SEQ ID NO: 22077 - DNA, 2299 bp, Homo sapiens
ctctgtgcatttagtcttgccaagatggagagtctcaggcgggcattctgagctgcttcttgtcactggggaaaaccacgtgcacgcagtgctgaggcgccccacgcgcgtcctcaggggaagccaggcactgagaacaaaggttgtgggaccgctctttgaggaactcaccagctccgcgagctcgcggccgccagcgcggtccacccattggcgggagaggactcacagaccgcagctcctcaccccgcctgctccgcagcgggaccgcgtagacctcagctccccgagcagcgcaggtctgccaaggaccatgggtgccgcgctggggacaggcacgcggctggctccctggccgggccgggcctgcggcgccctcccgcgctggacacccaccgcgcccgcccaaggctgccactccaagcctggcccggcgcgccctgtgcccctgaagaagcgcggatacgatgtcaccaggaaccctcatctcaacaaggggatggcctttacccttgaagaaaggctgcagcttggaatccacggcctaatcccgccctgctttctgagccaggacgtccagctcctccgaatcatgagatattacgagcggcagcagagtgacctggacaagtacatcattctcatgacactccaagaccggaacgagaagctcttctaccgagtgctgacttcggacgtggagaagttcatgccaatcgtgtacacgcctaccgtggggctggcctgtcagcactatggcctgactttccgcaggccccgtggactgttcatcaccattcatgacaaaggtcatcttgcaacaatgctgaattcttggccagaagacaatattaaggccgtggtggtgactgatggggagcgcatcctgggcctgggagacctgggctgctacggcatgggcatccctgtgggcaagctggccctgtacacggcatgcggaggggtgaacccgcagcagtgcctccctgtgctgctggacgtcggcaccaacaatgaggagctgctcagagaccctctgtacatcggcctgaaacaccagcgcgtgcacgggaaggcatacgatgacttgctggatgagttcatgcaggctgtgacagacaagtttggaataaattgcctcatccaatttgaagacttcgccaatgccaatgccttccgcctgctcaacaaataccgtaacaagtactgcatgttcaatgatgacatccaaggcacagcctccgttgctgtggcagggatcttggctgctctgcgaatcaccaagaacaagctttccaatcacgtgtttgttttccaaggtgcaggcgaggcagctatgggcattgcccacctccttgtcatggccctagagaaagaaggtgtaccgaaggcagaggccacaagaaagatctggatggtggactctaaagggctcattgtcaaggggaggagccacctgaaccatgaaaaggagatgtttgcccaagaccatcctgaagtcaactccctggaggaggtggtgaggctggtgaagcccacagccatcataggtgttgctgccatcgcaggagccttcacggagcagattctgagggacatggcctccttccacgagcgccctatcatctttgccctgagcaaccccaccagcaaggccgagtgcacggctgagaagtgctaccgggtcaccgagggccgagggatttttgccagtggaagtccttttaagagtgtgactctggaagatggcaagaccttcattcctgggcagggaaacaatgcttacgtgttccccggggtggcactgggagtcatcgccggcgggatccggcacatcccagatgagatcttcctcctgacagcagagcaaattgcccaggaagtctctgagcagcatctgtcccaggggagactctacccaccactcagcaccatccgagacgtgtctttgagaattgccatcaaagttctcgactacgcgtacaaacacaacctggcttcctactacccagagcctaaggacaaggaggcttttgtaagatccctggtctacactccagactatgactcctttacactggacagctacacttggcccaaggaagccatgaatgttcagacggtctgaggcagtctcagaggctagtatggggctagatgaagcccagagtaacacccacaatataaatgggttccaaaatggcccaagtgaatccttgtcgctgtgttttttcttttaaactttctggtgtgagaggagatgccaaggcatacagtgaataaaagccttgtctctgaa

SEQ ID NO: 22078 - protein, 604 aa, Homo sapiens; identical to SEQ ID NO: 2853

SEQ ID NO: 22079 - DNA, 2160 bp, Homo sapiens
gcaccggatctgcttccagggcttggtttcgctttgcctggctcttggctaggcctggcgccccgcgcggagccgagcaggtggcagccgaggagtggcgggggctggaacatttaaccctttgggagcacctgccctctcccagagggcgcgtccccggatcaggcccggtgccccgcagcgcgcgtgggtcctggctggctggaaggaggccctgaccttgctttctctcccgtgccaggtctgccaaggaccatgggtgccgcgctggggacaggcacgcggctggctccctggccgggccgggcctgcggcgccctcccgcgctggacacccaccgcgcccgcccaaggctgccactccaagcctggcccggcgcgccctgtgcccctgaagaagcgcggatacgatgtcaccaggaaccctcatctcaacaaggggatggcctttacccttgaagaaaggctgcagcttggaatccacggcctaatcccgccctgctttctgagccaggacgtccagctcctccgaatcatgagatattacgagcggcagcagagtgacctggacaagtacatcattctcatgacactccaagaccggaacgagaagctcttctaccgagtgctgacttcggacgtggagaagttcatgccaatcgtgtacacgcctaccgtggggctggcctgtcagcactatggcctgactttccgcaggccccgtggactgttcatcaccattcatgacaaaggtcatcttgcaacaatgctgaattcttggccagaagacaatattaaggccgtggtggtgactgatggggagcgcatcctgggcctgggagacctgggctgctacggcatgggcatccctgtgggcaagctggccctgtacacggcatgcggaggggtgaacccgcagcagtgcctccctgtgctgctggacgtcggcaccaacaatgaggagctgctcagagaccctctgtacatcggcctgaaacaccagcgcgtgcacgggaaggcatacgatgacttgctggatgagttcatgcaggctgtgacagacaagtttggaataaattgcctcatccaatttgaagacttcgccaatgccaatgccttccgcctgctcaacaaataccgtaacaagtactgcatgttcaatgatgacatccaaggcacagcctccgttgctgtggcagggatcttggctgctctgcgaatcaccaagaacaagctttccaatcacgtgtttgttttccaaggtgcaggcgaggcagctatgggcattgcccacctccttgtcatggccctagagaaagaaggtgtaccgaaggcagaggccacaagaaagatctggatggtggactctaaagggctcattgtcaaggggaggagccacctgaaccatgaaaaggagatgtttgcccaagaccatcctgaagtcaactccctggaggaggtggtgaggctggtgaagcccacagccatcataggtgttgctgccatcgcaggagccttcacggagcagattctgagggacatggcctccttccacgagcgccctatcatctttgccctgagcaaccccaccagcaaggccgagtgcacggctgagaagtgctaccgggtcaccgagggccgagggatttttgccagtggaagtccttttaagagtgtgactctggaagatggcaagaccttcattcctgggcagggaaacaatgcttacgtgttccccggggtggcactgggagtcatcgccggcgggatccggcacatcccagatgagatcttcctcctgacagcagagcaaattgcccaggaagtctctgagcagcatctgtcccaggggagactctacccaccactcagcaccatccgagacgtgtctttgagaattgccatcaaagttctcgactacgcgtacaaacacaacctggcttcctactacccagagcctaaggacaaggaggcttttgtaagatccctggtctacactccagactatgactcctttacactggacagctacacttggcccaaggaagccatgaatgttcagacggtctgaggcagtctcagaggctagtatggggctagatgaagcccagagtaacacccacaatataaatgggttccaaaatggcccaagtgaatcctt

SEQ ID NO: 22080 - protein, 604 aa, Homo sapiens; identical to SEQ ID NO: 2853

SEQ ID NO: 22081 - DNA, 2264 bp, Homo sapiens
gtgcatttagtcttgccaagatggagagtctcaggcgggcattctgagctgcttcttgtcactggggaaaaccacgtgcacgcagtgctgaggcgccccacgcgcgtcctcaggggaagccaggcactgagaacaaaggttgtgggaccgctctttgaggaactcaccagctccgcgagctcgcggccgccagcgcggtccacccattggcgggagaggactcacagaccgcagctcctcaccccgcctgctccgcagcgggaccgcgtagacctcagctccccgagcagcgcaggtgggccagggaaggagaggaccgaggcaagccaccacgcgggattaggggtctgccaaggaccatgggtgccgcgctggggacaggcacgcggctggctccctggccgggccgggcctgcggcgccctcccgcgctggacacccaccgcgcccgcccaaggctgccactccaagcctggcccggcgcgccctgtgcccctgaagaagcgcggatacgatgtcaccaggaaccctcatctcaacaaggggatggcctttacccttgaagaaaggctgcagcttggaatccacggcctaatcccgccctgctttctgagccaggacgtccagctcctccgaatcatgagatattacgagcggcagcagagtgacctggacaagtacatcattctcatgacactccaagaccggaacgagaagctcttctaccgagtgctgacttcggacgtggagaagttcatgccaatcgtgtacacgcctaccgtggggctggcctgtcagcactatggcctgactttccgcaggccccgtggactgttcatcaccattcatgacaaaggtcatcttgcaacaatgctgaattcttggccagaagacaatattaaggccgtggtggtgactgatggggagcgcatcctgggcctgggagacctgggctgctacggcatgggcatccctgtgggcaagctggccctgtacacggcatgcggaggggtgaacccgcagcagtgcctccctgtgctgctggacgtcggcaccaacaatgaggagctgctcagagaccctctgtacatcggcctgaaacaccagcgcgtgcacgggaaggcatacgatgacttgctggatgagttcatgcaggctgtgacagacaagtttggaataaattgcctcatccaatttgaagacttcgccaatgccaatgccttccgcctgctcaacaaataccgtaacaagtactgcatgttcaatgatgacatccaaggcacagcctccgttgctgtggcagggatcttggctgctctgcgaatcaccaagaacaagctttccaatcacgtgtttgttttccaaggtgcaggcgaggcagctatgggcattgcccacctccttgtcatggccctagagaaagaaggtgtaccgaaggcagaggccacaagaaagatctggatggtggactctaaagggctcattgtcaaggggaggagccacctgaaccatgaaaaggagatgtttgcccaagaccatcctgaagtcaactccctggaggaggtggtgaggctggtgaagcccacagccatcataggtgttgctgccatcgcaggagccttcacggagcagattctgagggacatggcctccttccacgagcgccctatcatctttgccctgagcaaccccaccagcaaggccgagtgcacggctgagaagtgctaccgggtcaccgagggccgagggatttttgccagtggaagtccttttaagagtgtgactctggaagatggcaagaccttcattcctgggcagggaaacaatgcttacgtgttccccggggtggcactgggagtcatcgccggcgggatccggcacatcccagatgagatcttcctcctgacagcagagcaaattgcccaggaagtctctgagcagcatctgtcccaggggagactctacccaccactcagcaccatccgagacgtgtctttgagaattgccatcaaagttctcgactacgcgtacaaacacaacctggcttcctactacccagagcctaaggacaaggaggcttttgtaagatccctggtctacactccagactatgactcctttacactggacagctacacttggcccaaggaagccatgaatgttcagacggtctgaggcagtctcagaggctagtatggggctagatgaagcccagagtaacacccacaatataaatgggttccaaaatggcccaagtgaatcctt

SEQ ID NO: 22082 - protein, 604 aa, Homo sapiens; identical to SEQ ID NO: 2853

SEQ ID NO: 22083 - DNA, 2218 bp, Homo sapiens
ctctgtgcatttagtcttgccaagatggagagtctcaggcgggcattctgagctgcttcttgtcactggggaaaaccacgtgcacgcagtgctgaggcgccccacgcgcgtcctcaggggaagccaggcactgagaacaaaggttgtgggaccgctctttgaggaactcaccagctccgcgagctcgcggccgccagcgcggtccacccattggcgggagaggactcacagaccgcagctcctcaccccgcctgctccgcagcgggaccgcgtagacctcagctccccgagcagcgcaggtctgccaaggaccatgggtgccgcgctggggacaggcacgcggctggctccctggccgggccgggcctgcggcgccctcccgcgctggacacccaccgcgcccgcccaaggctgccactccaagcctggcccggcgcgccctgtgcccctgaagaagcgcggatacgatgtcaccaggaaccctcatctcaacaaggggatggcctttacccttgaagaaaggctgcagcttggaatccacggcctaatcccgccctgctttctgagccaggacgtccagctcctccgaatcatgagatattacgagcggcagcagagtgacctggacaagtacatcattctcatgacactccaagaccggaacgagaagctcttctaccgagtgctgacttcggacgtggagaagttcatgccaatcgtgtacacgcctaccgtggggctggcctgtcagcactatggcctgactttccgcaggccccgtggactgttcatcaccattcatgacaaaggtcatcttgcaacaatgctgaattcttggccagaagacaatattaaggccgtggtggtgactgatggggagcgcatcctgggcctgggagacctgggctgctacggcatgggcatccctgtgggcaagctggccctgtacacggcatgcggaggggtgaacccgcagcagtgcctccctgtgctgctggacgtcggcaccaacaatgaggagctgctcagagaccctctgtacatcggcctgaaacaccagcgcgtgcacgggaaggcatacgatgacttgctggatgagttcatgcaggctgtgacagacaagtttggaataaattgcctcatccaatttgaagacttcgccaatgccaatgccttccgcctgctcaacaaataccgtaacaagtactgcatgttcaatgatgacatccaaggcacagcctccgttgctgtggcagggatcttggctgctctgcgaatcaccaagaacaagctttccaatcacgtgtttgttttccaaggtgcaggcgaggcagctatgggcattgcccacctccttgtcatggccctagagaaagaaggtgtaccgaaggcagaggccacaagaaagatctggatggtggactctaaagggctcattgtcaaggggaggagccacctgaaccatgaaaaggagatgtttgcccaagaccatcctgaagtcaactccctggaggaggtggtgaggctggtgaagcccacagccatcataggtgttgctgccatcgcaggagccttcacggagcagattctgagggacatggcctccttccacgagcgccctatcatctttgccctgagcaaccccaccagcaaggccgagtgcacggctgagaagtgctaccgggtcaccgagggccgagggatttttgccagtggaagtccttttaagagtgtgactctggaagatggcaagaccttcattcctgggcagggaaacaatgcttacgtgttccccggggtggcactgggagtcatcgccggcgggatccggcacatcccagatgagatcttcctcctgacagcagagcaaattgcccaggaagtctctgagcagcatctgtcccaggggagactctacccaccactcagcaccatccgagacgtgtctttgagaattgccatcaaagttctcgactacgcgtacaaacacaacctggcttcctactacccagagcctaaggacaaggaggcttttgtaagatccctggtctacactccagactatgactcctttacactggacagctacacttggcccaaggaagccatgaatgttcagacggtctgaggcagtctcagaggctagtatggggctagatgaagcccagagtaacacccacaatataaatgggttccaaaatggcccaagtgaatcctt

SEQ ID NO: 22084 - protein, 604 aa, Homo sapiens; identical to SEQ ID NO: 2853

SEQ ID NO: 22085 - DNA, 1633 bp, Homo sapiens
cccgcaccggatctgcttccagggcttggtttcgctttgcctggctcttggctaggcctggcgccccgcgcggagccgagcaggtggcagccgaggagtggcgggggctggaacatttaaccctttgggagcacctgccctctcccagagggcgcgtccccggatcaggcccggtgccccgcagcgcgccctgtgcccctgaagaagcgcggatacgatgtcaccaggaaccctcatctcaacaaggggatggcctttacccttgaagaaaggctgcagcttggaatccacggcctaatcccgccctgctttctgagccaggacgtccagctcctccgaatcatgagatattacgagcggcagcagagtgacctggacaagtacatcattctcatgacactccaagaccggaacgagaagctcttctaccgagtgctgacttcggacgtggagaagttcatgccaatcgtgtacacgcctaccgtggggctggcctgtcagcactatggcctgactttccgcaggccccgtggactgttcatcaccattcatgacaaaggtcatcttgcaacaatgctgaattcttggccagaagacaatattaaggccgtggtggtgactgatggggagcgcatcctgggcctgggagacctgggctgctacggcatgggcatccctgtgggcaagctggccctgtacacggcatgcggaggggtgaacccgcagcagtgcctccctgtgctgctggacgtcggcaccaacaatgaggagctgctcagagaccctctgtacatcggcctgaaacaccagcgcgtgcacgggaaggcatacgatgacttgctggatgagttcatgcaggctgtgacagacaagtttggaataaattgcctcatccaatttgaagacttcgccaatgccaatgccttccgcctgctcaacaaataccgtaacaagtactgcatgttcaatgatgacatccaagctcccagcaccgcgcctgctacatgatagatgcctaataaatgtttaaagaatatatgaatgatgtctacacatacaaactgacatcctcataagcacacccacctgttcatgtgagtatgtctacactggacacctgcccctgcagcctctctgttatccaggtcatcattcatgtacagctgacccttgaacaaaggtggtggttacaggtgccaatgccccacacagtcaaaaatctgcataacttttgcctctccagaaacttagctactaatagcctactgttgaccagaagccttactaataacatcagtagtggattaacacataaatagactagtatctatccctattttatgtatgcatgacatacctaacttcttaatttttttgatatttctaggctacacagttcatctgtgagtgttcgcaaattgttacaaacctccaaaattttaaaaaatatatgtattgaaaaaatctgcatataagtggactcacacagctcaaccccatgttgttcaaggattgactgtgctcacatataaatgcacctctacatgtgctcatacatattcacatgtgtaccccacatgcagacacatggagctgtttgtttttaattaaatcaatccatttgtttacattc

SEQ ID NO: 22086 - protein, 252 aa, Homo sapiens
MAFTLEERLQLGIHGLIPPCFLSQDVQLLRIMRYYERQQSDLDKYIILMTLQDRNEKLFYRVLTSDVEKFMPIVYTPTVGLACQHYGLTFRRPRGLFITIHDKGHLATMLNSWPEDNIKAVVVTDGERILGLGDLGCYGMGIPVGKLALYTACGGVNPQQCLPVLLDVGTNNEELLRDPLYIGLKHQRVHGKAYDDLLDEFMQAVTDKFGINCLIQFEDFANANAFRLLNKYRNKYCMFNDDIQAPSTAPAT

SEQ ID NO: 22087 - DNA, 950 bp, Homo sapiens
cgatgtcaccaggaaccctcatctcaacaaggggatggcctttacccttgaagaaaggctgcagcttggaatccacggcctaatcccgccctgctttctgagccaggacgtccagctcctccgaatcatgagatattacgagcggcagcagagtgacctggacaagtacatcattctcatgacactccaagaccggaacgagaagctcttctaccgagtgctgacttcggacgtggagaagttcatgccaatcgtgtacacgcctaccgtggggctggcctgtcagcactatggcctgactttccgcaggccccgtggactgttcatcaccattcatgacaaaggtcatcttgcaacaatgctgaattcttggccagaagacaatattaaggccgtggtggtgactgatggggagcgcatcctgggcctgggagacctgggctgctacggcatgggcatccctgtgggcaagctggccctgtacacggcatgcggaggggtgaacccgcagcagtgcctccctgtgctgctggacgtcggcaccaacaatgaggagctgctcagagaccctctgtacatcggcctgaaacaccagcgcgtgcacgggaaggcatacgatgacttgctggatgagttcatgcaggctgtgacagacaagtaagtggaccagtctgtcccttttgaaagaggacttttaagagatgccgtgactaaagtcaacactggttttggctgatatacaaagtaaaggcagtagatgcatgcttttccaggtattctgaaaattccaacttgacccctaggagtgataagactggacaccaaatgggctcattctctgagagaatccctgggagcagtgaggggagggaatgagagggttgatggctgaaggctgtgatctggaggtagttaagtatcattgtcccaggagaaaaacccccttggcc

SEQ ID NO: 22088 - protein, 208 aa, Homo sapiens
MAFTLEERLQLGIHGLIPPCFLSQDVQLLRIMRYYERQQSDLDKYIILMTLQDRNEKLFYRVLTSDVEKFMPIVYTPTVGLACQHYGLTFRRPRGLFITIHDKGHLATMLNSWPEDNIKAVVVTDGERILGLGDLGCYGMGIPVGKLALYTACGGVNPQQCLPVLLDVGTNNEELLRDPLYIGLKHQRVHGKAYDDLLDEFMQAVTDK

SEQ ID NO: 22089 - DNA, 721 bp, Homo sapiens
ggactcacagaccgcagctcctcaccccgcctgctccgcagcgggaccgcgtagacctcagctccccgagcagcgcaggtgggccagggaaggagaggaccgaggcaagccaccacgcgggattaggggtctgccaaggaccatgggtgccgcgctggggacaggcacgcggctggctccctggccgggccgggcctgcggcgccctcccgcgctggacacccaccgcgcccgcccaaggctgccactccaagcctggcccggcgcgccctgtgcccctgaagaagcgcggatacgatgtcaccaggaaccctcatctcaacaaggtctgctggagtttgctggaggtccactccagaccctgtttgcctggatatcaccagcagatgctgcagaacagtgaagattgctgcctgttccttcgtctggaagcttcatcccagaggggcacctcccagatgccagctggggctctcctgtatgaggtgtctgttgacccctgctggaaggtgtctctccttcaggaggcacaggggtcagggacccacttgaggaggcagtctatcccttagcagagctcgattgctgtgctgggaggtctgctgttctcttcagagccggcaggcaggaacatttaaatctgctgaagctgcacccacagccaccctttcccccaggtgctctgtcccagggagatgggagttttatctataagcccctga

SEQ ID NO: 22090 - protein, 142 aa, Homo sapiens
MGAALGTGTRLAPWPGRACGALPRWTPTAPAQGCHSKPGPARPVPLKKRGYDVTRNPHLNKVCWSLLEVHSRPCLPGYHQQMLQNSEDCCLFLRLEASSQRGTSQMPAGALLYEVSVDPCWKVSLLQEAQGSGTHLRRQSIP

SEQ ID NO: 22091 - DNA, 1575 bp, Homo sapiens
gcggccgcgagctcgcggagctgaacagtgctcggcatggcagggattccagggctcctcttccttctcttctttctgctctgtgctgttgggcaagtgagcccttacagtgccccctggaaacccacttggcctgcataccgcctccctgtcgtcttgccccagtctaccctcaatttagccaagccagactttggagccgaagccaaattagaagtatcttcttcatgtggaccccagtgtcataagggaactccactgcccacttacgaagaggccaagcaatatctgtcttatgaaacgctctatgccaatggcagccgcacagagacgcaggtgggcatctacatcctcagcagtagtggagatggggcccaacaccgagactcagggtcttcaggaaagtctcgaaggaagcggcagatttatggctatgacagcaggttcagcatttttgggaaggacttcctgctcaactaccctttctcaacatcagtgaagttatccacgggctgcaccggcaccctggtggcagagaagcatgtcctcacagctgcccactgcatacacgatggaaaaacctatgtgaaaggaacccagaagcttcgagtgggcttcctaaagcccaagtttaaagatggtggtcgaggggccaacgactccacttcagccatgcccgagcagatgaaatttcagtggatccgggtgaaacgcacccatgtgcccaagggttggatcaagggcaatgccaatgacatcggcatggattatgattatgccctcctggaactcaaaaagccccacaagagaaaatttatgaagattggggtgagccctcctgctaagcagctgccagggggcagaattcacttctctggttatgacaatgaccgaccaggcaatttggtgtatcgcttctgtgacgtcaaagacgagacctatgacttgctctaccagcaatgcgatgcccagccaggggccagcgggtctggggtctatgtgaggatgtggaagagacagcagcagaagtgggagcgaaaaattattggcattttttcagggcaccagtgggtggacatgaatggttccccacaggatttcaacgtggctgtcagaatcactcctctcaaatatgcccagatttgctattggattaaaggaaactacctggattgtagggaggggtgacacagtgttccctcctggcagcaattaagggtcttcatgttcttattttaggagaggccaaattgttttttgtcattggcgtgcacacgtgtgtgtgtgtgtgtgtgtgtgtgtaaggtgtcttataatcttttacctatttcttacaattgcaagatgactggctttactatttgaaaactggtttgtgtatcatatcatatatcatttaagcagtttgaaggcatacttttgcatagaaataaaaaaaatactgatttggggcaatgaggaatatttgacaattaagttaatcttcacgtttttgcaaactttgatttttatttcatctgaacttgtttcaaagatttatattaaatatttggcatacaagagatatgaattctt

SEQ ID NO: 22092 - protein, 383 aa, Homo sapiens; identical to SEQ ID NO: 2857

SEQ ID NO: 22093 - DNA, 3626 bp, Homo sapiens
gcggccgcgagctcgcggagctgaacagtgctcggcatggcagggattccagggctcctcttccttctcttctttctgctctgtgctgttgggcaagtgagcccttacagtgccccctggaaacccacttggcctgcataccgcctccctgtcgtcttgccccagtctaccctcaatttagccaagccagactttggagccgaagccaaattagaagtatcttcttcatgtggaccccagtgtcataagggaactccactgcccacttacgaagaggccaagcaatatctgtcttatgaaacgctctatgccaatggcagccgcacagagacgcaggtgggcatctacatcctcagcagtagtggagatggggcccaacaccgagactcagggtcttcaggaaagtctcgaaggaagcggcagatttatggctatgacagcaggttcagcatttttgggaaggacttcctgctcaactaccctttctcaacatcagtgaagttatccacgggctgcaccggcaccctggtggcagagaagcatgtcctcacagctgcccactgcatacacgatggaaaaacctatgtgaaaggaacccagaagcttcgagtgggcttcctaaagcccaagtttaaagatggtggtcgaggggccaacgactccacttcagccatgcccgagcagatgaaatttcagtggatccgggtgaaacgcacccatgtgcccaagggttggatcaagggcaatgccaatgacatcggcatggattatgattatgccctcctggaactcaaaaagccccacaagagaaaatttatgaagattggggtgagccctcctgctaagcagctgccagggggcagaattcacttctctggttatgacaatgaccgaccaggcaatttggtgtatcgcttctgtgacgtcaaagacgagacctatgacttgctctaccagcaatgcgatgcccagccaggggccagcgggtctggggtctatgtgaggatgtggaagagacagcagcagaagtgggagcgaaaaattattggcattttttcagggcaccagtgggtggacatgaatggttccccacaggatttcaacgtggctgtcagaatcactcctctcaaatatgcccagatttgctattggattaaaggaaactacctggattgtagggaggggtgacacagtgttccctcctggcagcaattaagggtcttcatgttcttattttaggagaggccaaattgttttttgtcattggcgtgcacacgtgtgtgtgtgtgtgtgtgtgtgtgtaaggtgtcttataatcttttacctatttcttacaattgcaagatgactggctttactatttgaaaactggtttgtgtatcatatcatatatcatttaagcagtttgaaggcatacttttgcatagaaataaaaaaaatactgatttggggcaatgaggaatatttgacaattaagttaatcttcacgtttttgcaaactttgatttttatttcatctgaacttgtttcaaagatttatattaaatatttggcatacaagagatatgaattcttatatgtgtgcatgtgtgttttcttctgagattcatcttggtggtgggtttttttgtttttttaattcagtgcctgatctttaatgcttccataaggcagtgttcccatttaggaactttgacagcatttgttaggcagaatattttggatttggaggcatttgcatggtagtctttgaacagtaaaatgatgtgttgactatactgatacacatattaaactataccttatagtaaaccagtatcccaagctgcttttagttccaaaaatagtttcttttccaaaggttgttgctctactttgtaggaagtctttgcatatggccctcccaactttaaagtcataccagagtggccaagagtgtttatcccaacccttccatttaacaggatttcactcacatttctggaactagctatttttcagaagacaataatcagggcttaattagaacaggctgtatttcctcccagcaaacagttgtggccacactaaaaacaatcatagcattttacccctggattatagcacatctcatgttttatcatttggatggagtaatttaaaatgaattaaattccagagaacaatggaagcattgcctggcagatgtcacaacagaataaccacttgtttggagcctggcacagtcctccagcctgatcaaaaattattctgcatagttttcagtgtgctttctgggagctatgtacttcttcaatttggaaacttttctctctcatttatagtgaaaatacttggaagttactttaagaaaaccagtgtggcctttttccctctagctttaaaagggccgcttttgctggaatgctctaggttatagataaacaattaggtataatagcaaaaatgaaaattggaagaatgcaaaatggatcagaatcatgccttccaataaaggcctttacacatgttttatcaatatgattatcaaatcacagcatatacagaaaagacttggacttattgtatgtttttattttatggctctcggcctaagcacttctttctaaatgtatcggagaaaaaatcaaatggactacaagcacgtgtttgctgtgcttgcaccccaggtaaacctgcattgtagcaatttgtaaggatattcagatggagcactgtcacttagacattctctgggggattttctgcttgtctttcttgagctttttggaaggataattctgataaggcactcaagaaacgtacaaccacagtgctttcttcaaatcatatgagaaatactatgcatagcaaggagatgcagagccgccaggaaaattctgagttccagcacaattttctttggaatctaacaggaatctagcctgaggaagaagggaggtctccatttctatgtctggtatttgggggttttgtttgtttttgctttagcttggtgaaaaaaagttcactgaacaccaagaccagaatggatttttttaaaaaaatagatgttccttttgtgaagcaccttgattccttgattttgattttttgcaaagttagacaatggcacaaagtcaaaatgaaatcaatgtttagttcacaagtagatgtaatttactaaagaatgatacacccatatgctatatacagcttaactcacagaactgtaaaagaaaattataaaataattcaacatgtccatctttttagtgataataaaagaaagcatggtattaaactatcatagaagtagacagaaaaagaaaaaaggactcatggcattattaatataattagtgctttacatgtgttagttatacatattagaagcatatttgcctagtaaggctagtagaaccacatttcccaaagtgtgctccttaaacactcatgccttatgattttctaccaaaagtaaaaagggttgtattaagtcagaggaagatgcctctccattttccctctctttatcagaggttcacatgcctgtctgcacattaaaagctctgggaagacctgttgtaaagggacaagttgaggttgtaaaatctgcatttaaataaacatctttgatcacaaaa

SEQ ID NO: 22094 - protein, 383 aa, Homo sapiens; identical to SEQ ID NO: 2857

SEQ ID NO: 22095 - DNA, 503 bp, Homo sapiens
aacgcatccattgcccaggcccagcaacagaccttgaagactgaaatcttccttgccaatccctgcagaagaaatgtgcctccggaccaactggtctgtaaagcgatctcgtgaggtcccttgttgtgtccccatgtccttggatgaggctgagtggaatggctgtctccatcaggtcactacacataacaggccatcctttcttctcatacgtctccctagcttcctgggcacaaggaacatcattccttctcatgcatggtctgcagtgatggtgagtccttccagatttatatcaagttgtccagcttcggtttgcaggcctttgtcaaatcccatccccagctgtgtcaggacccaggaggcctctggcttcattggagcactggcccactgctcaggctcttagtgcttacagacccagaccccgatcctccactcatggctgtatctgcagcttccagtgcagagctccacacatagcatcttgtccagtgttgcat

SEQ ID NO: 22096 - protein, 111 aa, Homo sapiens
MCLRTNWSVKRSREVPCCVPMSLDEAEWNGCLHQVTTHNRPSFLLIRLPSFLGTRNIIPSHAWSAVMVSPSRFISSCPASVCRPLSNPIPSCVRTQEASGFIGALAHCSGS

SEQ ID NO: 22097 - DNA, 1704 bp, Homo sapiens
gggcggacccgccagctgcctgcgctgctcgccagcttgctcgcactcggctgtgcggcggggcaggcatgggagccgcgcgctctctcccggcgcccacacctgtctgagcggcgcagcgagccgcggcccgggcgggctgctcggcgcggaacagtgctcggcatggcagggattccagggctcctcttccttctcttctttctgctctgtgctgttgggcaagtgagcccttacagtgccccctggaaacccacttggcctgcataccgcctccctgtcgtcttgccccagtctaccctcaatttagccaagccagactttggagccgaagccaaattagaagtatcttcttcatgtggaccccagtgtcataagggaactccactgcccacttacgaagaggccaagcaatatctgtcttatgaaacgctctatgccaatggcagccgcacagagacgcaggtgggcatctacatcctcagcagtagtggagatggggcccaacaccgagactcagggtcttcaggaaagtctcgaaggaagcggcagatttatggctatgacagcaggttcagcatttttgggaaggacttcctgctcaactaccctttctcaacatcagtgaagttatccacgggctgcaccggcaccctggtggcagagaagcatgtcctcacagctgcccactgcatacacgatggaaaaacctatgtgaaaggaacccagaagcttcgagtgggcttcctaaagcccaagtttaaagatggtggtcgaggggccaacgactccacttcagccatgcccgagcagatgaaatttcagtggatccgggtgaaacgcacccatgtgcccaagggttggatcaagggcaatgccaatgacatcggcatggattatgattatgccctcctggaactcaaaaagccccacaagagaaaatttatgaagattggggtgagccctcctgctaagcagctgccagggggcagaattcacttctctggttatgacaatgaccgaccaggcaatttggtgtatcgcttctgtgacgtcaaagacgagacctatgacttgctctaccagcaatgcgatgcccagccaggggccagcgggtctggggtctatgtgaggatgtggaagagacagcagcagaagtgggagcgaaaaattattggcattttttcagggcaccagtgggtggacatgaatggttccccacaggatttcaacgtggctgtcagaatcactcctctcaaatatgcccagatttgctattggattaaaggaaactacctggattgtagggaggggtgacacagtgttccctcctggcagcaattaagggtcttcatgttcttattttaggagaggccaaattgttttttgtcattggcgtgcacacgtgtgtgtgtgtgtgtgtgtgtgtgtaaggtgtcttataatcttttacctatttcttacaattgcaagatgactggctttactatttgaaaactggtttgtgtatcatatcatatatcatttaagcagtttgaaggcatacttttgcatagaaataaaaaaaatactgatttggggcaatgaggaatatttgacaattaagttaatcttcacgtttttgcaaactttgatttttatttcatctgaacttgtttcaaagatttatattaaatatttggcatacaagagatatgaattctt

SEQ ID NO: 22098 - protein, 383 aa, Homo sapiens; identical to SEQ ID NO: 2857

SEQ ID NO: 22099 - DNA, 3755 bp, Homo sapiens
gggcggacccgccagctgcctgcgctgctcgccagcttgctcgcactcggctgtgcggcggggcaggcatgggagccgcgcgctctctcccggcgcccacacctgtctgagcggcgcagcgagccgcggcccgggcgggctgctcggcgcggaacagtgctcggcatggcagggattccagggctcctcttccttctcttctttctgctctgtgctgttgggcaagtgagcccttacagtgccccctggaaacccacttggcctgcataccgcctccctgtcgtcttgccccagtctaccctcaatttagccaagccagactttggagccgaagccaaattagaagtatcttcttcatgtggaccccagtgtcataagggaactccactgcccacttacgaagaggccaagcaatatctgtcttatgaaacgctctatgccaatggcagccgcacagagacgcaggtgggcatctacatcctcagcagtagtggagatggggcccaacaccgagactcagggtcttcaggaaagtctcgaaggaagcggcagatttatggctatgacagcaggttcagcatttttgggaaggacttcctgctcaactaccctttctcaacatcagtgaagttatccacgggctgcaccggcaccctggtggcagagaagcatgtcctcacagctgcccactgcatacacgatggaaaaacctatgtgaaaggaacccagaagcttcgagtgggcttcctaaagcccaagtttaaagatggtggtcgaggggccaacgactccacttcagccatgcccgagcagatgaaatttcagtggatccgggtgaaacgcacccatgtgcccaagggttggatcaagggcaatgccaatgacatcggcatggattatgattatgccctcctggaactcaaaaagccccacaagagaaaatttatgaagattggggtgagccctcctgctaagcagctgccagggggcagaattcacttctctggttatgacaatgaccgaccaggcaatttggtgtatcgcttctgtgacgtcaaagacgagacctatgacttgctctaccagcaatgcgatgcccagccaggggccagcgggtctggggtctatgtgaggatgtggaagagacagcagcagaagtgggagcgaaaaattattggcattttttcagggcaccagtgggtggacatgaatggttccccacaggatttcaacgtggctgtcagaatcactcctctcaaatatgcccagatttgctattggattaaaggaaactacctggattgtagggaggggtgacacagtgttccctcctggcagcaattaagggtcttcatgttcttattttaggagaggccaaattgttttttgtcattggcgtgcacacgtgtgtgtgtgtgtgtgtgtgtgtgtaaggtgtcttataatcttttacctatttcttacaattgcaagatgactggctttactatttgaaaactggtttgtgtatcatatcatatatcatttaagcagtttgaaggcatacttttgcatagaaataaaaaaaatactgatttggggcaatgaggaatatttgacaattaagttaatcttcacgtttttgcaaactttgatttttatttcatctgaacttgtttcaaagatttatattaaatatttggcatacaagagatatgaattcttatatgtgtgcatgtgtgttttcttctgagattcatcttggtggtgggtttttttgtttttttaattcagtgcctgatctttaatgcttccataaggcagtgttcccatttaggaactttgacagcatttgttaggcagaatattttggatttggaggcatttgcatggtagtctttgaacagtaaaatgatgtgttgactatactgatacacatattaaactataccttatagtaaaccagtatcccaagctgcttttagttccaaaaatagtttcttttccaaaggttgttgctctactttgtaggaagtctttgcatatggccctcccaactttaaagtcataccagagtggccaagagtgtttatcccaacccttccatttaacaggatttcactcacatttctggaactagctatttttcagaagacaataatcagggcttaattagaacaggctgtatttcctcccagcaaacagttgtggccacactaaaaacaatcatagcattttacccctggattatagcacatctcatgttttatcatttggatggagtaatttaaaatgaattaaattccagagaacaatggaagcattgcctggcagatgtcacaacagaataaccacttgtttggagcctggcacagtcctccagcctgatcaaaaattattctgcatagttttcagtgtgctttctgggagctatgtacttcttcaatttggaaacttttctctctcatttatagtgaaaatacttggaagttactttaagaaaaccagtgtggcctttttccctctagctttaaaagggccgcttttgctggaatgctctaggttatagataaacaattaggtataatagcaaaaatgaaaattggaagaatgcaaaatggatcagaatcatgccttccaataaaggcctttacacatgttttatcaatatgattatcaaatcacagcatatacagaaaagacttggacttattgtatgtttttattttatggctctcggcctaagcacttctttctaaatgtatcggagaaaaaatcaaatggactacaagcacgtgtttgctgtgcttgcaccccaggtaaacctgcattgtagcaatttgtaaggatattcagatggagcactgtcacttagacattctctgggggattttctgcttgtctttcttgagctttttggaaggataattctgataaggcactcaagaaacgtacaaccacagtgctttcttcaaatcatatgagaaatactatgcatagcaaggagatgcagagccgccaggaaaattctgagttccagcacaattttctttggaatctaacaggaatctagcctgaggaagaagggaggtctccatttctatgtctggtatttgggggttttgtttgtttttgctttagcttggtgaaaaaaagttcactgaacaccaagaccagaatggatttttttaaaaaaatagatgttccttttgtgaagcaccttgattccttgattttgattttttgcaaagttagacaatggcacaaagtcaaaatgaaatcaatgtttagttcacaagtagatgtaatttactaaagaatgatacacccatatgctatatacagcttaactcacagaactgtaaaagaaaattataaaataattcaacatgtccatctttttagtgataataaaagaaagcatggtattaaactatcatagaagtagacagaaaaagaaaaaaggactcatggcattattaatataattagtgctttacatgtgttagttatacatattagaagcatatttgcctagtaaggctagtagaaccacatttcccaaagtgtgctccttaaacactcatgccttatgattttctaccaaaagtaaaaagggttgtattaagtcagaggaagatgcctctccattttccctctctttatcagaggttcacatgcctgtctgcacattaaaagctctgggaagacctgttgtaaagggacaagttgaggttgtaaaatctgcatttaaataaacatctttgatcacaaaa

SEQ ID NO: 22100 - protein, 383 aa, Homo sapiens; identical to SEQ ID NO: 2857

SEQ ID NO: 22101 - DNA, 572 bp, Homo sapiens
gcgctgctcgccagcttgctcgcactcggctgtgcggcggggcaggcatgggagccgcgcgctctctcccggcgcccacacctgtctgagcggcgcagcgagccgcggcccgggcgggctgctcggcgcggatggctccctaatgagtagaatgagacctgtgtgccaaccctggcctagtcctcatgcccccacaactgtgaagcgagagggctcaacagtttcgaattcaattcaaccaccacctcctgaataccaactaggttccaggacctggctagaagcagagacaccaggacagaaaagacagtgttctgctttcatggagttcacagaagagtcgaggagaattcaccaatctgttggaacacttctgccacgtgtgaagagttttggcagaccaaatccacatgcctgaagtgatgcccaccaacaaagacataaaaattttcaacatttcaacagccatgttggaatcatctgcagaataccgaaaaagtgcccagttggagatttcataaaaataacaggcaatcacacacgttgcaggaactgtgtacagtactgagaac

SEQ ID NO: 22102 - protein, 91 aa, Homo sapiens
MSRMRPVCQPWPSPHAPTTVKREGSTVSNSIQPPPPEYQLGSRTWLEAETPGQKRQCSAFMEFTEESRRIHQSVGTLLPRVKSFGRPNPHA

SEQ ID NO: 22103 - DNA, 2160 bp, Homo sapiens
agcttgctcgcactcggctgtgcggcggggcaggcatgggagccgcgcgctctctcccggcgcccacacctgtctgagcggcgcagcgagccgcggcccgggcgggctgctcggcgcggatggctccctaatgagtagaatgagacctgtgtgccaaccctggcctagtcctcatgcccccacaactgtgaagcgagagggctcaacagtttcgaattcaattcaaccaccacctcctgaataccaactaggttccaggacctggctagaagcagagacaccaggacagaaaagacagtgttctgctttcatggagttcacagaagagtcgaggagagcttcacatttttcatccattcttaaaattgagccagtttagccctaggaggtgggcaggctctgaggaatcatcaatcaagagaagagaacatcgccagaaacaccatgctgcagtacaaaaattctataaaaataccttttttgagtcattaacataaaatgaagaaaacagcagcagccaagaagagagatgttgaaatttaagagaggaagacagagaagaaaaatccactggataccttatgtgtaattcaccaatctgttggaacacttctgccacgtgtgaagagttttggcagaccaaatccacatgcctgaagtgatgcccaccaacaaagacataaaaattttcaacatttcaacagccatgttggaatcatctgcagaataccgaaaaagtgcccagttggagatttcataaaaataacaggcaatcacacacgttgcaggaactgtgtacagtactgagaacaccccaatcttgaccatcagtctttctaacttgtctgtctttgtcccatccttttgaagatttgaccgaattttgaacaaggccaccaaacctgcagcaatgaacaaagttccaatgaccaaataagtaaagaggggagccaccacgaacccggtgagggcatcgagattttggtttccaacatagcacaagccagtcagttcatctgcatccaccagtctcataatcaagatgacaatggttttcactgcggggatggcccaggctgcaatgtggaaataagagctgtgcatttcaatggcttcatgaccccatttgagtcctgctgccaaaaaccaagtgagtgtcagaataacccaccaaatggagctggccattccaaaaaagtacatcagcaagaaaattattgcacatcctgtgttcttaagtccttcttggatgagaacaggttctgctgcctcttcaaaatcacaggatatcctttcccggcctacagtcagcctgacaatataagcaatgctataaatattatagcacatactgagaaatatgatggggcgctcagggtaggaaaacctagaagaatcgatcaggaaggtcagtactgtgaaggcagtggagatgaaacacaggctggcccacacagccatccagatatcagtgaactccttggctgagcggctgtataagccagcatcatagccacacttgagcacacagttcaggctccttttcacccagatgtactgatcagaattggttcccacagagtgacactcttccccaggctggatgggggttttgtgaggtaagggcacctcttcatcacctggcccttccatgcacatgtggttgtggtcgttctgtggtgggaatttgctgcagttcagactctctggccaggcaaatccaaattccttcaggacgggttcacagcgtctcttgactgaaagacacatgccgccgcatgggccaatggggatgttgatcttctctgtgcacattggcacataaacagaacaaaggaagaactggaaaagtaacaaaatgaacacacacaaaaaaaacaatgacttggaagtttgaccaaatgctcccacaaagctgagttgaatgcttccaggcaatctaggtatctacttttaaaccaacctatcgggagtctgtctgtttactctgacctcaaacaagggcgcctgataatccatcacttacatacttttcttagtttggctttagtaatcctttccagaagaatgtacataaataaataaataaaataaatagggtctgaagaattgcataagccctctttgcacaacacttgaaataaatcttaaaaaactggc

SEQ ID NO: 22104 - protein, 82 aa, Homo sapiens
MSRMRPVCQPWPSPHAPTTVKREGSTVSNSIQPPPPEYQLGSRTWLEAETPGQKRQCSAFMEFTEESRRASHFSSILKIEPV

SEQ ID NO: 22105 - DNA, 5322 bp, Homo sapiens
aatgagacctgtgtgccaaccctggcctagtcctcatgcccccacaactgtgaagcgagagggctcaacagtttcgaattcaattcaaccaccacctcctgaataccaactaggttccaggacctggctagaagcagagacaccaggacagaaaagacagtgttctgctttcatggagttcacagaagagtcgaggagacacagctggatcctccctgtttaccccagtggatgctaaatgctttggtgaagaggagacatccctgcacaaagcagagctgtggattctctgacctccttgaagactctcttctgagctgcagtggacatttgccatatttttattaatgggtgtctgtcatcaaatctccctctgtaagggttggtcactgttgtggcttctctcgatgtgaggtcggactcaccttccatatcaaaagtggacaaaatcacactcacactctcttgttcacacataaacacacaaccctggcacaatctgagggtcagtaactgactttggctcagcccaccaagtggtctttccctgaagtgtgaatctcagggaagcaatacaaaaacaggcagggggtgggtggctacctctggagacagctggaggtcgtcctttcaaaagcaggctggcgggcacgctgaccaaactactcctgccaaggagccattgctgtggttcctttggactggacttctgactctcccctaatttctactcatttctaaggttaattctctttactctccaaccactccaatacatttccttccatttatgttctctagagtctgttttcattgctgacacctaaggtggtgcataattataagccagcgtgatttcatttcctatctgaagccttcgaaaaaaatggctctcaagcagtatctcagacacccaaatccaaggctttactttggtggccatggaaagacacctgaatgggtgggcgtgggaatagggtaagagaagtagaaaagaggaagggaaaagagaaagtactgcatatttcatacctactatagtctaggactgaggatacagcaatgatcaacataggcagaggctctaacagatgccaggagccagctaggcatttgtccggctatcttatgataatattatagggagggaggtgctcccataccccaagtgggaagagtgcggctcagtgaggctgagaaacttgccgtgggtcacacagcagatgactattggagctggaatctgaaccagatctcattcctaccatatctgctctttccactacataaatttgttaaacaatggtgggtaaaccatgcacctttttttcttttcgtattttgatttcagtgttgtatccatgatttggaacgagcccacctgagcctaatgatgcgacgagatcattggattatatatgtatttactttaaaaacacaaggtagaaaactttactgagtccatgaaaagaaaagctggagacacgtcaaagcctgttttgatttaagtggaatagatccagcttgagtgtaaattcgagactgtgtttgcttgtgtcacactctatttttcaaattactttcatatgtcctgtttcatttatttcccccagttcggaatgggaaaactgaggcctgggacttgaaataacagatgtatgtttgtacagcaaatcatcatgagagccaaaactcaaacccatactctctcaccgaaccccactgcttctttcagcacacaataattattattatgccaagtaagtttaacaaggtgacttggatcgattcattctgatgatttgagttggctcctgggatcatctgggtaaatattaggcccacatctctttccaaacatattccatctctctctctctctttggttttttcttttttctacattttcacctctgctccctcatcatacctccctccctttctctgttgaactcctccccttctcttctttcctcccttcctctcatcctctcacccacaaaaacatttgtttgtcttacatagggatagtgtcatgtgactgggtggctgaaaggagaagtatcttttaagctcctggaagcagaatattttcttatggattttttattgtttggattgttttgccaggctaatgaaagaagactctgaggtccccttatctcaggccaactagaggatgccttcaagtttttgtttttcttcccaagctggttccttacaaatgcatccagaaggtcattcccaggtccccaagatagtggtgggtaatcaatcacatccaggacatcagcatcacagcagataagctcatgcatgggaggatttgggaaaggagagaggggatcctaaactatccctgaaccatgtgctccagcaaaggcaagtggagggattactttttctaggagttcactgggacagccacaagtatattctagctccaatgaccattcttcccttttgatttttgactcaaaacaaataaaaatacacatacataaaatccttaaacatttcctatataatctgataattgcaattcagcaagcaataaagattgtgtgattgtgtttaacagctccaagggatgggtccacacagggcccccaggcaataactaatccctctgaaacaaacagagaggactccagacctggctttgccaaggacaagttttgtaagcttatttaagtcacctgacttctctaggcctcagattcctcagctataaaataatgagctagtttattatttcaaccaatgcttattaaacatccactttgtgtcaggctttgtgcaagaagctggaaatatttttaaagtatagacacagtatctgttctcagggtctcagtgtttaatgcgggaaaagatgcatcataagagaaaagtgctgtggacggcaaaggcaaaaacaactcagcccaggagcttatctttaggattcttcccaaccccaaaagtctacgtgtatggcatttttttgtctgttcattttgttttggttgtcttttcacatgaatgttatttcattctttcttgactagttgttttcaaatcattgttgcattgttgtcattatcatccattaccaattactaaacacatactgttaccccaaatgttgtaattaccccaactgttggtaattaccccaatgactctaaaagttagacattataatcactattttttatataataacactgaagcccagagaggttaagtaacttacccaagctcacatcgctagaaagttacggaactgggattggagttgacccctgccaactccaaagtacatgctctttctactacttggtgctgccttaggtatatgtagccacttaggacaaacatcatttacaggagcaggtgtgatataaaaatatgaggccctttgttcaaatattattgaaaatttcaagatagcaacagcaaagcattaaacaaagcacaaggcctgtctaagcacagggctctgaatgactgcccatgttgcaaacccaggaatccagccctgccagccacaattcagtttgcaatggcatctcccactgaagcagaaaagcttcatagcaatttgcaggcccagatcacactcgcagaatgtttcagtgatcatgcttcacatgtaggatttctggcactacccagagggttcattgtgaaccacctggcaggacttgggggctctgtgtggtggctttttcagagtagccctggcacctaacctaaagaatattaatatcatttctggtaatgccaattactttatttttttttgagatggagttttgctcttgttgccaggctagagtgcaatggcacaatctcagctcaccacaacctctgcctcccaggttcaagtgattctcctgcctcagcctcccgagtagctgggattacaggcatgtgacaccacacctggctaattttgtatttttggtagagacaaggtttctccatgttggtcaggctggtctcgaactcccgacctcaggtgatccgaccacctcgacctcccaaagtgctgggattacaggcgtgaaccacagcgcccggccagccaattactttttttaatgtggggaaaggtatataatcttgctgaaagagttttgctccgtgtgatggttcatacctgtaatcccagtattttgggaggctgaggcaggaggatggcttgagcccaagagtttgagaccagcctgggaaacagagacccctgtctctacaaaaaatacaaaaaattagccaggcatggtggtatgtacctgtagtaggaggctgagctgggaggatcacttgagcctgggaggttgaggccacagtaagccatgatcatgccactgcactccagcctgggtgacagagtaaagaaaaaaaaaaaaaaagagttctggtcatacccttacacccttactcttacatttagaacatttagaacattaatgctgcataaatggaacatgtccaaaagcctcttaggatgcaagcctcttttgaaattgcaaactgggaccagtacatgtgccctaatagagggcagtaggaaaaaaagcaagagctttgcagctgctggattacgaacctctctactgaggcactaactcctattaaggtgttagctcctactgacccagcagaggctgagtaaagattgtcattttggtcaatgattcttaatcagtggtatttaatcttttgagatcacagaccccttctttgaaaagtatgaaccatctccccagaaaaaagacaggtgtatgtaaaatattcttgcattcaattgtagactctctgccttagccctagattttttaaaaccatattttaaagcatggctcccctaattatagaattgtcagaggcgtctgaaccagagcaactccatcttgagtaggggctgggtaaaataaggctgagacctactgggctgcattcccagacggttaggcattctaagtcacaggatgagataggaggtcagccaagatacaggtcatcaagaccttgctgataaaataggttgcagtaaagaagccagctgaagcccaccaaaaccaagatggccatgagagtgacctctggttgtcctcactgctacactcccaccagcaccatgacagtttacagatgccatggcaatgtcaggaagttaccctatatggtctaaaaggggaggcatgaataatccaccccttgtttagcatataatcaagaaataaccataaaaataggcaaccagaagccttctgtcagtggagtagccattcttttattcctttactttcttaataaacttgctttcacttt

SEQ ID NO: 22106 - protein, 78 aa, Homo sapiens
MRPVCQPWPSPHAPTTVKREGSTVSNSIQPPPPEYQLGSRTWLEAETPGQKRQCSAFMEFTEESRRHSWILPVYPSGC

SEQ ID NO: 22107 - DNA, 4695 bp, Homo sapiens
cgcgagagagcgagcgccaccgccgcgggccccgcagccgttctgcctgctgtcaccgctgcctccatcgccgacactagcgctccagctgcagccaaggccgctacgagagcgcaggaagccctcgaggagcggctgcctgggggcgcaaggctcagggcgcgcacctggtttagaagatcatgaccacatggatcatctaactaaatggtacatggggacaaaatggtcctttagaaaatacatctgaattgctggctaatttcttgatttgcgactcaacgtaggacatcgcttgttcgtagctatcagaaccctcctgaattttccccaccatgctatctttattggcttgaactcctttcctaaaatggtccttctgttgatcctgtcagtcttacttttgaaagaagatgtccgtgggagtgcacagtccagtgagaggagggtggtggctcacatgccgggtgacatcattattggagctctcttttctgttcatcaccagcctactgtggacaaagttcatgagaggaagtgtggggcggtccgtgaacagtatggcattcagagagtggaggccatgctgcataccctggaaaggatcaattcagaccccacactcttgcccaacatcacactgggctgtgagataagggactcctgctggcattcggctgtggccctagagcagagcattgagttcataagagattccctcatttcttcagaagaggaagaaggcttggtacgctgtgtggatggctcctcctcttccttccgctccaagaagcccatagtaggggtcattgggcctggctccagttctgtagccattcaggtccagaatttgctccagcttttcaacatacctcagattgcttactcagcaaccagcatggatctgagtgacaagactctgttcaaatatttcatgagggttgtgccttcagatgctcagcaggcaagggccatggtggacatagtgaagaggtacaactggacctatgtatcagccgtgcacacagaaggcaactatggagaaagtgggatggaagccttcaaagatatgtcagcgaaggaagggatttgcatcgcccactcttacaaaatctacagtaatgcaggggagcagagctttgataagctgctgaagaagctcacaagtcacttgcccaaggcccgggtggtggcctgcttctgtgagggcatgacggtgagaggtctgctgatggccatgaggcgcctgggtctagcgggagaatttctgcttctgggcagtgatggctgggctgacaggtatgatgtgacagatggatatcagcgagaagctgttggtggcatcacaatcaagctccaatctcccgatgtcaagtggtttgatgattattatctgaagctccggccagaaacaaaccaccgaaacccttggtttcaagaattttggcagcatcgttttcagtgccgactggaagggtttccacaggagaacagcaaatacaacaagacttgcaatagttctctgactctgaaaacacatcatgttcaggattccaaaatgggatttgtgatcaacgccatctattcgatggcctatgggctccacaacatgcagatgtccctctgcccaggctatgcaggactctgtgatgccatgaagccaattgatggacggaaacttttggagtccctgatgaaaaccaattttactggggtttctggagatacgatcctattcgatgagaatggagactctccaggaaggtatgaaataatgaatttcaaggaaatgggaaaagattactttgattatatcaacgttggaagttgggacaatggagaattaaaaatggatgatgatgaagtatggtccaagaaaagcaacatcatcagatctgtgtgcagtgaaccatgtgagaaaggccagatcaaggtgatccgaaagggagaagtcagctgttgttggacctgtacaccttgtaaggagaatgagtatgtctttgatgagtacacatgcaaggcatgccaactggggtcttggcccactgatgatctcacaggttgtgacttgatcccagtacagtatcttcgatggggtgaccctgaacccattgcagctgtggtgtttgcctgccttggcctcctggccaccctgtttgttactgtagtcttcatcatttaccgtgatacaccagtagtcaagtcctcaagcagggaactctgctacattatccttgctggcatctgcctgggctacttatgtaccttctgcctcattgcgaagcccaaacagatttactgctaccttcagagaattggcattggtctctccccagccatgagctactcagcccttgtaacaaagaccaaccgtattgcaaggatcctggctggcagcaagaagaagatctgtaccaaaaagcccagattcatgagtgcctgtgcccagctagtgattgctttcattctcatatgcatccagttgggcatcatcgttgccctctttataatggagcctcctgacataatgcatgactacccaagcattcgagaagtctacctgatctgtaacaccaccaacctaggagttgtcactccacttggatacaatggattgttgattttgagctgcaccttctatgcgttcaagaccagaaatgttccagctaacttcaacgaggccaagtatatcgccttcacaatgtacacgacctgcattatatggctagcttttgtgccaatctactttggcagcaactacaaaatcatcaccatgtgtttctcggtcagcctcagtgccacagtggccctaggctgcatgtttgtgccgaaggtgtacatcatcctggccaaaccagagagaaacgtgcgcagcgccttcaccacatctaccgtggtgcgcatgcatgtaggggatggcaagtcatcctccgcagccagcagatccagcagcctagtcaacctgtggaagagaaggggctcctctggggaaaccttaagttccaatggaaaatccgtcacgtgggcccagaatgagaagagcagccgggggcagcacctgtggcagcgcctgtccatccacatcaacaagaaagaaaaccccaaccaaacggccgtcatcaagcccttccccaagagcacggagagccgtggcctgggcgctggcgctggcgcaggcgggagcgctgggggcgtgggggccacgggcggtgcgggctgcgcaggcgccggcccaggcgggcccgagtccccagacgccggccccaaggcgctgtatgatgtggccgaggctgaggagcacttcccggcgcccgcgcggccgcgctcaccgtcgcccatcagcacgctgagccaccgcgcgggctcggccagccgcacggacgacgatgtgccgtcgctgcactcggagcctgtggcgcgcagcagctcctcgcagggctccctcatggagcagatcagcagtgtggtcacccgcttcacggccaacatcagcgagctcaactccatgatgctgtccaccgcggcccccagccccggcgtcggcgccccgctctgctcgtcctacctgatccccaaagagatccagttgcccacgaccatgacgacctttgccgaaatccagcctctgccggccatcgaagtcacgggaggcgcgcagcccgcggcaggggcgcaggcggctggggacgcggcccgggagagccccgcggccggtcccgaggctgcggccgccaagccagacctggaggagctggtggctctcaccccgccgtcccccttcagagactcggtggactcggggagcacaacccccaactcgccagtgtccgagtcggccctctgtatcccgtcgtctcccaaatatgacactcttatcataagagattacactcagagctcctcgtcgttgtgaatgtccctggaaagcacgccggcctgcgcgtgcggagcggagccccccgtgttcacacacacacaatggcaagcatagtcgcctggttacggcccagggggaagatgccaagggcaccccttaatggaaacacgagatcagtagtgctatctcatgacaaccgacgaagaaaccgacgacaaatcttttggcagattttcttctagtggccttagaaaacatgggcttttaagaaacacggctgatatctttgagggctgacaaggcgtctcttcaaacagttccataccaagtgctttgctctagggaagcagtgcgtgtgaaacagcgtaacggagggtgaagagcatagttaataagcaactgtaaaaagttttatttgtttactttaattcttttcccagaagagtctttgattcaccaaacatgaatgtacattttctaacaaactcaaaatctgggaccaaaacatcaacttttttctttcttttttctttctttttgttttttctttcctgtaaagaccttgaaaagcagtaacttgggtccagtatttacggaggcgttgtgaatgtgtcccatgcataacacactactggatagtgagtgctgcgctaatgtactacgtagggcttctaccagagattttcctctccaattgggttgtgaaatactcttccaaaagcctgcatcggggattccacctacttatttcagattcacctccattaaccaagaaaaccagtggaagatttcttgactatttcaccatgttgccaatc

SEQ ID NO: 22108 - protein, 1180 aa, Homo sapiens; identical to SEQ ID NO: 2859

SEQ ID NO: 22109 - DNA, 997 bp, Homo sapiens
cagccgtgtttcttaaaagcccatgttttctaaggccactagaagaaaatctgccaaaagatttgtcgtcggtttcttcgtcggttgtcatgagatagcactactgatctcgtgtttccattaaggggtgcccttggcatcttccccctgggccgtaaccaggcgactatgcttgccattgtgtgtgtgtgaacacggggggctccgctccgcacgcgcaggccggcgtgctttccagggacattcacaacgacgaggagctctgagtgtaatctcttatgataagagtgtcatatttgggagacgacgggatacagagggccgactcggacactggcgagttgggggttgtgctccccgagtccaccgagtctctgaagggggacggcggggtgagagccaccagctcctccaggtctggcttggcggccgcagcctcgggaccggccgcggggctctcccgggccgcgtccccagccgcctgcgcccctgccgcgggctgcgcgcctcccgtgacttcgatggccggcagaggctggatttcggcaaaggtcgtcatggtcgtgggcaactggatctctttggggatcaggtgtccactagcttctggaacatggcagagaagaaatgggccagtttatttacgagatttgattgggaggatggttgccaactacaccctttctcctatcagaaggataagaaacaggtgtttcgaaagttgaacatgatggaacataactttggatgttagcagtaacagtctttggaatcacctgtagccatgccccaaaacatgatagcatgttgcaaaacctctagtgcccatggccataagggagaaagagcaccagaccatctgaataacgtgaaagtggacacaggaaacaccagacacccagagaaatggagtccaaatagaaactcagaccattcttgctggagatacatcaagtgaatacctttgtagatctggacctgacccaaggaagcctgg

SEQ ID NO: 22110 - protein, 148 aa, Homo sapiens
MIRVSYLGDDGIQRADSDTGELGVVLPESTESLKGDGGVRATSSSRSGLAAAASGPAAGLSRAASPAACAPAAGCAPPVTSMAGRGWISAKVVMVVGNWISLGIRCPLASGTWQRRNGPVYLRDLIGRMVANYTLSPIRRIRNRCFES

SEQ ID NO: 22111 - DNA, 671 bp, Homo sapiens
ggcaggagtgggcttctagtaaaaaagatgagttcagcccctttcctttctctctcgcacacatatttgctcgcctttttgtctgccaacatgggataaagcagcaagaaagtgcttgccagatatgggtccttgaaccttggactgcccagcctccagaacttgatggctgggctgacaggtatgatgtgacagatggatatcagcgagaagctgttggtggcatcacaatcaagctccaatctcccgatgtcaagtggtttgatgattattatctgaagctccggccagaaacaaaccaccgaaacccttggtttcaagaattttggcagcatcgttttcagtgccgactggaagggtttccacaggagaacagcaaatacaacaagacttgcaatagttctctgactctgaaaacacatcatgttcaggattccaaaatgggatttgtgatcaacgccatctattcgatggcctatgggctccacaacatgcagatgtccctctgcccaggctatgcaggactctgtgatgccatgaagccaattgatggacggaaacttttggagtccctgatgaaaaccaattttactggggtttctggagatacgatcctattcgatgagaatggagactctccaggaaggtatgaaataatgaatttcaaggaa

SEQ ID NO: 22112 - protein, 76 aa, Homo sapiens
MGFVINAIYSMAYGLHNMQMSLCPGYAGLCDAMKPIDGRKLLESLMKTNFTGVSGDTILFDENGDSPGRYEIMNFK

SEQ ID NO: 22113 - DNA, 755 bp, Homo sapiens
gcccctttcctttctctctcgcacacatatttgctcgcctttttgtctgccaacatgggataaagcagcaagaaagtgcttgccagatatgggtccttgaaccttggactgcccagcctccagaacttgatggctgggctgacaggtatgatgtgacagatggatatcagcgagaagctgttggtggcatcacaatcaagctccaatctcccgatgtcaagtggtttgatgattattatctgaagctccggccagaaacaaaccaccgaaacccttggtttcaagaattttggcagcatcgttttcagtgccgactggaagggtttccacaggagaacagcaaatacaacaagacttgcaatacgctggaggctggaagccggagatcaggatgtgaacatagttgggttctggtgaagcctcattttccagcctacagacagcctccttcttgctatgtccacacttggcagaaagggagagaaattcagggcatgaatcaaattttttttgtatcttctttatcaagtcactggtatctcttctcttaaggacattaaccctatcatgaacaggctaccctcattagctcatctaaacctaattacttcccaaaacttcatctccaaataccatcacactaggaattagagtttcttcaacatattgagggtatttgaggggacgtaatttagtccataacacacagtctctggcatttaataaaactcaataaattacaacaatattaggaa

SEQ ID NO: 22114 - protein, 57 aa, Homo sapiens
SSGQKQTTETLGFKNFGSIVFSADWKGFHRRTANTTRLAIRWRLEAGDQDVNIVGFW

SEQ ID NO: 22115 - DNA, 467 bp, Homo sapiens
aagaaagtgcttgccagatatgggtccttgaaccttggactgcccagcctccagaactcatcccttacgccatactttggtaaatactgttcatggtcttagaaatgccaagcaagcagacagcaggaaactagtgatctagaatcagcaagaaacctctaagataaagaaactgaagcacagttaagtaatccatccaagatcacacagctaatgggaggagtgaaccccatacactcaagtaccaataccacactcttaatcactaagccaggatcaatctgatcatccacaagtgttctcctggagggactcagaaatgagttgtgcagagcgatgcagaatcattccttggagcacttccagcagaaataagacacagaaagaaggttctacttcactgatcctcaaacattgcaatatgtgtacatgtcaatcagcaataaacttaaatataagatcgtcaa

SEQ ID NO: 22116 - protein, 48 aa, Homo sapiens
MSCAERCRIIPWSTSSRNKTQKEGSTSLILKHCNMCTCQSAINLNIRS

SEQ ID NO: 22117 - DNA, 556 bp, Homo sapiens
gtggatggctcctcctcttccttccgctccaagaagcccatagtaggggtcattgggcctggctccagttctgtagccattcaggtccagaatttgctccagcttttcaacatacctcagattgcttactcagcaaccagcatggatctgagtgacaagactctgttcaaatatttcatgagggttgtgccttcagatgctcagcaggcaagggccatggtggacatagtgaagaggtacaactggacctatgtatcagccgtgcacacagaaggtagagggacaaagaaggaagagatgcgtaagagggatcagacattgatgttatcttttatgaggttcaagctattctcatgcctcagcctccagaggagctaggattacaggcatgtaccacacccaggaagttatacagatacacgttcctctgaacttcgccaatacttacagtattgtacaatacttatttgtgacttctcatcaacaccccaactggttagatgctgttatttttactggttgtatattaagacaataaaaaatttcgtacttgggt

SEQ ID NO: 22118 - protein, 78 aa, Homo sapiens
MDLSDKTLFKYFMRVVPSDAQQARAMVDIVKRYNWTYVSAVHTEGRGTKKEEMRKRDQTLMLSFMRFKLFSCLSLQRS

SEQ ID NO: 22119 - DNA, 1265 bp, Homo sapiens
cgcgagagagcgagcgccaccgccgcgggccccgcagccgttctgcctgctgtcaccgctgcctccatcgccgacactagcgctccagctgcagccaaggccgctacgagagcgcaggaagccctcgaggagcggctgcctgggggcgcaaggctcagggcgcgcacctggtttagaagatcatgaccacatggatcatctaactaaatggtacatggggacaaaatggtcctttagaaaatacatctgaattgctggctaatttcttgatttgcgactcaacgtaggacatcgcttgttcgtagctatcagaaccctcctgaattttccccaccatgctatctttattggcttgaactcctttcctaaaatggtccttctgttgatcctgtcagtcttacttttgaaagaagatgtccgtgggagtgcacagtccagtgagaggagggtggtggctcacatgccgggtgacatcattattggagctctcttttctgttcatcaccagcctactgtggacaaagttcatgagaggaagtgtggggcggtccgtgaacagtatggcattcagagagtggaggccatgctgcataccctggaaaggatcaattcagaccccacactcttgcccaacatcacactgggctgtgagataagggactcctgctggcattcggctgtggccctagagcagagcattgagttcataagagattccctcatttcttcagaagaggaagaaggcttggtacgctgtgtggatggctcctcctcttccttccgctccaagaagcccatagtaggggtcattgggcctggctccagttctgtagccattcaggtccagaatttgctccagcttttcaacatacctcagattgcttactcagcaaccagcatggatctgagtgacaagactctgttcaaatatttcatgagggttgtgccttcagatgctcagcaggcaagggccatggtggacatagtgaagaggtacaactggacctatgtatcagccgtgcacacagaaggtagagggacaaagaaggaagagatgcgtaagagggatcagacattgatgttatcttttatgaggtgtgtgttcttgagatttgaagaaattagatggaatgattctttagtatatgatgccctggaaaatgaaaacatccaagtgctgtctctctgtttccccagcagtgctgtaattcaaataaatacctttctttctcctatagctttaataaaccgtttgaatgttacat

SEQ ID NO: 22120 - protein, 297 aa, Homo sapiens
MVLLLILSVLLLKEDVRGSAQSSERRVVAHMPGDIIIGALFSVHHQPTVDKVHERKCGAVREQYGIQRVEAMLHTLERINSDPTLLPNITLGCEIRDSCWHSAVALEQSIEFIRDSLISSEEEEGLVRCVDGSSSSFRSKKPIVGVIGPGSSSVAIQVQNLLQLFNIPQIAYSATSMDLSDKTLFKYFMRVVPSDAQQARAMVDIVKRYNWTYVSAVHTEGRGTKKEEMRKRDQTLMLSFMRCVFLRFEEIRWNDSLVYDALENENIQVLSLCFPSSAVIQINTFLSPIALINRLNV

SEQ ID NO: 22121 - DNA, 2484 bp, Homo sapiens
tattgagttcttcaaacattgtagcctctttatggtctctgagaaataactaccttaaacccataatctttaatacttcctaaactttcttaataagagaagctctattcctgacactacctctcatttgcaaggtcaaatcatcattagttttgtagtctattaactgggtttgcttaggtcaggcattattattactaaccttattgttaatattctaaccataagaattaaactattaatggtgaatagagtttttcactttaacataggcctatcccactggtgggatacgagccaattcgaaagaaaagtcagtcatgtgcttttcagaggatgaaagcttaagataaagactaaaagtgtttgatgctggaggtgggagtggtattatataggtctcagccaagacatgtgataatcactgtagtagtagctggaaagagaaatctgtgactccaattagccagttcctgcagaccttgtgaggactagaggaagaatgctcctggctgttttgtactgcctgctgtggagtttccagacctccgctggccatttccctagagcctgtgtctcctctaagaacctgatggagaaggaatgctgtccaccgtggagcggggacaggagtccctgtggccagctttcaggcagaggttcctgtcagaatatccttctgtccaatgcaccacttgggcctcaatttcccttcacaggggtggatgaccgggagtcgtggccttccgtcttttataataggacctgccagtgctctggcaacttcatgggattcaactgtggaaactgcaagtttggcttttggggaccaaactgcacagagagacgactcttggtgagaagaaacatcttcgatttgagtgccccagagaaggacaaattttttgcctacctcactttagcaaagcataccatcagctcagactatgtcatccccatagggacctatggccaaatgaaaaatggatcaacacccatgtttaacgacatcaatatttatgacctctttgtctggatgcattattatgtgtcaatggatgcactgcttgggggatctgaaatctggagagacattgattttgcccatgaagcaccagcttttctgccttggcatagactcttcttgttgcggtgggaacaagaaatccagaagctgacaggagatgaaaacttcactattccatattgggactggcgggatgcagaaaagtgtgacatttgcacagatgagtacatgggaggtcagcaccccacaaatcctaacttactcagcccagcatcattcttctcctcttggcagattgtctgtagccgattggaggagtacaacagccatcagtctttatgcaatggaacgcccgagggacctttacggcgtaatcctggaaaccatgacaaatccagaaccccaaggctcccctcttcagctgatgtagaattttgcctgagtttgacccaatatgaatctggttccatggataaagctgccaatttcagctttagaaatacactggaaggatttgctagtccacttactgggatagcggatgcctctcaaagcagcatgcacaatgccttgcacatctatatgaatggaacaatgtcccaggtacagggatctgccaacgatcctatcttccttcttcaccatgcatttgttgacagtatttttgagcagtggctccgaaggcaccgtcctcttcaagaagtttatccagaagccaatgcacccattggacataaccgggaatcctacatggttccttttataccactgtacagaaatggtgatttctttatttcatccaaagatctgggctatgactatagctatctacaagattcagacccagactcttttcaagactacattaagtcctatttggaacaagcgagtcggatctggtcatggctccttggggcggcgatggtaggggccgtcctcactgccctgctggcagggcttgtgagcttgctgtgtcgtcacaagagaaagcagcttcctgaagaaaagcagccactcctcatggagaaagaggattaccacagcttgtatcagagccatttataaaaggcttaggcaatagagtagggccaaaaagcctgacctcactctaactcaaagtaatgtccaggttcccagagaatatctgctggtatttttctgtaaagaccatttgcaaaattgtaacctaatacaaagtgtagccttcttccaactcaggtagaacacacctgtctttgtcttgctgttttcactcagcccttttaacattttcccctaagcccatatgtctaaggaaaggatgctatttggtaatgaggaactgttatttgtatgtgaattaaagtgctcttattttaaaaaattgaaataattttgatttttgccttctgattatttaaagatctatatatgttttattggccccttctttattttaataaaacagtgagaaatct

SEQ ID NO: 22122 - protein, 529 aa, Homo sapiens [sequence omitted]

SEQ ID NO: 22123 - DNA, 1500 bp, Homo sapiens
ggtgggagtggtattatataggtctcagccaagacatgtgataatcactgtagtagtagctggaaagagaaatctgtgactccaattagccagttcctgcagaccttgtgaggactagaggaagaatgctcctggctgttttgtactgcctgctgtggagtttccagacctccgctggccatttccctagagcctgtgtctcctctaagaacctgatggagaaggaatgctgtccaccgtggagcggggacaggagtccctgtggccagctttcaggcagaggttcctgtcagaatatccttctgtccaatgcaccacttgggcctcaatttcccttcacaggggtggatgaccgggagtcgtggccttccgtcttttataataggacctgccagtgctctggcaacttcatgggattcaactgtggaaactgcaagtttggcttttggggaccaaactgcacagagagacgactcttggtgagaagaaacatcttcgatttgagtgccccagagaaggacaaattttttgcctacctcactttagcaaagcataccatcagctcagactatgtcatccccatagggacctatggccaaatgaaaaatggatcaacacccatgtttaacgacatcaatatttatgacctctttgtctggatgcattattatgtgtcaatggatgcactgcttgggggatctgaaatctggagagacattgattttgcccatgaagcaccagcttttctgccttggcatagactcttcttgttgcggtgggaacaagaaatccagaagctgacaggagatgaaaacttcactattccatattgggactggcgggatgcagaaaagtgtgacatttgcacagatgagtacatgggaggtcagcaccccacaaatcctaacttactcagcccagcatcattcttctcctcttggcagattgtctgtagccgattggaggagtacaacagccatcagtctttatgcaatggaacgcccgagggacctttacggcgtaatcctggaaaccatgacaaatccagaaccccaaggctcccctcttcagctgatgtagaattttgcctgagtttgacccaatatgaatctggttccatggataaagctgccaatttcagctttagaaatacactggaagagatgggatttctccatattggctgggctggtctcaaactcctgacctcaagagatccaccaccttagcctcccaaaatgctgggattacaggcttgagccaccacacctggcctaacttcaaggtatcaaagacaaattaacaatgtctgatgcatacataggactgctttgtaatcttctacactaatgatttgtactattttggtttcagaatccatttataactcttacaatatatgaaaaatttctgccagcttttatttatgtgggttatatttatgactacttctcatttgtaaaactgaaataaaaagatcttgcatatttgtattaattt

SEQ ID NO: 22124 - protein, 367 aa, Homo sapiens
MLLAVLYCLLWSFQTSAGHFPRACVSSKNLMEKECCPPWSGDRSPCGQLSGRGSCQNILLSNAPLGPQFPFTGVDDRESWPSVFYNRTCQCSGNFMGFNCGNCKFGFWGPNCTERRLLVRRNIFDLSAPEKDKFFAYLTLAKHTISSDYVIPIGTYGQMKNGSTPMFNDINIYDLFVWMHYYVSMDALLGGSEIWRDIDFAHEAPAFLPWHRLFLLRWEQEIQKLTGDENFTIPYWDWRDAEKCDICTDEYMGGQHPTNPNLLSPASFFSSWQIVCSRLEEYNSHQSLCNGTPEGPLRRNPGNHDKSRTPRLPSSADVEFCLSLTQYESGSMDKAANFSFRNTLEEMGFLHIGWAGLKLLTSRDPPP

SEQ ID NO: 22125 - DNA, 382 bp, Homo sapiens
tgtgaaggattaatgcctctcagcagaattcaagaaaacctgtctttatcagatgtctgagtcccttaccatcagtagacagaggtactgagttttgcctagtgctttggtgatgcttcataatgtttacaagacaccatgcgtccactccatggaaataatcatcaatgagagaagcaacatcatcctaatcagttgcacagttaaacaaaaaaaaaaaaaaaaaaaaaaaaaacgacatcactgaagtcaagaagcacaaaatgacaaatggtcaagttccaacagctaaaaagatccaagacattatgagcttttaatgagtgaaacatgccatgagaaagagaccttctgtcaataaatccaaatccttgttcactaa

SEQ ID NO: 22126 - protein, 44 aa, Homo sapiens
MLHNVYKTPCVHSMEIIINERSNIILISCTVKQKKKKKKKKRHH

SEQ ID NO: 22127 - DNA, 4121 bp, Homo sapiens
atggatgaactcagtgttgctgccttacattcttgggggacgtttagccaaatagacaagcacttacaaaaccacctgcttgagcctgtgtctgctttgtctagggcaagaactggtcccatgtgtaaacgtggatggaagtatgatgtgatggatataattatgggacactgtgtgggcacacggcctcctgcttgttgcctcatcctcctgcttttcaagcttttggccactgtctcccaggggctgccagggactggacccctgggcttccacttcacacattccatttataatgctaccgtgtatgagaactcagcagcaaggacctacgtcaacagccagagtagaatgggcatcaccttaatagatctatcctgggatatcaaatacagaatagtgtccggagacgaggaaggctttttcaaagcagaggaagtcatcattgcagatttctgttttctcagaataagaactaaaggtggcaattctgccatattaaatagggaaatccaggataattatttattgatagtaaaaggttctgtcagaggagaggatttggaagcatggaccaaagtgaatatacaggttttagatatgaatgatctgagacctttgttttcacccacaacatactctgttaccatagcagaaagcacacctctaaggactagtgttgcccaggtgactgcaacagacgcagatattggttccaatggagaattctactactactttaaaaataaagttgatctcttttcagttcaccccacgagtggtgtcatctccttaagtggtcgattaaattatgatgaaaagaataggtatgatctggaaattttggctgtggaccggggaatgaaactgtatgggaacaatggagtgagcagtactgcaaagctttatgttcacattgagcgcataaatgaacatgccccaacaatccatgtagtcactcatgttcctttctcgttggaaaaagagccaacatatgcagtggtgacagttgatgacttagatgatggagcgaatggagagatcgaatctgtttccattgtggctggggatcctttagatcagttcttcctggctaaggaaggaaagtggttgaatgagtacaagattaaggagaggaagcagattgactgggagagctttccctatggctacaatctcactcttcaagcaaaagacaagggatctcctcaaaaatgttcagcattaaaggcagtctacattggcaaccccacaagagacactgtccccattagatttgaaaaagaagtgtacgatgtgagcataagtgaattttcccctcctggtgtcgtggttgctatagtaaaattaagtcctgaaccgatagatgtggaatacaaattatctcctggtgaggatgcagtgtactttaaaattaatcctcggtcgggtctgattgttacagcacggccactgaatactgttaagaaggaggtttataaactggaggtgacaaacaaggaaggagatttaaaagcacaggtcaccatcagcatagaagatgcaaatgaccacaccccagaatttcagcaaccactgtatgatgcttatgtgaatgaaagtgtcccagtgggaaccagcgttctaacagtttcagcttctgataaggataaaggagaaaatgggtacatcacctatagtatcgctagcctgaatttgttaccatttgtcattaatcagtttacaggtgttattagcacaactgaagaactggattttgaatcctccccagaaatttacagattcattgttagagcctctgactggggttcaccataccgccatgaaagtgaggtcaatgtgactattcgaataggaaatgtcaacgacaacagccctctctttgaaaaagtggcttgccagggagttatttcatatgactttccagttggtggtcacatcacagcagtctcagcgatcgatatcgatgaacttgaacttgtaaagtacaaaatcatttctggaaatgaacttggcttcttttatttaaacccagattctggtgttttacagcttaaaaaatcactgacaaattctggcattaaaaatggcaattttgccctcagaattacagcaactgatggagagaatcttgcagaccccatgtctattaacatttcagtcctacatgggaaagtgtcttcaaagagcttcagttgcagagaaactcgtgtggctcaaaagctggcagagaaactactcattaaggcaaaagcaaatgggaaactgaatctggaagatggatttcttgacttttattcaattaatagacagggaccatattttgacaagtcttttccttctgatgtggctgtaaaggaggatctgccagttggtgctaacattctgaagattaaagcctatgatgccgactctggcttcaatggaaaagtgctatttacaatatcagatggaaatacggatagttgctttaatattgatatggagactgggcagcttaaagtccttatgcccatggatcgagaacacacagacctctatctccttaatatcaccatctatgacttaggtaatccacagaaatcgtcatggagactgctgaccatcaatgtggaggatgctaatgacaatagcccagtttttattcaagacagttactcagttaacattcttgaaagttcaggcattggtactgaaatcattcaagtggaagccagagacaaagacttaggttctaatggtgaagtgacttactcagtcttgacagatacacagcagtttgccatcaatagctcaactggaatcgtttatgtagccgaccagttggaccgggaatccaaagccaattattctttgaaaatagaagccagggacaaggcagagagtggtcagcagctgttttcagttgtcactcttaaagtttttttagatgatgtcaatgactgctccccagctttcattcccagtagctatagtgtgaaggttcttgaagatctccctgttggcactgtcattgcttggcttgagacccatgatccagatcttggactggggggtcaagtgcgctattctttggtcaatgactataatgggagatttgaaatagataaagcaagtggtgccatccgcttgagcaaagagcttgattatgagaaacagcagttctataaccttactgtgcgggccaaagacaaagggcggcctgtctctctgtcatctgtttcctttgttgaggtggaagtggtggatgtcaatgaaaacctccacactccctatttcccagactttgctgttgttggatctgtaaaggaaaactcacgcattggaacaagcgtgctgcaggtgactgctcgagatgaagactccggaagggatggagagatccagtactccatcagggatggcagtggtcttggaaggttcagtatagacgacgagagtggtaagtgtaatattttgtgccaagagtgttgtttcacctcttttaaatggtcaacagtggaaaagtaaagggatgttaggacactaaaatagaatgacaaatgaggttgcatttggtgcagagacgacgcacatagatgctttttcttaggatgttctggtttgttagaagatctgtttataaactaacagctgtggtttccagtgggagtcctggtttgttttgttttgttattttcttgctcagcactattgctaccaggtcatcttttgataagcctaagtaattgtcacttctgttgattgtactcctgaccctctctaaatgaaggactctgataaagtaaattacatttgaattggctttaagttagaagtgtgaaatggattttcaaatggatcttatataggaatctttccctttacagtaaggctttgcagaagtgatattgcattagttgcttggtcttttatctttcatgggttcatctggtccttgaatgatgggcatttgcactctgtagctccattaatataaggaggtgtgcttctacaaatgttttcttaatggaataaatgagtcttgctatgaattttatttataaaaattgattttaagaatttatttgtaaggagatatttacaaaacattaaaaaatatggggcaacattgttccagt

SEQ ID NO: 22128 - protein, 1169 aa, Homo sapiens
MDELSVAALHSWGTFSQIDKHLQNHLLEPVSALSRARTGPMCKRGWKYDVMDIIMGHCVGTRPPACCLILLLFKLLATVSQGLPGTGPLGFHFTHSIYNATVYENSAARTYVNSQSRMGITLIDLSWDIKYRIVSGDEEGFFKAEEVIIADFCFLRIRTKGGNSAILNREIQDNYLLIVKGSVRGEDLEAWTKVNIQVLDMNDLRPLFSPTTYSVTIAESTPLRTSVAQVTATDADIGSNGEFYYYFKNKVDLFSVHPTSGVISLSGRLNYDEKNRYDLEILAVDRGMKLYGNNGVSSTAKLYVHIERINEHAPTIHVVTHVPFSLEKEPTYAVVTVDDLDDGANGEIESVSIVAGDPLDQFFLAKEGKWLNEYKIKERKQIDWESFPYGYNLTLQAKDKGSPQKCSALKAVYIGNPTRDTVPIRFEKEVYDVSISEFSPPGVVVAIVKLSPEPIDVEYKLSPGEDAVYFKINPRSGLIVTARPLNTVKKEVYKLEVTNKEGDLKAQVTISIEDANDHTPEFQQPLYDAYVNESVPVGTSVLTVSASDKDKGENGYITYSIASLNLLPFVINQFTGVISTTEELDFESSPEIYRFIVRASDWGSPYRHESEVNVTIRIGNVNDNSPLFEKVACQGVISYDFPVGGHITAVSAIDIDELELVKYKIISGNELGFFYLNPDSGVLQLKKSLTNSGIKNGNFALRITATDGENLADPMSINISVLHGKVSSKSFSCRETRVAQKLAEKLLIKAKANGKLNLEDGFLDFYSINRQGPYFDKSFPSDVAVKEDLPVGANILKIKAYDADSGFNGKVLFTISDGNTDSCFNIDMETGQLKVLMPMDREHTDLYLLNITIYDLGNPQKSSWRLLTINVEDANDNSPVFIQDSYSVNILESSGIGTEIIQVEARDKDLGSNGEVTYSVLTDTQQFAINSSTGIVYVADQLDRESKANYSLKIEARDKAESGQQLFSVVTLKVFLDDVNDCSPAFIPSSYSVKVLEDLPVGTVIAWLETHDPDLGLGGQVRYSLVNDYNGRFEIDKASGAIRLSKELDYEKQQFYNLTVRAKDKGRPVSLSSVSFVEVEVVDVNENLHTPYFPDFAVVGSVKENSRIGTSVLQVTARDEDSGRDGEIQYSIRDGSGLGRFSIDDESGKCNILCQECCFTSFKWSTVEK

SEQ ID NO: 22129 - DNA, 1582 bp, Homo sapiens
cctttgttgaggtggaagtggtggatgtcaatgaaaacctccacactccctatttcccagactttgctgttgttggatctgtaaaggaaaactcacgcattggaacaagcgtgctgcaggtgactgctcgagatgaagactccggaagggatggagagatccagtactccatcagggatggcagtggtcttggaaggttcagtatagacgacgagagtggggtcatcactgccgcagacattcttgatcgggagacaatggggtcatactggctaacagtgtatgccacagacaggggcgttgttccactctactccaccattgaggtctacattgaagttgaagatgtgaatgacaatgccccgctgacctcagaacctatatattatcctgttgtcatggaaaactctccaaaggacgtatctgtcattcagatccaggctgaagatcctgactccagttccaatgaaaaactgacatacaggattacaagtggaaatcctcagaatttttttgccatcaatatcaaaacagggtcttgctctgttgcccaggctggaatgcagtggcatgatcatagctcactgcaatctcgaactcctggattcaagggatacccctgcctcagcctcttgagtagctgggactataggcatgcaccgccatgcccagctacttttttaaatagttgagagtctcactatgttgcccaagctggtcttgatctcctggtcccaaatgatcctcttcctctgcctcccaagcactggaattacaggcatgagccactgtgcccagcccttatgctggacatttcatatgaatttcatgtaagtggaatcacgtaacatatagtcttttgtgactggtttctttcacttagcataatgtttttaaggatcatttgtgttgtgtgtatcagtatttcatttctttttatggctgaatgttgtatgcatacatcaccttttgtttatccattcatcagctgatggacgtttggattgtttctgtcttttgactattagaaacaaggatatgaatatatataagttttgtatagatatatattttcacttttcttacaaatatatcaaggaacagaattgttggagcatatggttactactccgtgtttaattttttgaggaacctccctactggtttccaaagtggctgcaccattatacatcccactatcagtctatgagcatttcagtttttccacacactccttaaaactcatctgactttttgtttttagccatcatactggatgttaagtggtatcttattgtgatttcgatttacatttgcctaatggccaatgatgttgaacatttcatgttcttcttaggtcattggtatgtcttctttggagaaatgtctgtttaagtacttcaaaattgagctatttttcttcttattagtgagttgtaatagttatttatatgtactagatagaagacccgtgtcagatatatgatttacaaatatttggcttgtcttttactttcttgataggggcatttgaagaacaatgggttttcattttaattttaataaagtctaggtttttttt

SEQ ID NO: 22130 - protein, 144 aa, Homo sapiens [sequence omitted]

SEQ ID NO: 22131 - DNA, 8192 bp, Homo sapiens
cctttgttgaggtggaagtggtggatgtcaatgaaaacctccacactccctatttcccagactttgctgttgttggatctgtaaaggaaaactcacgcattggaacaagcgtgctgcaggtgactgctcgagatgaagactccggaagggatggagagatccagtactccatcagggatggcagtggtcttggaaggttcagtatagacgacgagagtggggtcatcactgccgcagacattcttgatcgggagacaatggggtcatactggctaacagtgtatgccacagacaggggcgttgttccactctactccaccattgaggtctacattgaagttgaagatgtgaatgacaatgccccgctgacctcagaacctatatattatcctgttgtcatggaaaactctccaaaggacgtatctgtcattcagatccaggctgaagatcctgactccagttccaatgaaaaactgacatacaggattacaagtggaaatcctcagaatttttttgccatcaatatcaaaacaggtctgattacaacaacttcaaggaaattggatcgagaacagcaggcagaacattttctggaggtgactgtgacagatggtggtccctctccaaaacagtcaaccatttgggtggtggttcaggttctagatgaaaatgacaacaagccccagttcccagagaaggtctaccagatcaagctgccagaacgtgaccgaaagaagagaggagaaccgatttacagggcttttgcatttgatagagatgagggccccaacgcagaaatctcctacagtattgtggatgggaatgatgacggaaagttctttattgaccctaaaactgggatggtttcttctagaaagcagtttacagcaggcagttatgacatcctaacgataaaggcagtggacaatgggcgcccacagaaatcctccacggcccgcctccacattgaatggattaagaaaccacccccttcacctataccattgaccttcgatgagccgttttataacttcacagtcatggaaagtgatagagtgactgaaattgtaggggtggtgtctgtgcagccagctaacacccctctgtggtttgacatagttggtggcaagcatgctcgagagatgttctatattctacagacagcttgtgggcagaactgttcaacagaaggggggaattttgacagcgcttttgatgcagagaagggtgttgggacaattgtcatcgcaaaacctttggatgcagagcagaggtccatctataatatgagtgtggaagtcaccgatgggacaaatgttgctgttactcaggtatttatcaaagtgctggataataatgataatggcccagaattctctcagccgaattacgatgtgacaatttccgaggatgtgcttccagacacggagatcctgcagattgaagccacagatagagatgagaagcacaagctgagctacactgttcatagcagcatcgactccatcagcatgagaaaattccggattgaccctagcactggcgtgctctatactgccgagaggctggaccatgaggcccaggacaagcacattctcaacataatggtcagagatcaggagtttccttatcgaagaaacttggcccgagtcattgtgaatgtggaggatgctaatgatcacagtccttattttaccaacccactgtatgaagcgtctgtgtttgaatctgctgctctgggatcagctgttctgcaagtgacggctctggacaaagacaaaggagaaaatgcagaactcatatataccatagaagcagggaacactgggaacatgtttaagatcgaaccggtcctaggcatcatcaccatttgcaaagaaccagacatgacgacgatgggtcagtttgtcctatccatcaaagtcacagatcagggatccccgccaatgtctgctactgcaattgtgcgcatttccgtcaccatgtctgacaattctcaccccaagttcattcacaaagactaccaagcagaagtaaatgaaaatgttgacattggaacatcagtcattctaatctctgccatcagtcaatctaccctcatttatgaagtcaaagatggagacattaatgggatctttaccataaatccatattctggagtcatcaccactcagaaggccctggattatgagcgcacatcctcttatcaactcatcattcaggccaccaatatggcaggaatggcttccaatgctacagtcaatattcagattgttgatgaaaatgataatgccccagtttttctcttttctcaatactcaggcagcctaagtgaggctgccccaattaatagcattgtcaggagcttggataacagcccactggtgattcgagccacagatgctgacagcaaccggaatgctctgcttgtgtatcagattgtggagtcaacagcaaaaaagtttttcacggtggactccagtacaggtgcaatcagaacaattgccaacctggaccatgaaaccattgcccatttccattttcatgtgcatgtgagagacagtggtagcccccaactgactgcagagagtcccgttgaagtcaacattgaggtgacagatgtgaatgataacccacctgtttttactcaggctgtgtttgagactatcttacttctacctacctatgttggagtggaggttctgaaagttagtgccacagatcctgactctgaggtaccccctgaactgacatacagcctaatggaaggcagtttggatcattttttaattgactcaaacagtggagtacttaccataaaaaacaacaacctctccaaggatcactacatgctgatagttaaggtgtctgatggaaagttctacagtacctccatggtcaccatcatggttaaagaagccatggacagcggcctccactttacacaaagcttctattccacctcaatctcagagaacaacactaacataaccaaagttgctattgtcaatgcagttggaaatcgccttaatgagcccttaaaatacagcatcttaaacccaggaaataagttcaagataaaatctacctcaggggtcattcagacgactggagtcccctttgaccgtgaagaacaagagttatatgagctggtggtagaagccagccgtgagctggaccatctgcgtgtggccagagtggtggtcagggttaacattgaagacataaatgacaattctccagtctttgtgggcctcccatactatgctgctgttcaagtggatgcggaacccgggactctgatttatcaggtgacagccattgacaaagataaaggtccaaatggagaagtgacctatgtcctgcaggatgactatggccactttgaaattaaccctaattcagggaatgttattttaaaggaagcattcaactctgacttgtccaacattgagtatggagtcaccatcctagccaaggatggcggaaaaccttctttgtctacatctgtggagcttcccatcactattgtcaacaaagcaatgcctgtgtttgataagcccttttatacagcatctgtcaatgaagacatcagaatgaacacacccatcctaagcatcaatgccaccagtccagaaggccaaggcatcatatatatcattatcgatggggacccttttaaacagtttaacattgactttgacactggggtcctgaaagttgttagccctttggattatgaagttacatctgcttacaagctgacaataagagccagcgacgcccttactggtgctagggctgaagtcactgttgacttgctagttaatgatgtaaatgacaacccccctattttcgatcagcctacatacaatacaacactatcagaagcatctcttattgggacacctgttttacaagttgtctctattgatgcagactcagaaaacaataaaatggtacattatcagattgtccaggatacctacaatagcacagattattttcacatagatagctcaagtggcttaatcctgacagcacgaatgctggaccatgagttagtacaacactgcactttgaaagtcagatcaatagatagtggcttcccatcactgagcagtgaggttctcgttcatatctacatctctgatgtaaatgacaaccctccagtttttaatcagctcatttatgagtcatatgtgagtgaattagccccccggggccattttgtaacctgtgtacaagcctctgatgcagacagctctgattttgaccggttggaatatagcattttatctgggaatgaccggacgagctttctgatggacagcaagagtggagttatcacattgtccaaccatcggaagcagcggatggagcctctgtacagtctcaatgtgtctgtctctgatgggttgttcaccagcactgcacaggtgcatattagggtacttggggctaacttgtacagccctgccttttcacaaagcacatacgtagctgaggtgagagagaacgtggctgcaggaacaaaggtaattcatgttcgagccacagatggtgatccagggacttatgggcagatcagctatgccatcatcaatgactttgccaaggatcgattcctcatagacagcaatgggcaggtcatcaccacagaaaggctagaccgggaaaaccctctagaaggggatgttagtatttttgtgagggcccttgatggtggagggagaacaactttctgcactgtgagagtgattgttgtggatgaaaatgacaatgctccccagttcatgacagtggaatatagagccagtgtcagggcagatgttggaaggggccacttggtcactcaagttcaagccatagatcccgatgatggagcaaattcaaggattacttattccctctatagcgaggcctctgtttcagtggccgacctcctggaaatcgatcctgacaatggctggatggtcacaaagggtaattttaaccagctgaaaaatacagtgctttcgttctttgtcaaagcagtagatgggggcatcccagtaaagcactccctcattcctgtctatatccacgtcttgccccctgaaacgttcttgccatcattcacccagtctcagtattcctttaccattgcagaagatacagccattgggagtacagtggacaccctgaggattttgcccagtcagaatgtctggttcagcacagttaatggggaacggccagaaaataacaaagggggcatattcgtcatagaacaggaaacaggcactattaagcttgacaaacgccttgaccgtgaaaccagcccagctttccactttaaagtagcagccactatacccctggacaaagtagacattgtgtttactgtggatgtagatatcaaggtattggatttgaatgacaacaagccagtctttgaaacttcaagctatgacaccattataatggaagggatgcctgttggcaccaaactcacacaagtgagagctattgatatggactggggagccaatggacaagtcacttactccctccactcggattcccagcccgaaaaggtaatggaagcattcaatattgacagcaacacgggctggatcagtaccttgaaggacctagatcacgagacagaccccacattcaccttctctgtggtggcctctgaccttggagaggcattctctctttcctccacggccttggtctctgtcagagtgacagatataaatgacaatgcaccagtcttcgcgcaggaagtgtaccgagggaatgtgaaggagagcgacccaccgggcgaggtggtagccgtcctcagcacctgggacagagacacatccgacgttaatcgccaagtgagctaccatattacaggaggaaaccctcgaggaaggtttgctctgggcctggtgcaaagtgagtggaaggtctatgtgaagaggcctctagacagagaagaacaggacatttactttctcaatatcactgccactgatgggctttttgtcacacaggccatggtggaagtgagcgtcagtgatgtgaatgacaatagcccagtgtgtgatcaggttgcatatacagcattacttcctgaagacattccatcaaataaaatcatcctgaaagtcagtgcaaaggatgctgatattggatccaatggatatatacgatactcactctatggatctggaaacagtgaattttttctagatccagaaagtggcgagttaaaaaccttggctctgttggaccgggagaggatccccgtgtacagcctgatggccaaggccactgacgggggtggcaggttctgccagtccaacatccacctaatcctggaggatgtgaatgataacccccctgtgttttcttctgaccactacaacacctgtgtctatgagaacacagccaccaaggctctgttgaccagagttcaagccgtggaccccgacattggcatcaataggaaggtcgtgtactccctggcagactcagctggtggggtcttctccattgacagctcatctggcatcatcatcctggagcagccactggaccgtgagcagcagtcttcgtacaacatcagcgtgcgggccactgaccagagtcctggacagtccctgtcctctctcactactgtcaccatcaccgttctggacattaatgacaacccccctgtgtttgagaggagggactacctggtgacggtgcctgaggacacctcccctggcacccaagtccttgctgtttttgccaccagcaaagatattggcacaaatgctgagatcacttatctcatccggtctgggaacgaacaagggaaatttaagatcaaccccaagacagggggtatttctgtctctgaagtcctggactatgaattatgcaaaaggttttacctggtagtggaagccaaagatgggggcaccccagctctcagcgctgtggccactgtcaacatcaacctcacagatgttaatgacaaccctcccaagttcagccaagacgtctacagtgcggttatcagtgaagacgccttggtgggagactctgtcattttgctaatagcagaagatgtagacagccagcccaacggacagattcatttttccattgtgaatggagatcgggacaatgaatttactgtagatcctgtcttgggacttgtgaaagttaagaagaaattggaccgggaacgggtgtctggatactctctgcttgtccaggccgtagacagtggcattcctgcaatgtcatcaactgcaactgtcaacattgatatttctgatgtgaatgacaacagcccggtgtttacacctgccaactatactgctgtgattcaggaaaataagccagtgggcaccagcatcttgcagctggtggtgacagacagagactcctttcacaatgggcctcccttttcattctctattttgtcgggaaatgaagaggaggagtttgtgttggaccctcatgggatcttgcggtcggctgtggtcttccagcacacagagtctctggaatacgtgttgtgtgtccaggcaaaggattcaggcaaaccccagcaagtttctcacacttacatccgcgtgcgagtcattgaggaaagcacccacaagcccacagccattcccctggaaattttcattgtcaccatggaggatgactttcctggtggggtcattgggaagattcatgccacagatcaagacatgtatgatgtgctcacatttgccctgaaatcggagcagaaaagcttatttaaagtgaacagtcacgatgggaaaatcatcgccctgggaggcctggacagcggcaagtatgtcctgaatgtgtctgtgagtgatggtcgcttccaggtacccattgatgtggtcgtgcatgtggagcagttggtgcatgagatgctgcagaacactgtcaccatccgctttgaaaatgtgtcccctgaggacttcgtggggctgcacatgcatgggttccggcgcaccctgcggaatgcagtcctcacccagaagcaggacagcctgcgcatcatcagcatccagcccgtggcaggcaccaaccaactggacatgctgtttgcggtggagatgcacagcagcgagttctacaagccagcctacctgatccagaagctgtccaatgctagaagacacctggagaatatc

SEQ ID NO: 22132 - protein, 3502 aa, Homo sapiens
MGSYWLTVYATDRGVVPLYSTIEVYIEVEDVNDNAPLTSEPIYYPVVMENSPKDVSVIQIQAEDPDSSSNEKLTYRITSGNPQNFFAINIKTGLITTTSRKLDREQQAEHFLEVTVTDGGPSPKQSTIWVVVQVLDENDNKPQFPEKVYQIKLPERDRKKRGEPIYRAFAFDRDEGPNAEISYSIVDGNDDGKFFIDPKTGMVSSRKQFTAGSYDILTIKAVDNGRPQKSSTARLHIEWIKKPPPSPIPLTFDEPFYNFTVMESDRVTEIVGVVSVQPANTPLWFDIVGGKHAREMFYILQTACGQNCSTEGGNFDSAFDAEKGVGTIVIAKPLDAEQRSIYNMSVEVTDGTNVAVTQVFIKVLDNNDNGPEFSQPNYDVTISEDVLPDTEILQIEATDRDEKHKLSYTVHSSIDSISMRKFRIDPSTGVLYTAERLDHEAQDKHILNIMVRDQEFPYRRNLARVIVNVEDANDHSPYFTNPLYEASVFESAALGSAVLQVTALDKDKGENAELIYTIEAGNTGNMFKIEPVLGIITICKEPDMTTMGQFVLSIKVTDQGSPPMSATAIVRISVTMSDNSHPKFIHKDYQAEVNENVDIGTSVILISAISQSTLIYEVKDGDINGIFTINPYSGVITTQKALDYERTSSYQLIIQATNMAGMASNATVNIQIVDENDNAPVFLFSQYSGSLSEAAPINSIVRSLDNSPLVIRATDADSNRNALLVYQIVESTAKKFFTVDSSTGAIRTIANLDHETIAHFHFHVHVRDSGSPQLTAESPVEVNIEVTDVNDNPPVFTQAVFETILLLPTYVGVEVLKVSATDPDSEVPPELTYSLMEGSLDHFLIDSNSGVLTIKNNNLSKDHYMLIVKVSDGKFYSTSMVTIMVKEAMDSGLHFTQSFYSTSISENNTNITKVAIVNAVGNRLNEPLKYSILNPGNKFKIKSTSGVIQTTGVPFDREEQELYELVVEASRELDHLRVARVVVRVNIEDINDNSPVFVGLPYYAAVQVDAEPGTLIYQVTAIDKDKGPNGEVTYVLQDDYGHFEINPNSGNVILKEAFNSDLSNIEYGVTILAKDGGKPSLSTSVELPITIVNKAMPVFDKPFYTASVNEDIRMNTPILSINATSPEGQGIIYIIIDGDPFKQFNIDFDTGVLKVVSPLDYEVTSAYKLTIRASDALTGARAEVTVDLLVNDVNDNPPIFDQPTYNTTLSEASLIGTPVLQVVSIDADSENNKMVHYQIVQDTYNSTDYFHIDSSSGLILTARMLDHELVQHCTLKVRSIDSGFPSLSSEVLVHIYISDVNDNPPVFNQLIYESYVSELAPRGHFVTCVQASDADSSDFDRLEYSILSGNDRTSFLMDSKSGVITLSNHRKQRMEPLYSLNVSVSDGLFTSTAQVHIRVLGANLYSPAFSQSTYVAEVRENVAAGTKVIHVRATDGDPGTYGQISYAIINDFAKDRFLIDSNGQVITTERLDRENPLEGDVSIFVRALDGGGRTTFCTVRVIVVDENDNAPQFMTVEYRASVRADVGRGHLVTQVQAIDPDDGANSRITYSLYSEASVSVADLLEIDPDNGWMVTKGNFNQLKNTVLSFFVKAVDGGIPVKHSLIPVYIHVLPPETFLPSFTQSQYSFTIAEDTAIGSTVDTLRILPSQNVWFSTVNGERPENNKGGIFVIEQETGTIKLDKRLDRETSPAFHFKVAATIPLDKVDIVFTVDVDIKVLDLNDNKPVFETSSYDTIIMEGMPVGTKLTQVRAIDMDWGANGQVTYSLHSDSQPEKVMEAFNIDSNTGWISTLKDLDHETDPTFTFSVVASDLGEAFSLSSTALVSVRVTDINDNAPVFAQEVYRGNVKESDPPGEVVAVLSTWDRDTSDVNRQVSYHITGGNPRGRFALGLVQSEWKVYVKRPLDREEQDIYFLNITATDGLFVTQAMVEVSVSDVNDNSPVCDQVAYTALLPEDIPSNKIILKVSAKDADIGSNGYIRYSLYGSGNSEFFLDPESGELKTLALLDRERIPVYSLMAKATDGGGRFCQSNIHLILEDVNDNPPVFSSDHYNTCVYENTATKALLTRVQAVDPDIGINRKVVYSLADSAGGVFSIDSSSGIIILEQPLDREQQSSYNISVRATDQSPGQSLSSLTTVTITVLDINDNPPVFERRDYLVTVPEDTSPGTQVLAVFATSKDIGTNAEITYLIRSGNEQGKFKINPKTGGISVSEVLDYELCKRFYLVVEAKDGGTPALSAVATVNINLTDVNDNPPKFSQDVYSAVISEDALVGDSVILLIAEDVDSQPNGQIHFSIVNGDRDNEFTVDPVLGLVKVKKKLDRERVSGYSLLVQAVDSGIPAMSSTATVNIDISDVNDNSPVFTPANYTAVIQENKPVGTSILQLVVTDRDSFHNGPPFSFSILSGNEEEEFVLDPHGILRSAVVFQHTESLEYVLCVQAKDSGKPQQVSHTYIRVRVIEESTHKPTAIPLEIFIVTMEDDFPGGVIGKIHATDQDMYDVLTFALKSEQKSLFKVNSHDGKIIALGGLDSGKYVLNVSVSDGRFQVPIDVVVHVEQLVHEMLQNTVTIRFENVSPEDFVGLHMHGFRRTLRNAVLTQKQDSLRIISIQPVAGTNQLDMLFAVEMHSSEFYKPAYLIQKLSNARRHLENIMRISAILEKNCSGLDCQEQHCEQGLSLDSHALMTYSTARISFVCPRFYRNVRCTCNGGLCPGSNDPCVEKPCPGDMQCVSYEASRRPFLCQCPPGKLGECSGHTSLSFAGNSYIKYRLSENSKEEDFKLALRLRTLQSNGIIMYTRANPCIILKIVDGKLWFQLDCGSGPGILGISGRAVNDGSWHSVFLELNRNFTSLSLDDSYVERRRAPLYFQTLSTESSIYFGALVQADNIRSLTDTRVTQVLSGFQGCLDSVILNNNELPLQNKRSSFAEVVGLTELKLGCVLYPDACKRSPCQHGGSCTGLPSGGYQCTCLSQFTGRNCESEITACFPNPCRNGGSCDPIGNTFICNCKAGLTGVTCEEDINECEREECENGGSCVNVFGSFLCNCTPGYVGQYCGLRPVVVPNIQAGHSYVGKEELIGIAVVLFVIFILVVLFIVFRKKVFRKNYSRNNITLVQDPATAALLNKSNGIPFRNLRGSGDGRNVYQEVGPPQVPVRPMAYTPCFQSDSRSNLDKIVDGLGGEHQEMTTFHPESPRILTARRGVVVCSVAPNLPAVSPCRSDCDSIRKNGWDAGTENKGVDDPGEVTCFAGSNKGSNSEVQSLSSFQSDSGDDNASIVTVIQLVNNVVDTIENEVSVMDQGQNYNRAYHWDTSDWMPGARLSDIEEVPNYENQDGGSAHQGSTRELESDYYLGGYDIDSEYPPPHEEEFLSQDQLPPPLPEDFPDQYEALPPSQPVSLASTLSPDCRRRPQFHPSQYLPPHPFPNETDLVGPPASCEFSTFAVSMNQGTEPTGPADSVSLSLHNSRGTSSSDVSANCGFDDSEVAMSDYESVGELSLASLHIPFVETQHQTQV

SEQ ID NO: 22133 - DNA, 775 bp, Homo sapiens
atcagtggaaaggccacatgaggacaaagcagccatctagcagccagaaggagagccctcaccagaaactgaacactgctggaatctttatcttgaactctccagcctctagaatgatgagaaaataaaggccaagtgcacacagagcacctcactggaagaatctgagtcacctcatccttctgaaacaattctggaagtctaccaccatctgcacagctttcgtggcagcaaattaatccagggaaaaataagcaaataagactggctcagggaaacacagcaagtaagtgaaaaatccttgaattaaacaatttaagaagacattgagtgtgggaacttagaagagtgggtaaagtaaaaagaagaaagaaaacctcaaatacaaaatcaatgtaaacagacatcttgctcaggtggcttaccctgttgttacttatctagtatttaaatgtccaagtgtctgtttctttggagaaaaaactttatagaaagtacctccttcatagcgctgtttataagaaaatgcgcatctgacaggaagtctattttttgaggactgtgatctgcagagaaaacacttagaaggacacaatcaaagtcaaaagcctatacattttgtggataagtgatccaaacctaagacagttacaaagaaaatggctctcagctatttacagccagacttcaggccttctgtggatttctttggcattacctcactaagttaatatatcatcacttgacatttaataataaatacctgatgaaatta

SEQ ID NO: 22134 - protein, 34 aa, Homo sapiens
MSKCLFLWRKNFIESTSFIALFIRKCASDRKSIF

SEQ ID NO: 22135 - DNA, 4356 bp, Homo sapiens
tgctgcgagaggcagggcaagctggaggattccctctgaatgattaagaactccgcaattcgcctctgccacaggctgcaaaggacccgaggaaccgctctctctgaactgtgctgatgggcaggaggatgggagacaggaattgagagtcacagaggaaggacagtggagtctggcatcttattggtgtctttaaaggattgccatttaatgccattcaagatctactaagcatcatttttgcatgactactgcaaaaggattactttacagataccagttcctttgtcaagagcatactttggaccctgttttcagaaagcagggcactctttaatgaagaaacaccagagctgttaaacacattgagacacagaagattctagtgactgaggatggcttcctcttggaaactaatgctgtttctgtcagtcaccatgtgtctttcagagtattcaaaatctcttcctggtctctccacttcatatgctgctttgttaagaattaagaagagttcatcttcatctctctttggttccaaaaccagaccacgatacagcagcccttcattaggaacactgagtgcttcttcacccagctggctaggggcagctcagaattattattcccccatcaatctttatcattcctcagatgccttcaaacaagatgaaagtgtggactatgggccagtttttgtgcaagaaccagatgatattatttttccaactgattctgatgaaaagaaggtagcattgaattgtgaagttcgtggcaatccagttcccagttacagatggcttcgaaatggaacagaaatagatctggaaagtgattatcgctacagtttgatagatggcaccttcattataagcaatccaagtgaagcaaaggattctggtcattatcagtgtttagcaaccaacactgtggggagtattcttagtagagaagctacactgcagtttgcctatctgggaaattttagtggccggacaagaagtgcagtctctgtgagggaaggccagggtgtcgttctgatgtgctctcctccgccacattcaccagagatcatctatagctgggtatttaatgagttcccttcctttgtggcggaagacagccggcggttcatctcccaggagacaggcaacctttatatttctaaagtccaaacatcagatgttggcagctatatttgtctggtgaaaaacacagtgacgaatgctagagtccttagtcctccaacgccactcactctgcgtaatgatggtgtgatgggagaatatgagccgaaaattgaggtccattttcctttcacggttacagctgctaaaggaacaactgttaagatggaatgctttgcacttggcaaccccgttccaacaatcacatggatgaaggttaatggttatattcctagtaaggcacgtctgcggaaatctcaggcggtgctggaaataccgaatgtacagctggatgatgcaggcatttatgagtgcagagctgaaaactcacgtggaaaaaattcctttcgtggacaattacaagtatacacctacccacactgggtagaaaaactgaatgatactcagttagacagtgggagccctctccgatgggaatgtaaggctactggaaaacccagacccacgtatcgttggctgaagaatggagtacccctctcacctcagagtagggttgagatggttaatggagtattgatgatccacaatgtgaatcaatcagatgctggaatgtatcagtgtttggctgaaaataagtatggagccatttacgctagtgctgagctgaagattctagcttcagctcccacttttgcactgaatcaactgaagaaaacaataattgttaccaaagaccaagaagttgtcatagagtgcaaaccccaaggctctccaaaaccaaccatctcttggaagaaaggagacagagcagttagagaaaacaaaagaatagctattcttccagacgggagtctacggatcctaaatgcttccaaatcagacgagggaaagtacgtttgccgaggggaaaacgtctttggttctgctgaaattatagcttcgctatctgtaaaagaacctacaaggatagaacttactcctaaaagaacagaattgacagtgggagaaagcattgtccttaattgcaaagcaattcacgatgctagtttggatgtcactttctactggactctgaaaggacagcctattgatttcgaggaagagggtggacattttgaaagcatcagggcccaagcatcctctgcagatttaatgatcaggaacatccttctgatgcatgctgggagatatggctgcagggtacagaccacagcagacagtgtgtcagatgaggcagaacttcttgttaggggacccccaggcccacctgggatagtaattgttgaggaaataaccgaaagtacggccacactgtcctggagcccagcagctgacaaccacagcccaatctcctcctacaaccttcaagctcgcagcccattttccctgggctggcaaacagtaaagacagtcccagaaatcataacaggggacatggagtcagccatggctgtggacctaaatccctgggtggaatatgaatttcgagtggtagccaccaaccctattgggacaggagatccaagcaccccatctcgaatgatccgcacaaatgaagcagttccgaagacagcacccaccaatgtaagcggaagaagtggaagaaggcatgagttagtcattgcctgggagccagtatctgaagagtttcagaatggggaaggcttcggctatattgtggctttcagacccaatggaacacgtggctggaaggaaaaaatggtgacatcctctgaagcttccaaattcatttatcgagatgaaagtgtccctcctcttactccctttgaagtgaaagttggcgtttataacaataaaggagatgggccttttagtcaaattgtggtcatctgttcagctgaaggagaacccagtgctgctcccacagatgtcaaggcgacaagtgtgtctgtgtcagagattcttgttgcatggaaacacattaaagagagtctaggaagaccacagggatttgaggtatgaacagaatgattgaaaataagccttattgtttcttctgacatcacattctcctaaagagaggttttggtgacacctcagaatttcaacagaatttcttagaaattttgctctatgttaaagaaactaagaaatactattttactgggatgtgttatgttgctcattaactggtttatttttcagtacagtagcttccgtagcactatgcaaagatgtttttaaaagatgaaatagagttttagacaaaagcaggagctacaggtagatatttaattgtatccaatttactggtcattttaaaagtttttgtgtcttcctttctaataatttaatgtataaatacaagttttccttttgtactttattggtatctcttaccctcagtgctgaattatcaaattttgcttggaatttaatgatctgtattgtatctatgtattcagatagtttttttggtcccttaaatgttgctatttttaaacatagttattccagccttataatggtgaacatttcatatcaaatgaataacatcaatgaaattttagcctccgcagagaatagcagattgtgagtagtctgtgaacatgaatattttatgataacaaggtttggcttctcacacagctcttgttcttgttcttgccttgcttggccagtcatggagaggaattagggggataatgtctaaaagaaaaaaagaattagcatctgacccaagactttagttgcatttaaaaaaatttattcttacttttcctctgcttcagttcccattaagagaaaatcatcttgtgtcttgaacaatgatcaagtataggacttgtatactaacatggtttccaggctgaaacatatttttaattctatttgagttttcaaataatgcccaacaattatttgattaacatacagctggcattaaataatgatttctatgataaaaaaatttatacaatctttctaagagttacagcaagaacaatttatgggaaaccattacctacttatacaatatcatggacttatttctacaatcttgcttcaattaattatttggaatgataatttagtatctcattatgattgcatgtttaatgtgatgaatatttctgtttctcccaatccatgcttcagggaccatgtttgttcatcattaaatctcagcaaatgataatatatatatttggcccataactgaccacaataaatatgttgaatgaat

SEQ ID NO: 22136 - protein, 911 aa, Homo sapiens
MASSWKLMLFLSVTMCLSEYSKSLPGLSTSYAALLRIKKSSSSSLFGSKTRPRYSSPSLGTLSASSPSWLGAAQNYYSPINLYHSSDAFKQDESVDYGPVFVQEPDDIIFPTDSDEKKVALNCEVRGNPVPSYRWLRNGTEIDLESDYRYSLIDGTFIISNPSEAKDSGHYQCLATNTVGSILSREATLQFAYLGNFSGRTRSAVSVREGQGVVLMCSPPPHSPEIIYSWVFNEFPSFVAEDSRRFISQETGNLYISKVQTSDVGSYICLVKNTVTNARVLSPPTPLTLRNDGVMGEYEPKIEVHFPFTVTAAKGTTVKMECFALGNPVPTITWMKVNGYIPSKARLRKSQAVLEIPNVQLDDAGIYECRAENSRGKNSFRGQLQVYTYPHWVEKLNDTQLDSGSPLRWECKATGKPRPTYRWLKNGVPLSPQSRVEMVNGVLMIHNVNQSDAGMYQCLAENKYGAIYASAELKILASAPTFALNQLKKTIIVTKDQEVVIECKPQGSPKPTISWKKGDRAVRENKRIAILPDGSLRILNASKSDEGKYVCRGENVFGSAEIIASLSVKEPTRIELTPKRTELTVGESIVLNCKAIHDASLDVTFYWTLKGQPIDFEEEGGHFESIRAQASSADLMIRNILLMHAGRYGCRVQTTADSVSDEAELLVRGPPGPPGIVIVEEITESTATLSWSPAADNHSPISSYNLQARSPFSLGWQTVKTVPEIITGDMESAMAVDLNPWVEYEFRVVATNPIGTGDPSTPSRMIRTNEAVPKTAPTNVSGRSGRRHELVIAWEPVSEEFQNGEGFGYIVAFRPNGTRGWKEKMVTSSEASKFIYRDESVPPLTPFEVKVGVYNNKGDGPFSQIVVICSAEGEPSAAPTDVKATSVSVSEILVAWKHIKESLGRPQGFEV

SEQ ID NO: 22137 - DNA, 5398 bp, Homo sapiens
tgctgcgagaggcagggcaagctggaggattccctctgaatgattaagaactccgcaattcgcctctgccacaggctgcaaaggacccgaggaaccgctctctctgaactgtgctgatgggcaggaggatgggagacaggaattgagagtcacagaggaaggacagtggagtctggcatcttattggtgtctttaaaggattgccatttaatgccattcaagatctactaagcatcatttttgcatgactactgcaaaaggattactttacagataccagttcctttgtcaagagcatactttggaccctgttttcagaaagcagggcactctttaatgaagaaacaccagagctgttaaacacattgagacacagaagattctagtgactgaggatggcttcctcttggaaactaatgctgtttctgtcagtcaccatgtgtctttcagagtattcaaaatctcttcctggtctctccacttcatatgctgctttgttaagaattaagaagagttcatcttcatctctctttggttccaaaaccagaccacgatacagcagcccttcattaggaacactgagtgcttcttcacccagctggctaggggcagctcagaattattattcccccatcaatctttatcattcctcagatgccttcaaacaagatgaaagtgtggactatgggccagtttttgtgcaagaaccagatgatattatttttccaactgattctgatgaaaagaaggtagcattgaattgtgaagttcgtggcaatccagttcccagttacagatggcttcgaaatggaacagaaatagatctggaaagtgattatcgctacagtttgatagatggcaccttcattataagcaatccaagtgaagcaaaggattctggtcattatcagtgtttagcaaccaacactgtggggagtattcttagtagagaagctacactgcagtttgcctatctgggaaattttagtggccggacaagaagtgcagtctctgtgagggaaggccagggtgtcgttctgatgtgctctcctccgccacattcaccagagatcatctatagctgggtatttaatgagttcccttcctttgtggcggaagacagccggcggttcatctcccaggagacaggcaacctttatatttctaaagtccaaacatcagatgttggcagctatatttgtctggtgaaaaacacagtgacgaatgctagagtccttagtcctccaacgccactcactctgcgtaatgatggtgtgatgggagaatatgagccgaaaattgaggtccattttcctttcacggttacagctgctaaaggaacaactgttaagatggaatgctttgcacttggcaaccccgttccaacaatcacatggatgaaggttaatggttatattcctagtaaggcacgtctgcggaaatctcaggcggtgctggaaataccgaatgtacagctggatgatgcaggcatttatgagtgcagagctgaaaactcacgtggaaaaaattcctttcgtggacaattacaagtatacacctacccacactgggtagaaaaactgaatgatactcagttagacagtgggagccctctccgatgggaatgtaaggctactggaaaacccagacccacgtatcgttggctgaagaatggagtacccctctcacctcagagtagggttgagatggttaatggagtattgatgatccacaatgtgaatcaatcagatgctggaatgtatcagtgtttggctgaaaataagtatggagccatttacgctagtgctgagctgaagattctagcttcagctcccacttttgcactgaatcaactgaagaaaacaataattgttaccaaagaccaagaagttgtcatagagtgcaaaccccaaggctctccaaaaccaaccatctcttggaagaaaggagacagagcagttagagaaaacaaaagaatagctattcttccagacgggagtctacggatcctaaatgcttccaaatcagacgagggaaagtacgtttgccgaggggaaaacgtctttggttctgctgaaattatagcttcgctatctgtaaaagaacctacaaggatagaacttactcctaaaagaacagaattgacagtgggagaaagcattgtccttaattgcaaagcaattcacgatgctagtttggatgtcactttctactggactctgaaaggacagcctattgatttcgaggaagagggtggacattttgaaagcatcagggcccaagcatcctctgcagatttaatgatcaggaacatccttctgatgcatgctgggagatatggctgcagggtacagaccacagcagacagtgtgtcagatgaggcagaacttcttgttaggggacccccaggcccacctgggatagtaattgttgaggaaataaccgaaagtacggccacactgtcctggagcccagcagctgacaaccacagcccaatctcctcctacaaccttcaagctcgcagcccattttccctgggctggcaaacagtaaagacagtcccagaaatcataacaggggacatggagtcagccatggctgtggacctaaatccctgggtggaatatgaatttcgagtggtagccaccaaccctattgggacaggagatccaagcaccccatctcgaatgatccgcacaaatgaagcagttccgaagacagcacccaccaatgtaagcggaagaagtggaagaaggcatgagttagtcattgcctgggagccagtatctgaagagtttcagaatggggaaggcttcggctatattgtggctttcagacccaatggaacacgtggctggaaggaaaaaatggtgacatcctctgaagcttccaaattcatttatcgagatgaaagtgtccctcctcttactccctttgaagtgaaagttggcgtttataacaataaaggagatgggccttttagtcaaattgtggtcatctgttcagctgaaggagaacccagtgctgctcccacagatgtcaaggcgacaagtgtgtctgtgtcagagattcttgttgcatggaaacacattaaagagagtctaggaagaccacagggatttgaggttggttactggaaagacatggaacaggaagatacagcagaaacagtcaaaactagagggaatgagtctttcgtcatcctaacaggattagaaggaaatacgttatatcacttcacagtgagggcttacaatggagctggatatgggccacctagcagtgaagtgagtgcaaccaccaagaaatcccctcctagtcaagcacctagcaacctcaggtgggagcagcaaggctctcaggtttctctgggctgggaacccgtcataccattagccaacgaatctgaagttgtgggttacaaggttttttataggcaagagggtcacagcaacagccaagttattgaaacacagaaacttcaagcagtagtaccactcccagatgctggagtctatattattgaagttcgagcatatagtgaaggaggagatggaacagctagttctcaaattagggtaccatcatattcaggtggaaaaatcacaagtgcacagtcgacccttcactctctctccacatcttcgtcatcagtcaccttgctcttggcattgatgattccttcaacttcctggtgaaaactgctgacttaatttgcttttgtttgctttagcttggtaacagcggtgaatagagtgtagtgtaagtggagaaccaggatcctgagatgagcttgagctttaaaaacttgggactatacatggtgaacttacaggaggttaggggggaaatattacttatccatcaggtttctctttggtttttgtaaacggagaggacagttcttagtccagtaaaaatatgcagattgtatgtaatgaatttttgtaaacaaaggtaatttctgtcaaatgtattctttacttttttaatatgttgggattttattttatatctgatgactccgagtgtgtgccatccatttgttaagtaactggcctttagcagatctgtttcaaaaacaaatacaaaaatgagaatgaaaagtttgcttaagactaagtccagtgtttttcattttccctttggctgaatatttcaattgacaaaccagcaggacatatgaaaaatgcttcagtgatgtggtccattataagataagtacacaaaaattttcttgaaaaatattgtatgattgcatagtgaaatagcaagatttgtcaatatgctattctatatgcacccctagagcaagtcattagggtagggaataagccatttacattagtgcaagatagaaagcgagtccagatgaatttcagtgctatagtttttcataaagtactatgttatctagcagcaaatataataaatatttatttttaataacaaaagatggtttaacatcaccaaaaaatatgatcactaaaaactgcagacatgctggcatgggtgctaacttaaaaatgagatgaatatgggacagagcgtttccatttctttacctactgccaaaacagatgttgaattaggtccaaggttttcttctaattgcaaaattttgcaaaaattttaagggcaatgaaaatttgttgtgcaaataattatgcatagtctgtagattaaaatggttcaagtataacaaataagttttgatttttaaaaacagttccatgcatcacataccactgataaaatcaactagtaaaataaagacagtctttcttggataaattgaatttttaattaagctgtggaaacatggcatcagtacagggattcagctagtctagccagctatgcactgtttgattctgtggcttgggaagtaatccttatttgctatttcaaagagtcatcttgagcctgagagatcctagagagttgttggaaaatgagatgaaaattttctacttgatgatatcttaaagaagttctaacaagcacaagaatgtgccagagttggcatcatacccatgaagatgcgtgaaaggatagttattgcaaagtcatatgccagagaagagcctggagaaactatggttttataggcgatgttaacaagagaacaaaaattggttttataattttatataatttaaacttgttaactgtatttgcttcattaataacaagcaaaatgaaacaatatggagctcaaattgctagctctcaaggttaatccttgtagaatcagagaagtgattgaagtttctgttctgaacatcctgaaagaatagtttcagagccacagtaaaagtctgtatgtaggttacatattctctttggggaaatgatgtaagacaccctaaacaaacaagaaattagttaaaagact

SEQ ID NO: 22138 - protein, 1100 aa, Homo sapiens; identical to SEQ ID NO: 2863

SEQ ID NO: 22139 - DNA, 5120 bp, Homo sapiens
aattcgcctctgccacaggctgcaaaggacccgaggaaccgctctctctgaactgtgctgatgggcaggaggatgggagacaggaattgagagtcacagaggaaggacagtggagtctggcatcttattggtgtctttaaaggattgccatttaatgccattcaagatctactaagcatcatttttgcatgactactgcaaaaggattactttacagataccagttcctttgtcaagagcatactttggaccctgttttcagaaagcagggcactctttaatgaagaaacaccagagctgttaaacacattgagacacagaagattctagtgactgaggatggcttcctcttggaaactaatgctgtttctgtcagtcaccatgtgtctttcagaaagtgtggactatgggccagtttttgtgcaagaaccagatgatattatttttccaactgattctgatgaaaagaaggtagcattgaattgtgaagttcgtggcaatccagttcccagttacagatggcttcgaaatggaacagaaatagatctggaaagtgattatcgctacagtttgatagatggcaccttcattataagcaatccaagtgaagcaaaggattctggtcattatcagtgtttagcaaccaacactgtggggagtattcttagtagagaagctacactgcagtttgcctatctgggaaattttagtggccggacaagaagtgcagtctctgtgagggaaggccagggtgtcgttctgatgtgctctcctccgccacattcaccagagatcatctatagctgggtatttaatgagttcccttcctttgtggcggaagacagccggcggttcatctcccaggagacaggcaacctttatatttctaaagtccaaacatcagatgttggcagctatatttgtctggtgaaaaacacagtgacgaatgctagagtccttagtcctccaacgccactcactctgcgtaatgatggtgtgatgggagaatatgagccgaaaattgaggtccattttcctttcacggttacagctgctaaaggaacaactgttaagatggaatgctttgcacttggcaaccccgttccaacaatcacatggatgaaggttaatggttatattcctagtaaggcacgtctgcggaaatctcaggcggtgctggaaataccgaatgtacagctggatgatgcaggcatttatgagtgcagagctgaaaactcacgtggaaaaaattcctttcgtggacaattacaagtatacacctacccacactgggtagaaaaactgaatgatactcagttagacagtgggagccctctccgatgggaatgtaaggctactggaaaacccagacccacgtatcgttggctgaagaatggagtacccctctcacctcagagtagggttgagatggttaatggagtattgatgatccacaatgtgaatcaatcagatgctggaatgtatcagtgtttggctgaaaataagtatggagccatttacgctagtgctgagctgaagattctagcttcagctcccacttttgcactgaatcaactgaagaaaacaataattgttaccaaagaccaagaagttgtcatagagtgcaaaccccaaggctctccaaaaccaaccatctcttggaagaaaggagacagagcagttagagaaaacaaaagaatagctattcttccagacgggagtctacggatcctaaatgcttccaaatcagacgagggaaagtacgtttgccgaggggaaaacgtctttggttctgctgaaattatagcttcgctatctgtaaaagaacctacaaggatagaacttactcctaaaagaacagaattgacagtgggagaaagcattgtccttaattgcaaagcaattcacgatgctagtttggatgtcactttctactggactctgaaaggacagcctattgatttcgaggaagagggtggacattttgaaagcatcagggcccaagcatcctctgcagatttaatgatcaggaacatccttctgatgcatgctgggagatatggctgcagggtacagaccacagcagacagtgtgtcagatgaggcagaacttcttgttaggggacccccaggcccacctgggatagtaattgttgaggaaataaccgaaagtacggccacactgtcctggagcccagcagctgacaaccacagcccaatctcctcctacaaccttcaagctcgcagcccattttccctgggctggcaaacagtaaagacagtcccagaaatcataacaggggacatggagtcagccatggctgtggacctaaatccctgggtggaatatgaatttcgagtggtagccaccaaccctattgggacaggagatccaagcaccccatctcgaatgatccgcacaaatgaagcagttccgaagacagcacccaccaatgtaagcggaagaagtggaagaaggcatgagttagtcattgcctgggagccagtatctgaagagtttcagaatggggaaggcttcggctatattgtggctttcagacccaatggaacacgtggctggaaggaaaaaatggtgacatcctctgaagcttccaaattcatttatcgagatgaaagtgtccctcctcttactccctttgaagtgaaagttggcgtttataacaataaaggagatgggccttttagtcaaattgtggtcatctgttcagctgaaggagaacccagtgctgctcccacagatgtcaaggcgacaagtgtgtctgtgtcagagattcttgttgcatggaaacacattaaagagagtctaggaagaccacagggatttgaggttggttactggaaagacatggaacaggaagatacagcagaaacagtcaaaactagagggaatgagtctttcgtcatcctaacaggattagaaggaaatacgttatatcacttcacagtgagggcttacaatggagctggatatgggccacctagcagtgaagtgagtgcaaccaccaagaaatcccctcctagtcaagcacctagcaacctcaggtgggagcagcaaggctctcaggtttctctgggctgggaacccgtcataccattagccaacgaatctgaagttgtgggttacaaggttttttataggcaagagggtcacagcaacagccaagttattgaaacacagaaacttcaagcagtagtaccactcccagatgctggagtctatattattgaagttcgagcatatagtgaaggaggagatggaacagctagttctcaaattagggtaccatcatattcaggtggaaaaatcacaagtgcacagtcgacccttcactctctctccacatcttcgtcatcagtcaccttgctcttggcattgatgattccttcaacttcctggtgaaaactgctgacttaatttgcttttgtttgctttagcttggtaacagcggtgaatagagtgtagtgtaagtggagaaccaggatcctgagatgagcttgagctttaaaaacttgggactatacatggtgaacttacaggaggttaggggggaaatattacttatccatcaggtttctctttggtttttgtaaacggagaggacagttcttagtccagtaaaaatatgcagattgtatgtaatgaatttttgtaaacaaaggtaatttctgtcaaatgtattctttacttttttaatatgttgggattttattttatatctgatgactccgagtgtgtgccatccatttgttaagtaactggcctttagcagatctgtttcaaaaacaaatacaaaaatgagaatgaaaagtttgcttaagactaagtccagtgtttttcattttccctttggctgaatatttcaattgacaaaccagcaggacatatgaaaaatgcttcagtgatgtggtccattataagataagtacacaaaaattttcttgaaaaatattgtatgattgcatagtgaaatagcaagatttgtcaatatgctattctatatgcacccctagagcaagtcattagggtagggaataagccatttacattagtgcaagatagaaagcgagtccagatgaatttcagtgctatagtttttcataaagtactatgttatctagcagcaaatataataaatatttatttttaataacaaaagatggtttaacatcaccaaaaaatatgatcactaaaaactgcagacatgctggcatgggtgctaacttaaaaatgagatgaatatgggacagagcgtttccatttctttacctactgccaaaacagatgttgaattaggtccaaggttttcttctaattgcaaaattttgcaaaaattttaagggcaatgaaaatttgttgtgcaaataattatgcatagtctgtagattaaaatggttcaagtataacaaataagttttgatttttaaaaacagttccatgcatcacataccactgataaaatcaactagtaaaataaagacagtctttcttggataaattgaatttttaattaagctgtggaaacatggcatcagtacagggattcagctagtctagccagctatgcactgtttgattctgtggcttgggaagtaatccttatttgctatttcaaagagtcatcttgagcctgagagatcctagagagttgttggaaaatgagatgaaaattttctacttgatgatatcttaaagaagttctaacaagcacaagaatgtgccagagttggcatcatacccatgaagatgcgtgaaaggatagttattgcaaagtcatatgccagagaagagcctggagaaactatggttttataggcgatgttaacaagagaacaaaaattggttttataattttatataatttaaacttgttaactgtatttgcttcattaataacaagcaaaatgaaacaatatggagctcaaattgctagctctcaaggttaatccttgtagaatcagagaagtgattgaagtttctgttctgaacatcctgaaagaatagtttcagagccacagtaaaagtctgtatgtaggttacatattctctttggggaaatgatgtaagacaccctaaacaaacaagaaattagttaaaagact

SEQ ID NO: 22140 - protein, 1026 aa, Homo sapiens; identical to SEQ ID NO: 2865

SEQ ID NO: 22141 - DNA, 246 bp, Homo sapiens
gcactctttaatgaagaaacaccagagctgttaaacacattgagacacagaagattctagtgactgaggatggcttcctcttggaaactaatgctgtttctgtcagtcaccatgtgtctttcagcattactgtcttccctgctgatctcagttgtttctcttttatcttctcaatgtcattttcctcttgaacttataagccaactgaaggagatggaggtagggttgcaagatgaaataaaggac

SEQ ID NO: 22142 - protein, 58 aa, Homo sapiens
MASSWKLMLFLSVTMCLSALLSSLLISVVSLLSSQCHFPLELISQLKEMEVGLQDEIK

SEQ ID NO: 22143 - DNA, 1375 bp, Homo sapiens
atgttgatcaaacgcaaattattccattaaactcatatttgtaaattaaaatattctatatatgtgtgtgtatagagagagggaaagagagaggagaagtacttaaatgtgtgtgtatcctccttggagctattagtatgaggtttatatattttataatacagaaccattcttgcaacactattttagtattttttcagtttttgtttataattcatgacattttgagtctgccttcttcactattctccagataaaatctagaacagtcatccaataattaagccagaaagggagtatgaacaaacatgaagtaaagatgtttgtgagatgttcagaaaatcattggtaaagatgtttgaagataaaggattagactgcatttttttggaaactaatatgagcatgaagaaacagtatcacatggtttatgaatgtattcctcttcccaaggaagtgggtgacatggctcccatctattttaagaaagccataatggaatctgatgaagagtggtccatgaacaagaagttgatagatctctcttcaaaagatatcagaaagtctgtacccagagggttaccttacttctctgtggattttggccttcacggagggtttgcccatgtcattgaagatcagcacaaattccctcattactttggaaaggaaatcataggtgggatgctggatatagaaccaagactttggaggaaaggcatccgagaaagctttgaggatcagaggaaaaaagcactgcagtttgctcagtggtggaaaccatatgacttcaccaaaagtaaaaactattgaggtgtaccttccattttaaaatttttcttcagatcccgttcagttttatttccattgcatctaatgaagcaactgaccctcaggtcacaggcagagagagtcacagcagcagactgctctgggtcagtgacaactgtacatcaggagattgtgttgttttcttcttcacctgctcctatctatggacttcattttagtcaccatggagtaaaaacatatattcgatgatctgctcacattcctgctctctacctacttcttggtattccgaattgttcagttaatttagagaaggccttttctgaagggatatctaaaaagcataggaaatccttggttcagagggaagtgggtctgcttcatggttgttaagtctactgtctggcttcttttgcatttttaaaaataagacgatttaattttaatttcataggattttatagaaaagctcttaattttctactagcagtatatagtatcacttctattctttttgttaaaggaaaaggaaatgtccccaaagtattaaagaattaaatgatactgaaaatttgtatgattc

SEQ ID NO: 22144 - protein, 160 aa, Homo sapiens
MFRKSLVKMFEDKGLDCIFLETNMSMKKQYHMVYECIPLPKEVGDMAPIYFKKAIMESDEEWSMNKKLIDLSSKDIRKSVPRGLPYFSVDFGLHGGFAHVIEDQHKFPHYFGKEIIGGMLDIEPRLWRKGIRESFEDQRKKALQFAQWWKPYDFTKSKNY

SEQ ID NO: 22145 - DNA, 3270 bp, Homo sapiens
tcttgcggcttcttagctttacgatggcaacaagtatggcggctgctagtggtagatttgaaagtgcgaagagtatcgaagagcggaaagaacagacccggaatgccagggccgaggtgttgcgccaggctaaagccaattttgaaaaagaagaaaggcgtaaagaacttaagcgacttcggggtgaggatacatggatgctacctgatgtgaatgagagaattgaacagttctcacaggaacactctgtgaagaaaaagaagaaaaaagacaagcattcaaaaaaagcaaagaaagaaaagaaaaaaaagagcaagaaacagaaatatgaaaaaaacaatgagtcatctgatagctcatcaagctctgaagatgagtgggttgaggctgttccatcccagactcctgacaaggaaaaagcctggaaagtgaaagatgaaaagtcaggaaaagatgacacccaaattatcaagagggatgagtggatgactgttgattttatgtctgttaaaactgtgtcatcatcatcactcaaagctgaaaaggaaactatgaggaaaatagagcaagagaaaaaccaagcgcttgaacagtccaaactgatggaaagagaattgaatccgtactggaaggatggtgggacaggtcttccacctgaagactgtagtgtgtcatcgattactaaagtttcagtggtagaagatggtggattaagctggctaaggaaatcttatctaagaatgaaggaacaagctgagaaacaaagtagaaactttgaggacattgtagccgaaagatatgggtcaatggaaatatttcagtcaaaattagaagatgctgaaaaagctgcatccacgaaagaagattatagacgggaacggtggaggaaacccacatattcagataaagcacaaaattgtcaagaaagtagagaatcagacttagtaaaatatggtaacagttcaagggatagatatgctacaacagatactgcaaaaaatagcaataatgaaaaatttattggtgatgaaaaagataagagacctgggtctttagaaacgtgtagaagagaatctaacccaaggcaaaatcaagagttttcttttggcaatttgagagctaaattcttgagaccctctgatgatgaagaactgtcatttcacagcaagggcagaaaatttgaaccacttagttcatcttcagcattggtagctcagggctctttgtgtagtggttttagaaaacccaccaagaacagtgaagaaagattaacatcatggagtcgctctgatgggagaggagacaagaaacattcaaatcaaaagccatcggaaaccagtactgatgaacaccaacatgttccagaagacccaagagaaaaatcacaagatgaagtcttgagagatgaccctccaaaaaaagaacatctacgggatacaaagtctacatttgctggcagtccagagcgtgagtccattcacatcctgagtgttgatgagaagaacaagttgggagccaagattatcaaagcagagatgatggggaatatggaattagctgaacaacttaaagttcaacttgaaaaggcaaataaattcaaagaaactataacacagataccaaaaaaatctggggtagagaatgaagaccagcaagaagtaatccttgtcagaacagatcagtctggaagagtatggcctgtgaacacacccggaaaatctctggaatcacaaggaggaagaagaaagagacagatggtttcaacccatgaggaaagagaaagggtcagatactttcatgatgatgataatctaagcctaaatgatttagtcaaaaatgaaaagatgggaacagcagaaaatcaaaacaagctctttatgagaatggcatctaagtttatgggaaaaacagatggagactattacaccctggatgacatgtttgtctccaaagcagctgagagagaacgtcttggtgaagaggaagagaaccaaaggaaaaaagctattgctgagcatcggagtcttgctgcacaaatggaaaaatgtctgtattgttttgacagctctcaatttcccaagcatcttattgttgcaataggtgttaaggtttatttatgtttacccaacgtacggtctcttactgaggggcactgcctgatagtccctttgcagcaccatagagcagctactttgttggatgaagacatctgggaggagatccagatgttcagaaaatcattggtaaagatgtttgaagataaaggattagactgcatttttttggaaactaatatgagcatgaagaaacagtatcacatggtttatgaatgtattcctcttcccaaggaagtgggtgacatggctcccatctattttaagaaagccataatggaatctgatgaagagtggtccatgaacaagaagttgatagatctctcttcaaaagatatcagaaagtctgtacccagagggttaccttacttctctgtggattttggccttcacggagggtttgcccatgtcattgaagatcagcacaaattccctcattactttggaaaggaaatcataggtgggatgctggatatagaaccaagactttggaggaaaggcatccgagaaagctttgaggatcagaggaaaaaagcactgcagtttgctcagtggtggaaaccatatgacttcaccaaaagtaaaaactattgaggtgtaccttccattttaaaatttttcttcagatcccgttcagttttatttccattgcatctaatgaagcaactgaccctcaggtcacaggcagagagagtcacagcagcagactgctctgggtcagtgacaactgtacatcaggagattgtgttgttttcttcttcacctgctcctatctatggacttcattttagtcaccatggagtaaaaacatatattcgatgatctgctcacattcctgctctctacctacttcttggtattccgaattgttcagttaatttagagaaggccttttctgaagggatatctaaaaagcataggaaatccttggttcagagggaagtgggtctgcttcatggttgttaagtctactgtctggcttcttttgcatttttaaaaataagacgatttaattttaatttcataggattttatagaaaagctcttaattttctactagcagtatatagtatcacttctattctttttgttaaaggaaaaggaaatgtccccaaagtattaaagaattaaatgatactgaaaatttgtatgattc

SEQ ID NO: 22146 - protein, 894 aa, Homo sapiens
MATSMAAASGRFESAKSIEERKEQTRNARAEVLRQAKANFEKEERRKELKRLRGEDTWMLPDVNERIEQFSQEHSVKKKKKKDKHSKKAKKEKKKKSKKQKYEKNNESSDSSSSSEDEWVEAVPSQTPDKEKAWKVKDEKSGKDDTQIIKRDEWMTVDFMSVKTVSSSSLKAEKETMRKIEQEKNQALEQSKLMERELNPYWKDGGTGLPPEDCSVSSITKVSVVEDGGLSWLRKSYLRMKEQAEKQSRNFEDIVAERYGSMEIFQSKLEDAEKAASTKEDYRRERWRKPTYSDKAQNCQESRESDLVKYGNSSRDRYATTDTAKNSNNEKFIGDEKDKRPGSLETCRRESNPRQNQEFSFGNLRAKFLRPSDDEELSFHSKGRKFEPLSSSSALVAQGSLCSGFRKPTKNSEERLTSWSRSDGRGDKKHSNQKPSETSTDEHQHVPEDPREKSQDEVLRDDPPKKEHLRDTKSTFAGSPERESIHILSVDEKNKLGAKIIKAEMMGNMELAEQLKVQLEKANKFKETITQIPKKSGVENEDQQEVILVRTDQSGRVWPVNTPGKSLESQGGRRKRQMVSTHEERERVRYFHDDDNLSLNDLVKNEKMGTAENQNKLFMRMASKFMGKTDGDYYTLDDMFVSKAAERERLGEEEENQRKKAIAEHRSLAAQMEKCLYCFDSSQFPKHLIVAIGVKVYLCLPNVRSLTEGHCLIVPLQHHRAATLLDEDIWEEIQMFRKSLVKMFEDKGLDCIFLETNMSMKKQYHMVYECIPLPKEVGDMAPIYFKKAIMESDEEWSMNKKLIDLSSKDIRKSVPRGLPYFSVDFGLHGGFAHVIEDQHKFPHYFGKEIIGGMLDIEPRLWRKGIRESFEDQRKKALQFAQWWKPYDFTKSKNY

SEQ ID NO: 22147 - DNA, 3170 bp, Homo sapiens
gcggcttcttagctttacgatggcaacaagtatggcggctgctagtggtagatttgaaagtgcgaagagtatcgaagagcggaaagaacagacccggaatgccagggccgaggtgttgcgccaggctaaagccaattttgaaaaagaagaaaggcgtaaagaacttaagcgacttcggggtgaggatacatggatgctacctgatgtgaatgagagaattgaacagttctcacaggaacactctgtgaagaaaaagaagaaaaaagacaagcattcaaaaaaagcaaagaaagaaaagaaaaaaaagagcaagaaacagaaatatgaaaaaaacaatgagtcatctgatagctcatcaagctctgaagatgagtgggttgaggctgttccatcccagactcctgacaaggaaaaagcctggaaagtgaaagatgaaaagtcaggaaaagatgacacccaaattatcaagagggatgagtggatgactgttgattttatgtctgttaaaactgtgtcatcatcatcactcaaagctgaaaaggaaactatgaggaaaatagagcaagagaaaaaccaagcgcttgaacagtccaaactgatggaaagagaattgaatccgtactggaaggatggtgggacaggtcttccacctgaagactgtagtgtgtcatcgattactaaagtttcagtggtagaagatggtggattaagctggctaaggaaatcttatctaagaatgaaggaacaagctgagaaacaaagtagaaactttgaggacattgtagccgaaagatatgggtcaatggaaatatttcagtcaaaattagaagatgctgaaaaagctgcatccacgaaagaagattatagacgggaacggtggaggaaacccacatattcagataaagcacaaaattgtcaagaaagtagagaatcagacttagtaaaatatggtaacagttcaagggatagatatgctacaacagatactgcaaaaaatagcaataatgaaaaatttattggtgatgaaaaagataagagacctgggtctttagaaacgtgtagaagagaatctaacccaaggcaaaatcaagagttttcttttggcaatttgagagctaaattcttgagaccctctgatgatgaagaactgtcatttcacagcaagggcagaaaatttgaaccacttagttcatcttcagcattggtagctcagggctctttgtgtagtggttttagaaaacccaccaagaacagtgaagaaagattaacatcatggagtcgctctgatgggagaggagacaagaaacattcaaatcaaaagccatcggaaaccagtactgatgaacaccaacatgttccagaagacccaagagaaaaatcacaagatgaagtcttgagagatgaccctccaaaaaaagaacatctacgggatacaaagtctacatttgctggcagtccagagcgtgagtccattcacatcctgagtgttgatgagaagaacaagttgggagccaagattatcaaagcagagatgatggggaatatggaattagctgaacaacttaaagttcaacttgaaaaggcaaataaattcaaagaaactataacacagataccaaaaaaatctggggtagagaatgaagaccagcaagaagtaatccttgtcagaacagatcagtctggaagagtatggcctgtgaacacacccggaaaatctctggaatcacaaggaggaagaagaaagagacagatggtttcaacccatgaggaaagagaaagggtcagatactttcatgatgatgataatctaagcctaaatgatttagtcaaaaatgaaaagatgggaacagcagaaaatcaaaacaagctctttatgagaatggcatctaagtttatgggaaaaacagatggagactattacaccctggatgacatgtttgtctccaaagcagctgagagagaacgtcttggtgaagaggaagagaaccaaaggaaaaaagctattgctgagcatcggagtcttgctgcacaaatggaaaaatgtctgtattgttttgacagctctcaatttcccaagcatcttattgttgcaataggtgttaaggtttatttatgtttacccaacgtacggtctcttactgaggggcactgcctgatagtccctttgcagcaccatagagcagctactttgttggatgaagacatctgggaggagatccagatgttcagaaaatcattggtaaagatgtttgaagataaaggattagactgcatttttttggaaactaatatgagcatgaagaaacagtatcacatggtttatgaatgtattcctcttcccaaggaagtgggtgacatggctcccatctattttaagaaagccataatggaatctgatgaagagtggtccatgaacaagaagttgatagatctctcttcaaaagatatcagaaagtctgtacccagagggttaccttacttctctgtggattttggccttcacggagggtttgcccatgtcattgaagatcagcacaaattccctcattactttggaaaggaaatcataggtgggatgctggatatagaaccaagactttggaggaaaggcatccgagaaagctttgaggatcagaggaaaaaagcactgcagtttgctcagtggtggaaaccatatgacttcaccaaaagtaaaaactattgaggtgtaccttccattttaaaatttttcttcagatcccgttcagttttatttccattgcatctaatgaagcaactgaccctcaggtcacaggcagagagagtcacagcagcagactgctctgggtcagtgacaactgtacatcaggagatttcctgctctctacctacttcttggtattccgaattgttcagttaatttagagaaggccttttctgaagggatatctaaaaagcataggaaatccttggttcagagggaagtgggtctgcttcatggttgttaagtctactgtctggcttcttttgcatttttaaaaataagacgatttaattttaatttcataggattttatagaaaagctcttaattttctactagcagtatatagtatcacttctattctttttgttaaaggaaaaggaaatgtccccaaagtattaaagaattaaatgatactgaaaatttgt

SEQ ID NO: 22148 - protein, 894 aa, Homo sapiens; identical to SEQ ID NO: 22146

SEQ ID NO: 22149 - DNA, 3158 bp, Homo sapiens
caagattgtcatggattttaagcacccagatggcattgcagtgccagttatgttgcctcgtcggagtttgctggtgatgacaggagaatctagatacctttggacccatggaatcacgtgcagaaaatttgatactgttcaagcatctgagagtcttaaaagtggaattatcaccagtgatgttggagacttaactttaagcaagaggggactacgaacatcatttacatttaggaaagtgaggcaaacaccttgtaactgtagttacccgttggtctgtgatagccagaggaaagagactcccccctcatttccagagagtgataaagaagcctcacggctggagcaagagtacgtccatcaggtttatgaagagattgctgggcacttcagcagcacaagacataccccttggccgcacattgtggagtttttgaaggctttgccaagtggttcaatagtggctgatattggatgtggtaatggaaagtatcttggcatcaataaggagttatatatgattggttgtgatcgtagccaaaaccttgtggacatttgtagagagaggcaatttcaggcttttgtctgtgatgcattggcagtaccagtccgcagtgggtcttgtgatgcctgcatctccattgctgttattcatcattttgcaacagcagagcgtagagtggcagctctccaagaaattgttcgactcctgagaccaggtgggaaggcactcatttatgtctgggcaatggaacaagaatataataagcagaagtccaagtatcttagaggaaacagaaatagccaaggaaagaaagaggagatgaacagtgatacctcagtgcagaggtcacttgtggagcaaatgcgtgacatgggcagtcgagactcggcatcttctgtcccccgcattaatgactctcaggaaggaggatgtaattcaaggcaagtttctaattccaagctgcctgttcatgttaacaggacttctttttattctcaagatgtactggttccctggcaccttaagggaaatcctgataaaggcaaacctgttgagccatttggtcccataggatcccaggacccaagtcctgtgtttcatcgttactaccatgtgttccgtgagggagaactggaaggtgcctgcaggactgtgagtgatgtcagaattctgcaaagctactacgatcaaggaaactggtgtgtgattcttcaaaaggcctgattatttacctgaacacatcatatataaagaagaaatgctcacttaaaaaaaaagagagaataaattaattacccttttaattaaagagaaaacttgtgggaaagtaccaaaggaaagctgagaaaaatttggaagtagggattcattaggagacattcaaatgtctcctgttggctgacatcacagatgtggtgttggctcctcctacttccctaggagaggtggtttctaaaagtgattgaagcagtttgtgcagtgtttgtaattcttgggtaagagcccaggattttgaagataatagttttttagtaaagtgctactaaatgtagtaaatcatgtaggattttagggatgtaattatatgttaatacagaaaatagtcctggtcaatagaaaattgtctgaagttttacctatgatttttagctctgtaaaatcatagacaataaccattctatttccatgcctgactagcccagggctggacgtatagcgggtgtccaataacgtttagtcaatcagataatacccagaacttagtaggagtttcattcaaaaactattttttgaacccaaccatgtaccagttactattttaagtactgataatgaagcagtgaataagaaagagcaaagctcttgcccttatggtgcttacattctagacggggagacagacagcaggcaaatcaataaatagatactatgtgccagatagtgataaatgccatgaaaaacataaaatgagagacgattcaccttggagcaaaagattacttttaagtgactgaaataactactaatcctgactaatttattatcaagagttaattggtattccaaattcattgagcagggtgctaaaaacaacccaaatgtgctcctttaactcctttgtttaaatgacaaaagttagaatgtggtcactcagacctaactgtgcccttagagccaaagctgtggtgtcattattggttatttctagttgattcatagtttgtcccaatccaggttcaatcgggttatttttaagatctgtacaatattgcataatagtaacccagttaacttaccacttaggttagatttcctggaggaacaaaggtagaaattcaaccataggtcaaattatcacatagaaggaaaaggctttttttcaaagaaaaaattttttgaacactttactcccagtatgcattacttttgtagtagtaatgcttaagactgttttaaagaaaaattgctttctgtttaattaatgtttactgttattaatgctagtgatacttaatcttgaagcatcaagttttcagaaacctatagtgatcaataatgggtctcagatgagaggatgattatttttttcatggaatttcagtccaacatcctggtgtactggtccctctgggatgaatttataaggctcatgatataggaaaaggaatatagggctaaaaatagttttatttctgatataaattctggtacttgacaccaaagtttgaagtcaagtcatgccaataaattttaacatccaaatgaaatagatgattttctatgaagatgaaaaataccaaaattgactcaagaagggagagaaaatggaagatgttgaaaaatagcataggaattcagaactgggctctagaatcagatttcctgagagttgaattctagatctgccatttattagctgtgggattttgggcaaatttcttgactttctgtgcttcagttttcttagctgtaaaattggaagagttgttatgaaaattcactgaaagtatatttgtatacatcataggatagtgtaagaatatagtatggctttgagaaatgttcattattattactcccagaggagttttaggtattaagtgatgccaaatataatttgttaattgtataataaaaatctatattcttactg

SEQ ID NO: 22150 - protein, 405 aa, Homo sapiens
MDFKHPDGIAVPVMLPRRSLLVMTGESRYLWTHGITCRKFDTVQASESLKSGIITSDVGDLTLSKRGLRTSFTFRKVRQTPCNCSYPLVCDSQRKETPPSFPESDKEASRLEQEYVHQVYEEIAGHFSSTRHTPWPHIVEFLKALPSGSIVADIGCGNGKYLGINKELYMIGCDRSQNLVDICRERQFQAFVCDALAVPVRSGSCDACISIAVIHHFATAERRVAALQEIVRLLRPGGKALIYVWAMEQEYNKQKSKYLRGNRNSQGKKEEMNSDTSVQRSLVEQMRDMGSRDSASSVPRINDSQEGGCNSRQVSNSKLPVHVNRTSFYSQDVLVPWHLKGNPDKGKPVEPFGPIGSQDPSPVFHRYYHVFREGELEGACRTVSDVRILQSYYDQGNWCVILQKA

SEQ ID NO: 22151 - DNA, 1701 bp, Homo sapiens
gttttctccaacatggccgcgcccaggggagatggcgtgcaagtatccgctgcggtgttctggtgctagagtggagaggctggcaaagaagaaggcacacgcatggtgagaatccggcctgagccgaagcggagtttgctatggacagcaaccatcaaagtaattacaaactcagtaaaactgagaagaagttcttaaggaaacagattaaagccaagcatactttgctgagacatgaaggcattgagacagtatcctatgccactcagagcctggttgttgccaatggtggtttgggtaatggtgtgagtcggaaccagctgctcccggttttagagaaatgtggactggtggatgctctcttaatgccacctaacaagccgtactcatttgcaagatacagaactacagaagaatctaagagagcctatgttaccctcaatggaaaagaagtagtggatgatttaggacaaaagatcactctgtatttgaattttgtggaaaaagtgcagtggaaggagttgaggcctcaagccttaccaccaggactcatggtagtagaagaaataatttcttctgaggaggagaaaatgcttttggaaagtgttgattggacagaagatacagacaatcaaaactctcaaaaatccttaaaacacagaagagtaaagcattttggttatgagttccactatgagaacaacaatgtagataaagataagccattatctgggggtcttcctgacatttgtgaaagctttttggagaaatggttgaggaaaggttacattaaacataaacctgatcaaatgaccataaatcagtatgaacctgggcaagattgtcatggattttaagcacccagatggcattgcagtgccagttatgttgcctcgtcggagtttgctggtgatgacaggagaatctagatacctttggacccatggaatcacgtgcagaaaatttgatactgttcaagcatctgagagtcttaaaagtggaattatcaccagtgatgttggagacttaactttaagcaagaggggactacgaacatcatttacatttaggaaagtgaggcaaacaccttgtaactgtagagcgtagagtggcagctctccaagaaattgttcgactcctgagaccaggtgggaaggcactcatttatgtctgggcaatggaacaagaatataataagcagaagtccaagtatcttagaggaaacagaaatagccaaggaaagaaagaggagatgaacagtgatacctcagtgcagaggtcacttgtggagcaaatgcgtgacatgggcagtcgagactcggcatcttctgtcccccgcattaatgactctcaggaaggaggatgtaattcaaggcaagtttctaattccaagctgcctgttcatgttaacaggacttctttttattctcaagatgtactggttccctggcaccttaagggaaatcctgataaaggcaaacctgttgagccatttggtcccataggatcccaggacccaagtcctgtgtttcatcgttactaccatgtgttccgtgagggagaactggaaggtgcctgcaggactgtgagtgatgtcagaattctgcaaagctactacgatcaaggaaactggtgtgtgattcttcaaaaggcctgattatttacctgaacacatcatatataaagaagaaatgctcactt

SEQ ID NO: 22152 - protein, 238 aa, Homo sapiens; identical to SEQ ID NO: 2869

SEQ ID NO: 22153 - DNA, 467 bp, Homo sapiens
ccaattctacctgcccgggaaagagatgctccaatattgaagtgcggagtttcccagcagttggaggaggcgcagctcaacagcccagccgaccgctcctcccagctcgctgcgcggaggaccccacagtccggcggccccgcagcccggctgcctagctcctccctggagaccgaagcccacaagagatgccagtatggggacaagatgtctggaactgtagcagctactttgtaaccaggagacatcaggaatgaagataacaagtcaatacatcaaggatggcagagcagaagaacagagggcatttttcagcagcagaaacagtaccagtgattgccttgtctggctggcttgtcatttgaggaaagacaactatttgtttaagcaatcagcccagttttctgttactggcaactaaaagcaattctaaatgacattgatatggaagggaggcagggaaatgc

SEQ ID NO: 22154 - protein, 55 aa, Homo sapiens
MKITSQYIKDGRAEEQRAFFSSRNSTSDCLVWLACHLRKDNYLFKQSAQFSVTGN

SEQ ID NO: 22155 - DNA, 2786 bp, Homo sapiens
ctgtccagcctcggcgcccgggaccgagcgcgtcgctcgccgccgcggagcgcgtagccggagcgcctggggaaggcggagatgaagaccacgccgccgcgcgccgggagctgctgagcctaccgccgccagagtccagttgacacttactttgacaaaggcaaatttggaagcaattacttgaggacagttcatatagcatctggacagtcaacacgggcaccatgaagcacttcctgagaatgttgatccaggtatgcctgtatttttactgtaaatttctgtggcgctgcctgaaatttgtaatgaggaagctaactggaagatgtgaactacaacggatctgttataataccaagccgggagcttctagaaccatgaaaatcgaaacatcactgagggattctaaaagtaagctgttgcagacttctgtgagtgttcaccccgacgctattgaaaaaactatagaagatatcatggaactgaaaaaaattaatcctgacgtaaatccacagctgggaatctctcttcaggcttgccttctgcaaatcgttgggtacaggaaccttattgcagatgtggaaaaactgcgtagagaggcctatgattctgataatccccaacatgaagaaatgcttttgaagttatggaaattcttgaagcccaatactccactggaatctcggatttctaagcagtggtgtgaaattggtttccaaggtgatgatcctaaaacagactttcgaggaatgggacttctgggactgtacaatttgcagtatttcgcggaaagggatgccacagcagctcagcaggtcctgtctgactctcttcatccgaaatgcagcaaattcagcaaagcagaatgggagaagaaaaggatggataaggcaattgggtactcatttgcaattgtgggcatcaatataactgacctggcatataatctactggtcagcggagctctaaaaacccatttctacaatatcgccccagaagctccaacattgtctcactttcagcaaacattctgctatttgatgcatgaatttcataagttttggatcgaagaggaccccatggacataatggaatttaatcgtgtgagggagaaattccgcaagaggatcatcaaacagctgcagaacccagacatggcgctgtgcccacattttgctgcctcggaaggtttaatcaacatgtagttgcccacgccggttttaatggataccctggaacactgcctcattgtcttgttagatctctgcttaggtcgcagctcacgcattgaatgcacacagtgattgtatgcatgccttttggtacagtgttttcatctcttggtcataattccgagatccccagagaccactgtttctggagtatctgtcatccagtgactgctcatattgtggcattatgcagtgttacatcttgccttgatacccaggtatggagagagttttctatttttttagactttttttcctctccctcataattcagcattaaagaattgtatttctctagctgtattttgtatgtaagaggtttagctgaatctcattctgtgaaagccttttaatttattgaaatgtttcatgactactgctgctagctcttcaagccaggttcatgcttggacctcattctgataaagtataagactttaaaataatacaaaacagggccgggcgcagtggctcacacctgtaatcccagcactttggggagctgaggcgggcggatcacgaggtcaagagatcgagaccatcctggccaacatggtgaaaccccgtctctactaaaaataacaaaaattagctgggcgtggtggtgggtgcctgtaatcccagctactcgggaggctgaggcaggagaatcgcttgaacccgggaggtggaggttacagtgagccgagatcataccactgcactccagcctggcgacagagcaagactccatctcaaaaataaataaataaataaataaataaataaataaataaataaataaataaataaaatagtacagacagacacatgataagccaaactgttcctgcaaacatagctatgcttcatgaggcttacaagaagtaactttaggtaggagctgtttttgtttgaagtactgcaaaattatattgtaacttcccctcaccccagttgcaattgtgtcatagtcatctgtatatcaaactattttattcccataacttcattggcttggatgcctaagtgtatgatgcttgaagcctcagaaaagaaataagcatatttcaaaagctgcaaaaggtttttcactgcctgcctcttgcggaactgggttacaccctggcactgttctgatccaagcatatttgcttggggaactaagtgctgactagtttgttttctatgtcaaggggcaatattaaaaaacaatttgcaagaaaatgtgtttcaagagagcaacctaagctaagtcactctgcgatatttcttgaaaataacgaccttgtcttgtatcagtggaagaagtaagttgcttagaaagggaaaagtcaaattgttccagaactgctaaaaatcattttaaaaaccatgatttagtttggaattatgattgtagtctgttgaatagtatttaccatggcatttcatacccatggtattttataccttctgactatcaattttagtattattagatgtttgtgtaaccacttgcttatttaaatgaattttgagtactgcctaattgtcagttatatgaataaattacatgtcattctactgtaacgt

SEQ ID NO: 22156 - protein, 326 aa, Homo sapiens
MKHFLRMLIQVCLYFYCKFLWRCLKFVMRKLTGRCELQRICYNTKPGASRTMKIETSLRDSKSKLLQTSVSVHPDAIEKTIEDIMELKKINPDVNPQLGISLQACLLQIVGYRNLIADVEKLRREAYDSDNPQHEEMLLKLWKFLKPNTPLESRISKQWCEIGFQGDDPKTDFRGMGLLGLYNLQYFAERDATAAQQVLSDSLHPKCSKFSKAEWEKKRMDKAIGYSFAIVGINITDLAYNLLVSGALKTHFYNIAPEAPTLSHFQQTFCYLMHEFHKFWIEEDPMDIMEFNRVREKFRKRIIKQLQNPDMALCPHFAASEGLINM

SEQ ID NO: 22157 - DNA, 2733 bp, Homo sapiens
ggagatgaagaccacgccgccgcgcgccgggagctgctgagcctaccgccgccagagtccagttgacacttactttgacaaaggcaaatttggaagcaattacttgaggacagttcatatagcatctggacagtcaacacgggcaccatgaagcacttcctgagaatgttgatccaggtatgcctgtatttttactgtaaatttctgtggcgctgcctgaaatttgtaatgaggaagctaactggaagatgtgaactacaacggatctgttataataccaagccgggagcttctagaaccatgaaaatcgaaacatcactgagggattctaaaagtaagctgttgcagacttctgtgagtgttcaccccgacgctattgaaaaaactatagaagatatcatggaactgaaaaaaattaatcctgacgtaaatccacagctgggaatctctcttcaggcttgccttctgcaaatcgttgggtacaggaaccttattgcagatgtggaaaaactgcgtagagaggcctatgattctgataatccccaacatgaagaaatgcttttgaagttatggaaattcttgaagcccaatactccactggaatctcggatttctaagcagtggtgtgaaattggtttccaaggtgatgatcctaaaacagactttcgaggaatgggacttctgggactgtacaatttgcagtatttcgcggaaagggatgccacagcagctcagcaggtcctgtctgactctcttcatccgaaatgcagggatatcactaaagaagaaataagcaaattcagcaaagcagaatgggagaagaaaaggatggataaggcaattgggtactcatttgcaattgtgggcatcaatataactgacctggcatataatctactggtcagcggagctctaaaaacccatttctacaatatcgccccagaagctccaacattgtctcactttcagcaaacattctgctatttgatgcatgaatttcataagttttggatcgaagaggaccccatggacataatggaatttaatcgtgtgagggagaaattccgcaagaggatcatcaaacagctgcagaacccagacatggcgctgtgcccacattttgctgcctcggaaggtttaatcaacatgtagttgcccacgccggttttaatggataccctggaacactgcctcattgtcttgttagatctctgcttaggtcgcagctcacgcattgaatgcacacagtgattgtatgcatgccttttggtacagtgttttcatctcttggtcataattccgagatccccagagaccactgtttctggagtatctgtcatccagtgactgctcatattgtggcattatgcagtgttacatcttgccttgatacccaggtatggagagagttttctatttttttagactttttttcctctccctcataattcagcattaaagaattgtatttctctagctgtattttgtatgtaagaggtttagctgaatctcattctgtgaaagccttttaatttattgaaatgtttcatgactactgctgctagctcttcaagccaggttcatgcttggacctcattctgataaagtataagactttaaaataatacaaaacagggccgggcgcagtggctcacacctgtaatcccagcactttggggagctgaggcgggcggatcacgaggtcaagagatcgagaccatcctggccaacatggtgaaaccccgtctctactaaaaataacaaaaattagctgggcgtggtggtgggtgcctgtaatcccagctactcgggaggctgaggcaggagaatcgcttgaacccgggaggtggaggttacagtgagccgagatcataccactgcactccagcctggcgacagagcaagactccatctcaaaaataaataaataaataaataaataaataaataaataaataaataaataaataaaatagtacagacagacacatgataagccaaactgttcctgcaaacatagctatgcttcatgaggcttacaagaagtaactttaggtaggagctgtttttgtttgaagtactgcaaaattatattgtaacttcccctcaccccagttgcaattgtgtcatagtcatctgtatatcaaactattttattcccataacttcattggcttggatgcctaagtgtatgatgcttgaagcctcagaaaagaaataagcatatttcaaaagctgcaaaaggtttttcactgcctgcctcttgcggaactgggttacaccctggcactgttctgatccaagcatatttgcttggggaactaagtgctgactagtttgttttctatgtcaaggggcaatattaaaaaacaatttgcaagaaaatgtgtttcaagagagcaacctaagctaagtcactctgcgatatttcttgaaaataacgaccttgtcttgtatcagtggaagaagtaagttgcttagaaagggaaaagtcaaattgttccagaactgctaaaaatcattttaaaaaccatgatttagtttggaattatgattgtagtctgttgaatagtatttaccatggcatttcatacccatggtattttataccttctgactatcaattttagtattattagatgtttgtgtaaccacttgcttatttaaatgaattttgagtactgcctaattgtcagttatatgaataaattacatgtcattctactgtaacgt

SEQ ID NO: 22158 - protein, 334 aa, Homo sapiens
MKHFLRMLIQVCLYFYCKFLWRCLKFVMRKLTGRCELQRICYNTKPGASRTMKIETSLRDSKSKLLQTSVSVHPDAIEKTIEDIMELKKINPDVNPQLGISLQACLLQIVGYRNLIADVEKLRREAYDSDNPQHEEMLLKLWKFLKPNTPLESRISKQWCEIGFQGDDPKTDFRGMGLLGLYNLQYFAERDATAAQQVLSDSLHPKCRDITKEEISKFSKAEWEKKRMDKAIGYSFAIVGINITDLAYNLLVSGALKTHFYNIAPEAPTLSHFQQTFCYLMHEFHKFWIEEDPMDIMEFNRVREKFRKRIIKQLQNPDMALCPHFAASEGLINM

SEQ ID NO: 22159 - DNA, 972 bp, Homo sapiens; identical to SEQ ID NO: 5089

SEQ ID NO: 22160 - protein, 127 aa, Homo sapiens; identical to SEQ ID NO: 5090

SEQ ID NO: 22161 - DNA, 592 bp, Homo sapiens
gaggtggaggctgcagtgagctgagattcgccactgctggcctcaaacccctggcctcaagtgatcctcctgccttggctttctaaagtgttgagattacaggtgtgagccacagtgcctggcaagaaacaagcttttaagaatcaggttcctcatccaaggaacaaaccgtcagtgttgtcaccagagaagttcaagcctgaatgctgcctccgggaatccaagcatcagatgaagagagacagaggagatggcttctggggtgactgatacttcccgatttgggccttttctgatgtgttcaggttcccatgacagtgatagtggggccctggcttgtgtaacctcaaggccagtagggtgatggttggtgtgtaccctcatcagaaatgttaaaaacagtcaattctagtgtgtgaagggcccaaaggcaggctagtcctaaaagaaatggcataagccaggcacagtggcatgtgcctgtagtcccagctatttgggtggctgaggcagcaggatcacatgaggccaggagttcaaggacagcctgagcaacattgcaagatctttcctctaaaaaattaataaactt

SEQ ID NO: 22162 - protein, 37 aa, Homo sapiens
MASGVTDTSRFGPFLMCSGSHDSDSGALACVTSRPVG

SEQ ID NO: 22163 - DNA, 853 bp, Homo sapiens
tactttaggcgctgcccagagtccaggagtccagacagcctgggaggggagaaggagttggagctcaagttggagacagcgaggagaaacctgccatagccagggtgtgtctttgatcctcttcaggaggtgaggagaagccagaggtccttggtgtgccctcagaaatctgcctgcagttctcaccaagccgctgtgaaaatggggataaacacccgggagctgtttctcaacttcactattgtcttgattacggttattcttatgtggctccttgtgaggtcctatcagtactgagaggccatgccatggtcctgggattgactgagatgctccggagctgcctgctctatgccctgagaccccactgctgtcattgtcacaggatgccattctccatccgagggcacctgtgacctgcactcacaatatctgctatgctgtagtgctaggattgattatgtgttctccaaagatgctgctcccaagggctgccaagtgtttgccagggaacggtagatttattccccaactcttaactgaaaatgtgttagacaagccacaaagttaaaattaaactggattcatgatgatgtaggattgttacaagcccctgatctgtctcaccacacatcccttcaacccacacggtctgcaaccaaactctaattcaacctgccagaaggaatgttagaggaagtctttgtcagcccttatagctatcatgtgaataaagttaagtcaacttcaaaaacaacttctagaacttattttagcttccatgtgtgacagagcatttgacccttggctgggattggagtgacaagtgctaccgtatttctagcatttgagg

SEQ ID NO: 22164 - protein, 36 aa, Homo sapiens
MCSPKMLLPRAAKCLPGNGRFIPQLLTENVLDKPQS

SEQ ID NO: 22165 - DNA, 769 bp, Homo sapiens
ctgtctgctgctgaggcctgcagagattaatataaacggcaggaggtgaggagaagccagaggtccttggtgtgccctcagaaatctgcctgcagttctcaccaagccgctgtgaaaatggggataaacacccgggagctgtttctcaacttcactattgtcttgattacggttattcttatgtggctccttgtgaggtcctatcagtactgagaggccatgccatggtcctgggattgactgagatgctccggagctgcctgctctatgccctgagaccccactgctgtcattgtcacaggatgccattctccatccgagggcacctgtgacctgcactcacaatatctgctatgctgtagtgctaggattgattatgtgttctccaaagatgctgctcccaagggctgccaagtgtttgccagggaacggtagatttattccccaactcttaactgaaaatgtgttagacaagccacaaagttaaaattaaactggattcatgatgatgtaggattgttacaagcccctgatctgtctcaccacacatcccttcaacccacacggtctgcaaccaaactctaattcaacctgccagaaggaatgttagaggaagtctttgtcagcccttatagctatcatgtgaataaagttaagtcaacttcaaaaacaacttctagaacttattttagcttccatgtgtgacagagcatttgacccttggctgggattggagtgacaagtgctaccgtatttctagcatttgagg

SEQ ID NO: 22166 - protein, 36 aa, Homo sapiens; identical to SEQ ID NO: 22164

SEQ ID NO: 22167 - DNA, 749 bp, Homo sapiens
tactttaggcgctgcccagagtccaggagtccagacagcctgggaggggagaaggagttggagctcaagttggagacagcgaggagaaacctgccatagccagggtgtgtctttgatcctcttcaggaggtgaggagaagccagaggtccttggtgtgccctcagaaatctgcctgcagttctcaccaagccgctgtgaaaatggggataaacacccgggagctgtttctcaacttcactattgtcttgattacggttattcttatgtggctccttgtgaggtcctatcagtactgagaggccatgccatggtcctgggattgactgagatgctccggagctgcctgctctatgccctgagaccccactgctgtcattgtcacaggatgccattctccatccgagggcacctgtgacctgcactcacaatatctgctatgctgtagtgctaggattgattatgtgttctccaaagatgctgctcccaagggctgccaagtgtttgccagggaacggtagatttattccccaactcttaactgaaaatgtgttagacaagccacaaagttaaaattaaactggattcatgatgatgtaggattgttacaagcccctgatctgtctcaccacacatcccttcaacccacacggtctgcaaccaaactctaattcaacctgccagaaggaatgttagaggaagtctttgtcagcccttatagctatcatgtgaataaagttaagtcaacttc

SEQ ID NO: 22168 - protein, 36 aa, Homo sapiens; identical to SEQ ID NO: 22164

SEQ ID NO: 22169 - DNA, 665 bp, Homo sapiens
ctgtctgctgctgaggcctgcagagattaatataaacggcaggaggtgaggagaagccagaggtccttggtgtgccctcagaaatctgcctgcagttctcaccaagccgctgtgaaaatggggataaacacccgggagctgtttctcaacttcactattgtcttgattacggttattcttatgtggctccttgtgaggtcctatcagtactgagaggccatgccatggtcctgggattgactgagatgctccggagctgcctgctctatgccctgagaccccactgctgtcattgtcacaggatgccattctccatccgagggcacctgtgacctgcactcacaatatctgctatgctgtagtgctaggattgattatgtgttctccaaagatgctgctcccaagggctgccaagtgtttgccagggaacggtagatttattccccaactcttaactgaaaatgtgttagacaagccacaaagttaaaattaaactggattcatgatgatgtaggattgttacaagcccctgatctgtctcaccacacatcccttcaacccacacggtctgcaaccaaactctaattcaacctgccagaaggaatgttagaggaagtctttgtcagcccttatagctatcatgtgaataaagttaagtcaacttc

SEQ ID NO: 22170 - protein, 36 aa, Homo sapiens; identical to SEQ ID NO: 22164

SEQ ID NO: 22171 - DNA, 1883 bp, Homo sapiens
gctcaggcccggattccgcggcgcgagagtgagcgctggcgggggcggtgggatgctccaagtcggcgtgaaagaggcgagagtgggcgagcacgggcggccggaccaggagcactcccggtgaccacctagtctccattttatttcctcggaaactgccgggcaggcgggggaccggccgcagggcggggtttctcttggcgaattgtttcctgccagcggcagccgagctgcgttcacgcgctgatcggagaatgagtgacagtcccagcctcagcacactcgcaactcggagatccttgcgctggcccggagagacatacaacacccttcagcagatcccctgggaaggaggtgggaagagacttaagttagaagaaaactccgatgtttggaagagatttccagaaataacccgaagaaaatgttttcctgtttataaattctgaaatctgtggtctctttattaaaatagccaggcttttatataggtattatgatatagaagcgtcattaaataatattttcttacatggggacgtgaccttaattcttaaagatattaatgtataatattactgaggtaccaacacaataggctttaattaaaattccacccgtgttttcaaaagtagggggtggagaaagcggggtgaaaagaatcatgtctcagcacctgaaggcttgggtatgtaaggaactaatgtgagaaaggtgttctagatgtcaggttaacccattagcctagaacactgaaaccctctaacagaggaagtctgcataagttcaaaggcattaaagcactaatgttaccgggtactccgtttttcttcaaaggtcggcctccccactcctgtagcaggttttttgttttgttttgttttgttttgtttctgttttgtttttttgagatggagcctcgctctgtcgcccaggctgcagtgcagtggcgccatctctgctcactgcaacctctgctcccggttcaagcgattctgctgcctcagcctcctgagtagctgggattacaggcgcgcgccaccacgcccagctaatttttgtatttttagtagagacggtgtttcaccatgttggtcaggccggtctcgaactcctgacctcgtgatctgcccacctcagcctcccaaagtgctaggattacagccgtgagctaccgcacccagccgctgtagcagtttttaaaagtccatcctctactgtcaggacatccatccttattggacaggccccatctcttccccactttcctcctctataatagaccaagtgggccacaccagtacagtgtaattagcttggacccctgaaaagtatttcttcccccaagtaaatcttccacaacgtttactttgggctatttctctcattccaagtataaacaattcaaaagtacagaaaagtagaaagaactaaaaataaccccaaatcccacagattccagagatactcatagattttgtcttctgtatgtgcatatgatttttataattgacatattatagtagcaatttgaatcctgctgattttgcctaacatcagtataagcatttattcctctggatcattaaaaagcttttctagatatttttatagctatgtaatatttcttcatatggatgattttgcaatggtttccccatttttgcatatttatattgtttgtggagtttgataatataaataaggcttttttgaacatctttcaacaaatatttgcggagcaaccactgggtttagccctgtgctagatgcagtgaattatatacgtctttttttaatggttgctgtatttaagtgtctttgatttcagacttctgcttctaacatctaaaatcaccacattaaatattacagatttatgt

SEQ ID NO: 22172 - protein, 64 aa, Homo sapiens
MSDSPSLSTLATRRSLRWPGETYNTLQQIPWEGGGKRLKLEENSDVWKRFPEITRRKCFPVYKF

SEQ ID NO: 22173 - DNA, 1887 bp, Homo sapiens
gagttgcgagtgtgctgaggctgggactgtcactcattctccgatcagcgcgtgaacgcagctcggctgccgctggcaggaaacaattctgcaaaaataatcatactcagcctggcaattgtctgcccctaggtctgtcgctcagccgccgtccacactcgctgcaggggggggggcacagaatttaccgcggcaagacatccctcccagccagcagattacaatgctgccaaactaaggatttcatttggactttgtttttcctgggaactgcagtttctctgcaggtggatattgttcccagccagggggagatcagcgttggagagtccaaattcttcttatgccaaggcaagagatgccaaagataaagacatctcctggttctcccccaatggagaaaagctcaccccaaaccagcagcggatctcagtggtgtggaatgatgattcctcctccaccctcaccatctataacgccaacatcgacgacgccggcatttacaagtgtgtggttacaggcgaggatggcagtgagtcagaggccaccgtcaacgtgaagatctttcagaagctcatgttcaagaatgcgccaaccccacaggagttccgggagggggaagatgccgtgattgtgtgtgatgtggtcagctccctcccaccaaccatcatctggaaacacaaaggccgagatgtcatcctgaaaaaagatgtccgattcatagtcctgtccaacaactacctgcagatccggggcatcaagaaaacagatgagggcacttatcgctgtgagggcagaatcctggcacggggggagatcaacttcaaggacattcaggtcattgtgaatgtgccacctaccatccaggccaggcagaatattgtgaatgccaccgccaacctcggccagtccgtcaccctggtgtgcgatgccgaaggcttcccagagcccaccatgagctggacaaaggatggggaacagatagagcaagaggaagacgatgagaagtacatcttcagcgacgatagttcccagctgaccatcaaaaaggtggataagaacgacgaggctgagtacatctgcattgctgagaacaaggctggcgagcaggatgcgaccatccacctcaaagtctttgcaaaacccaaaatcacatatgtagagaaccagactgccatggaattagaggagcaggtcactcttacctgtgaagcctccggagaccccattccctccatcacctggaggacttctacccggaacatcagcagcgaagaaaaggcttcgtggactcgaccagagaagcaagaggtatagcttacctgaccactagccagtctttagttttgaaagcattacagtttaactcaccattgcagtttaataaccagacatgctaaactaattagtaatttagctaaagaataggtcgatagtggtagacattacttagcaatagtatcattttaggatgagcaagcaagctgtgttgggagtggatgaacaaatccatattatttcctaaaactggatcttattctcttgctggtgctggtaaaatcacatccaggtaattacaccaatagaaataaattgcccccaattcccaggccaggcattttgaaatggtgaaagttttttgactcacatggttgatgtggctctggaccataaagtcacagagttagtgatctaaaaacccactcctccctttcctttccagctcaactcatcttgttgctcacttattttataatgatcagtcttggtaaattatcacatcacgtttcatctcaaaagcaatgcaaatgacatctctcgttggttttcccaaattgctaaacgtatctctgttacttttatagagcattaaatttatgagattag

SEQ ID NO: 22174 - protein, 246 aa, Homo sapiens
MFKNAPTPQEFREGEDAVIVCDVVSSLPPTIIWKHKGRDVILKKDVRFIVLSNNYLQIRGIKKTDEGTYRCEGRILARGEINFKDIQVIVNVPPTIQARQNIVNATANLGQSVTLVCDAEGFPEPTMSWTKDGEQIEQEEDDEKYIFSDDSSQLTIKKVDKNDEAEYICIAENKAGEQDATIHLKVFAKPKITYVENQTAMELEEQVTLTCEASGDPIPSITWRTSTRNISSEEKASWTRPEKQEV

SEQ ID NO: 22175 - DNA, 4780 bp, Homo sapiens
gagttgcgagtgtgctgaggctgggactgtcactcattctccgatcagcgcgtgaacgcagctcggctgccgctggcaggaaacaattctgcaaaaataatcatactcagcctggcaattgtctgcccctaggtctgtcgctcagccgccgtccacactcgctgcaggggggggggcacagaatttaccgcggcaagacatccctcccagccagcagattacaatgctgccaaactaaggatttcatttggactttgtttttcctgggaactgcagtttctctgcaggtggatattgttcccagccagggggagatcagcgttggagagtccaaattcttcttatgccaaggcaagagatgccaaagataaagacatctcctggttctcccccaatggagaaaagctcaccccaaaccagcagcggatctcagtggtgtggaatgatgattcctcctccaccctcaccatctataacgccaacatcgacgacgccggcatttacaagtgtgtggttacaggcgaggatggcagtgagtcagaggccaccgtcaacgtgaagatctttcagaagctcatgttcaagaatgcgccaaccccacaggagttccgggagggggaagatgccgtgattgtgtgtgatgtggtcagctccctcccaccaaccatcatctggaaacacaaaggccgagatgtcatcctgaaaaaagatgtccgattcatagtcctgtccaacaactacctgcagatccggggcatcaagaaaacagatgagggcacttatcgctgtgagggcagaatcctggcacggggggagatcaacttcaaggacattcaggtcattgtgaatgtgccacctaccatccaggccaggcagaatattgtgaatgccaccgccaacctcggccagtccgtcaccctggtgtgcgatgccgaaggcttcccagagcccaccatgagctggacaaaggatggggaacagatagagcaagaggaagacgatgagaagtacatcttcagcgacgatagttcccagctgaccatcaaaaaggtggataagaacgacgaggctgagtacatctgcattgctgagaacaaggctggcgagcaggatgcgaccatccacctcaaagtctttgcaaaacccaaaatcacatatgtagagaaccagactgccatggaattagaggagcaggtcactcttacctgtgaagcctccggagaccccattccctccatcacctggaggacttctacccggaacatcagcagcgaagaaaagactctggatgggcacatggtggtgcgtagccatgcccgtgtgtcgtcgctgaccctgaagagcatccagtacactgatgccggagagtacatctgcaccgccagcaacaccatcggccaggactcccagtccatgtaccttgaagtgcaatatgccccaaagctacagggccctgtggctgtgtacacttgggaggggaaccaggtgaacatcacctgcgaggtatttgcctatcccagtgccacgatctcatggtttcgggatggccagctgctgccaagctccaattacagcaatatcaagatctacaacaccccctctgccagctatctggaggtgaccccagactctgagaatgattttgggaactacaactgtactgcagtgaaccgcattgggcaggagtccttggaattcatccttgttcaagcagacaccccctcttcaccatccatcgaccaggtggagccatactccagcacagcccaggtgcagtttgatgaaccagaggccacaggtggggtgcccatcctcaaatacaaagctgagtggagagcagttggtgaagaagtatggcattccaagtggtatgatgccaaggaagccagcatggagggcatcgtcaccatcgtgggcctgaagcccgaaacaacgtacgccgtaaggctggcggcgctcaatggcaaagggctgggtgagatcagcgcggcctccgagttcaagacgcagccagtccttttctttcttcagcggcatctgctagctcgtctacccctgttccattgtctccaccagatacaacttggcctcttcctgcccttgcaaccacagaaccagctagtgagggaacccagtgcacctaagctcgaagggcagatgggagaggatggaaactctattaaagtgaacctgatcaagcaggatgacggcggctcccccatcagacactatctggtcaggtaccgagcgctctcctccgagtggaaaccagagatcaggctcccgtctggcagtgaccacgtcatgctgaagtccctggactggaatgctgagtatgaggtctacgtggtggctgagaaccagcaaggaaaatccaaggcggctcattttgtgttcaggacctcggcccagcccacagccatcccagcaaccttgggaggcaattctgcatcctacacctttgtctcattgcttttctctgcagtgactcttcttttgctctgttaggaacttgaacacaaaaattaaatttgcttaaaagcccagttcctatgaaaaagatcagtgccccctttggaagaacctggcaggaccaccatggccacagctgctgagcaaccattctgtgtggaagagaaggttttgtgattggaaaaagctttacctccagacatgtcaccactcacagatacttttgtgccacttcataaggagtttgccccctttttaatggcagtaaaaagaatttgagagctctttctttaaatgctatttttaaaaaccatcatgctagatttacagagaagtttctgcatatctgctacttgttgcattttgggttcaaacctaaatatgatgtagcagaggaagaattctaagtaccttctaaagcttgtgtcagattgttaaaatcaccacacattcccctcattctaactctgtgctccttgtcctcccttcaataataattggctttgcttgcaattaagcatttaagtgcccatgttaaaagagccagaccgcactgattcacatgagcgttttgctgacatgatgggcaactgaagtcacccctgttgcccatgcactggaaaaaaagttgaatttgttggatattttctggggctgatgaacgttctgggatgtgctttcagtcctcgtattacggccagcaccttacactgtctctgtgaacggggccaagccatgatgtgccaacaagtgtcagctttgaaaggtgtttgtctcccaatcggggtgactcccctgctgcctggcagcatgtcgcagatcagcacagagtggggccgtggttcagcagtgacccacagaatggctttgagcatcagtctacaggacaggttggaagcatccactgtgaaccaggcattagtcccctacctggcctgtgtgtgctcagtagagaaggagagggacaggccactcccagactgcccagcccaggagggttaataaattggggccgagccaacctgtcagtgcttcctgaatgccccagcctctgtattggtgcgttggttcagtgacattttctaaactctcctgaaaatccagctgctcctccctgctgcttgggagttcacccaggagaggaaatgggtgtgttttgttaaggtcccttgtggagactcagggctgaatcctgcttggtaatatcagtgtgtgtgcttggggatggaccttctactgaataaaaactccctccctccccccattgtggtcacatatcattctacatatctcatctctgagcatctccatggaagcttgatttttgttctttttggtttctttatgtatttttttctgttgttattattttttaatgttcaaagactagcctttccctttgggattccaaatgatcccatgctgtggtctgaggggcaaagccacctatgttggcgctcgccattaatccccagcgctcagtttagaggctcacgtgcagacatcagaggctccatgctgcacagtagctcaggcagggtagtgcctctcaacccagccacaaaactctccccgctggagtcccagatggcgcttcacaccagggcagtggaggcaggcatggtttttgggcacagggcagagcataaggatcccaggtcagtgtgggagagctactggctcttaggatcaccttgggcagaagtcacacggcttcatcctaggagggcccagcttgggagtctgcctccccctgatcccaggaccacccacaggagaggggcagtgtccatctttctgaagggaccctttggagatctcgtcctaagtgtggagaggactgacgtggccctgtcatctcaacacatcccagggtcaggcaggcctcagctgaaacaatgtcagggtcctcaagggtcccatttagacagacccacggcttgtaacagtgcgctcctcaggaggcagcactagcgcatacccactccccacggacactgagttcctggtgacagctgcagccccagccccgccaggagtcctggagacagcagccctcagagaccctgcaggagtgagtgcaccccaccttgctcagccacaccccactcccctgtgccctgtagttgtgctgcccatgctccacacaccatggggcccctttgctcatttttggactatttatacagcaggtttggatcatgtttttctactaataagaatgctaacattgttgtgtagataatcagtgagggctttatgaagtttacacctttgcattattaaaggaaataacagttcatgtgaa

SEQ ID NO: 22176 - protein, 643 aa, Homo sapiens
MFKNAPTPQEFREGEDAVIVCDVVSSLPPTIIWKHKGRDVILKKDVRFIVLSNNYLQIRGIKKTDEGTYRCEGRILARGEINFKDIQVIVNVPPTIQARQNIVNATANLGQSVTLVCDAEGFPEPTMSWTKDGEQIEQEEDDEKYIFSDDSSQLTIKKVDKNDEAEYICIAENKAGEQDATIHLKVFAKPKITYVENQTAMELEEQVTLTCEASGDPIPSITWRTSTRNISSEEKTLDGHMVVRSHARVSSLTLKSIQYTDAGEYICTASNTIGQDSQSMYLEVQYAPKLQGPVAVYTWEGNQVNITCEVFAYPSATISWFRDGQLLPSSNYSNIKIYNTPSASYLEVTPDSENDFGNYNCTAVNRIGQESLEFILVQADTPSSPSIDQVEPYSSTAQVQFDEPEATGGVPILKYKAEWRAVGEEVWHSKWYDAKEASMEGIVTIVGLKPETTYAVRLAALNGKGLGEISAASEFKTQPVLFFLQRHLLARLPLFHCLHQIQLGLFLPLQPQNQLVREPSAPKLEGQMGEDGNSIKVNLIKQDDGGSPIRHYLVRYRALSSEWKPEIRLPSGSDHVMLKSLDWNAEYEVYVVAENQQGKSKAAHFVFRTSAQPTAIPATLGGNSASYTFVSLLFSAVTLLLLC

SEQ ID NO: 22177 - DNA, 3980 bp, Homo sapiens
gagttgcgagtgtgctgaggctgggactgtcactcattctccgatcagcgcgtgaacgcagctcggctgccgctggcaggaaacaattctgcaaaaataatcatactcagcctggcaattgtctgcccctaggtctgtcgctcagccgccgtccacactcgctgcaggggggggggcacagaatttaccgcggcaagacatccctcccagccagcagattacaatgctgccaaactaaggatttcatttggactttgtttttcctgggaactgcagtttctctgcaggtggatattgttcccagccagggggagatcagcgttggagagtccaaattcttcttatgccaaggcaagagatgccaaagataaagacatctcctggttctcccccaatggagaaaagctcaccccaaaccagcagcggatctcagtggtgtggaatgatgattcctcctccaccctcaccatctataacgccaacatcgacgacgccggcatttacaagtgtgtggttacaggcgaggatggcagtgagtcagaggccaccgtcaacgtgaagatctttcagaagctcatgttcaagaatgcgccaaccccacaggagttccgggagggggaagatgccgtgattgtgtgtgatgtggtcagctccctcccaccaaccatcatctggaaacacaaaggccgagatgtcatcctgaaaaaagatgtccgattcatagtcctgtccaacaactacctgcagatccggggcatcaagaaaacagatgagggcacttatcgctgtgagggcagaatcctggcacggggggagatcaacttcaaggacattcaggtcattgtgaatgtgccacctaccatccaggccaggcagaatattgtgaatgccaccgccaacctcggccagtccgtcaccctggtgtgcgatgccgaaggcttcccagagcccaccatgagctggacaaaggatggggaacagatagagcaagaggaagacgatgagaagtacatcttcagcgacgatagttcccagctgaccatcaaaaaggtggataagaacgacgaggctgagtacatctgcattgctgagaacaaggctggcgagcaggatgcgaccatccacctcaaagtctttgcaaaacccaaaatcacatatgtagagaaccagactgccatggaattagaggagcaggtcactcttacctgtgaagcctccggagaccccattccctccatcacctggaggacttctacccggaacatcagcagcgaagaaaagactctggatgggcacatggtggtgcgtagccatgcccgtgtgtcgtcgctgaccctgaagagcatccagtacactgatgccggagagtacatctgcaccgccagcaacaccatcggccaggactcccagtccatgtaccttgaagtgcaatatgccccaaagctacagggccctgtggctgtgtacacttgggaggggaaccaggtgaacatcacctgcgaggtatttgcctatcccagtgccacgatctcatggtttcgggatggccagctgctgccaagctccaattacagcaatatcaagatctacaacaccccctctgccagctatctggaggtgaccccagactctgagaatgattttgggaactacaactgtactgcagtgaaccgcattgggcaggagtccttggaattcatccttgttcaagcagacaccccctcttcaccatccatcgaccaggtggagccatactccagcacagcccaggtgcagtttgatgaaccagaggccacaggtggggtgcccatcctcaaatacaaagctgagtggagagcagttggtgaagaagtatggcattccaagtggtatgatgccaaggaagccagcatggagggcatcgtcaccatcgtgggcctgaagcccgaaacaacgtacgccgtaaggctggcggcgctcaatggcaaagggctgggtgagatcagcgcggcctccgagttcaagacgcagccagtccgggaacccagtgcacctaagctcgaagggcagatgggagaggatggaaactctattaaagtgaacctgatcaagcaggatgacggcggctcccccatcagacactatctggtcaggtaccgagcgctctcctccgagtggaaaccagagatcaggctcccgtctggcagtgaccacgtcatgctgaagtccctggactggaatgctgagtatgaggtctacgtggtggctgagaaccagcaaggaaaatccaaggcggctcattttgtgttcaggacctcggcccagcccacagccatcccagccaacggcagccccacctcaggcctgagcaccggggccatcgtgggcatcctcatcgtcatcttcgtcctgctcctggtggttgtggacatcacctgctacttcctgaacaagtgtggcctgttcatgtgcattgcggtcaacctgtgtggaaaagccgggcccggggccaagggcaaggacatggaggagggcaaggccgccttctcgaaagatgagtccaaggagcccatcgtggaggttcgaacggaggaggagaggaccccaaaccatgatggagggaaacacacagagcccaacgagaccacgccactgacggagcccgagaagggccccgtagaagcaaagccagagtgccaggagacagaaacgaagccagcgccagccgaagtcaagacggtccccaatgacgccacacagacaaaggagaacgagagcaaagcatgatgggtgaagagaaccgagcaaagatcaaaataaaaagtgacacagcagcttcaccagagcatttccaacaccacagacacacacacgcacgcacacacacaaacacacatgcacacacacacatctcatttctctagtgtcttttgcctttaaaaaaaactaaacagataaaacatgggaatctcctttttgtaggtttatagaaagggtccctttgttgcacactcacttgtaagaaaatgagacaaaaaggttaaacccacagccaaactaggacactccgttccctgaaaccgttaaaaaatcaaacaaaaggaccccaaattaagaatctaggaagctcagaaacgaaatctaggttcaggaagaccacacttggtgttacccgattggcacagaccagtttcagagaaatactttcaggcactaagactaatcgaatgaacaaagtccacagtttatttttatactttcagtcaagtttgaactctgtaaaacctcataaataagttataatttctgttcactttgtatttgttcagtatgcaaagtgtgtcaccctttctagctgaattcaattcccacgtagactcttattttataggacgaatgccaaattgcagcttctgggggtagatctcaatttgcagtattcagacttctttttctttcttttacattcttttttctttctttctttctgccaactttgttttccagtgtttacaaggtgacaaatgtttgactttggttgtgtttaaatgtccgtgtaaaatagctgccttttattttttaaggtaacaaataccacctagaggtaggtaggatcatcccacgcttgctttagcacaggacaactttacaaaacatgattgtttacagctgctcttcccctcttttctgatctgcagtttttgcctgggtcccactcaggtgaaaatccatctcattctggaatggttttgcttttgaatttttggttatttttgtgtttctttgggggttagaccactttctgattagccgccacctgcctgcatctgtgaaaagggatctgctcccaggcgttctcacccttcttttgaaggactccttaggctttgttgaatgaagcagagaagattgtatagttggggctggtcttggtgaacacacattattaccccacacatcccctttgtgtagaaagccaaataaaatctatacataccatt

SEQ ID NO: 22178 - protein, 729 aa, Homo sapiens
MFKNAPTPQEFREGEDAVIVCDVVSSLPPTIIWKHKGRDVILKKDVRFIVLSNNYLQIRGIKKTDEGTYRCEGRILARGEINFKDIQVIVNVPPTIQARQNIVNATANLGQSVTLVCDAEGFPEPTMSWTKDGEQIEQEEDDEKYIFSDDSSQLTIKKVDKNDEAEYICIAENKAGEQDATIHLKVFAKPKITYVENQTAMELEEQVTLTCEASGDPIPSITWRTSTRNISSEEKTLDGHMVVRSHARVSSLTLKSIQYTDAGEYICTASNTIGQDSQSMYLEVQYAPKLQGPVAVYTWEGNQVNITCEVFAYPSATISWFRDGQLLPSSNYSNIKIYNTPSASYLEVTPDSENDFGNYNCTAVNRIGQESLEFILVQADTPSSPSIDQVEPYSSTAQVQFDEPEATGGVPILKYKAEWRAVGEEVWHSKWYDAKEASMEGIVTIVGLKPETTYAVRLAALNGKGLGEISAASEFKTQPVREPSAPKLEGQMGEDGNSIKVNLIKQDDGGSPIRHYLVRYRALSSEWKPEIRLPSGSDHVMLKSLDWNAEYEVYVVAENQQGKSKAAHFVFRTSAQPTAIPANGSPTSGLSTGAIVGILIVIFVLLLVVVDITCYFLNKCGLFMCIAVNLCGKAGPGAKGKDMEEGKAAFSKDESKEPIVEVRTEEERTPNHDGGKHTEPNETTPLTEPEKGPVEAKPECQETETKPAPAEVKTVPNDATQTKENESKA

SEQ ID NO: 22179 - DNA, 4010 bp, Homo sapiens
gagttgcgagtgtgctgaggctgggactgtcactcattctccgatcagcgcgtgaacgcagctcggctgccgctggcaggaaacaattctgcaaaaataatcatactcagcctggcaattgtctgcccctaggtctgtcgctcagccgccgtccacactcgctgcaggggggggggcacagaatttaccgcggcaagacatccctcccagccagcagattacaatgctgccaaactaaggatttcatttggactttgtttttcctgggaactgcagtttctctgcaggtggatattgttcccagccagggggagatcagcgttggagagtccaaattcttcttatgccaaggcaagagatgccaaagataaagacatctcctggttctcccccaatggagaaaagctcaccccaaaccagcagcggatctcagtggtgtggaatgatgattcctcctccaccctcaccatctataacgccaacatcgacgacgccggcatttacaagtgtgtggttacaggcgaggatggcagtgagtcagaggccaccgtcaacgtgaagatctttcagaagctcatgttcaagaatgcgccaaccccacaggagttccgggagggggaagatgccgtgattgtgtgtgatgtggtcagctccctcccaccaaccatcatctggaaacacaaaggccgagatgtcatcctgaaaaaagatgtccgattcatagtcctgtccaacaactacctgcagatccggggcatcaagaaaacagatgagggcacttatcgctgtgagggcagaatcctggcacggggggagatcaacttcaaggacattcaggtcattgtgaatgtgccacctaccatccaggccaggcagaatattgtgaatgccaccgccaacctcggccagtccgtcaccctggtgtgcgatgccgaaggcttcccagagcccaccatgagctggacaaaggatggggaacagatagagcaagaggaagacgatgagaagtacatcttcagcgacgatagttcccagctgaccatcaaaaaggtggataagaacgacgaggctgagtacatctgcattgctgagaacaaggctggcgagcaggatgcgaccatccacctcaaagtctttgcaaaacccaaaatcacatatgtagagaaccagactgccatggaattagaggagcaggtcactcttacctgtgaagcctccggagaccccattccctccatcacctggaggacttctacccggaacatcagcagcgaagaaaaggcttcgtggactcgaccagagaagcaagagactctggatgggcacatggtggtgcgtagccatgcccgtgtgtcgtcgctgaccctgaagagcatccagtacactgatgccggagagtacatctgcaccgccagcaacaccatcggccaggactcccagtccatgtaccttgaagtgcaatatgccccaaagctacagggccctgtggctgtgtacacttgggaggggaaccaggtgaacatcacctgcgaggtatttgcctatcccagtgccacgatctcatggtttcgggatggccagctgctgccaagctccaattacagcaatatcaagatctacaacaccccctctgccagctatctggaggtgaccccagactctgagaatgattttgggaactacaactgtactgcagtgaaccgcattgggcaggagtccttggaattcatccttgttcaagcagacaccccctcttcaccatccatcgaccaggtggagccatactccagcacagcccaggtgcagtttgatgaaccagaggccacaggtggggtgcccatcctcaaatacaaagctgagtggagagcagttggtgaagaagtatggcattccaagtggtatgatgccaaggaagccagcatggagggcatcgtcaccatcgtgggcctgaagcccgaaacaacgtacgccgtaaggctggcggcgctcaatggcaaagggctgggtgagatcagcgcggcctccgagttcaagacgcagccagtccgggaacccagtgcacctaagctcgaagggcagatgggagaggatggaaactctattaaagtgaacctgatcaagcaggatgacggcggctcccccatcagacactatctggtcaggtaccgagcgctctcctccgagtggaaaccagagatcaggctcccgtctggcagtgaccacgtcatgctgaagtccctggactggaatgctgagtatgaggtctacgtggtggctgagaaccagcaaggaaaatccaaggcggctcattttgtgttcaggacctcggcccagcccacagccatcccagccaacggcagccccacctcaggcctgagcaccggggccatcgtgggcatcctcatcgtcatcttcgtcctgctcctggtggttgtggacatcacctgctacttcctgaacaagtgtggcctgttcatgtgcattgcggtcaacctgtgtggaaaagccgggcccggggccaagggcaaggacatggaggagggcaaggccgccttctcgaaagatgagtccaaggagcccatcgtggaggttcgaacggaggaggagaggaccccaaaccatgatggagggaaacacacagagcccaacgagaccacgccactgacggagcccgagaagggccccgtagaagcaaagccagagtgccaggagacagaaacgaagccagcgccagccgaagtcaagacggtccccaatgacgccacacagacaaaggagaacgagagcaaagcatgatgggtgaagagaaccgagcaaagatcaaaataaaaagtgacacagcagcttcaccagagcatttccaacaccacagacacacacacgcacgcacacacacaaacacacatgcacacacacacatctcatttctctagtgtcttttgcctttaaaaaaaactaaacagataaaacatgggaatctcctttttgtaggtttatagaaagggtccctttgttgcacactcacttgtaagaaaatgagacaaaaaggttaaacccacagccaaactaggacactccgttccctgaaaccgttaaaaaatcaaacaaaaggaccccaaattaagaatctaggaagctcagaaacgaaatctaggttcaggaagaccacacttggtgttacccgattggcacagaccagtttcagagaaatactttcaggcactaagactaatcgaatgaacaaagtccacagtttatttttatactttcagtcaagtttgaactctgtaaaacctcataaataagttataatttctgttcactttgtatttgttcagtatgcaaagtgtgtcaccctttctagctgaattcaattcccacgtagactcttattttataggacgaatgccaaattgcagcttctgggggtagatctcaatttgcagtattcagacttctttttctttcttttacattcttttttctttctttctttctgccaactttgttttccagtgtttacaaggtgacaaatgtttgactttggttgtgtttaaatgtccgtgtaaaatagctgccttttattttttaaggtaacaaataccacctagaggtaggtaggatcatcccacgcttgctttagcacaggacaactttacaaaacatgattgtttacagctgctcttcccctcttttctgatctgcagtttttgcctgggtcccactcaggtgaaaatccatctcattctggaatggttttgcttttgaatttttggttatttttgtgtttctttgggggttagaccactttctgattagccgccacctgcctgcatctgtgaaaagggatctgctcccaggcgttctcacccttcttttgaaggactccttaggctttgttgaatgaagcagagaagattgtatagttggggctggtcttggtgaacacacattattaccccacacatcccctttgtgtagaaagccaaataaaatctatacataccatt

SEQ ID NO: 22180 - protein, 739 aa, Homo sapiens
MFKNAPTPQEFREGEDAVIVCDVVSSLPPTIIWKHKGRDVILKKDVRFIVLSNNYLQIRGIKKTDEGTYRCEGRILARGEINFKDIQVIVNVPPTIQARQNIVNATANLGQSVTLVCDAEGFPEPTMSWTKDGEQIEQEEDDEKYIFSDDSSQLTIKKVDKNDEAEYICIAENKAGEQDATIHLKVFAKPKITYVENQTAMELEEQVTLTCEASGDPIPSITWRTSTRNISSEEKASWTRPEKQETLDGHMVVRSHARVSSLTLKSIQYTDAGEYICTASNTIGQDSQSMYLEVQYAPKLQGPVAVYTWEGNQVNITCEVFAYPSATISWFRDGQLLPSSNYSNIKIYNTPSASYLEVTPDSENDFGNYNCTAVNRIGQESLEFILVQADTPSSPSIDQVEPYSSTAQVQFDEPEATGGVPILKYKAEWRAVGEEVWHSKWYDAKEASMEGIVTIVGLKPETTYAVRLAALNGKGLGEISAASEFKTQPVREPSAPKLEGQMGEDGNSIKVNLIKQDDGGSPIRHYLVRYRALSSEWKPEIRLPSGSDHVMLKSLDWNAEYEVYVVAENQQGKSKAAHFVFRTSAQPTAIPANGSPTSGLSTGAIVGILIVIFVLLLVVVDITCYFLNKCGLFMCIAVNLCGKAGPGAKGKDMEEGKAAFSKDESKEPIVEVRTEEERTPNHDGGKHTEPNETTPLTEPEKGPVEAKPECQETETKPAPAEVKTVPNDATQTKENESKA

SEQ ID NO: 22181 - DNA, 5815 bp, Homo sapiens
gagttgcgagtgtgctgaggctgggactgtcactcattctccgatcagcgcgtgaacgcagctcggctgccgctggcaggaaacaattctgcaaaaataatcatactcagcctggcaattgtctgcccctaggtctgtcgctcagccgccgtccacactcgctgcaggggggggggcacagaatttaccgcggcaagacatccctcccagccagcagattacaatgctgccaaactaaggatttcatttggactttgtttttcctgggaactgcagtttctctgcaggtggatattgttcccagccagggggagatcagcgttggagagtccaaattcttcttatgccaaggcaagagatgccaaagataaagacatctcctggttctcccccaatggagaaaagctcaccccaaaccagcagcggatctcagtggtgtggaatgatgattcctcctccaccctcaccatctataacgccaacatcgacgacgccggcatttacaagtgtgtggttacaggcgaggatggcagtgagtcagaggccaccgtcaacgtgaagatctttcagaagctcatgttcaagaatgcgccaaccccacaggagttccgggagggggaagatgccgtgattgtgtgtgatgtggtcagctccctcccaccaaccatcatctggaaacacaaaggccgagatgtcatcctgaaaaaagatgtccgattcatagtcctgtccaacaactacctgcagatccggggcatcaagaaaacagatgagggcacttatcgctgtgagggcagaatcctggcacggggggagatcaacttcaaggacattcaggtcattgtgaatgtgccacctaccatccaggccaggcagaatattgtgaatgccaccgccaacctcggccagtccgtcaccctggtgtgcgatgccgaaggcttcccagagcccaccatgagctggacaaaggatggggaacagatagagcaagaggaagacgatgagaagtacatcttcagcgacgatagttcccagctgaccatcaaaaaggtggataagaacgacgaggctgagtacatctgcattgctgagaacaaggctggcgagcaggatgcgaccatccacctcaaagtctttgcaaaacccaaaatcacatatgtagagaaccagactgccatggaattagaggagcaggtcactcttacctgtgaagcctccggagaccccattccctccatcacctggaggacttctacccggaacatcagcagcgaagaaaagactctggatgggcacatggtggtgcgtagccatgcccgtgtgtcgtcgctgaccctgaagagcatccagtacactgatgccggagagtacatctgcaccgccagcaacaccatcggccaggactcccagtccatgtaccttgaagtgcaatatgccccaaagctacagggccctgtggctgtgtacacttgggaggggaaccaggtgaacatcacctgcgaggtatttgcctatcccagtgccacgatctcatggtttcgggatggccagctgctgccaagctccaattacagcaatatcaagatctacaacaccccctctgccagctatctggaggtgaccccagactctgagaatgattttgggaactacaactgtactgcagtgaaccgcattgggcaggagtccttggaattcatccttgttcaagcagacaccccctcttcaccatccatcgaccaggtggagccatactccagcacagcccaggtgcagtttgatgaaccagaggccacaggtggggtgcccatcctcaaatacaaagctgagtggagagcagttggtgaagaagtatggcattccaagtggtatgatgccaaggaagccagcatggagggcatcgtcaccatcgtgggcctgaagcccgaaacaacgtacgccgtaaggctggcggcgctcaatggcaaagggctgggtgagatcagcgcggcctccgagttcaagacgcagccagtccgggaacccagtgcacctaagctcgaagggcagatgggagaggatggaaactctattaaagtgaacctgatcaagcaggatgacggcggctcccccatcagacactatctggtcaggtaccgagcgctctcctccgagtggaaaccagagatcaggctcccgtctggcagtgaccacgtcatgctgaagtccctggactggaatgctgagtatgaggtctacgtggtggctgagaaccagcaaggaaaatccaaggcggctcattttgtgttcaggacctcggcccagcccacagccatcccagccaacggcagccccacctcaggcctgagcaccggggccatcgtgggcatcctcatcgtcatcttcgtcctgctcctggtggttgtggacatcacctgctacttcctgaacaagtgtggcctgttcatgtgcattgcggtcaacctgtgtggaaaagccgggcccggggccaagggcaaggacatggaggagggcaaggccgccttctcgaaagatgagtccaaggagcccatcgtggaggttcgaacggaggaggagaggaccccaaaccatgatggagggaaacacacagagcccaacgagaccacgccactgacggagcccgagaagggccccgtagaagcaaagccagagtgccaggagacagaaacgaagccagcgccagccgaagtcaagacggtccccaatgacgccacacagacaaaggagaacgagagcaaagcatgatgggtgaagagaaccgagcaaagatcaaaataaaaagtgacacagcagcttcaccagagcatttccaacaccacagacacacacacgcacgcacacacacaaacacacatgcacacacacacatctcatttctctagtgtcttttgcctttaaaaaaaactaaacagataaaacatgggaatctcctttttgtaggtttatagaaagggtccctttgttgcacactcacttgtaagaaaatgagacaaaaaggttaaacccacagccaaactaggacactccgttccctgaaaccgttaaaaaatcaaacaaaaggaccccaaattaagaatctaggaagctcagaaacgaaatctaggttcaggaagaccacacttggtgttacccgattggcacagaccagtttcagagaaatactttcaggcactaagactaatcgaatgaacaaagtccacagtttatttttatactttcagtcaagtttgaactctgtaaaacctcataaataagttataatttctgttcactttgtatttgttcagtatgcaaagtgtgtcaccctttctagctgaattcaattcccacgtagactcttattttataggacgaatgccaaattgcagcttctgggggtagatctcaatttgcagtattcagacttctttttctttcttttacattcttttttctttctttctttctgccaactttgttttccagtgtttacaaggtgacaaatgtttgactttggttgtgtttaaatgtccgtgtaaaatagctgccttttattttttaaggtaacaaataccacctagaggtaggtaggatcatcccacgcttgctttagcacaggacaactttacaaaacatgattgtttacagctgctcttcccctcttttctgatctgcagtttttgcctgggtcccactcaggtgaaaatccatctcattctggaatggttttgcttttgaatttttggttatttttgtgtttctttgggggttagaccactttctgattagccgccacctgcctgcatctgtgaaaagggatctgctcccaggcgttctcacccttcttttgaaggactccttaggctttgttgaatgaagcagagaagattgtatagttggggctggtcttggtgaacacacattattaccccacacatcccctttgtgtagaaagccaaataaaatctatacataccatttccttttgagcccagaatctagatttgagcggaagagcatgtgtgcttcagggaattagtgtctttttttggaaatctgttgaagtaaagtaacatcggccttctgttcacttaggcagcatttatagaaacaaaagaagaaagaaacaacctactgtctggagtcataacacaactttcctggattggaaaccaagtgggggaaaaaatacagaaactttaagggggatgggaggggggggagaagggaaaagccagccctttgtatagaaattttgcttttttttccctcattctactttagaactgcaagcttgtgcactgtggatgcgtgaatattttagtgtgaaacgtgtttttgtcatagtattgaaataaaacttcaacatagtttggttgtggaaggtatagcagatagttcagaaaaaatattcaggaaacaaaaatcactcaaacggaatcgaagccttttaacaaagaaaatgaaatacagatgatgatgatgatgatgaagatgatgctaagtaaacagaaatcagtactccgcatgcgctcctctcctaaggtacaaagcagcaagaggttagggtggcaaggctgcctctgggtccattctgtgggccactctccccaacgttctgacacttctgcagtctgatcagtggcgatgctagattataatttcaaactgtgaagaataatggtcttgtcatttgctcaatgtggggttatgttgcattttctcagctcctggggatggaaatggaggatcccagaacacacagccctggcccctttgattctagggcctgcacagatctctggttcaaatgcacaggccctcagaatagaggaacatgaagagagatcttagagcacacagtagaatgtgagagcctgggtgtctgagaccgggagggcccagcagtgaggggcaggctcttctggtcaccaggctgttcagtggactcagttcttcatcttgtaatgtcgatggctttgccacaccaggccaagcccatgccataccttgtcaagactgtcaaagtggttgtggttaggtcaaactggttttggttctgatggttaggaagaaacaggtcagccctcagatcacctggcccgggacagctgaccccctagaaccctggctctgccattagctaggacctaagactctgcccacattttggtctgttctctcccattacacataggtttgtctcagcatgcaagagtttttcctttaaaaaaaaaaaaaaaaaaaaaaaaaaagcaatgctttctctaaaatcaaagagggagtcattttattccaagatgttttatcttttatgttaagagatcaaagcttataattttcttttttaatttttgaaggagggatcaactccagtttccaatgtctatgtgtctatgtgtgtatgtgccatacatatgtattcacatgaagaccggcatggccaagttctgctggaggagcactcaagtgtgacgagcagggccactggaccctgcagggctgtggtgtatatagtgcagctttggaggtggaactctattttcacacttttctatggagccttccgagtcccaggttttcacttgaggctgtctgtctggatggcggttttcagacctccattaacatccctacccagcattctgtacttcgggggccttctctcttgttataaaactttttaccaagtgaaacatcgataccacctttgtttccattctcactggtgtaaatactgagtactaactgagaattttgactttgcattctgtcggaatacttgtgttcaataaaaattgaaagaaaaaagcta

SEQ ID NO: 22182 - protein, 729 aa, Homo sapiens; identical to SEQ ID NO: 22178

SEQ ID NO: 22183 - DNA, 4341 bp, Homo sapiens
tgttagggagtatggaaatgttggggccagtgccatggttgtatgttgagggagtgaaactctcttctcaggttcaggagaaggtattacaagaagaggaacccatacccagacagccctgctgttgtcctgcattgttgagggaggaattatgtcctatgtgtttgtagtaacagaatccacagctaagaaaagacaagctcaggagggaagtccttgggtagatgctaaagagccttctctttgttctttgtgccagaagctataggtttctaattatgatggcaggagaagtgtccttatgaagtgtgtcgctgtgtataaaaatatctctatgttttgttattgctgtgttctttgtgtgatagatgttattaggagcacactctgtcctttccaaggacgtaatctgactgttttctgtttcctcttcttttttgctttgctttccaacctgatgatgtgctgctgtgttctgttgcaatgaaattccttcatctgtttcacatcgcaacaaaaagtttctctgcaggtggatattgttcccagccagggggagatcagcgttggagagtccaaattcttcttatgccaaggcaagagatgccaaagataaagacatctcctggttctcccccaatggagaaaagctcaccccaaaccagcagcggatctcagtggtgtggaatgatgattcctcctccaccctcaccatctataacgccaacatcgacgacgccggcatttacaagtgtgtggttacaggcgaggatggcagtgagtcagaggccaccgtcaacgtgaagatctttcagaagctcatgttcaagaatgcgccaaccccacaggagttccgggagggggaagatgccgtgattgtgtgtgatgtggtcagctccctcccaccaaccatcatctggaaacacaaaggccgagatgtcatcctgaaaaaagatgtccgattcatagtcctgtccaacaactacctgcagatccggggcatcaagaaaacagatgagggcacttatcgctgtgagggcagaatcctggcacggggggagatcaacttcaaggacattcaggtcattgtgaatgtgccacctaccatccaggccaggcagaatattgtgaatgccaccgccaacctcggccagtccgtcaccctggtgtgcgatgccgaaggcttcccagagcccaccatgagctggacaaaggatggggaacagatagagcaagaggaagacgatgagaagtacatcttcagcgacgatagttcccagctgaccatcaaaaaggtggataagaacgacgaggctgagtacatctgcattgctgagaacaaggctggcgagcaggatgcgaccatccacctcaaagtctttgcaaaacccaaaatcacatatgtagagaaccagactgccatggaattagaggagcaggtcactcttacctgtgaagcctccggagaccccattccctccatcacctggaggacttctacccggaacatcagcagcgaagaaaagactctggatgggcacatggtggtgcgtagccatgcccgtgtgtcgtcgctgaccctgaagagcatccagtacactgatgccggagagtacatctgcaccgccagcaacaccatcggccaggactcccagtccatgtaccttgaagtgcaatatgccccaaagctacagggccctgtggctgtgtacacttgggaggggaaccaggtgaacatcacctgcgaggtatttgcctatcccagtgccacgatctcatggtttcgggatggccagctgctgccaagctccaattacagcaatatcaagatctacaacaccccctctgccagctatctggaggtgaccccagactctgagaatgattttgggaactacaactgtactgcagtgaaccgcattgggcaggagtccttggaattcatccttgttcaagcagacaccccctcttcaccatccatcgaccaggtggagccatactccagcacagcccaggtgcagtttgatgaaccagaggccacaggtggggtgcccatcctcaaatacaaagctgagtggagagcagttggtgaagaagtatggcattccaagtggtatgatgccaaggaagccagcatggagggcatcgtcaccatcgtgggcctgaagcccgaaacaacgtacgccgtaaggctggcggcgctcaatggcaaagggctgggtgagatcagcgcggcctccgagttcaagacgcagccagtccgggaacccagtgcacctaagctcgaagggcagatgggagaggatggaaactctattaaagtgaacctgatcaagcaggatgacggcggctcccccatcagacactatctggtcaggtaccgagcgctctcctccgagtggaaaccagagatcaggctcccgtctggcagtgaccacgtcatgctgaagtccctggactggaatgctgagtatgaggtctacgtggtggctgagaaccagcaaggaaaatccaaggcggctcattttgtgttcaggacctcggcccagcccacagccatcccagccaacggcagccccacctcaggcctgagcaccggggccatcgtgggcatcctcatcgtcatcttcgtcctgctcctggtggttgtggacatcacctgctacttcctgaacaagtgtggcctgttcatgtgcattgcggtcaacctgtgtggaaaagccgggcccggggccaagggcaaggacatggaggagggcaaggccgccttctcgaaagatgagtccaaggagcccatcgtggaggttcgaacggaggaggagaggaccccaaaccatgatggagggaaacacacagagcccaacgagaccacgccactgacggagcccgagctgcctgccgacactacggccactgtcgaggacatgctgccttctgtcaccaccgtcaccactaactctgacactatcaccgaaacctttgccactgctcagaacagccccaccagaagggccccgtagaagcaaagccagagtgccaggagacagaaacgaagccagcgccagccgaagtcaagacggtccccaatgacgccacacagacaaaggagaacgagagcaaagcatgatgggtgaagagaaccgagcaaagatcaaaataaaaagtgacacagcagcttcaccagagcatttccaacaccacagacacacacacgcacgcacacacacaaacacacatgcacacacacacatctcatttctctagtgtcttttgcctttaaaaaaaactaaacagataaaacatgggaatctcctttttgtaggtttatagaaagggtccctttgttgcacactcacttgtaagaaaatgagacaaaaaggttaaacccacagccaaactaggacactccgttccctgaaaccgttaaaaaatcaaacaaaaggaccccaaattaagaatctaggaagctcagaaacgaaatctaggttcaggaagaccacacttggtgttacccgattggcacagaccagtttcagagaaatactttcaggcactaagactaatcgaatgaacaaagtccacagtttatttttatactttcagtcaagtttgaactctgtaaaacctcataaataagttataatttctgttcactttgtatttgttcagtatgcaaagtgtgtcaccctttctagctgaattcaattcccacgtagactcttattttataggacgaatgccaaattgcagcttctgggggtagatctcaatttgcagtattcagacttctttttctttcttttacattcttttttctttctttctttctgccaactttgttttccagtgtttacaaggtgacaaatgtttgactttggttgtgtttaaatgtccgtgtaaaatagctgccttttattttttaaggtaacaaataccacctagaggtaggtaggatcatcccacgcttgctttagcacaggacaactttacaaaacatgattgtttacagctgctcttcccctcttttctgatctgcagtttttgcctgggtcccactcaggtgaaaatccatctcattctggaatggttttgcttttgaatttttggttatttttgtgtttctttgggggttagaccactttctgattagccgccacctgcctgcatctgtgaaaagggatctgctcccaggcgttctcacccttcttttgaaggactccttaggctttgttgaatgaagcagagaagattgtatagttggggctggtcttggtgaacacacattattaccccacacatcccctttgtgtagaaagccaaataaaatctatacataccatt

SEQ ID NO: 22184 - protein, 732 aa, Homo sapiens
MFKNAPTPQEFREGEDAVIVCDVVSSLPPTIIWKHKGRDVILKKDVRFIVLSNNYLQIRGIKKTDEGTYRCEGRILARGEINFKDIQVIVNVPPTIQARQNIVNATANLGQSVTLVCDAEGFPEPTMSWTKDGEQIEQEEDDEKYIFSDDSSQLTIKKVDKNDEAEYICIAENKAGEQDATIHLKVFAKPKITYVENQTAMELEEQVTLTCEASGDPIPSITWRTSTRNISSEEKTLDGHMVVRSHARVSSLTLKSIQYTDAGEYICTASNTIGQDSQSMYLEVQYAPKLQGPVAVYTWEGNQVNITCEVFAYPSATISWFRDGQLLPSSNYSNIKIYNTPSASYLEVTPDSENDFGNYNCTAVNRIGQESLEFILVQADTPSSPSIDQVEPYSSTAQVQFDEPEATGGVPILKYKAEWRAVGEEVWHSKWYDAKEASMEGIVTIVGLKPETTYAVRLAALNGKGLGEISAASEFKTQPVREPSAPKLEGQMGEDGNSIKVNLIKQDDGGSPIRHYLVRYRALSSEWKPEIRLPSGSDHVMLKSLDWNAEYEVYVVAENQQGKSKAAHFVFRTSAQPTAIPANGSPTSGLSTGAIVGILIVIFVLLLVVVDITCYFLNKCGLFMCIAVNLCGKAGPGAKGKDMEEGKAAFSKDESKEPIVEVRTEEERTPNHDGGKHTEPNETTPLTEPELPADTTATVEDMLPSVTTVTTNSDTITETFATAQNSPTRRAP

SEQ ID NO: 22185 - DNA, 6176 bp, Homo sapiens
tgttagggagtatggaaatgttggggccagtgccatggttgtatgttgagggagtgaaactctcttctcaggttcaggagaaggtattacaagaagaggaacccatacccagacagccctgctgttgtcctgcattgttgagggaggaattatgtcctatgtgtttgtagtaacagaatccacagctaagaaaagacaagctcaggagggaagtccttgggtagatgctaaagagccttctctttgttctttgtgccagaagctataggtttctaattatgatggcaggagaagtgtccttatgaagtgtgtcgctgtgtataaaaatatctctatgttttgttattgctgtgttctttgtgtgatagatgttattaggagcacactctgtcctttccaaggacgtaatctgactgttttctgtttcctcttcttttttgctttgctttccaacctgatgatgtgctgctgtgttctgttgcaatgaaattccttcatctgtttcacatcgcaacaaaaagtttctctgcaggtggatattgttcccagccagggggagatcagcgttggagagtccaaattcttcttatgccaaggcaagagatgccaaagataaagacatctcctggttctcccccaatggagaaaagctcaccccaaaccagcagcggatctcagtggtgtggaatgatgattcctcctccaccctcaccatctataacgccaacatcgacgacgccggcatttacaagtgtgtggttacaggcgaggatggcagtgagtcagaggccaccgtcaacgtgaagatctttcagaagctcatgttcaagaatgcgccaaccccacaggagttccgggagggggaagatgccgtgattgtgtgtgatgtggtcagctccctcccaccaaccatcatctggaaacacaaaggccgagatgtcatcctgaaaaaagatgtccgattcatagtcctgtccaacaactacctgcagatccggggcatcaagaaaacagatgagggcacttatcgctgtgagggcagaatcctggcacggggggagatcaacttcaaggacattcaggtcattgtgaatgtgccacctaccatccaggccaggcagaatattgtgaatgccaccgccaacctcggccagtccgtcaccctggtgtgcgatgccgaaggcttcccagagcccaccatgagctggacaaaggatggggaacagatagagcaagaggaagacgatgagaagtacatcttcagcgacgatagttcccagctgaccatcaaaaaggtggataagaacgacgaggctgagtacatctgcattgctgagaacaaggctggcgagcaggatgcgaccatccacctcaaagtctttgcaaaacccaaaatcacatatgtagagaaccagactgccatggaattagaggagcaggtcactcttacctgtgaagcctccggagaccccattccctccatcacctggaggacttctacccggaacatcagcagcgaagaaaagactctggatgggcacatggtggtgcgtagccatgcccgtgtgtcgtcgctgaccctgaagagcatccagtacactgatgccggagagtacatctgcaccgccagcaacaccatcggccaggactcccagtccatgtaccttgaagtgcaatatgccccaaagctacagggccctgtggctgtgtacacttgggaggggaaccaggtgaacatcacctgcgaggtatttgcctatcccagtgccacgatctcatggtttcgggatggccagctgctgccaagctccaattacagcaatatcaagatctacaacaccccctctgccagctatctggaggtgaccccagactctgagaatgattttgggaactacaactgtactgcagtgaaccgcattgggcaggagtccttggaattcatccttgttcaagcagacaccccctcttcaccatccatcgaccaggtggagccatactccagcacagcccaggtgcagtttgatgaaccagaggccacaggtggggtgcccatcctcaaatacaaagctgagtggagagcagttggtgaagaagtatggcattccaagtggtatgatgccaaggaagccagcatggagggcatcgtcaccatcgtgggcctgaagcccgaaacaacgtacgccgtaaggctggcggcgctcaatggcaaagggctgggtgagatcagcgcggcctccgagttcaagacgcagccagtccgggaacccagtgcacctaagctcgaagggcagatgggagaggatggaaactctattaaagtgaacctgatcaagcaggatgacggcggctcccccatcagacactatctggtcaggtaccgagcgctctcctccgagtggaaaccagagatcaggctcccgtctggcagtgaccacgtcatgctgaagtccctggactggaatgctgagtatgaggtctacgtggtggctgagaaccagcaaggaaaatccaaggcggctcattttgtgttcaggacctcggcccagcccacagccatcccagccaacggcagccccacctcaggcctgagcaccggggccatcgtgggcatcctcatcgtcatcttcgtcctgctcctggtggttgtggacatcacctgctacttcctgaacaagtgtggcctgttcatgtgcattgcggtcaacctgtgtggaaaagccgggcccggggccaagggcaaggacatggaggagggcaaggccgccttctcgaaagatgagtccaaggagcccatcgtggaggttcgaacggaggaggagaggaccccaaaccatgatggagggaaacacacagagcccaacgagaccacgccactgacggagcccgagctgcctgccgacactacggccactgtcgaggacatgctgccttctgtcaccaccgtcaccactaactctgacactatcaccgaaacctttgccactgctcagaacagccccaccagaagggccccgtagaagcaaagccagagtgccaggagacagaaacgaagccagcgccagccgaagtcaagacggtccccaatgacgccacacagacaaaggagaacgagagcaaagcatgatgggtgaagagaaccgagcaaagatcaaaataaaaagtgacacagcagcttcaccagagcatttccaacaccacagacacacacacgcacgcacacacacaaacacacatgcacacacacacatctcatttctctagtgtcttttgcctttaaaaaaaactaaacagataaaacatgggaatctcctttttgtaggtttatagaaagggtccctttgttgcacactcacttgtaagaaaatgagacaaaaaggttaaacccacagccaaactaggacactccgttccctgaaaccgttaaaaaatcaaacaaaaggaccccaaattaagaatctaggaagctcagaaacgaaatctaggttcaggaagaccacacttggtgttacccgattggcacagaccagtttcagagaaatactttcaggcactaagactaatcgaatgaacaaagtccacagtttatttttatactttcagtcaagtttgaactctgtaaaacctcataaataagttataatttctgttcactttgtatttgttcagtatgcaaagtgtgtcaccctttctagctgaattcaattcccacgtagactcttattttataggacgaatgccaaattgcagcttctgggggtagatctcaatttgcagtattcagacttctttttctttcttttacattcttttttctttctttctttctgccaactttgttttccagtgtttacaaggtgacaaatgtttgactttggttgtgtttaaatgtccgtgtaaaatagctgccttttattttttaaggtaacaaataccacctagaggtaggtaggatcatcccacgcttgctttagcacaggacaactttacaaaacatgattgtttacagctgctcttcccctcttttctgatctgcagtttttgcctgggtcccactcaggtgaaaatccatctcattctggaatggttttgcttttgaatttttggttatttttgtgtttctttgggggttagaccactttctgattagccgccacctgcctgcatctgtgaaaagggatctgctcccaggcgttctcacccttcttttgaaggactccttaggctttgttgaatgaagcagagaagattgtatagttggggctggtcttggtgaacacacattattaccccacacatcccctttgtgtagaaagccaaataaaatctatacataccatttccttttgagcccagaatctagatttgagcggaagagcatgtgtgcttcagggaattagtgtctttttttggaaatctgttgaagtaaagtaacatcggccttctgttcacttaggcagcatttatagaaacaaaagaagaaagaaacaacctactgtctggagtcataacacaactttcctggattggaaaccaagtgggggaaaaaatacagaaactttaagggggatgggaggggggggagaagggaaaagccagccctttgtatagaaattttgcttttttttccctcattctactttagaactgcaagcttgtgcactgtggatgcgtgaatattttagtgtgaaacgtgtttttgtcatagtattgaaataaaacttcaacatagtttggttgtggaaggtatagcagatagttcagaaaaaatattcaggaaacaaaaatcactcaaacggaatcgaagccttttaacaaagaaaatgaaatacagatgatgatgatgatgatgaagatgatgctaagtaaacagaaatcagtactccgcatgcgctcctctcctaaggtacaaagcagcaagaggttagggtggcaaggctgcctctgggtccattctgtgggccactctccccaacgttctgacacttctgcagtctgatcagtggcgatgctagattataatttcaaactgtgaagaataatggtcttgtcatttgctcaatgtggggttatgttgcattttctcagctcctggggatggaaatggaggatcccagaacacacagccctggcccctttgattctagggcctgcacagatctctggttcaaatgcacaggccctcagaatagaggaacatgaagagagatcttagagcacacagtagaatgtgagagcctgggtgtctgagaccgggagggcccagcagtgaggggcaggctcttctggtcaccaggctgttcagtggactcagttcttcatcttgtaatgtcgatggctttgccacaccaggccaagcccatgccataccttgtcaagactgtcaaagtggttgtggttaggtcaaactggttttggttctgatggttaggaagaaacaggtcagccctcagatcacctggcccgggacagctgaccccctagaaccctggctctgccattagctaggacctaagactctgcccacattttggtctgttctctcccattacacataggtttgtctcagcatgcaagagtttttcctttaaaaaaaaaaaaaaaaaaaaaaaaaaagcaatgctttctctaaaatcaaagagggagtcattttattccaagatgttttatcttttatgttaagagatcaaagcttataattttcttttttaatttttgaaggagggatcaactccagtttccaatgtctatgtgtctatgtgtgtatgtgccatacatatgtattcacatgaagaccggcatggccaagttctgctggaggagcactcaagtgtgacgagcagggccactggaccctgcagggctgtggtgtatatagtgcagctttggaggtggaactctattttcacacttttctatggagccttccgagtcccaggttttcacttgaggctgtctgtctggatggcggttttcagacctccattaacatccctacccagcattctgtacttcgggggccttctctcttgttataaaactttttaccaagtgaaacatcgataccacctttgtttccattctcactggtgtaaatactgagtactaactgagaattttgactttgcattctgtcggaatacttgtgttcaataaaaattgaaagaaaaaagcta

SEQ ID NO: 22186 - protein, 732 aa, Homo sapiens; identical to SEQ ID NO: 22184

SEQ ID NO: 22187 - DNA, 446 bp, Homo sapiens
actgtcagccctcaaaaatccagtatctccaacaaactgggtgtcacaaggctttctagtgaagtgttccacacctgtttgttgtcatctctcattaatgtgtggcatctcctgggatgcatctttcaaccaaccagcatcccagatttataggtcaaagcagaggatcagagaactcatcccagggaggaatggcacttgcagaaatgggcagccatgactttgcttgactcttctgtcttcttgctagagttgttttttagcttccagacatgaaatgctccacacaccatggggcccctttgctcatttttggactatttatacagcaggtttggatcatgtttttctactaataagaatgctaacattgttgtgtagataatcagtgagggctttatgaagtttacacctttgcattattaaaggaaataacagttcatgtg

SEQ ID NO: 22188 - protein, 35 aa, Homo sapiens
MLHTPWGPFAHFWTIYTAGLDHVFLLIRMLTLLCR

SEQ ID NO: 22189 - DNA, 3899 bp, Homo sapiens
ctttgccactgctcagaacagccccaccagtgagaccaccaccctgacctccagtattgccccgccggccacggccacgcctgactcaaactctgtaccggctggccaggccaccccttccaaggggcccagcgcctctgccccctccccggccccagcttcagcccccaaggtcgcccccctcgttgacctgagcgacaccccgacctcaacccctgccgctagcaatttgtcttctagtgtcctggctaaccaaggggctgtcctcagcccaagcgcccctgctggtgtcggggaggcctctaaggctcctccggccagcaagcccacccctgcaccagtccccaccccgactggggcagccagtcctctagcagcagcggctgcccctgccacagaagcccctcaggccaagcaggaggctcccagcaccaaaggcccggacccggagcccacccagcccggagccgcgaagagcccggccgaggcagccacagcccttgctagcccgaagagcgaggctgcctccgtcagcaccacaaacccttcccagggcgaggactttaaaatggacgaagggaacttcaagaccccagatattgaccttgcaaaggatgtttttgcagccctgggctctcctgctcccgccgctggggccagtggacaagcccctgagcttgctccttccactgcagacagctctgtttcgcctgcgccagcaaagaccgagaagggccccgtagaagcaaagccagagtgccaggagacagaaacgaagccagcgccagccgaagtcaagacggtccccaatgacgccacacagacaaaggagaacgagagcaaagcatgatgggtgaagagaaccgagcaaagatcaaaataaaaagtgacacagcagcttcaccagagcatttccaacaccacagacacacacacgcacgcacacacacaaacacacatgcacacacacacatctcatttctctagtgtcttttgcctttaaaaaaaactaaacagataaaacatgggaatctcctttttgtaggtttatagaaagggtccctttgttgcacactcacttgtaagaaaatgagacaaaaaggttaaacccacagccaaactaggacactccgttccctgaaaccgttaaaaaatcaaacaaaaggaccccaaattaagaatctaggaagctcagaaacgaaatctaggttcaggaagaccacacttggtgttacccgattggcacagaccagtttcagagaaatactttcaggcactaagactaatcgaatgaacaaagtccacagtttatttttatactttcagtcaagtttgaactctgtaaaacctcataaataagttataatttctgttcactttgtatttgttcagtatgcaaagtgtgtcaccctttctagctgaattcaattcccacgtagactcttattttataggacgaatgccaaattgcagcttctgggggtagatctcaatttgcagtattcagacttctttttctttcttttacattcttttttctttctttctttctgccaactttgttttccagtgtttacaaggtgacaaatgtttgactttggttgtgtttaaatgtccgtgtaaaatagctgccttttattttttaaggtaacaaataccacctagaggtaggtaggatcatcccacgcttgctttagcacaggacaactttacaaaacatgattgtttacagctgctcttcccctcttttctgatctgcagtttttgcctgggtcccactcaggtgaaaatccatctcattctggaatggttttgcttttgaatttttggttatttttgtgtttctttgggggttagaccactttctgattagccgccacctgcctgcatctgtgaaaagggatctgctcccaggcgttctcacccttcttttgaaggactccttaggctttgttgaatgaagcagagaagattgtatagttggggctggtcttggtgaacacacattattaccccacacatcccctttgtgtagaaagccaaataaaatctatacataccatttccttttgagcccagaatctagatttgagcggaagagcatgtgtgcttcagggaattagtgtctttttttggaaatctgttgaagtaaagtaacatcggccttctgttcacttaggcagcatttatagaaacaaaagaagaaagaaacaacctactgtctggagtcataacacaactttcctggattggaaaccaagtgggggaaaaaatacagaaactttaagggggatgggaggggggggagaagggaaaagccagccctttgtatagaaattttgcttttttttccctcattctactttagaactgcaagcttgtgcactgtggatgcgtgaatattttagtgtgaaacgtgtttttgtcatagtattgaaataaaacttcaacatagtttggttgtggaaggtatagcagatagttcagaaaaaatattcaggaaacaaaaatcactcaaacggaatcgaagccttttaacaaagaaaatgaaatacagatgatgatgatgatgatgaagatgatgctaagtaaacagaaatcagtactccgcatgcgctcctctcctaaggtacaaagcagcaagaggttagggtggcaaggctgcctctgggtccattctgtgggccactctccccaacgttctgacacttctgcagtctgatcagtggcgatgctagattataatttcaaactgtgaagaataatggtcttgtcatttgctcaatgtggggttatgttgcattttctcagctcctggggatggaaatggaggatcccagaacacacagccctggcccctttgattctagggcctgcacagatctctggttcaaatgcacaggccctcagaatagaggaacatgaagagagatcttagagcacacagtagaatgtgagagcctgggtgtctgagaccgggagggcccagcagtgaggggcaggctcttctggtcaccaggctgttcagtggactcagttcttcatcttgtaatgtcgatggctttgccacaccaggccaagcccatgccataccttgtcaagactgtcaaagtggttgtggttaggtcaaactggttttggttctgatggttaggaagaaacaggtcagccctcagatcacctggcccgggacagctgaccccctagaaccctggctctgccattagctaggacctaagactctgcccacattttggtctgttctctcccattacacataggtttgtctcagcatgcaagagtttttcctttaaaaaaaaaaaaaaaaaaaaaaaaaaagcaatgctttctctaaaatcaaagagggagtcattttattccaagatgttttatcttttatgttaagagatcaaagcttataattttcttttttaatttttgaaggagggatcaactccagtttccaatgtctatgtgtctatgtgtgtatgtgccatacatatgtattcacatgaagaccggcatggccaagttctgctggaggagcactcaagtgtgacgagcagggccactggaccctgcagggctgtggtgtatatagtgcagctttggaggtggaactctattttcacacttttctatggagccttccgagtcccaggttttcacttgaggctgtctgtctggatggcggttttcagacctccattaacatccctacccagcattctgtacttcgggggccttctctcttgttataaaactttttaccaagtgaaacatcgataccacctttgtttccattctcactggtgtaaatactgagtactaactgagaattttgactttgcattctgtcggaatacttgtgttcaataaaaattgaaagaaaaaagcta

SEQ ID NO: 22190 - protein, 93 aa, Homo sapiens
MDEGNFKTPDIDLAKDVFAALGSPAPAAGASGQAPELAPSTADSSVSPAPAKTEKGPVEAKPECQETETKPAPAEVKTVPNDATQTKENESKA

SEQ ID NO: 22191 - DNA, 1325 bp, Homo sapiens
taggtaggatcatcccacgcttgctttagcacaggacaactttacaaaacatgattgtttacagctgctcttcccctcttttctgatctgcagtttttgcctgggtcccactcaggtgaaaatccatctcattctggaatggttttgcttttgaatttttggttatttttgtgtttctttgggggttagaccactttctgattagccgccacctgcctgcatctgtgaaaagggatctgctcccaggcgttctcacccttcttttgaaggactccttaggctttgttgaatgaagcagagaagattgtatagttggggctggtcttggtgaacacacattattaccccacacatcccctttgtgtagaaagccaaataaaatctatacataccatttccttttgagcccagaatctagatttgagcggaagagcatgtgtgcttcagggaattagtgtctttttttggaaatctgttgaagtaaagtaacatcggccttctgttcacttaggcagcatttatagaaacaaaagaagaaagaaacaacctactgtctggagtcataacacaactttcctggattggaaaccaagtgggggaaaaaatacagaaactttaagggggatgggaggggggggagaagggaaaagccagccctttgtatagaaattttgcttttttttccctcattctactttagaactgcaagcttgtgcactgtggatgcgtgaatattttagtgtgaaacgtgtttttgtcatagtattgaaataaaacttcaacatagtttggttgtggaaggtatagcagatagttcagaaaaaatattcaggaaacaaaaatcactcaaacggaatcgaagccttttaacaaagaaaatgaaatacagatgatgatgatgatgatgaagatgatgctaagtaaacagaaatcagtactccgcatgcgctcctctcctaaggtacaaagcagcaagaggttagggtggcaaggctgcctctgggtccattctgtgggccactctccccaacgttctgacacttctgcagtctgatcagtggcgatgctagattataatttcaaactgtgaagaataatggtcttgtcatttgctcaatgtggggttatacctccattaacatccctacccagcattctgtacttcgggggccttctctcttgttataaaactttttaccaagtgaaacatcgataccacctttgtttccattctcactggtgtaaatactgagtactaactgagaattttgactttgcattctgtcggaatacttgtgttcaataaaaattgaaagaaaaaagct

SEQ ID NO: 22192 - protein, 51 aa, Homo sapiens
MVLSFAQCGVIPPLTSLPSILYFGGLLSCYKTFYQVKHRYHLCFHSHWCKY

SEQ ID NO: 22193 - DNA, 754 bp, Homo sapiens
agaggaaggtcattggagatgaggaggtcaaactgaggggcctttgtgttggaggaattgcccatataatgtactgaagtcactgaggatgatggtggaccttcaggagagaggaggatcatgggctaaagattaaagtcttcacgactgcctggtggaaatacagtattatataatgacatgctactatgcatctctacctaactcctcgtctggtgatgccatattgaaatcagccatactgagagtatttacacactgctgaagtcagtaaatgctacaaatcaaggcttgaatgtaacctacatgagaaagagttgccttgctcactgccgtatcccagtatcccaagaaccttggagatgctctatgaatactgaatgaatctgagaggaaactagcccgaagggggaaggctctggaagcaagccctcatggaccaacggagaaaaaggaaactgaatcttggggagattaagcaactctttcaaggtcaaccggggagcggcagaaccagagttcgaaggaaacctttctgaatctgacgtctgccccttctaaattaggactctcatctatcagcctgtgagaaaaaatacagaaagcatcattcaggcaacacatgaactcaagacactgagacttcgctaaccttcctcgcacacaaggtcctaaaggaactaccacacgcatgtccacatttgatgcacataacagactctcaccgcattgaaataaaccccagtatgatcat

SEQ ID NO: 22194 - protein, 34 aa, Homo sapiens
MDQRRKRKLNLGEIKQLFQGQPGSGRTRVRRKPF

SEQ ID NO: 22195 - DNA, 702 bp, Homo sapiens
agagctctagctccggagcgcgccaagttgaaggccaaagtcgaggttgggatgcccgatgcctggcgcggggagacggaggaagcaaagtgctgctgcctggtggaaatacagtattatataatgacatgctactatgcatctctacctaactcctcgtctggtgatgccatattgaaatcagccatactgagagtatttacacactgctgaagtcagtaaatgctacaaatcaaggcttgaatgtaacctacatgagaaagagttgccttgctcactgccgtatcccagtatcccaagaaccttggagatgctctatgaatactgaatgaatctgagaggaaactagcccgaagggggaaggctctggaagcaagccctcatggaccaacggagaaaaaggaaactgaatcttggggagattaagcaactctttcaaggtcaaccggggagcggcagaaccagagttcgaaggaaacctttctgaatctgacgtctgccccttctaaattaggactctcatctatcagcctgtgagaaaaaatacagaaagcatcattcaggcaacacatgaactcaagacactgagacttcgctaaccttcctcgcacacaaggtcctaaaggaactaccacacgcatgtccacatttgatgcacataacagactctcaccgcattgaaataaaccccagtatgatcat

SEQ ID NO: 22196 - protein, 53 aa, Homo sapiens
MPDAWRGETEEAKCCCLVEIQYYIMTCYYASLPNSSSGDAILKSAILRVFTHC

SEQ ID NO: 22197 - DNA, 480 bp, Homo sapiens
agttgaaggccaaagtcgaggttgggatgcccgatgcctggcgcggggagacggaggaagcaaagtgctgctgcctggtggaaatacagtattatataatgacatgctactatgcatctctacctaactcctcgtctggtgatgccatattgaaatcagccatactgagagtatttacacactgctgaagtcagtaaatgctacaaatcaaggcttgaatgtaacctacatgagaaagagttgccttgctcactgccgtatcccagtatcccaagaaccttggagatgctctatgaatactgaatgaatctgagaggaaactagcccgaagggggaaggctctggaagcaagccctcatggaccaacggagagtgagtgtcatcattttatgttttctccaaatcttgtaaacaatgtgttttagtcttagcctgtcatatgcagctgaaatctggggcaaataaaatcacatagatgca

SEQ ID NO: 22198 - protein, 53 aa, Homo sapiens; identical to SEQ ID NO: 22196

SEQ ID NO: 22199 - DNA, 2294 bp, Homo sapiens
ggctcctggccccgccccagcccaggcaggtcactgcgccatttcctgtccaaagctgggcgaatcagggattccggttcacaatggatgctgataaagagaaagatttgcagaaatttcttaaaaatgtggatgaaatctccaatttaattcaggagatgaattctgatgacccagttgtgcaacagaaagctgtcctggagacagaaaagagactactgcttatggaggaagaccaggaggaggatgaatgcaggaccaccttgaacaagactatgatcagtcctccacaaactgctatgaagagtgcagaagaaataaactcagaggccttcttggcatctgtggagaaggatgcaaaggaacgagccaagagaagaagggaaaacaaagtcttggcggatgccctaaaagaaaaagggaatgaagcatttgctgaaggcaattatgaaacagctatcctgcgctacagtgagggtttggagaagctgaaggacatgaaagtgctgtacaccaaccgagcccaggcttatatgaaacttgaggactatgagaaggcactggtggattgtgagtgggctctcaagtgtgatgaaaaatgcacaaaagcatattttcacatgggaaaagccaacctggccctgaagaactacagtgtgtctagagagtgttataagaagatcttagaaataaaccccaagctgcaaacccaggtgaaaggttacctgaatcaagtagatcttcaggaaaaagcagaccttcaagaaaaggaagcccacgaactgctggattcaggaaagaacacagccgtgaccaccaagaacctcctggagaccctttccaagcctgaccagatccccttgttctatgctggggggattgagatcctgactgaaatgataaatgagtgcacagaacaaactttattcagaatgcacaatggatttagtatcatcagtgacaacgaggtcataagaaggtgtttttccacagcaggaaatgatgcagttgaagaaatggtctgtgtgtctgttctcaagctctggcaagcagtgtgcagcaggaacgaggaaaaccagcgtgtgctagtgatacaccatgacagggccaggctgttggccgccctcttgtcctccaaggtcctggccatccggcagcagagctttgccctgctgctgcatctcgcccagactgagagcggacggagcctgatcatcaaccaccttgacctgaccagattattggaagcgctggtgtcatttcttgatttctcggataaggaggccaacactgctatgggactgttcacagacttggctctggaagaaagattccaagtctggttccaggccaaccttccaggtgttctccctgcactcacaggcgttctgaagacagatcccaaggtaagcagctcctcggctctgtgccagtgcattgccatcatgggaaacctcagtgctgagcccactacccgaagacacatggcggcctgtgaggaatttggggatggctgcttgagcctcctggccaggtgtgaggaggatgtggacctgttcagagaggttatctacacactcctgggactcatgatgaacctgtgtcttcaggctccctttgtctctgaggtttgggctgtggaggtgagcagaaggtgcctgtctttactaaacagccaggatggaggaatcctgacaagagctgctggtgttctgagccggaccctttcttcctctctgaaaattgttgaggaggccttgcgagcaggagtggtaaagaaaatgatgaaattcctgaagacaggaggtgagactgcatcacgttatgctataaagatactagctatctgcacgaatagttatcatgaagctcgggaagaagtaataagactggataaaaagttgagcgttatgatgaagctgctcagctcggaggatgaggttctggtgggcaacgctgccctctgccttggtaactgcatggaggtgcccaacgttgcgtcttccctgctaaagacggaccttttgcaggtcttgttaaagcttgcaggcagtgacacacagaagacggccgtgcaggtgaacgcaggcattgctctggggaagctgtgcacagctgagcccagatttgctgctcaactgagaaagcttcatggcctagaaattctcaactctacgatgaaatacatcagtgattcttgagagagacagggtttgtgtgcatttggggaacacacagatgcacaccgtgtgttgttcctatgctaataaagacctttgatgtatccacttcag

SEQ ID NO: 22200 - protein, 705 aa, Homo sapiens; identical to SEQ ID NO: 2879

SEQ ID NO: 22201 - DNA, 2573 bp, Homo sapiens
ggctcctggccccgccccagcccaggcaggtcactgcgccatttcctgtccaaagctgggcgaatcagggattccggttcacaatggatgctgataaagagaaagatttgcagaaatttcttaaaaatgtggatgaaatctccaatttaattcaggagatgaattctgatgacccagttgtgcaacagaaagctgtcctggagacagaaaagagactactgcttatggaggaagaccaggaggaggatgaatgcaggaccaccttgaacaagactatgatcagtcctccacaaactgctatgaagagtgcagaagaaataaactcagaggccttcttggcatctgtggagaaggatgcaaaggaacgagccaagagaagaagggaaaacaaagtcttggcggatgccctaaaagaaaaagggaatgaagcatttgctgaaggcaattatgaaacagctatcctgcgctacagtgagggtttggagaagctgaaggacatgaaagtgctgtacaccaaccgagcccaggcttatatgaaacttgaggactatgagaaggcactggtggattgtgagtgggctctcaagtgtgatgaaaaatgcacaaaagcatattttcacatgggaaaagccaacctggccctgaagaactacagtgtgtctagagagtgttataagaagatcttagaaataaaccccaagctgcaaacccaggtgaaaggttacctgaatcaagtagatcttcaggaaaaagcagaccttcaagaaaaggaagcccacgaactgctggattcaggaaagaacacagccgtgaccaccaagaacctcctggagaccctttccaagcctgaccagatccccttgttctatgctggggggattgagatcctgactgaaatgataaatgagtgcacagaacaaactttattcagaatgcacaatggatttagtatcatcagtgacaacgaggtcataagaaggtgtttttccacagcaggaaatgatgcagttgaagaaatggtctgtgtgtctgttctcaagctctggcaagcagtgtgcagcaggaacgaggaaaaccagcgtgtgctagtgatacaccatgacagggccaggctgttggccgccctcttgtcctccaaggtcctggccatccggcagcagagctttgccctgctgctgcatctcgcccagactgagagcggacggagcctgatcatcaaccaccttgacctgaccagattattggaagcgctggtgtcatttcttgatttctcggataaggaggccaacactgctatgggactgttcacagacttggctctggaagaaagattccaagtctggttccaggccaaccttccaggtgttctccctgcactcacaggcgttctgaagacagatcccaaggtaagcagctcctcggctctgtgccagtgcattgccatcatgggaaacctcagtgctgagcccactacccgaagacacatggcggcctgtgaggaatttggggatggctgcttgagcctcctggccaggtgtgaggaggatgtggacctgttcagagaggttatctacacactcctgggactcatgatgaacctgtgtcttcaggctccctttgtctctgaggtttgggctgtggaggtgagcagaaggtgcctgtctttactaaacagccaggatggaggaatcctgacaagagctgctggtgttctgagccggaccctttcttcctctctgaaaattgttgaggaggccttgcgagcaggagtggtaaagaaaatgatgaaattcctgaagacaggaggtgagactgcatcacgttatgctataaagatactagctatctgcacgaatagttatcatgaagctcgggaagaagtaataagactggataaaaagttgagcgttatgatgaagctgctcagctcggaggatgaggttctggtgggcaacgctgccctctgccttggtaactgcatggaggtgcccaacgttgcgtcttccctgctaaagacggaccttttgcaggtcttgttaaagcttgcaggcagtgacacacagaagacggccgtgcaggtgaacgcaggcattgctctggggaagctgtgcacagctgagcccagagtgcctgccgagagcagtcatctccaatttggaagagagtctgctgcacctgaagctctgtctcctcgcaggtgggaagagatgtttcacatgctagtattctccctctccagtgtggatccacccccgccaccgccccaaacttgttacccctaacacatgctaccatgcagaccttccaggcagcatggaaaataccagcgccatctttcagaaggcctcatctccacttgccaggagccccgacaccacccttggagacacggcttgttccagatgaggaaactgaggtgcaaagcagttaagcaactggtccaagatctagaccaggtactcaaccaccccactccacatgcaactgtccccaacccatgcgattcatcctttccctgaaggcttgtgtggtgctgccttttaaattcataacataatgacttcattgttatg

SEQ ID NO: 22202 - protein, 732 aa, Homo sapiens
MDADKEKDLQKFLKNVDEISNLIQEMNSDDPVVQQKAVLETEKRLLLMEEDQEEDECRTTLNKTMISPPQTAMKSAEEINSEAFLASVEKDAKERAKRRRENKVLADALKEKGNEAFAEGNYETAILRYSEGLEKLKDMKVLYTNRAQAYMKLEDYEKALVDCEWALKCDEKCTKAYFHMGKANLALKNYSVSRECYKKILEINPKLQTQVKGYLNQVDLQEKADLQEKEAHELLDSGKNTAVTTKNLLETLSKPDQIPLFYAGGIEILTEMINECTEQTLFRMHNGFSIISDNEVIRRCFSTAGNDAVEEMVCVSVLKLWQAVCSRNEENQRVLVIHHDRARLLAALLSSKVLAIRQQSFALLLHLAQTESGRSLIINHLDLTRLLEALVSFLDFSDKEANTAMGLFTDLALEERFQVWFQANLPGVLPALTGVLKTDPKVSSSSALCQCIAIMGNLSAEPTTRRHMAACEEFGDGCLSLLARCEEDVDLFREVIYTLLGLMMNLCLQAPFVSEVWAVEVSRRCLSLLNSQDGGILTRAAGVLSRTLSSSLKIVEEALRAGVVKKMMKFLKTGGETASRYAIKILAICTNSYHEAREEVIRLDKKLSVMMKLLSSEDEVLVGNAALCLGNCMEVPNVASSLLKTDLLQVLLKLAGSDTQKTAVQVNAGIALGKLCTAEPRVPAESSHLQFGRESAAPEALSPRRWEEMFHMLVFSLSSVDPPPPPPQTCYP

SEQ ID NO: 22203 - DNA, 2927 bp, Homo sapiens
aaagctgggcgaatcaggtcggtgccgcggggtaccccggaatcccccctgggagctggtcctgcactggccttcagagccgagcagaggacgctgctttgggccccagagcatgggaaggtcttggctgcggtctgggacggctgcggtctgggacctgcatggagggcccgggacttgcggacgcctgggagcggttgctgggcaacagtgcgtgcggcctggcctctttgcgcccggcgggcagcgcgcgtctggggcaggctccgcgcggggctcgggcacaggtccccgctgccgcagccctaccgagtgaagcactgagcgcagtgaggaccctgagatccatgccctgggagacagaggttgtctcctgtccatgcacccgcgcgcctgccttctaaccttcataccgttgggcagattaattcactggactaggcctctgttccgtgggagttgaaaagatttgacctggaagaaaccctagcgattattcagttaagccgcaaccccaccccctgttttatatagggattccggttcacaatggatgctgataaagagaaagatttgcagaaatttcttaaaaatgtggatgaaatctccaatttaattcaggagatgaattctgatgacccagttgtgcaacagaaagctgtcctggagacagaaaagagactactgcttatggaggaagaccaggaggaggatgaatgcaggaccaccttgaacaagactatgatcagtcctccacaaactgctatgaagagtgcagaagaaataaactcagaggccttcttggcatctgtggagaaggatgcaaaggaacgagccaagagaagaagggaaaacaaagtcttggcggatgccctaaaagaaaaagggaatgaagcatttgctgaaggcaattatgaaacagctatcctgcgctacagtgagggtttggagaagctgaaggacatgaaagtgctgtacaccaaccgagcccagcagtggtaatggctgtccactgttgctagccctgcgattctgtagcatcccttgtcaggttccctaagccctgccttcaccgtggaagaggtccctgtattcaactctcctcagttgcccagtgcaagtgtgccatctgtttcctggcaggaccatgactgatccaggcttatatgaaacttgaggactatgagaaggcactggtggattgtgagtgggctctcaagtgtgatgaaaaatgcacaaaagcatattttcacatgggaaaagccaacctggccctgaagaactacagtgtgtctagagagtgttataagaagatcttagaaataaaccccaagctgcaaacccaggtgaaaggttacctgaatcaagtagatcttcaggaaaaagcagaccttcaagaaaaggaagcccacgaactgctggattcaggaaagaacacagccgtgaccaccaagaacctcctggagaccctttccaagcctgaccagatccccttgttctatgctggggggattgagatcctgactgaaatgataaatgagtgcacagaacaaactttattcagaatgcacaatggatttagtatcatcagtgacaacgaggtcataagaaggtgtttttccacagcaggaaatgatgcagttgaagaaatggtctgtgtgtctgttctcaagctctggcaagcagtgtgcagcaggaacgaggaaaaccagcgtgtgctagtgatacaccatgacagggccaggctgttggccgccctcttgtcctccaaggtcctggccatccggcagcagagctttgccctgctgctgcatctcgcccagactgagagcggacggagcctgatcatcaaccaccttgacctgaccagattattggaagcgctggtgtcatttcttgatttctcggataaggaggccaacactgctatgggactgttcacagacttggctctggaagaaagattccaagtctggttccaggccaaccttccaggtgttctccctgcactcacaggcgttctgaagacagatcccaaggtaagcagctcctcggctctgtgccagtgcattgccatcatgggaaacctcagtgctgagcccactacccgaagacacatggcggcctgtgaggaatttggggatggctgcttgagcctcctggccaggtgtgaggaggatgtggacctgttcagagaggttatctacacactcctgggactcatgatgaacctgtgtcttcaggctccctttgtctctgaggtttgggctgtggaggtgagcagaaggtgcctgtctttactaaacagccaggatggaggaatcctgacaagagctgctggtgttctgagccggaccctttcttcctctctgaaaattgttgaggaggccttgcgagcaggagtggtaaagaaaatgatgaaattcctgaagacaggaggtgagactgcatcacgttatgctataaagatactagctatctgcacgaatagttatcatgaagctcgggaagaagtaataagactggataaaaagttgagcgttatgatgaagctgctcagctcggaggatgaggttctggtgggcaacgctgccctctgccttggtaactgcatggaggtgcccaacgttgcgtcttccctgctaaagacggaccttttgcaggtcttgttaaagcttgcaggcagtgacacacagaagacggccgtgcaggtgaacgcaggcattgctctggggaagctgtgcacagctgagcccagatttgctgctcaactgagaaagcttcatggcctagaaattctcaactctacgatgaaatacatcagtgattcttgagagagacagggtttgtgtgcatttggggaacacacagatgcacaccgtgtgttgttcctatgctaataaagacctttgatgtatccacttcag

SEQ ID NO: 22204 - protein, 555 aa, Homo sapiens
MKLEDYEKALVDCEWALKCDEKCTKAYFHMGKANLALKNYSVSRECYKKILEINPKLQTQVKGYLNQVDLQEKADLQEKEAHELLDSGKNTAVTTKNLLETLSKPDQIPLFYAGGIEILTEMINECTEQTLFRMHNGFSIISDNEVIRRCFSTAGNDAVEEMVCVSVLKLWQAVCSRNEENQRVLVIHHDRARLLAALLSSKVLAIRQQSFALLLHLAQTESGRSLIINHLDLTRLLEALVSFLDFSDKEANTAMGLFTDLALEERFQVWFQANLPGVLPALTGVLKTDPKVSSSSALCQCIAIMGNLSAEPTTRRHMAACEEFGDGCLSLLARCEEDVDLFREVIYTLLGLMMNLCLQAPFVSEVWAVEVSRRCLSLLNSQDGGILTRAAGVLSRTLSSSLKIVEEALRAGVVKKMMKFLKTGGETASRYAIKILAICTNSYHEAREEVIRLDKKLSVMMKLLSSEDEVLVGNAALCLGNCMEVPNVASSLLKTDLLQVLLKLAGSDTQKTAVQVNAGIALGKLCTAEPRFAAQLRKLHGLEILNSTMKYISDS

SEQ ID NO: 22205 - DNA, 3046 bp, Homo sapiens
gtcctgcactggccttcagagccgagcagaggacgctgctttgggccccagagcatgggaaggtcttggctgcggtctgggacggctgcggtctgggacctgcatggagggcccgggacttgcggacgcctgggagcggttgctgggcaacagtgcgtgcggcctggcctctttgcgcccggcgggcagcgcgcgtctggggcaggctccgcgcggggctcgggcacaggtccccgctgccgcagccctaccgagtgaagcactgagcgcggcgccgcttcgccatcacctggctctggccctctcaccctagcgtaggggggcactggccaggcagtgaggaccctgagatccatgccctgggagacagaggttgtctcctgtccatgcacccgcgcgcctgccttctaaccttcataccgttgggcagattaattcactggactaggcctctgttccgtgggagttgaaaagatttgacctggaagaaaccctagcgattattcagttaagccgcaaccccaccccctgttttatatagggattccggttcacaatggatgctgataaagagaaagatttgcagaaatttcttaaaaatgtggatgaaatctccaatttaattcaggagatgaattctgatgacccagttgtgcaacagaaagctgtcctggagacagaaaagagactactgcttatggaggaagaccaggaggaggatgaatgcaggaccaccttgaacaagactatgatcagtcctccacaaactgctatgaagagtgcagaagaaataaactcagaggccttcttggcatctgtggagaaggatgcaaaggaacgagccaagagaagaagggaaaacaaagtcttggcggatgccctaaaagaaaaagggaatgaagcatttgctgaaggcaattatgaaacagctatcctgcgctacagtgagggtttggagaagctgaaggacatgaaagtgctgtacaccaaccgagcccaggcttatatgaaacttgaggactatgagaaggcactggtggattgtgagtgggctctcaagtgtgatgaaaaatgcacaaaagcatattttcacatgggaaaagccaacctggccctgaagaactacagtgtgtctagagagtgttataagaagatcttagaaataaaccccaagctgcaaacccaggtgaaaggttacctgaatcaagtagatcttcaggaaaaagcagaccttcaagaaaaggaagcccacgaactgctggattcaggaaagaacacagccgtgaccaccaagaacctcctggagaccctttccaagcctgaccagatccccttgttctatgctggggggattgagatcctgactgaaatgataaatgagtgcacagaacaaactttattcagaatgcacaatggatttagtatcatcagtgacaacgaggtcataagaaggtgtttttccacagcaggaaatgatgcagttgaagaaatggtctgtgtgtctgttctcaagctctggcaagcagtgtgcagcaggaacgaggaaaaccagcgtgtgctagtgatacaccatgacagggccaggctgttggccgccctcttgtcctccaaggtcctggccatccggcagcagagctttgccctgctgctgcatctcgcccagactgagagcggacggagcctgatcatcaaccaccttgacctgaccagattattggaagcgctggtgtcatttcttgatttctcggataaggaggccaacactgctatgggactgttcacagacttggctctggaagaaagattccaagtctggttccaggccaaccttccaggtgttctccctgcactcacaggcgttctgaagacagatcccaaggtaagcagctcctcggctctgtgccagtgcattgccatcatgggaaacctcagtgctgagcccactacccgaagacacatggcggcctgtgaggaatttggggatggctgcttgagcctcctggccaggtgtgaggaggatgtggacctgttcagagaggttatctacacactcctgggactcatgatgaacctgtgtcttcaggctccctttgtctctgaggtttgggctgtggaggtgagcagaaggtgcctgtctttactaaacagccaggatggaggaatcctgacaagagctgctggtgttctgagccggaccctttcttcctctctgaaaattgttgaggaggccttgcgagcaggagtggtaaagaaaatgatgaaattcctgaagacaggaggtgagactgcatcacgttatgctataaagatactagctatctgcacgaatagttatcatgaagctcgggaagaagtaataagactggataaaaagttgagcgttatgatgaagctgctcagctcggaggatgaggttctggtgggcaacgctgccctctgccttggtaactgcatggaggtgcccaacgttgcgtcttccctgctaaagacggaccttttgcaggtcttgttaaagcttgcaggcagtgacacacagaagacggccgtgcaggtgaacgcaggcattgctctggggaagctgtgcacagctgagcccagagtgcctgccgagagcagtcatctccaatttggaagagagtctgctgcacctgaagctctgtctcctcgcaggtgggaagagatgtttcacatgctagtattctccctctccagtgtggatccacccccgccaccgccccaaacttgttacccctaacacatgctaccatgcagaccttccaggcagcatggaaaataccagcgccatctttcagaaggcctcatctccacttgccaggagccccgacaccacccttggagacacggcttgttccagatgaggaaactgaggtgcaaagcagttaagcaactggtccaagatctagaccaggtactcaaccaccccactccacatgcaactgtccccaacccatgcgattcatcctttccctgaaggcttgtgtggtgctgccttttaaattcataacataatgacttcattgttatg

SEQ ID NO: 22206 - protein, 732 aa, Homo sapiens; identical to SEQ ID NO: 22202

SEQ ID NO: 22207 - DNA, 634 bp, Homo sapiens
cgcgcggggctcgggcacaggtccccgctgccgcagccctaccgagtgaagcactgagcgcggcgccgcttcgccatcacctggctctggccctctcaccctagcgtaggggggcactggccaggcagtgaggaccctgagatccatgccctgggagacagaggttgtctcctgtccatgcacccgcgcgcctgccttctaaccttcataccgttgggcagattaattcactggactaggcctctgttccgtgggagttgaaaagatttgacctggaagaaaccctagcgattattcaggattccggttcacaatggatgctgataaagagaaagatttgcagaaatttcttaaaaatgtggatgaaatctccaatttaattcaggagatgaattctgatgacccagttgtgcaacagaaagctgtcctggagacagaaaagagactactgcttatggaggaagaccaggaggaggatgaatgcaggaccaccttgaacaagactatgatcagtcctccacaaactgctatgaagctgaaattaccctgctgtcagaggccttcttggcatctgtggagaaggatgcaaaggaacgagccaagagaagaagggaaaacaaagtcttggcggatg

SEQ ID NO: 22208 - protein, 106 aa, Homo sapiens
MDADKEKDLQKFLKNVDEISNLIQEMNSDDPVVQQKAVLETEKRLLLMEEDQEEDECRTTLNKTMISPPQTAMKLKLPCCQRPSWHLWRRMQRNEPREEGKTKSWR

SEQ ID NO: 22209 - DNA, 2803 bp, Homo sapiens
cgcgcggggctcgggcacaggtccccgctgccgcagccctaccgagtgaagcactgagcgcggcgccgcttcgccatcacctggctctggccctctcaccctagcgtaggggggcactggccaggcagtgaggaccctgagatccatgccctgggagacagaggttgtctcctgtccatgcacccgcgcgcctgccttctaaccttcataccgttgggcagattaattcactggactaggcctctgttccgtgggagttgaaaagatttgacctggaagaaaccctagcgattattcaggattccggttcacaatggatgctgataaagagaaagatttgcagaaatttcttaaaaatgtggatgaaatctccaatttaattcaggagatgaattctgatgacccagttgtgcaacagaaagctgtcctggagacagaaaagagactactgcttatggaggaagaccaggaggaggatgaatgcaggaccaccttgaacaagactatgatcagtcctccacaaactgctatgaagagtgcagaagaaataaactcagaggccttcttggcatctgtggagaaggatgcaaaggaacgagccaagagaagaagggaaaacaaagtcttggcggatgccctaaaagaaaaagggaatgaagcatttgctgaaggcaattatgaaacagctatcctgcgctacagtgagggtttggagaagctgaaggacatgaaagtgctgtacaccaaccgagcccaggcttatatgaaacttgaggactatgagaaggcactggtggattgtgagtgggctctcaagtgtgatgaaaaatgcacaaaagcatattttcacatgggaaaagccaacctggccctgaagaactacagtgtgtctagagagtgttataagaagatcttagaaataaaccccaagctgcaaacccaggtgaaaggttacctgaatcaagtagatcttcaggaaaaagcagaccttcaagaaaaggaagcccacgaactgctggattcaggaaagaacacagccgtgaccaccaagaacctcctggagaccctttccaagcctgaccagatccccttgttctatgctggggggattgagatcctgactgaaatgataaatgagtgcacagaacaaactttattcagaatgcacaatggatttagtatcatcagtgacaacgaggtcataagaaggtgtttttccacagcaggaaatgatgcagttgaagaaatggtctgtgtgtctgttctcaagctctggcaagcagtgtgcagcaggaacgaggaaaaccagcgtgtgctagtgatacaccatgacagggccaggctgttggccgccctcttgtcctccaaggtcctggccatccggcagcagagctttgccctgctgctgcatctcgcccagactgagagcggacggagcctgatcatcaaccaccttgacctgaccagattattggaagcgctggtgtcatttcttgatttctcggataaggaggccaacactgctatgggactgttcacagacttggctctggaagaaagattccaagtctggttccaggccaaccttccaggtgttctccctgcactcacaggcgttctgaagacagatcccaaggtaagcagctcctcggctctgtgccagtgcattgccatcatgggaaacctcagtgctgagcccactacccgaagacacatggcggcctgtgaggaatttggggatggctgcttgagcctcctggccaggtgtgaggaggatgtggacctgttcagagaggttatctacacactcctgggactcatgatgaacctgtgtcttcaggctccctttgtctctgaggtttgggctgtggaggtgagcagaaggtgcctgtctttactaaacagccaggatggaggaatcctgacaagagctgctggtgttctgagccggaccctttcttcctctctgaaaattgttgaggaggccttgcgagcaggagtggtaaagaaaatgatgaaattcctgaagacaggaggtgagactgcatcacgttatgctataaagatactagctatctgcacgaatagttatcatgaagctcgggaagaagtaataagactggataaaaagttgagcgttatgatgaagctgctcagctcggaggatgaggttctggtgggcaacgctgccctctgccttggtaactgcatggaggtgcccaacgttgcgtcttccctgctaaagacggaccttttgcaggtcttgttaaagcttgcaggcagtgacacacagaagacggccgtgcaggtgaacgcaggcattgctctggggaagctgtgcacagctgagcccagagtgcctgccgagagcagtcatctccaatttggaagagagtctgctgcacctgaagctctgtctcctcgcaggtgggaagagatgtttcacatgctagtattctccctctccagtgtggatccacccccgccaccgccccaaacttgttacccctaacacatgctaccatgcagaccttccaggcagcatggaaaataccagcgccatctttcagaaggcctcatctccacttgccaggagccccgacaccacccttggagacacggcttgttccagatgaggaaactgaggtgcaaagcagttaagcaactggtccaagatctagaccaggtactcaaccaccccactccacatgcaactgtccccaacccatgcgattcatcctttccctgaaggcttgtgtggtgctgccttttaaattcataacataatgacttcattgttatg

SEQ ID NO: 22210 - protein, 732 aa, Homo sapiens; identical to SEQ ID NO: 22202

SEQ ID NO: 22211 - DNA, 2611 bp, Homo sapiens
caggtccctaaatcgccggggttgatgttggctttggaagaactatttgcagagcgttttctgcactggaaggagggctggaagctttctggaagcattgccgcacggattccggttcacaatggatgctgataaagagaaagatttgcagaaatttcttaaaaatgtggatgaaatctccaatttaattcaggagatgaattctgatgacccagttgtgcaacagaaagctgtcctggagacagaaaagagactactgcttatggaggaagaccaggaggaggatgaatgcaggaccaccttgaacaagactatgatcagtcctccacaaactgctatgaagagtgcagaagaaataaactcagaggccttcttggcatctgtggagaaggatgcaaaggaacgagccaagagaagaagggaaaacaaagtcttggcggatgccctaaaagaaaaagggaatgaagcatttgctgaaggcaattatgaaacagctatcctgcgctacagtgagggtttggagaagctgaaggacatgaaagtgctgtacaccaaccgagcccaggcttatatgaaacttgaggactatgagaaggcactggtggattgtgagtgggctctcaagtgtgatgaaaaatgcacaaaagcatattttcacatgggaaaagccaacctggccctgaagaactacagtgtgtctagagagtgttataagaagatcttagaaataaaccccaagctgcaaacccaggtgaaaggttacctgaatcaagtagatcttcaggaaaaagcagaccttcaagaaaaggaagcccacgaactgctggattcaggaaagaacacagccgtgaccaccaagaacctcctggagaccctttccaagcctgaccagatccccttgttctatgctggggggattgagatcctgactgaaatgataaatgagtgcacagaacaaactttattcagaatgcacaatggatttagtatcatcagtgacaacgaggtcataagaaggtgtttttccacagcaggaaatgatgcagttgaagaaatggtctgtgtgtctgttctcaagctctggcaagcagtgtgcagcaggaacgaggaaaaccagcgtgtgctagtgatacaccatgacagggccaggctgttggccgccctcttgtcctccaaggtcctggccatccggcagcagagctttgccctgctgctgcatctcgcccagactgagagcggacggagcctgatcatcaaccaccttgacctgaccagattattggaagcgctggtgtcatttcttgatttctcggataaggaggccaacactgctatgggactgttcacagacttggctctggaagaaagattccaagtctggttccaggccaaccttccaggtgttctccctgcactcacaggcgttctgaagacagatcccaaggtaagcagctcctcggctctgtgccagtgcattgccatcatgggaaacctcagtgctgagcccactacccgaagacacatggcggcctgtgaggaatttggggatggctgcttgagcctcctggccaggtgtgaggaggatgtggacctgttcagagaggttatctacacactcctgggactcatgatgaacctgtgtcttcaggctccctttgtctctgaggtttgggctgtggaggtgagcagaaggtgcctgtctttactaaacagccaggatggaggaatcctgacaagagctgctggtgttctgagccggaccctttcttcctctctgaaaattgttgaggaggccttgcgagcaggagtggtaaagaaaatgatgaaattcctgaagacaggaggtgagactgcatcacgttatgctataaagatactagctatctgcacgaatagttatcatgaagctcgggaagaagtaataagactggataaaaagttgagcgttatgatgaagctgctcagctcggaggatgaggttctggtgggcaacgctgccctctgccttggtaactgcatggaggtgcccaacgttgcgtcttccctgctaaagacggaccttttgcaggtcttgttaaagcttgcaggcagtgacacacagaagacggccgtgcaggtgaacgcaggcattgctctggggaagctgtgcacagctgagcccagagtgcctgccgagagcagtcatctccaatttggaagagagtctgctgcacctgaagctctgtctcctcgcaggtgggaagagatgtttcacatgctagtattctccctctccagtgtggatccacccccgccaccgccccaaacttgttacccctaacacatgctaccatgcagaccttccaggcagcatggaaaataccagcgccatctttcagaaggcctcatctccacttgccaggagccccgacaccacccttggagacacggcttgttccagatgaggaaactgaggtgcaaagcagttaagcaactggtccaagatctagaccaggtactcaaccaccccactccacatgcaactgtccccaacccatgcgattcatcctttccctgaaggcttgtgtggtgctgccttttaaattcataacataatgacttcattgttatg

SEQ ID NO: 22212 - protein, 732 aa, Homo sapiens; identical to SEQ ID NO: 22202

SEQ ID NO: 22213 - DNA, 690 bp, Homo sapiens
taccatgcagaccttccaggcagcatggaaaataccagcgccatctttcagaaggcctcatctccacttgccaggagccccgacaccacccttggagacacggcttgttccaggtaatcagagtcttctggttcaacaagcagaggagctgggattttccatcctaaagaggatgtggccgggatggaactccatcaccatcctgaagccacagcagaggtggcaggtaacagacagtccagagctgctcactgtcttcatacatgacgtgaggacggtggttccagtgcgccgcaaggtgggactgaggttcagagttgagaggaaacaataggaaggggctgagatgctgcaacaggtcacgggctgctattgtaaacacttttttaaggataggttcaaataagagcttcttggcttggagaactgaggggaagtatgataacctaatattctgaggacaagaagacatttaataccacatgactttttttaagtaagaggtctcattttctaaataacttgaaaatagaggctctccaagggttccgttacaggagagaataatcagaggtgaagaaaacccatttagagctgactccctttcccagggaatgagcttttggtcctcatagactggcatcctgcagacacgcagagagaaagaataaagcctgcctgtgcattgtt

SEQ ID NO: 22214 - protein, 109 aa, Homo sapiens
MQTFQAAWKIPAPSFRRPHLHLPGAPTPPLETRLVPGNQSLLVQQAEELGFSILKRMWPGWNSITILKPQQRWQVTDSPELLTVFIHDVRTVVPVRRKVGLRFRVERKQ

SEQ ID NO: 22215 - DNA, 2543 bp, Homo sapiens; identical to SEQ ID NO: 2880

SEQ ID NO: 22216 - protein, 765 aa, Homo sapiens; identical to SEQ ID NO: 2881

SEQ ID NO: 22217 - DNA, 523 bp, Homo sapiens
tcttgggtccaccttccttgctcattgcatgccacatcaccacgccctacttgtttctgtgttccatccagtcctctcttagtgccctggtgtctggagctcagagggtgcttcctccctgcttgctgaatcggattacaggcagcaggggtttttgctgtaaggaaaggaaagggagactctccttcagtgccttggtgtaggctgagacaccgaggccccctgggaaacacctacggatcaggacctcctgcacaggtgtgatatttatcctggaagcaatgtgtacatggaatgccctacaggcacaggaggcatccctggagactgaatggtgtctgggaagagtagggccacagagctgagcccctatggactgcagcagagggcctggctccaatcctagcctaccatatcccagtcccatgatcctctggtcccatggagtcttgtttgagtgcaagtgaactgaatttcccaattcctcaaaaagagcaatagtaataaaaaccataatagtgac

SEQ ID NO: 22218 - protein, 31 aa, Homo sapiens
MDCSRGPGSNPSLPYPSPMILWSHGVLFECK

SEQ ID NO: 22219 - DNA, 2503 bp, Homo sapiens
ggctgccggaggggcggccgcgcgtggatgcggcgggagctggaagcctcaagcagccggcgccgtctctgcccccgggcgccctatggcttgaagagcctggccacccagtggctccaccgccctgatggatccactgaatctgtcctggtatgatgatgatctggagaggcagaactggagccggcccttcaacgggtcagacgggaaggcggacagaccccactacaactactatgccacactgctcaccctgctcatcgctgtcatcgtcttcggcaacgtgctggtgtgcatggctgtgtcccgcgagaaggcgctgcagaccaccaccaactacctgatcgtcagcctcgcagtggccgacctcctcgtcgccacactggtcatgccctgggttgtctacctggaggtggtaggtgagtggaaattcagcaggattcactgtgacatcttcgtcactctggacgtcatgatgtgcacggcgagcatcctgaacttgtgtgccatcagcatcgacaggtacacagctgtggccatgcccatgctgtacaatacgcgctacagctccaagcgccgggtcaccgtcatgatctccatcgtctgggtcctgtccttcaccatctcctgcccactcctcttcggactcaataacgcagaccagaacgagtgcatcattgccaacccggccttcgtggtctactcctccatcgtctccttctacgtgcccttcattgtcaccctgctggtctacatcaagatctacattgtcctccgcagacgccgcaagcgagtcaacaccaaacgcagcagccgagctttcagggcccacctgagggctccactaaaggaggctgcccggcgagcccaggagctggagatggagatgctctccagcaccagcccacccgagaggacccggtacagccccatcccacccagccaccaccagctgactctccccgacccgtcccaccatggtctccacagcactcccgacagccccgccaaaccagagaagaatgggcatgccaaagaccaccccaagattgccaagatctttgagatccagaccatgcccaatggcaaaacccggacctccctcaagaccatgagccgtaggaagctctcccagcagaaggagaagaaagccactcagatgctcgccattgttctcggcgtgttcatcatctgctggctgcccttcttcatcacacacatcctgaacatacactgtgactgcaacatcccgcctgtcctgtacagcgccttcacgtggctgggctatgtcaacagcgccgtgaaccccatcatctacaccaccttcaacattgagttccgcaaggccttcctgaagatcctccactgctgactctgctgcctgcccgcacagcagcctgcttcccacctccctgcccaggccggccagcctcacccttgcgaaccgtgagcaggaaggcctgggtggatcggcctcctcttcaccccggcaggccctgcagtgttcgcttggctccatgctcctcactgcccgcacaccctcactctgccagggcagtgctagtgagctgggcatggtaccagccctggggctgggccccccagctcaggggcagctcatagagtcccccctcccacctccagtccccctatccttggcaccaaagatgcagccgccttccttgaccttcctctggggctctagggttgctggagcctgagtcagggcccagaggctgagttttctctttgtggggcttggcgtggagcaggcggtggggagagatggacagttcacaccctgcaaggcccacaggaggcaagcaagctctcttgccgaggagccaggcaacttcagtcctgggagacccatgtaaataccagactgcaggttggaccccagagattcccaagccaaaaaccttagctccctcccgcaccccgatgtggacctctactttccaggctagtccggacccacctcaccccgttacagctccccaagtggtttccacatgctctgagaagaggagccctcatcttgaagggcccaggagggtctatggggagaggaactccttggcctagcccaccctgctgccttctgacggccctgcaatgtatcccttctcacagcacatgctggccagcctggggcctggcagggaggtcaggccctggaactctatctgggcctgggctaggggacatcagaggttctttgagggactgcctctgccacactctgacgcaaaaccactttccttttctattccttctggcctttcctctctcctgtttcccttcccttccactgcctctgccttagaggagcccacggctaagaggctgctgaaaaccatctggcctggcctggccctgccctgaggaaggaggggaagctgcagcttgggagagcccctggggcctagactctgtaacatcactatccatgcaccaaactaataaaactttgacgagtcaccttccaggacccctgggt

SEQ ID NO: 22220 - protein, 414 aa, Homo sapiens; identical to SEQ ID NO: 2885

SEQ ID NO: 22221 - DNA, 2808 bp, Homo sapiens
ccggcagcctcacgcgcgcaccgcgccgcctccgccccgtccccgcgctccctcctgcccgcccgccccgcgcccggccccgccccgccccgccccgccgcggcccgtccactgctccccgcgggccagagccggccgagctgctgcccgccggggctctgaacggcgcggcggggccgggagccagggaccggccgaggagagtggcggccccggacggctgccggaggggcggccgcgcgtggatgcggcgggagctggaagcctcaagcagccggcgccgtctctgcccccgggcgccctatggcttgaagagcctggccacccagtggctccaccgccctgatggatccactgaatctgtcctggtatgatgatgatctggagaggcagaactggagccggcccttcaacgggtcagacgggaaggcggacagaccccactacaactactatgccacactgctcaccctgctcatcgctgtcatcgtcttcggcaacgtgctggtgtgcatggctgtgtcccgcgagaaggcgctgcagaccaccaccaactacctgatcgtcagcctcgcagtggccgacctcctcgtcgccacactggtcatgccctgggttgtctacctggaggtggtaggtgagtggaaattcagcaggattcactgtgacatcttcgtcactctggacgtcatgatgtgcacggcgagcatcctgaacttgtgtgccatcagcatcgacaggtacacagctgtggccatgcccatgctgtacaatacgcgctacagctccaagcgccgggtcaccgtcatgatctccatcgtctgggtcctgtccttcaccatctcctgcccactcctcttcggactcaataacgcagaccagaacgagtgcatcattgccaacccggccttcgtggtctactcctccatcgtctccttctacgtgcccttcattgtcaccctgctggtctacatcaagatctacattgtcctccgcagacgccgcaagcgagtcaacaccaaacgcagcagccgagctttcagggcccacctgagggctccactaaagggcaactgtactcaccccgaggacatgaaactctgcaccgttatcatgaagtctaatgggagtttcccagtgaacaggcggagagtggaggctgcccggcgagcccaggagctggagatggagatgctctccagcaccagcccacccgagaggacccggtacagccccatcccacccagccaccaccagctgactctccccgacccgtcccaccatggtctccacagcactcccgacagccccgccaaaccagagaagaatgggcatgccaaagaccaccccaagattgccaagatctttgagatccagaccatgcccaatggcaaaacccggacctccctcaagaccatgagccgtaggaagctctcccagcagaaggagaagaaagccactcagatgctcgccattgttctcggcgtgttcatcatctgctggctgcccttcttcatcacacacatcctgaacatacactgtgactgcaacatcccgcctgtcctgtacagcgccttcacgtggctgggctatgtcaacagcgccgtgaaccccatcatctacaccaccttcaacattgagttccgcaaggccttcctgaagatcctccactgctgactctgctgcctgcccgcacagcagcctgcttcccacctccctgcccaggccggccagcctcacccttgcgaaccgtgagcaggaaggcctgggtggatcggcctcctcttcaccccggcaggccctgcagtgttcgcttggctccatgctcctcactgcccgcacaccctcactctgccagggcagtgctagtgagctgggcatggtaccagccctggggctgggccccccagctcaggggcagctcatagagtcccccctcccacctccagtccccctatccttggcaccaaagatgcagccgccttccttgaccttcctctggggctctagggttgctggagcctgagtcagggcccagaggctgagttttctctttgtggggcttggcgtggagcaggcggtggggagagatggacagttcacaccctgcaaggcccacaggaggcaagcaagctctcttgccgaggagccaggcaacttcagtcctgggagacccatgtaaataccagactgcaggttggaccccagagattcccaagccaaaaaccttagctccctcccgcaccccgatgtggacctctactttccaggctagtccggacccacctcaccccgttacagctccccaagtggtttccacatgctctgagaagaggagccctcatcttgaagggcccaggagggtctatggggagaggaactccttggcctagcccaccctgctgccttctgacggccctgcaatgtatcccttctcacagcacatgctggccagcctggggcctggcagggaggtcaggccctggaactctatctgggcctgggctaggggacatcagaggttctttgagggactgcctctgccacactctgacgcaaaaccactttccttttctattccttctggcctttcctctctcctgtttcccttcccttccactgcctctgccttagaggagcccacggctaagaggctgctgaaaaccatctggcctggcctggccctgccctgaggaaggaggggaagctgcagcttgggagagcccctggggcctagactctgtaacatcactatccatgcaccaaactaataaaactttgacgagtcaccttccaggacccctgggt

SEQ ID NO: 22222 - protein, 443 aa, Homo sapiens; identical to SEQ ID NO: 2883

SEQ ID NO: 22223 - DNA, 2763 bp, Homo sapiens
gtgtttgttgaatgaataaataaatgatggatcagctctgttcaagctcatcttattatgcatttttaaaaaattgtgtttgctcatttgtcctaccagctgtaaaaacttgctagcaaaagagtggcagaaggcccaacatttttagaaaattcttagccgtaaaccttaaaatcccgagttggaaaattctcattattaaatgccaggagttggtcttcttcctggagacctctgcaagaggccctctcactgacaccttgtgtccatttttcctggccagagcctggccacccagtggctccaccgccctgatggatccactgaatctgtcctggtatgatgatgatctggagaggcagaactggagccggcccttcaacgggtcagacgggaaggcggacagaccccactacaactactatgccacactgctcaccctgctcatcgctgtcatcgtcttcggcaacgtgctggtgtgcatggctgtgtcccgcgagaaggcgctgcagaccaccaccaactacctgatcgtcagcctcgcagtggccgacctcctcgtcgccacactggtcatgccctgggttgtctacctggaggtggtaggtgagtggaaattcagcaggattcactgtgacatcttcgtcactctggacgtcatgatgtgcacggcgagcatcctgaacttgtgtgccatcagcatcgacaggtacacagctgtggccatgcccatgctgtacaatacgcgctacagctccaagcgccgggtcaccgtcatgatctccatcgtctgggtcctgtccttcaccatctcctgcccactcctcttcggactcaataacgcagaccagaacgagtgcatcattgccaacccggccttcgtggtctactcctccatcgtctccttctacgtgcccttcattgtcaccctgctggtctacatcaagatctacattgtcctccgcagacgccgcaagcgagtcaacaccaaacgcagcagccgagctttcagggcccacctgagggctccactaaagggcaactgtactcaccccgaggacatgaaactctgcaccgttatcatgaagtctaatgggagtttcccagtgaacaggcggagagtggaggctgcccggcgagcccaggagctggagatggagatgctctccagcaccagcccacccgagaggacccggtacagccccatcccacccagccaccaccagctgactctccccgacccgtcccaccatggtctccacagcactcccgacagccccgccaaaccagagaagaatgggcatgccaaagaccaccccaagattgccaagatctttgagatccagaccatgcccaatggcaaaacccggacctccctcaagaccatgagccgtaggaagctctcccagcagaaggagaagaaagccactcagatgctcgccattgttctcggcgtgttcatcatctgctggctgcccttcttcatcacacacatcctgaacatacactgtgactgcaacatcccgcctgtcctgtacagcgccttcacgtggctgggctatgtcaacagcgccgtgaaccccatcatctacaccaccttcaacattgagttccgcaaggccttcctgaagatcctccactgctgactctgctgcctgcccgcacagcagcctgcttcccacctccctgcccaggccggccagcctcacccttgcgaaccgtgagcaggaaggcctgggtggatcggcctcctcttcaccccggcaggccctgcagtgttcgcttggctccatgctcctcactgcccgcacaccctcactctgccagggcagtgctagtgagctgggcatggtaccagccctggggctgggccccccagctcaggggcagctcatagagtcccccctcccacctccagtccccctatccttggcaccaaagatgcagccgccttccttgaccttcctctggggctctagggttgctggagcctgagtcagggcccagaggctgagttttctctttgtggggcttggcgtggagcaggcggtggggagagatggacagttcacaccctgcaaggcccacaggaggcaagcaagctctcttgccgaggagccaggcaacttcagtcctgggagacccatgtaaataccagactgcaggttggaccccagagattcccaagccaaaaaccttagctccctcccgcaccccgatgtggacctctactttccaggctagtccggacccacctcaccccgttacagctccccaagtggtttccacatgctctgagaagaggagccctcatcttgaagggcccaggagggtctatggggagaggaactccttggcctagcccaccctgctgccttctgacggccctgcaatgtatcccttctcacagcacatgctggccagcctggggcctggcagggaggtcaggccctggaactctatctgggcctgggctaggggacatcagaggttctttgagggactgcctctgccacactctgacgcaaaaccactttccttttctattccttctggcctttcctctctcctgtttcccttcccttccactgcctctgccttagaggagcccacggctaagaggctgctgaaaaccatctggcctggcctggccctgccctgaggaaggaggggaagctgcagcttgggagagcccctggggcctagactctgtaacatcactatccatgcaccaaactaataaaactttgacgagtcaccttc

SEQ ID NO: 22224 - protein, 443 aa, Homo sapiens; identical to SEQ ID NO: 2883

SEQ ID NO: 22225 - DNA, 2004 bp, Homo sapiens
gggagacctcatcttccaaccaagcttgctgggctagctttaatcaatgctggcctgagaacaggagcggaacattgcctagtagaccctgaggctttacaacagtgccactgacccctatgtgctgtatctgtgtcctgctgcctctcagcccatttccgggaccttgcaggatgaggagataactttgagctgctcagaggccagcgctgaggaagctctgctccctgcacttcccaaaacagtatctttcagaataaacagcgaagacttcttgctggaagcgcaagtgagggatcagccacgctggctcctggtctgccatgagggctggagccccgccctggggctgcagatctgctggagccttgggcatctcagactcactcaccacaagggagtaaacctcactgacatcaaactcaacagttcccaggagtttgctcagctctctcctagactgggaggcttcctggaggaggcgtggcagcccaggaacaactgcacttctggtcaagttgtttccctcagatgctctgagtgtggagcgaggcccctggcttcccggatagttggtgggcagtctgtggctcctgggcgctggccgtggcaggccagcgtggccctgggcttccggcacacgtgtgggggctctgtgctagcgccacgctgggtggtgactgctgcacattgtatgcacagtttcaggctggcccgcctgtccagctggcgggttcatgcggggctggtcagccacagtgccgtcaggccccaccaaggggctctggtggagaggattatcccacaccccctctacagtgcccagaatcatgactacgacgtcgccctcctgaggctccagaccgctctcaacttctcagacactgtgggcgctgtgtgcctgccggccaaggaacagcattttccgaagggctcgcggtgctgggtgtctggctggggccacacccaccctagccatacttacagctcggatatgctccaggacacggtggtgcccttgttcagcactcagctctgcaacagctcttgcgtgtacagcggagccctcaccccccgcatgctttgcgctggctacctggacggaagggctgatgcatgccagggagatagcgggggccccctagtgtgcccagatggggacacatggcgcctagtgggggtggtcagctgggggcgtggctgcgcagagcccaatcacccaggtgtctacgccaaggtagctgagtttctggactggatccatgacactgctcaggactccctcctctgagtcctgctgtttcctccagtctcactgcacaccactgcctcatgcttcctggggcctccagcagctccactaatggaggagaggcagtagcctccgacacagaacgcatggacctcctactactgtgtgtgaggaacagtcactacccactggccagccacccagccaacaggtctctcctcttgggccctgatttcagagtcctctttctcactagagactcaatgacagaagagaggctgggacttggttgggcatgctgtggttgctgagggatgagggggaggagagaggtaggagctggagatgaagaggctgctagaagcagcaggaagcctgcccttctgccctctcccctccctgcccctgtgtgagtcttttgggagggtgctgggaggtgccccccgtcccacctttttcctgtgctctaggtgggctaagtgcctccctagaggactccatggctgagaggctcctgggcagatggggtcaaggctgggccagcccagatgaagcctatgggagtcaggaccctctccactctccctctccactccccttcctgttctcacctggctgtggctggccctgtgtggggtgggtacactggaaaacaagaaggttggagttggtctaggacattggttttaaatgacagttctgtgaactggtccaaggagttctgttattaaagtgatatatggtcttggtcc

SEQ ID NO: 22226 - protein, 198 aa, Homo sapiens
MHSFRLARLSSWRVHAGLVSHSAVRPHQGALVERIIPHPLYSAQNHDYDVALLRLQTALNFSDTVGAVCLPAKEQHFPKGSRCWVSGWGHTHPSHTYSSDMLQDTVVPLFSTQLCNSSCVYSGALTPRMLCAGYLDGRADACQGDSGGPLVCPDGDTWRLVGVVSWGRGCAEPNHPGVYAKVAEFLDWIHDTAQDSLL

SEQ ID NO: 22227 - DNA, 1851 bp, Homo sapiens
gggagacctcatcttccaaccaagcttgctgggctagctttaatcaatgctggcctgagaacaggagcggaacattgcctagtagaccctgaggctttacaacagtgccactgacccctatgtgctgtatctgtgtcctgctgcctctcagcccatttccgggaccttgcaggatgaggagataactttgagctgctcagaggccagcgctgaggaagctctgctccctgcacttcccaaaacagtatctttcagaataaacagcgaagacttcttgctggaagcgcaagtgagggatcagccacgctggctcctggtctgccatgagggctggagccccgccctggggctgcagatctgctggagccttgggcatctcagactcactcaccacaagggagtaaacctcactgacatcaaactcaacagttcccaggagtttgctcagctctctcctagactgggaggcttcctggaggaggcgtggcagcccaggaacaactgcacttctggtcaagttgtttccctcagatgctctgagtgtggagcgaggcccctggcttcccggatagttggtgggcagtctgtggctcctgggcgctggccgtggcaggccagcgtggccctgggcttccggcacacgtgtgggggctctgtgctagcgccacgctgggtggtgactgctgcacattgtatgcacagtttcaggctggcccgcctgtccagctggcgggttcatgcggggctggtcagccacagtgccgtcaggccccaccaaggggctctggtggagaggattatcccacaccccctctacagtgcccagaatcatgactacgacgtcgccctcctgaggctccagaccgctctcaacttctcagacactgtgggcgctgtgtgcctgccggccaaggaacagcattttccgaagggctcgcggtgctgggtgtctggctggggccacacccaccctagccatacttacagctcggatatgctccaggacacggtggtgcccttgttcagcactcagctctgcaacagctcttgcgtgtacagcggagccctcaccccccgcatgctttgcgctggctacctggacggaagggctgatgcatgccaggactccctcctctgagtcctgctgtttcctccagtctcactgcacaccactgcctcatgcttcctggggcctccagcagctccactaatggaggagaggcagtagcctccgacacagaacgcatggacctcctactactgtgtgtgaggaacagtcactacccactggccagccacccagccaacaggtctctcctcttgggccctgatttcagagtcctctttctcactagagactcaatgacagaagagaggctgggacttggttgggcatgctgtggttgctgagggatgagggggaggagagaggtaggagctggagatgaagaggctgctagaagcagcaggaagcctgcccttctgccctctcccctccctgcccctgtgtgagtcttttgggagggtgctgggaggtgccccccgtcccacctttttcctgtgctctaggtgggctaagtgcctccctagaggactccatggctgagaggctcctgggcagatggggtcaaggctgggccagcccagatgaagcctatgggagtcaggaccctctccactctccctctccactccccttcctgttctcacctggctgtggctggccctgtgtggggtgggtacactggaaaacaagaaggttggagttggtctaggacattggttttaaatgacagttctgtgaactggtccaaggagttctgttattaaagtgatatatggtcttggtcc

SEQ ID NO: 22228 - protein, 147 aa, Homo sapiens
MHSFRLARLSSWRVHAGLVSHSAVRPHQGALVERIIPHPLYSAQNHDYDVALLRLQTALNFSDTVGAVCLPAKEQHFPKGSRCWVSGWGHTHPSHTYSSDMLQDTVVPLFSTQLCNSSCVYSGALTPRMLCAGYLDGRADACQDSLL

SEQ ID NO: 22229 - DNA, 2236 bp, Homo sapiens
gggatacagggaggggccatgtgcgaaccagggagacctcatcttccaaccaagcttgctgggctagctttaatcaatgctggcctgagaacaggagcggaacattgcctagtagaccctgaggctttacaacagtgccactgacccctatgagcctgatgctggatgaccaaccccctatggaggcccagtatgcagaggagggcccaggacctgggatcttcagagcagagcctggagaccagcagcatcccatttctcaggcagtgtgctggcgttccatgcgacgtggctgtgcagtgctgggagccctggggctgctggccggtgcaggtgttggctcatggctcctagtgctgtatctgtgtcctgctgcctctcagcccatttccgggaccttgcaggatgaggagataactttgagctgctcagaggccagcgctgaggaagctctgctccctgcacttcccaaaacagtatctttcagaataaacagcgaagacttcttgctggaagcgcaagtgagggatcagccacgctggctcctggtctgccatgagggctggagccccgccctggggctgcagatctgctggagccttgggcatctcagactcactcaccacaagggagtaaacctcactgacatcaaactcaacagttcccaggagtttgctcagctctctcctagactgggaggcttcctggaggaggcgtggcagcccaggaacaactgcacttctggtcaagttgtttccctcagatgctctgagtgtggagcgaggcccctggcttcccggatagttggtgggcagtctgtggctcctgggcgctggccgtggcaggccagcgtggccctgggcttccggcacacgtgtgggggctctgtgctagcgccacgctgggtggtgactgctgcacattgtatgcacagtttcaggctggcccgcctgtccagctggcgggttcatgcggggctggtcagccacagtgccgtcaggccccaccaaggggctctggtggagaggattatcccacaccccctctacagtgcccagaatcatgactacgacgtcgccctcctgaggctccagaccgctctcaacttctcagacactgtgggcgctgtgtgcctgccggccaaggaacagcattttccgaagggctcgcggtgctgggtgtctggctggggccacacccaccctagccatacttacagctcggatatgctccaggacacggtggtgcccttgttcagcactcagctctgcaacagctcttgcgtgtacagcggagccctcaccccccgcatgctttgcgctggctacctggacggaagggctgatgcatgccagggagatagcgggggccccctagtgtgcccagatggggacacatggcgcctagtgggggtggtcagctgggggcgtggctgcgcagagcccaatcacccaggtgtctacgccaaggtagctgagtttctggactggatccatgacactgctcaggactccctcctctgagtcctgctgtttcctccagtctcactgcacaccactgcctcatgcttcctggggcctccagcagctccactaatggaggagaggcagtagcctccgacacagaacgcatggacctcctactactgtgtgtgaggaacagtcactacccactggccagccacccagccaacaggtctctcctcttgggccctgatttcagagtcctctttctcactagagactcaatgacagaagagaggctgggacttggttgggcatgctgtggttgctgagggatgagggggaggagagaggtaggagctggagatgaagaggctgctagaagcagcaggaagcctgcccttctgccctctcccctccctgcccctgtgtgagtcttttgggagggtgctgggaggtgccccccgtcccacctttttcctgtgctctaggtgggctaagtgcctccctagaggactccatggctgagaggctcctgggcagatggggtcaaggctgggccagcccagatgaagcctatgggagtcaggaccctctccactctccctctccactccccttcctgttctcacctggctgtggctggccctgtgtggggtgggtacactggaaaacaagaaggttggagttggtctaggacattggttttaaatgacagttctgtgaactggtccaaggagttctgttattaaagtgatatatggtcttggtcc

SEQ ID NO: 22230 - protein, 457 aa, Homo sapiens
MSLMLDDQPPMEAQYAEEGPGPGIFRAEPGDQQHPISQAVCWRSMRRGCAVLGALGLLAGAGVGSWLLVLYLCPAASQPISGTLQDEEITLSCSEASAEEALLPALPKTVSFRINSEDFLLEAQVRDQPRWLLVCHEGWSPALGLQICWSLGHLRLTHHKGVNLTDIKLNSSQEFAQLSPRLGGFLEEAWQPRNNCTSGQVVSLRCSECGARPLASRIVGGQSVAPGRWPWQASVALGFRHTCGGSVLAPRWVVTAAHCMHSFRLARLSSWRVHAGLVSHSAVRPHQGALVERIIPHPLYSAQNHDYDVALLRLQTALNFSDTVGAVCLPAKEQHFPKGSRCWVSGWGHTHPSHTYSSDMLQDTVVPLFSTQLCNSSCVYSGALTPRMLCAGYLDGRADACQGDSGGPLVCPDGDTWRLVGVVSWGRGCAEPNHPGVYAKVAEFLDWIHDTAQDSLL

SEQ ID NO: 22231 - DNA, 280 bp, Homo sapiens
tgtcctgtatcaaatgttcgtgtccaactgtctccagctttttgctccaaaaggtttcaggctggcccgcctgtccagctggcgggttcatgcggggctggtcagccacagtgccgtcaggccccaccaaggggctctggtggagaggattatcccacaccccctctacagtgcccagaatcatgactacgacgtcgccctcctgaggctccagaccgctctcaacttctcaggctctgcagtgggggaagccaagcctgactggggaccaggaccatgt

SEQ ID NO: 22232 - protein, 88 aa, Homo sapiens
MFVSNCLQLFAPKGFRLARLSSWRVHAGLVSHSAVRPHQGALVERIIPHPLYSAQNHDYDVALLRLQTALNFSGSAVGEAKPDWGPGP

SEQ ID NO: 22233 - DNA, 2946 bp, Homo sapiens
gtttcccggcaggcctcgcgtcaagacggccggcgggacgggagctgcggcgctggctacgagagtgacccagtcagcgttggttcccgtcttggccatggcctcgttcgtgacagaagttttggcacactccgggaggctggaaaaggaggatctggggacccggatcagccgcctgacccggcgggtggaggagatcaagggtgaggtgtgcaatatgattagcaagaagtacagtgaattcctgcctagcatgcagagcgcgcagggcctgattacccaggtggataagctatctgaagacattgacctgctgaaatccaggatagagagtgaggtccgccgggatcttcacgtatcaaccggtgaatttacagacttaaagcagcagttggaaagagactcagttgtcctaagtttgcttaaacagttgcaggagttttccactgctattgaagaatataattgtgcattaacagagaagaagtatgtcactggtgctcagcgtctggaagaggcacagaaatgcttgaagttattaaaatccagaaaatgctttgatttaaaaatattgaaatctctcagcatggagctcacaatacagaaacagaacatactttatcaccttggagaagagtggcagaagctgattgtatggaagttcccaccatcaaaagataccagcagtttggaatcttacctacaaactgaacttcatttatacactgaacaatcgcacaaagaggagaagacccctatgccacccatcagttctgtcctcttggcattttctgttcttggagaactacacagcaagcttaaatcatttggtcagatgctgctgaagtatatccttaggccgctggcatcttgcccatcccttcatgctgtgatagaaagccagcctaacatagttattattcgttttgaatctataatgactaacttggaatatccatcaccatctgaagtttttacaaagatcagactggtactagaagtgctccagaaacagcttctagatttgccacttgacactgacctggaaaatgaaaaaacatctactgtcccattggctgagatgcttggagacatgatctgggaggacttgtctgagtgcctcatcaaaaactgtttggtttattcgattccaacaaatagcagcaaattacagcaatatgaagagatcatacagtccactgaagaatttgaaaatgccctaaaggaaatgagatttttaaaaggagatactacagatttgctgaaatacgctcgtaacatcaattctcattttgcaaacaaaaagtgccaggatgtgattgtggcagccagaaatctaatgacctcagaaattcataacactgtgaagattattcctgattctaagataaatgtgccagagttacccactcctgatgaggataacaaactggaagtacagaaagtatccaatactcagtaccacgaagtgatgaatttagagcctgaaaatacattggaccaacattccttttccttgcccacatgccgtatcagtgagtctgtgaagaaattaatggaactcgcctatcagactttactagaggcaacaaccagtagtgatcaatgtgctgttcaacttttctactcagtgaggaatatcttccatttgttccatgatgttgtaccaacatatcacaaggagaaccttcaaaaacttccccagttggctgctattcatcacaacaactgtatgtacattgctcaccacttgctgaccctcgggcatcagttcagattgcgtcttgcccccattctttgtgatggcactgctacttttgtggatcttgtacctggcttcaggagacttgggacagaatgctttttggcccaaatgcgggcacagaaaggtgaacttctggaaagattatcaagtgctaggaacttttcaaatatggacgatgaagagaattattctgcagcaagtaaagcagtccggcaggtactgcaccaactaaagagacttggaattgtgtggcaggatgtcctgccagtgaatatatattgcaaggctatggggactttactcaatacagcaatttctgaggtcattggcaaaattactgccctagaggacatatctactgaagatggtgataggttatattccttatgcaaaacagtgatggatgaaggaccccaagtatttgcacctttatctgaagaaagcaagaacaagaaatatcaagaagaggttccagtctatgtgccaaaatggatgccattcaaggaattgatgatgatgctacaagccagcttgcaagaaattggggatcggtgggcagatggaaaaggacccctggcagctgcgttctcttccagtgaagtaaaagctttaattcgtgccttgtttcagaacacagaaagaagagcagctgcccttgctaaaattaaatagctccatcttcttaagaaagctatgtcttgaatatgtggattcttcccttggcataattactcccttaaagacttctttgaatcgcccattggttttggtgaaccagtacatcttggaagtttgactttacagaagaacgtcttacctcctggcctgtacgaggctttgtttaagaactgtttattaagataaattgtcaagtaaagcacctcaattcattgactttctagccatcttcctttgattagctaacaaactgtcaggcagcattatttcatgctgcttccagagccctctgggagctatatacattgtaaatgcaggccctagctttggaacgaggaattgggagattccaggagtcagggtagagaatttctgagcaaatcggagatattttaggggtgtggaggaggggaagggaggaatgggccaccatatttggccttacaggaattaaggagacttcctgtaatatttctttccaataaatattgctttttacaatt

SEQ ID NO: 22234 - protein, 779 aa, Homo sapiens; identical to SEQ ID NO: 2889

SEQ ID NO: 22235 - DNA, 568 bp, Homo sapiens
catctcaaaaagaaaaacaaaatcaatttaaagccatcacatttttaaaagataaaggagaatttgtggcacagctgcattaacaaaacaagacaccagtctaaagtgcaacactaaacaggtgttctctcttcccatggtggaatacatacacacaattacacgtaagatttcactgaagatatggaatgaggcaaataaccctttgaaatgaaccacccaaggaatagagacaggctaaaaataatttcttttaagattttactgtaagatggaccccctgcccccactccagcccaggtaagtactaactcaaacccctcattttatgtgcatggccttggcttctgtcttctttcctcagccacatccaaatccagaaaggcttctgtaccctatgctcaaaacgcaacctcagccaggtgtgagccacaatgccgggatgcatcatttctttaaacaatggctttaactgttgaatgagctctgacaagccatatgcatctcataagcaagccaaaatactgtcttcatatctgtttttcttgcaaacatgtatcatccaagt

SEQ ID NO: 22236 - protein, 47 aa, Homo sapiens
MCMALASVFFPQPHPNPERLLYPMLKTQPQPGVSHNAGMHHFFKQWL

SEQ ID NO: 22237 - DNA, 690 bp, Homo sapiens; identical to SEQ ID NO: 5095

SEQ ID NO: 22238 - protein, 229 aa, Homo sapiens; identical to SEQ ID NO: 5096

SEQ ID NO: 22239 - DNA, 3716 bp, Homo sapiens
gtgcatttctaaccagctatcaggaagttgctgaatttaaaatgttgtctctgtggagccagaagataggctttagatagtcatagtgatgtcttttttaaaaagtctctctctttgcctaggaaaacccttttgtaacaatgagaccttcggccagtatcctcttcaggtaaacggttatcgcaacttagacgagtgtttggaaggggccatggtggagggtgatgttgagcttcttccctccgatcactcggtgaagtatggacaagagcgttggtttacaaagctacctccagtgttgacctttgaactctcaagatttgagtttaatcagtcccttgggcagccagagaaaattcacaataagctggaatttcctcagattatttatatggacaggtacatgtacaggagcaaggagcttattcgaaataagagagagtgtattcgaaagttgaaggaggaaataaaaattctgcagcaaaaattggaaaggtatgtgaaatatggctcaggcccagctcggttcccgctcccggacatgctgaaatatgttattgaatttgctagtacaaaacctgcctcagaaagctgtccacctgaaagtgacacacatatgacattaccactttcttcagtgcactgctcggtttctgaccagacatccaaggaaagtacaagtacagaaagctcttctcaggatgttgaaagtaccttttcttctcctgaagattctttacccaagtctaaaccactgacatcttctcggtcttccatggaaatgccttcacagccagctccacgaacagtcacagatgaggagataaattttgttaagacctgtcttcagagatggaggagtgagattgaacaagatatacaagatttaaagacttgtattgcaagtactactcagactattgaacagatgtactgcgatcctctccttcgtcaggtgccttatcgcttgcatgcagttcttgttcatgaaggacaagcaaatgctggacactattgggcctatatctataatcaaccccgacagagctggctcaagtacaatgacatctctgttactgaatcttcctgggaagaagttgaaagagattcctatggaggcctgagaaatgttagtgcttactgtctgatgtacattaatgacaaactaccctacttcaatgcagaggcagccccaactgaatcagatcaaatgtcagaagtggaagccctatctgtggaactcaagcattacattcaggaggataactggcggtttgagcaggaagtagaggagtgggaagaagagcagtcttgcaaaatccctcaaatggagtcctccaccaactcctcatcacaggactactctacatcacaagagccttcagtagcctcttctcatggggttcgctgcttgtcgtctgagcatgctgtgattgtaaaggagcaaactgcccaggctattgcaaacacagcccgtgcctatgagaagagcggtgtagaagcggcactgagtgaggcattccatgaagaatactccaggctctatcagcttgccaaagagacccccacctctcacagtgatcctcgacttcagcatgtccttgtctactttttccaaaatgaagcacccaaaagggtagtagaacgaacccttctggaacagtttgcagataaaaatcttagctatgatgaaagatcaatcagcattatgaaggtggctcaagcgaaactgaaggaaattggtccagatgacatgaatatggaagagtacaagaagtggcatgaagattatagtttgttccgaaaagtgtctgtgtatctcctaacaggcctagaactctatcaaaaaggaaagtaccaagaggcactttcctacctggtatatgcctaccagagcaatgctgccctgctgatgaaggggccccgccggggggtcaaagaatccgtgattgctttataccgaagaaaatgccttctggagctgaatgccaaagcagcttctctttttgaaacaaatgatgatcactccgtaactgagggcattaatgtgatgaatgaactgatcatcccctgcattcaccttatcattaataatgacatttccaaggatgatctggatgccattgaggtcatgagaaaccattggtgctcttaccttgggcaagatattgcagaaaatctgcagctgtgcctaggggagtttctacccagacttctagatccttctgcagaaatcatcgtcttgaaagagcctccaacaattcgacccaattctccctatgacctatgtagccgatttgcagctgtcatggagtcaattcagggagtttcaactgtgacagtgaaataagctcccacatgttcaaggcccattctggttcctggctgcctgcctcttgcacagaagttcgttgtcatagtgctcaccttgggaaaaggattaggtgggcacataagattccgatcagaccccaaccatgctgcatgtgtaaagaaggattgaaaataaaattgcactttttaggtacaaaatcataaaagctgtttcactagaaaaggcagaaagcagtgtattaaggtgttgaattacgccagaagacctgaaatgccttgtacctacaacaatgcttaggcttttctaagcctcttgccacttttaaaattatccttcaggcataaatatttttgacagcagaatagaagaatgattcatgagaacctgaaccagatgaacagctactagttattttatcaaatacagatgacatttaaaaattcttaactacaagagattagaaatataaaccttgcctggctcttgccaggagataacaaaatgggttgctgatgaactgcacccttttacatgtgggtagaatataagctcacatggcagtgagatgttgaaaagtcaaaagagacctgtctctctcctttcttttctatctttaaaccagaaaacctcatactcagtcctcagtgaaagaaagtaaagtattaaggactttagacagaagagcattgtgtaacttgactgaagatcatccattaatagttattaggcatttaggtaaaattttctaatacctaaaaattgtcaaaaacagtcaatagggctactgctggcccaaagaccatttaggtccacctcctcttttttgctctttttttttttctgtgacagtttcactgtgtcgcccaggctggcgttcagtggtgcaatctcagctcactgcaaactctgtctcctgggctcaagtgattctcgtgcctcagcctcccgaatagctggaattacgggcatgcaccaccacacctggctaatttttgtatttttaatagagatggggtttcaccatattggccaggctgatctctaactcctggcctcaagtgatctatctgcctccctcagcctcccaaagtctgggattgcagacaagtcatcgtacccggccttcttttttgcccttaaaagtaagggatgtgggtttgtacaaaaaaaaaaaaaaaaaaaaaaaaaccagcatacatatgcaaaactatatatatatgtatatgtagagaaaaatacttcccattgatcatttttaaaaggcttctgattggatattgtgttttaaccaaattttaaagattaatggaatcatgaaagggaaaaaaattgatacaactatgcagattttataaatgtgcaataaaagtatttgttttac

SEQ ID NO: 22240 - protein, 753 aa, Homo sapiens
MSFLKSLSLCLGKPFCNNETFGQYPLQVNGYRNLDECLEGAMVEGDVELLPSDHSVKYGQERWFTKLPPVLTFELSRFEFNQSLGQPEKIHNKLEFPQIIYMDRYMYRSKELIRNKRECIRKLKEEIKILQQKLERYVKYGSGPARFPLPDMLKYVIEFASTKPASESCPPESDTHMTLPLSSVHCSVSDQTSKESTSTESSSQDVESTFSSPEDSLPKSKPLTSSRSSMEMPSQPAPRTVTDEEINFVKTCLQRWRSEIEQDIQDLKTCIASTTQTIEQMYCDPLLRQVPYRLHAVLVHEGQANAGHYWAYIYNQPRQSWLKYNDISVTESSWEEVERDSYGGLRNVSAYCLMYINDKLPYFNAEAAPTESDQMSEVEALSVELKHYIQEDNWRFEQEVEEWEEEQSCKIPQMESSTNSSSQDYSTSQEPSVASSHGVRCLSSEHAVIVKEQTAQAIANTARAYEKSGVEAALSEAFHEEYSRLYQLAKETPTSHSDPRLQHVLVYFFQNEAPKRVVERTLLEQFADKNLSYDERSISIMKVAQAKLKEIGPDDMNMEEYKKWHEDYSLFRKVSVYLLTGLELYQKGKYQEALSYLVYAYQSNAALLMKGPRRGVKESVIALYRRKCLLELNAKAASLFETNDDHSVTEGINVMNELIIPCIHLIINNDISKDDLDAIEVMRNHWCSYLGQDIAENLQLCLGEFLPRLLDPSAEIIVLKEPPTIRPNSPYDLCSRFAAVMESIQGVSTVTVK

SEQ ID NO: 22241 - DNA, 4633 bp, Homo sapiens
gagaccggtgacccgcggctgggcgcctcggccatgactgcggagctgcagcaggacgacgcggccggcgcggcagacggccacggctcgagctgccaaatgctgttaaatcaactgagagaaatcacaggcattcaggacccttcctttctccatgaagctctgaaggccagtaatggtgacattactcaggcagtcagccttctcactgatgagagagttaaggagcccagtcaagacactgttgctacagaaccatctgaagtagaggggagtgctgccaacaaggaagtattagcaaaagttatagaccttactcatgataacaaagatgatcttcaggctgccattgctttgagtctactggagtctcccaaaattcaagctgatggaagagatcttaacaggatgcatgaagcaacctctgcagaaactaaacgctcaaagagaaaacgctgtgaagtctggggagaaaaccccaatcccaatgactggaggagagttgatggttggccagttgggctgaaaaatgttggcaatacatgttggtttagtgctgttattcagtctctctttcaattgcctgaatttcgaagacttgttctcagttatagtctgccacaaaatgtacttgaaaattgtcgaagtcatacagaaaagagaaatatcatgtttatgcaagagcttcagtatttgtttgctctaatgatgggatcaaatagaaaatttgtagacccgtctgcagccctggatctattaaagggagcattccgatcatctgaggaacagcagcaagatgtgagtgaattcacacacaagctcctggattggctagaggacgcattccagctagctgttaatgttaacagtcccaggaacaaatctgaaaatccaatggtgcagctgttctatggtactttcctgactgaaggggttcgtgaaggaaaacccttttgtaacaatgagaccttcggccagtatcctcttcaggtaaacggttatcgcaacttagacgagtgtttggaaggggccatggtggagggtgatgttgagcttcttccctccgatcactcggtgaagtatggacaagagcgttggtttacaaagctacctccagtgttgacctttgaactctcaagatttgagtttaatcagtcccttgggcagccagagaaaattcacaataagctggaatttcctcagattatttatatggacaggtacatgtacaggagcaaggagcttattcgaaataagagagagtgtattcgaaagttgaaggaggaaataaaaattctgcagcaaaaattggaaaggtatgtgaaatatggctcaggcccagctcggttcccgctcccggacatgctgaaatatgttattgaatttgctagtacaaaacctgcctcagaaagctgtccacctgaaagtgacacacatatgacattaccactttcttcagtgcactgctcggtttctgaccagacatccaaggaaagtacaagtacagaaagctcttctcaggatgttgaaagtaccttttcttctcctgaagattctttacccaagtctaaaccactgacatcttctcggtcttccatggaaatgccttcacagccagctccacgaacagtcacagatgaggagataaattttgttaagacctgtcttcagagatggaggagtgagattgaacaagatatacaagatttaaagacttgtattgcaagtactactcagactattgaacagatgtactgcgatcctctccttcgtcaggtgccttatcgcttgcatgcagttcttgttcatgaaggacaagcaaatgctggacactattgggcctatatctataatcaaccccgacagagctggctcaagtacaatgacatctctgttactgaatcttcctgggaagaagttgaaagagattcctatggaggcctgagaaatgttagtgcttactgtctgatgtacattaatgacaaactaccctacttcaatgcagaggcagccccaactgaatcagatcaaatgtcagaagtggaagccctatctgtggaactcaagcattacattcaggaggataactggcggtttgagcaggaagtagaggagtgggaagaagagcagtcttgcaaaatccctcaaatggagtcctccaccaactcctcatcacaggactactctacatcacaagagccttcagtagcctcttctcatggggttcgctgcttgtcgtctgagcatgctgtgattgtaaaggagcaaactgcccaggctattgcaaacacagcccgtgcctatgagaagagcggtgtagaagcggcactgagtgaggtgatgctgagccctgccatgcaaggggtcatcctggccatagctaaagcccgtcagacctttgaccgagatgggtctgaagcagggctgattaaggcattccatgaagaatactccaggctctatcagcttgccaaagagacccccacctctcacagtgatcctcgacttcagcatgtccttgtctactttttccaaaatgaagcacccaaaagggtagtagaacgaacccttctggaacagtttgcagataaaaatcttagctatgatgaaagatcaatcagcattatgaaggtggctcaagcgaaactgaaggaaattggtccagatgacatgaatatggaagagtacaagaagtggcatgaagattatagtttgttccgaaaagtgtctgtgtatctcctaacaggcctagaactctatcaaaaaggaaagtaccaagaggcactttcctacctggtatatgcctaccagagcaatgctgccctgctgatgaaggggccccgccggggggtcaaagaatccgtgattgctttataccgaagaaaatgccttctggagctgaatgccaaagcagcttctctttttgaaacaaatgatgatcactccgtaactgagggcattaatgtgatgaatgaactgatcatcccctgcattcaccttatcattaataatgacatttccaaggatgatctggatgccattgaggtcatgagaaaccattggtgctcttaccttgggcaagatattgcagaaaatctgcagctgtgcctaggggagtttctacccagacttctagatccttctgcagaaatcatcgtcttgaaagagcctccaacaattcgacccaattctccctatgacctatgtagccgatttgcagctgtcatggagtcaattcagggagtttcaactgtgacagtgaaataagctcccacatgttcaaggcccattctggttcctggctgcctgcctcttgcacagaagttcgttgtcatagtgctcaccttgggaaaaggattaggtgggcacataagattccgatcagaccccaaccatgctgcatgtgtaaagaaggattgaaaataaaattgcactttttaggtacaaaatcataaaagctgtttcactagaaaaggcagaaagcagtgtattaaggtgttgaattacgccagaagacctgaaatgccttgtacctacaacaatgcttaggcttttctaagcctcttgccacttttaaaattatccttcaggcataaatatttttgacagcagaatagaagaatgattcatgagaacctgaaccagatgaacagctactagttattttatcaaatacagatgacatttaaaaattcttaactacaagagattagaaatataaaccttgcctggctcttgccaggagataacaaaatgggttgctgatgaactgcacccttttacatgtgggtagaatataagctcacatggcagtgagatgttgaaaagtcaaaagagacctgtctctctcctttcttttctatctttaaaccagaaaacctcatactcagtcctcagtgaaagaaagtaaagtattaaggactttagacagaagagcattgtgtaacttgactgaagatcatccattaatagttattaggcatttaggtaaaattttctaatacctaaaaattgtcaaaaacagtcaatagggctactgctggcccaaagaccatttaggtccacctcctcttttttgctctttttttttttctgtgacagtttcactgtgtcgcccaggctggcgttcagtggtgcaatctcagctcactgcaaactctgtctcctgggctcaagtgattctcgtgcctcagcctcccgaatagctggaattacgggcatgcaccaccacacctggctaatttttgtatttttaatagagatggggtttcaccatattggccaggctgatctctaactcctggcctcaagtgatctatctgcctccctcagcctcccaaagtctgggattgcagacaagtcatcgtacccggccttcttttttgcccttaaaagtaagggatgtgggtttgtacaaaaaaaaaaaaaaaaaaaaaaaaaccagcatacatatgcaaaactatatatatatgtatatgtagagaaaaatacttcccattgatcatttttaaaaggcttctgattggatattgtgttttaaccaaattttaaagattaatggaatcatgaaagggaaaaaaattgatacaactatgcagattttataaatgtgcaataaaagtatttgttttac

SEQ ID NO: 22242 - protein, 1077 aa, Homo sapiens; identical to SEQ ID NO: 2891

SEQ ID NO: 22243 - DNA, 4207 bp, Homo sapiens
ctgagaggctgggccggcggcggctgcggcgggagaccggtgacccgcggctgggcgcctcggccatgactgcggagctgcagcaggacgacgcggccggcgcggcagacggccacggctcgagctgccaaatgctgttaaatcaactgagagaaatcacaggcattcaggacccttcctttctccatgaagctctgaaggccagtaatggtgacattactcaggcagtcagccttctcactgatgagagagttaaggagcccagtcaagacactgttgctacagaaccatctgaagtagaggggagtgctgccaacaaggaagtattagcaaaagttatagaccttactcatgataacaaagatgatcttcaggctgccattgctttgagtctactggagtctcccaaaattcaagctgatggaagagatcttaacaggatgcatgaagcaacctctgcagaaactaaacgctcaaagagaaaacgctgtgaagtctggggagaaaaccccaatcccaatgactggaggagagttgatggttggccagttgggctgaaaaatgttggcaatacatgttggtttagtgctgttattcaggatgcttcttcaggagttccaccgtgcaggcctgagagggttttcatttgaggagcatgttgggatgaggagttgtatattcatacaggagatatttttaaagaaaattaacttatgaaagtctctctttcaattgcctgaatttcgaagacttgttctcagttatagtctgccacaaaatgtacttgaaaattgtcgaagtcatacagaaaagagaaatatcatgtttatgcaagagcttcagtatttgtttgctctaatgatgggatcaaatagaaaatttgtagacccgtctgcagccctggatctattaaagggagcattccgatcatctgaggaacagcagcaagatgtgagtgaattcacacacaagctcctggattggctagaggacgcattccagctagctgttaatgttaacagtcccaggaacaaatctgaaaatccaatggtgcagctgttctatggtactttcctgactgaaggggttcgtgaaggaaaacccttttgtaacaatgagaccttcggccagtatcctcttcaggtaaacggttatcgcaacttagacgagtgtttggaaggggccatggtggagggtgatgttgagcttcttccctccgatcactcggtgaagtatggacaagagcgttggtttacaaagctacctccagtgttgacctttgaactctcaagatttgagtttaatcagtcccttgggcagccagagaaaattcacaataagctggaatttcctcagattatttatatggacaggtacatgtacaggagcaaggagcttattcgaaataagagagagtgtattcgaaagttgaaggaggaaataaaaattctgcagcaaaaattggaaagtctgcatctagcctgtttcaggacattgctcattcttcctacttgactgccagaggtgccattgcagagctggctcaagtacaatgacatctctgttactgaatcttcctgggaagaagttgaaagagattcctatggaggcctgagaaatgttagtgcttactgtctgatgtacattaatgacaaactaccctacttcaatgcagaggcagccccaactgaatcagatcaaatgtcagaagtggaagccctatctgtggaactcaagcattacattcaggaggataactggcggtttgagcaggaagtagaggagtgggaagaagagcagtcttgcaaaatccctcaaatggagtcctccaccaactcctcatcacaggactactctacatcacaagagccttcagtagcctcttctcatggggttcgctgcttgtcgtctgagcatgctgtgattgtaaaggagcaaactgcccaggctattgcaaacacagcccgtgcctatgagaagagcggtgtagaagcggcactgagtgaggcattccatgaagaatactccaggctctatcagcttgccaaagagacccccacctctcacagtgatcctcgacttcagcatgtccttgtctactttttccaaaatgaagcacccaaaagggtagtagaacgaacccttctggaacagtttgcagataaaaatcttagctatgatgaaagatcaatcagcattatgaaggtggctcaagcgaaactgaaggaaattggtccagatgacatgaatatggaagagtacaagaagtggcatgaagattatagtttgttccgaaaagtgtctgtgtatctcctaacaggcctagaactctatcaaaaaggaaagtaccaagaggcactttcctacctggtatatgcctaccagagcaatgctgccctgctgatgaaggggccccgccggggggtcaaagaatccgtgattgctttataccgaagaaaatgccttctggagctgaatgccaaagcagcttctctttttgaaacaaatgatgatcactccgtaactgagggcattaatgtgatgaatgaactgatcatcccctgcattcaccttatcattaataatgacatttccaaggatgatctggatgccattgaggtcatgagaaaccattggtgctcttaccttgggcaagatattgcagaaaatctgcagctgtgcctaggggagtttctacccagacttctagatccttctgcagaaatcatcgtcttgaaagagcctccaacaattcgacccaattctccctatgacctatgtagccgatttgcagctgtcatggagtcaattcagggagtttcaactgtgacagtgaaataagctcccacatgttcaaggcccattctggttcctggctgcctgcctcttgcacagaagttcgttgtcatagtgctcaccttgggaaaaggattaggtgggcacataagattccgatcagaccccaaccatgctgcatgtgtaaagaaggattgaaaataaaattgcactttttaggtacaaaatcataaaagctgtttcactagaaaaggcagaaagcagtgtattaaggtgttgaattacgccagaagacctgaaatgccttgtacctacaacaatgcttaggcttttctaagcctcttgccacttttaaaattatccttcaggcataaatatttttgacagcagaatagaagaatgattcatgagaacctgaaccagatgaacagctactagttattttatcaaatacagatgacatttaaaaattcttaactacaagagattagaaatataaaccttgcctggctcttgccaggagataacaaaatgggttgctgatgaactgcacccttttacatgtgggtagaatataagctcacatggcagtgagatgttgaaaagtcaaaagagacctgtctctctcctttcttttctatctttaaaccagaaaacctcatactcagtcctcagtgaaagaaagtaaagtattaaggactttagacagaagagcattgtgtaacttgactgaagatcatccattaatagttattaggcatttaggtaaaattttctaatacctaaaaattgtcaaaaacagtcaatagggctactgctggcccaaagaccatttaggtccacctcctcttttttgctctttttttttttctgtgacagtttcactgtgtcgcccaggctggcgttcagtggtgcaatctcagctcactgcaaactctgtctcctgggctcaagtgattctcgtgcctcagcctcccgaatagctggaattacgggcatgcaccaccacacctggctaatttttgtatttttaatagagatggggtttcaccatattggccaggctgatctctaactcctggcctcaagtgatctatctgcctccctcagcctcccaaagtctgggattgcagacaagtcatcgtacccggccttcttttttgcccttaaaagtaagggatgtgggtttgtacaaaaaaaaaaaaaaaaaaaaaaaaaccagcatacatatgcaaaactatatatatatgtatatgtagagaaaaatacttcccattgatcatttttaaaaggcttctgattggatattgtgttttaaccaaattttaaagattaatggaatcatgaaagggaaaaaaattgatacaactatgcagattttataaatgtgcaataaaagtatttgttttac

SEQ ID NO: 22244 - protein, 400 aa, Homo sapiens
MYINDKLPYFNAEAAPTESDQMSEVEALSVELKHYIQEDNWRFEQEVEEWEEEQSCKIPQMESSTNSSSQDYSTSQEPSVASSHGVRCLSSEHAVIVKEQTAQAIANTARAYEKSGVEAALSEAFHEEYSRLYQLAKETPTSHSDPRLQHVLVYFFQNEAPKRVVERTLLEQFADKNLSYDERSISIMKVAQAKLKEIGPDDMNMEEYKKWHEDYSLFRKVSVYLLTGLELYQKGKYQEALSYLVYAYQSNAALLMKGPRRGVKESVIALYRRKCLLELNAKAASLFETNDDHSVTEGINVMNELIIPCIHLIINNDISKDDLDAIEVMRNHWCSYLGQDIAENLQLCLGEFLPRLLDPSAEIIVLKEPPTIRPNSPYDLCSRFAAVMESIQGVSTVTVK

SEQ ID NO: 22245 - DNA, 1897 bp, Homo sapiens
ggtgacccgcggctgggcgcctcggccatgactgcggagctgcagcaggacgacgcggccggcgcggcagacggccacggctcgagctgccaaatgctgttaaatcaactgagagaaatcacaggcattcaggacccttcctttctccatgaagctctgaaggccagtaatggtgacattactcaggcagtcagccttctcactgatgagagagttaaggagcccagtcaagacactgttgctacagaaccatctgaagtagaggggagtgctgccaacaaggaagtattagcaaaagttatagaccttactcatgataacaaagatgatcttcaggctgccattgctttgagtctactggagtctcccaaaattcaagctgatggaagagatcttaacaggatgcatgaagcaacctctgcagaaactaaacgctcaaagagaaaacgctgtgaagtctggggagaaaaccccaatcccaatgactggaggagagttgatggttggccagttgggctgaaaaatgttggcaatacatgttggtttagtgctgttattcagtctctctttcaattgcctgaatttcgaagacttgttctcagttatagtctgccacaaaatgtacttgaaaattgtcgaagtcatacagaaaagagaaatatcatgtttatgcaagagcttcagtatttgtttgctctaatgatgggatcaaatagaaaatttgtagacccgtctgcagccctggatctattaaagggagcattccgatcatctgaggaacagcagcaagatgtgagtgaattcacacacaagctcctggattggctagaggacgcattccagctagctgttaatgttaacagtcccaggaacaaatctgaaaatccaatggtgcagctgttctatggtactttcctgactgaaggggttcgtgaaggaaaacccttttgtaacaatgagaccttcggccagtatcctcttcaggtaaacggttatcgcaacttagacgagtgtttggaaggggccatggtggagggtgatgttgagcttcttccctccgatcactcggtgaagtatggacaagagcgttggtttacaaagctacctccagtgttgacctttgaactctcaagatttgagtttaatcagtcccttgggcagccagagaaaattcacaataagctggaatttcctcagattatttatatggacaggtacatgtacaggagcaaggagcttattcgaaataagagagagtgtattcgaaagttgaaggaggaaataaaaattctgcagcaaaaattggaaaggtatgtgaaatatggctcaggcccagctcggttcccgctcccggacatgctgaaatatgttattgaatttgctagtacaaaacctgcctcagaaagctgtccacctgaaagtgacacacatatgacattaccactttcttcagtgcactgctcggtttctgaccagacatccaaggaaagtacaagtacagaaagctcttctcaggatgttgaaagtaccttttcttctcctgaagattctttacccaagtctaaaccactgacatcttctcggtcttccatggaaatgccttcacagccagctccacgaacagtcacagatgaggagataaattttgttaagacctgtcttcagagatggaggagtgagattgaacaagatatacaagatttaaagacttgtattgcaagtactactcagactattgaacagatgtactgcgatcctctccttcgtcaggtagaatgaaaattgatgggaaagtagtcaaggcatgtgctaatggtagatacaaaaatcaaatttgatagttttcttttaaacccaatgggaatccccctaagataaaagaataaacttaagatat

SEQ ID NO: 22246 - protein, 583 aa, Homo sapiens
MTAELQQDDAAGAADGHGSSCQMLLNQLREITGIQDPSFLHEALKASNGDITQAVSLLTDERVKEPSQDTVATEPSEVEGSAANKEVLAKVIDLTHDNKDDLQAAIALSLLESPKIQADGRDLNRMHEATSAETKRSKRKRCEVWGENPNPNDWRRVDGWPVGLKNVGNTCWFSAVIQSLFQLPEFRRLVLSYSLPQNVLENCRSHTEKRNIMFMQELQYLFALMMGSNRKFVDPSAALDLLKGAFRSSEEQQQDVSEFTHKLLDWLEDAFQLAVNVNSPRNKSENPMVQLFYGTFLTEGVREGKPFCNNETFGQYPLQVNGYRNLDECLEGAMVEGDVELLPSDHSVKYGQERWFTKLPPVLTFELSRFEFNQSLGQPEKIHNKLEFPQIIYMDRYMYRSKELIRNKRECIRKLKEEIKILQQKLERYVKYGSGPARFPLPDMLKYVIEFASTKPASESCPPESDTHMTLPLSSVHCSVSDQTSKESTSTESSSQDVESTFSSPEDSLPKSKPLTSSRSSMEMPSQPAPRTVTDEEINFVKTCLQRWRSEIEQDIQDLKTCIASTTQTIEQMYCDPLLRQVE

SEQ ID NO: 22247 - DNA, 1880 bp, Homo sapiens
gtaaggatagcatcaactggcaaacggagaaggaggagaacagagtggagaggaaccctgttaggagaaattgagcggcattccatctggtaggcaagtttgcatttctcctttttgggatctgcccaggaatgttgtcaagtgtaatggctcccctgtgggcctgcatcctggtggctgcaggaattctagccacagatacacatcatccccaggattctgctctgtatcatctcagcaagcagctattacagaaatatcataaagaagtgagacctgtttacaactggaccaaggccaccacagtctacctggacctgttcgtccatgctatattggatgtggatgcagagaatcaaatattaaagacaagtgtatggtaccaagaggtctggaatgatgaatttttatcctggaactccagcatgtttgatgagattagagagatctccctacctctaagtgccatctgggcccccgatatcatcatcaatgagtttgtggacattgaaagataccctgaccttccctatgtttatgtgaactcatctgggaccattgagaactataagcccatccaggtggtctctgcgtgcagtttagagacatatgcttttccatttgatgtccagaattgcagcctgaccttcaagagcattctgcatacagtggaagacgtagacctggcctttctgaggagcccagaagacattcagcatgacaaaaaggcgtttttgaatgacagtgagtgggaacttctatctgtgtcctccacatacagcatcctgcagagcagcgctggaggatttgcacagattcagtttaatgtggtgatgcgcaggcaccccctggtctatgtcgtgagtctgctgattcctagcatctttctcatgctggtggacctggggagcttctacctgccacccaactgccgagccaggattgtgttcaagaccagtgtgctggtgggctacaccgtcttcagggtcaacatgtccaaccaggtgccacggagtgtagggagcacccctctgattgggcacttcttcaccatctgcatggccttcttggttctcagcttagctaagtccatcgtgttggtcaaattcctccatgatgagcagcgtggtggacaggagcagcccttcttgtgccttcgaggggacaccgatgctgacaggcctagagtggaacccagggcccaacgtgctgtggtaacagagtcctcgctgtatggagagcacctggcccagccaggaaccctgaaggaagtctggtcgcagcttcaatctatcagcaactacctccaaactcaggaccagacagaccaacaggaggcagagtggctggtcctcctgtcccgctttgaccgactgctcttccaaagctaccttttcatgctggggatctacaccatcactctgtgctccctctgggcactgtggggcggcgtgtgaagactgaagtgttcttcagtaattgtgctggcacttaggagagagaggagggggaataatagtgggttaaaaagctttctgggtcgggtgtggtggttcttgcctatagtcccagtgctttgggaggccatagcaggaggattgcttgagcccaggagttcgagaccagccagagcaacatagtgagaccacatctctaccagtaaataaataaataaataaataaataaataaataaataaatagctgggcatagtggctcatgcctgtactctcagctacttgggaggttgaggtgggaggattgcttgagcccaggatttcaaggctgcagtgagccatgattgcaccactgcaccccagcctgggtgacagagcaagaccctgtctcaaaaaaaataaaataaaaggctttctgccttc

SEQ ID NO: 22248 - protein, 441 aa, Homo sapiens; identical to SEQ ID NO: 2893

SEQ ID NO: 22249 - DNA, 599 bp, Homo sapiens
aatattaaagacaagtgtatggtaccaagaggtctggaatgatgaatttttatcctggaactccagcatgtttgatgagattagagagatctccctacctctaagtgccatctgggcccccgatatcatcatcaatgagtttgtggacattgaaagataccctgaccttccctatgtttatgtgaactcatctgggaccattgagaactataagcccatccaggtggtctctgcgtgcagtttagagacatatgcttttccatttgatgtccagaattgcagcctgaccttcaagagcattctgcatacagtggaagacgtagacctggcctttctgaggagcccagaagacattcagcatgacaaaaaggcgtttttgaatgacagtgagtgggaacttctatctgtgtcctccacatacagcatcctgcagagcagcgctggaggatttgcacagattcagtttaatggcacttcttcaccatctgcatggccttcttggttctcagcttagctaagtccatcgtgttggtcaaattcctccatgatgagcagcgtggtggacaggagcagcccttcttgtgccttcgaggggacac

SEQ ID NO: 22250 - protein, 148 aa, Homo sapiens
MFDEIREISLPLSAIWAPDIIINEFVDIERYPDLPYVYVNSSGTIENYKPIQVVSACSLETYAFPFDVQNCSLTFKSILHTVEDVDLAFLRSPEDIQHDKKAFLNDSEWELLSVSSTYSILQSSAGGFAQIQFNGTSSPSAWPSWFSA

SEQ ID NO: 22251 - DNA, 2203 bp, Homo sapiens
tgaaacatgatccagctgaaggactgattgcaggaaaacttggcagctccccaaccttggtggcccagggagtgtgaggctgcagcctcagaaggtgtgagcagtggccacgagaggcaggctggctgggacatgaggttggcagagggcaggcaagctggcccttggtgggcctcgtcctgagcactcggaggcactcctatgcttggaaagctcgctatgctgctgtgggtccagcaggcgctgctcgccttgctcctccccacactcctggcacagggagaagccaggaggagccgaaacaccaccaggcccgctctgctgaggctgtcggattaccttttgaccaactacaggaagggtgtgcgccccgtgagggactggaggaagccaaccaccgtatccattgacgtcattgtctatgccatcctcaacgtggatgagaagaatcaggtgctgaccacctacatctggtaccggcagtactggactgatgagtttctccagtggaaccctgaggactttgacaacatcaccaagttgtccatccccacggacagcatctgggtcccggacattctcatcaatgagttcgtggatgtggggaagtctccaaatatcccgtacgtgtatattcggcatcaaggcgaagttcagaactacaagccccttcaggtggtgactgcctgtagcctcgacatctacaacttccccttcgatgtccagaactgctcgctgaccttcaccagttggctgcacaccatccaggacatcaacatctctttgtggcgcttgccagaaaaggtgaaatccgacaggagtgtcttcatgaaccagggagagtgggagttgctgggggtgctgccctactttcgggagttcagcatggaaagcagtaactactatgcagaaatgaagttctatgtggtcatccgccggcggcccctcttctatgtggtcagcctgctactgcccagcatcttcctcatggtcatggacatcgtgggcttctacctgccccccaacagtggcgagagggtctctttcaagattacactcctcctgggctactcggtcttcctgatcatcgtttctgacacgctgccggccactgccatcggcactcctctcattggtgtctactttgtggtgtgcatggctctgctggtgataagtttggccgagaccatcttcattgtgcggctggtgcacaagcaagacctgcagcagcccgtgcctgcttggctgcgtcacctggttctggagagaatcgcctggctactttgcctgagggagcagtcaacttcccagaggcccccagccacctcccaagccaccaagactgatgactgctcagccatgggaaaccactgcagccacatgggaggaccccaggacttcgagaagagcccgagggacagatgtagccctcccccaccacctcgggaggcctcgctggcggtgtgtgggctgctgcaggagctgtcctccatccggcaattcctggaaaagcgggatgagatccgagaggtggcccgagactggctgcgcgtgggctccgtgctggacaagctgctattccacatttacctgctagcggtgctggcctacagcatcaccctggttatgctctggtccatctggcagtacgcttgagtgggtacagcccagtggaggagggggtacagtcctggttaggtggggacagaggatttctgcttaggcccctcaggacccagggaatgccagggacattttcaagacacagacaaagtcccgtgccctgtttccaatgccaattcatctcagcaatcacaagccaaggtctgaacccttccaccaaaaactgggtgttcaaggcccttacacccttgtcccacccccagcagctcaccatggctttaaaacatgctgtcttagatcaggagaaactcgggcactccctaagtccactctagttgtggacttttccccattgaccctcacctgaataagggactttggaattctgcttctctttcacaactttgcttttaggttgaaggcaaaaccaactctctactacacaggcctgataactctgtacgaggcttctctaacccctagtgtcttttttttcttcacctcacttgtggcagcttccctgaacactcatcccccatcagatgatgggagtgggaagaataaaatgcagtgaaaccct

SEQ ID NO: 22252 - protein, 484 aa, Homo sapiens
MLGKLAMLLWVQQALLALLLPTLLAQGEARRSRNTTRPALLRLSDYLLTNYRKGVRPVRDWRKPTTVSIDVIVYAILNVDEKNQVLTTYIWYRQYWTDEFLQWNPEDFDNITKLSIPTDSIWVPDILINEFVDVGKSPNIPYVYIRHQGEVQNYKPLQVVTACSLDIYNFPFDVQNCSLTFTSWLHTIQDINISLWRLPEKVKSDRSVFMNQGEWELLGVLPYFREFSMESSNYYAEMKFYVVIRRRPLFYVVSLLLPSIFLMVMDIVGFYLPPNSGERVSFKITLLLGYSVFLIIVSDTLPATAIGTPLIGVYFVVCMALLVISLAETIFIVRLVHKQDLQQPVPAWLRHLVLERIAWLLCLREQSTSQRPPATSQATKTDDCSAMGNHCSHMGGPQDFEKSPRDRCSPPPPPREASLAVCGLLQELSSIRQFLEKRDEIREVARDWLRVGSVLDKLLFHIYLLAVLAYSITLVMLWSIWQYA

SEQ ID NO: 22253 - DNA, 2299 bp, Homo sapiens
tgaaacatgatccagctgaaggactgattgcaggaaaacttggcagctccccaaccttggtggcccagggagtgtgaggctgcagcctcagaaggtgtgagcagtggccacgagaggcaggctggctgggacatgaggttggcagagggcaggcaagctggcccttggtgggcctcgtcctgagcactcggaggcactcctatgcttggaaagctcgctatgctgctgtgggtccagcaggcgctgctcgccttgctcctccccacactcctggcacagggagaagccaggaggagccgaaacaccaccaggcccgctctgctgaggctgtcggattaccttttgaccaactacaggaagggtgtgcgccccgtgagggactggaggaagccaaccaccgtatccattgacgtcattgtctatgccatcctcaacgtggatgagaagaatcaggtgctgaccacctacatctggtaccggcagtactggactgatgagtttctccagtggaaccctgaggactttgacaacatcaccaagttgtccatccccacggacagcatctgggtcccggacattctcatcaatgagttcgtggatgtggggaagtctccaaatatcccgtacgtgtatattcggcatcaaggcgaagttcagaactacaagccccttcaggtggtgactgcctgtagcctcgacatctacaacttccccttcgatgtccagaactgctcgctgaccttcaccagttggctgcacaccatccaggacatcaacatctctttgtggcgcttgccagaaaaggtgaaatccgacaggagtgtcttcatgaaccagggagagtgggagttgctgggggtgctgccctactttcgggagttcagcatggaaagcagtaactactatgcagaaatgaagttctatgtggtcatccgccggcggcccctcttctatgtggtcagcctgctactgcccagcatcttcctcatggtcatggacatcgtgggcttctacctgccccccaacagtggcgagagggtctctttcaagattacactcctcctgggctactcggtcttcctgatcatcgtttctgacacgctgccggccactgccatcggcactcctctcattggtaaggcccctcctggcagcagagctcagtctggtgagaaacccgccccctcccacctcctgcatgtgtctcttgcctctgccctgggctgcacaggtgtctactttgtggtgtgcatggctctgctggtgataagtttggccgagaccatcttcattgtgcggctggtgcacaagcaagacctgcagcagcccgtgcctgcttggctgcgtcacctggttctggagagaatcgcctggctactttgcctgagggagcagtcaacttcccagaggcccccagccacctcccaagccaccaagactgatgactgctcagccatgggaaaccactgcagccacatgggaggaccccaggacttcgagaagagcccgagggacagatgtagccctcccccaccacctcgggaggcctcgctggcggtgtgtgggctgctgcaggagctgtcctccatccggcaattcctggaaaagcgggatgagatccgagaggtggcccgagactggctgcgcgtgggctccgtgctggacaagctgctattccacatttacctgctagcggtgctggcctacagcatcaccctggttatgctctggtccatctggcagtacgcttgagtgggtacagcccagtggaggagggggtacagtcctggttaggtggggacagaggatttctgcttaggcccctcaggacccagggaatgccagggacattttcaagacacagacaaagtcccgtgccctgtttccaatgccaattcatctcagcaatcacaagccaaggtctgaacccttccaccaaaaactgggtgttcaaggcccttacacccttgtcccacccccagcagctcaccatggctttaaaacatgctgtcttagatcaggagaaactcgggcactccctaagtccactctagttgtggacttttccccattgaccctcacctgaataagggactttggaattctgcttctctttcacaactttgcttttaggttgaaggcaaaaccaactctctactacacaggcctgataactctgtacgaggcttctctaacccctagtgtcttttttttcttcacctcacttgtggcagcttccctgaacactcatcccccatcagatgatgggagtgggaagaataaaatgcagtgaaaccct

SEQ ID NO: 22254 - protein, 516 aa, Homo sapiens
MLGKLAMLLWVQQALLALLLPTLLAQGEARRSRNTTRPALLRLSDYLLTNYRKGVRPVRDWRKPTTVSIDVIVYAILNVDEKNQVLTTYIWYRQYWTDEFLQWNPEDFDNITKLSIPTDSIWVPDILINEFVDVGKSPNIPYVYIRHQGEVQNYKPLQVVTACSLDIYNFPFDVQNCSLTFTSWLHTIQDINISLWRLPEKVKSDRSVFMNQGEWELLGVLPYFREFSMESSNYYAEMKFYVVIRRRPLFYVVSLLLPSIFLMVMDIVGFYLPPNSGERVSFKITLLLGYSVFLIIVSDTLPATAIGTPLIGKAPPGSRAQSGEKPAPSHLLHVSLASALGCTGVYFVVCMALLVISLAETIFIVRLVHKQDLQQPVPAWLRHLVLERIAWLLCLREQSTSQRPPATSQATKTDDCSAMGNHCSHMGGPQDFEKSPRDRCSPPPPPREASLAVCGLLQELSSIRQFLEKRDEIREVARDWLRVGSVLDKLLFHIYLLAVLAYSITLVMLWSIWQYA

SEQ ID NO: 22255 - DNA, 2002 bp, Homo sapiens
tggcagctccccaaccttggtggcccagggagtgtgaggctgcagcctcagaaggtgtgagcagtggccacgagaggcaggctggctgggacatgaggttggcagagggcaggcaagctggcccttggtgggcctcgtcctgagcactcggaggcactcctatgcttggaaagctcgctatgctgctgtgggtccagcaggcgctgctcgccttgctcctccccacactcctggcacagggagaagccaggaggagccgaaacaccaccaggcccgctctgctgaggctgtcggattaccttttgaccaactacaggaagggtgtgcgccccgtgagggactggaggaagccaaccaccgtatccattgacgtcattgtctatgccatcctcaacgtggatgagaagaatcaggtgctgaccacctacatctggtaccggcagtactggactgatgagtttctccagtggaaccctgaggactttgacaacatcaccaagttgtccatccccacggacagcatctgggtcccggacattctcatcaatgagttcgtggatgtggggaagtctccaaatatcccgtacgtgtatattcggcatcaaggcgaagttcagaactacaagccccttcaggtggtgactgcctgtagcctcgacatctacaacttccccttcgatgtccagaactgctcgctgaccttcaccagttggctgcacaccagtggtcatccgccggcggcccctcttctatgtggtcagcctgctactgcccagcatcttcctcatggtcatggacatcgtgggcttctacctgccccccaacagtggcgagagggtctctttcaagattacactcctcctgggctactcggtcttcctgatcatcgtttctgacacgctgccggccactgccatcggcactcctctcattggtgtctactttgtggtgtgcatggctctgctggtgataagtttggccgagaccatcttcattgtgcggctggtgcacaagcaagacctgcagcagcccgtgcctgcttggctgcgtcacctggttctggagagaatcgcctggctactttgcctgagggagcagtcaacttcccagaggcccccagccacctcccaagccaccaagactgatgactgctcagccatgggaaaccactgcagccacatgggaggaccccaggacttcgagaagagcccgagggacagatgtagccctcccccaccacctcgggaggcctcgctggcggtgtgtgggctgctgcaggagctgtcctccatccggcaattcctggaaaagcgggatgagatccgagaggtggcccgagactggctgcgcgtgggctccgtgctggacaagctgctattccacatttacctgctagcggtgctggcctacagcatcaccctggttatgctctggtccatctggcagtacgcttgagtgggtacagcccagtggaggagggggtacagtcctggttaggtggggacagaggatttctgcttaggcccctcaggacccagggaatgccagggacattttcaagacacagacaaagtcccgtgccctgtttccaatgccaattcatctcagcaatcacaagccaaggtctgaacccttccaccaaaaactgggtgttcaaggcccttacacccttgtcccacccccagcagctcaccatggctttaaaacatgctgtcttagatcaggagaaactcgggcactccctaagtccactctagttgtggacttttccccattgaccctcacctgaataagggactttggaattctgcttctctttcacaactttgcttttaggttgaaggcaaaaccaactctctactacacaggcctgataactctgtacgaggcttctctaacccctagtgtcttttttttcttcacctcacttgtggcagcttccctgaacactcatcccccatcagatgatgggagtgggaagaataaaatgcagtgaaaccct

SEQ ID NO: 22256 - protein, 244 aa, Homo sapiens
MLGKLAMLLWVQQALLALLLPTLLAQGEARRSRNTTRPALLRLSDYLLTNYRKGVRPVRDWRKPTTVSIDVIVYAILNVDEKNQVLTTYIWYRQYWTDEFLQWNPEDFDNITKLSIPTDSIWVPDILINEFVDVGKSPNIPYVYIRHQGEVQNYKPLQVVTACSLDIYNFPFDVQNCSLTFTSWLHTSGHPPAAPLLCGQPATAQHLPHGHGHRGLLPAPQQWREGLFQDYTPPGLLGLPDHRF

SEQ ID NO: 22257 - DNA, 968 bp, Homo sapiens
actgcccagcatcttcctcatggtcatggacatcgtgggcttctacctgccccccaacagtggcgagagggtctctttcaagattacactcctcctgggctactcggtcttcctgatcatcgtttctgacacgctgccggccactgccatcggcactcctctcattggtgtctactttgtggtgtgcatggctctgctggtgataagtttggccgagaccatcttcatttgtgggctgctgcaggagctgtcctccatccggcaattcctggaaaagcgggatgagatccgagaggtggcccgagactggctgcgcgtgggctccgtgctggacaagctgctattccacatttacctgctagcggtgctggcctacagcatcaccctggttatgctctggtccatctggcagtacgcttgagtgggtacagcccagtggaggagggggtacagtcctggttaggtggggacagaggatttctgcttaggcccctcaggacccagggaatgccagggacattttcaagacacagacaaagtcccgtgccctgtttccaatgccaattcatctcagcaatcacaagccaaggtctgaacccttccaccaaaaactgggtgttcaaggcccttacacccttgtcccacccccagcagctcaccatggctttaaaacatgctgtcttagatcaggagaaactcgggcactccctaagtccactctagttgtggacttttccccattgaccctcacctgaataagggactttggaattctgcttctctttcacaactttgcttttaggttgaaggcaaaaccaactctctactacacaggcctgataactctgtacgaggcttctctaacccctagtgtcttttttttcttcacctcacttgtggcagcttccctgaacactcatcccccatcagatgatgggagtgggaagaataaaatgcagtgaaaccct

SEQ ID NO: 22258 - protein, 133 aa, Homo sapiens
MVMDIVGFYLPPNSGERVSFKITLLLGYSVFLIIVSDTLPATAIGTPLIGVYFVVCMALLVISLAETIFICGLLQELSSIRQFLEKRDEIREVARDWLRVGSVLDKLLFHIYLLAVLAYSITLVMLWSIWQYA

SEQ ID NO: 22259 - DNA, 377 bp, Homo sapiens
gctgcgtcacctggttctggagagaatcgcctggctactttgcctgagggagcagtcaacttcccagaggcccccagccacctcccaagccaccaagactgatgactgctcagccatgggaaaccatctagttgtggacttttccccattgaccctcacctgaataagggactttggaattctgcttctctttcacaactttgcttttaggttgaaggcaaaaccaactctctactacacaggcctgataactctgtacgaggcttctctaacccctagtgtcttttttttcttcacctcacttgtggcagcttccctgaacactcatcccccatcagatgatgggagtgggaagaataaaatgcagtgaaacccta

SEQ ID NO: 22260 - protein, 34 aa, Homo sapiens
LLSHGKPSSCGLFPIDPHLNKGLWNSASLSQLCF

SEQ ID NO: 22261 - DNA, 5113 bp, Homo sapiens
ggtaggaggcaaccatgtggttccagctgaattttttttttccctctctctttcttcactcctttttctttccaaacagggaaaagtgttccacgaagcggtagcgccttttcgcctcgcgttttcctccctgaccctggtcccggctcccgtccgggcgccagctggtggggcgagcgccgggagcccatctgcccccaggggcacggggcgcggggccggctcccgcccggcacatggctgcagccacctcgcgcgcaccccgaggcgccgcgcccagctcgcccgaggtccgtcggaggcgcccggccgccccggagccaagcagcagctgagcggggaagcgcccgcgtccggggatcgggatgtccctcctccttctcctcttgctagtttcctactatgttggaaccttggggactcacactgagatcaagagagtggcagaggaaaaggtcactttgccctgccaccatcaactggggcttccagaaaaagacactctggatattgaatggctgctcaccgataatgaagggaaccaaaaagtggtgatcacttactccagtcgtcatgtctacaataacttgactgaggaacagaagggccgagtggcctttgcttccaatttcctggcaggagatgcctccttgcagattgaacctctgaagcccagtgatgagggccggtacacctgtaaggttaagaattcagggcgctacgtgtggagccatgtcatcttaaaagtcttagtgagaccatccaagcccaagtgtgagttggaaggagagctgacagaaggaagtgacctgactttgcagtgtgagtcatcctctggcacagagcccattgtgtattactggcagcgaatccgagagaaagagggagaggatgaacgtctgcctcccaaatctaggattgactacaaccaccctggacgagttctgctgcagaatcttaccatgtcctactctggactgtaccagtgcacagcaggcaacgaagctgggaaggaaagctgtgtggtgcgagtaactgtacagtatgtacaaagcatcggcatggttgcaggagcagtgacaggcatagtggctggagccctgctgattttcctcttggtgtggctgctaatccgaaggaaagacaaagaaagatatgaggaagaagagagacctaatgaaattcgagaagatgctgaagctccaaaagcccgtcttgtgaaacccagctcctcttcctcaggctctcggagctcacgctctggttcttcctccactcgctccacagcaaatagtgcctcacgcagccagcggacactgtcaactgacgcagcaccccagccagggctggccacccaggcatacagcctagtggggccagaggtgagaggttctgaaccaaagaaagtccaccatgctaatctgaccaaagcagaaaccacacccagcatgatccccagccagagcagagccttccaaacggtctgaattacaatggacttgactcccacgctttcctaggagtcagggtctttggactcttctcgtcattggagctcaagtcaccagccacacaaccagatgagaggtcatctaagtagcagtgagcattgcacggaacagattcagatgagcattttccttatacaataccaaacaagcaaaaggatgtaagctgattcatctgtaaaaaggcatcttattgtgcctttagaccagagtaagggaaagcaggagtccaaatctatttgttgaccaggacctgtggtgagaaggttggggaaaggtgaggtgaatatacctaaaacttttaatgtgggatattttgtatcagtgctttgattcacaattttcaagaggaaatgggatgctgtttgtaaattttctatgcatttctgcaaacttattggattattagttattcagacagtcaagcagaacccacagccttattacacctgtctacaccatgtactgagctaaccacttctaagaaactccaaaaaaggaaacatgtgtcttctattctgacttaacttcatttgtcataaggtttggatattaatttcaaggggagttgaaatagtgggagatggagaagagtgaatgagtttctcccactctatactaatctcactatttgtattgagcccaaaataactatgaaaggagacaaaaatttgtgacaaaggattgtgaagagctttccatcttcatgatgttatgaggattgttgacaaacattagaaatatataatggagcaattgtggatttcccctcaaatcagatgcctctaaggactttcctgctagatatttctggaaggagaaaatacaacatgtcatttatcaacgtccttagaaagaattcttctagagaaaaagggatctaggaatgctgaaagattacccaacataccattatagtctcttctttctgagaaaatgtgaaaccagaattgcaagactgggtggactagaaagggagattagatcagttttctcttaatatgtcaaggaaggtagccgggcatggtgccaggcacctgtaggaaaatccagcaggtggaggttgcagtgagccaagattatgccattgcactccagcctgggtgacaaagcaagactccatctcaaaaaaaaaaaaaaatcaaggaaggataaaaggaagttcagtattgtaccacacttggaacttcctccatttcttccattttagaaggatatgaacctggaacttttgatgattctaagccttaaactatcaaaaagatcagggattgccaatgcttctaatggcactgcaagtatatgccataaccgttccctcctaaaagtgaaaaatgagagaaattcagtattttcccaggctcagcatccagaagtctagctctgggctggaagaaaagggtactaatatttagggaagagatgagaataagtagtgggtggcaggagagggctgagctagtgcctgctaacattttagttgtatcttggaaagatttagcaaaaataactcaccaggatagctgctgaagagttgatgaatgggagaagaaagatgtttgagaaataaagaaaacagcagcctgcaatacaataacttgcctttttaatagttttgattactcttgatacctacagcacaaatgctggacctgaatcagctcttcaaggaccctagcacaaatgtcaactgatcacctctgggagagtagaaaacttttttttttttgagacgaagtctcgctctgttgcccaggctggagtgcagtggcaccatctcagctcactgcagcgtccgcctcttgggttcaagtgattctcctgccttgtcctcctgagtcgctggtattacaggtgcctgccatcacacccagctaatttttggagttctgatagagacagggtttctccatgttggccaggcttgtctcaagctcctgacctcaagtgacctacccacccttggcctcccacagtgctggaagccactgcacctggctcagaatacttttttttttgagatgcagtcttgctctcatcacgcaggctggagtgcagtggcgtatctcggctcactgcgacctccacctcccgagttcaagcgattctccttcctcagtcccccaagtagcttggattataggtgtgcgccaccacgtacagctaatttttgtatttttagtagagatggggtttcgccatgttgaccaggctggtctcaaaacgcctgacctcaggtgatccacccacctcggccccacaaagtgctaggattacaggtgtgagccaccatgcccggcccagaatactttttaaaagaagagcaggttagaggaaagaaaaaaattgatgctgaatgtggtgatgaaagcatgtttctaaaatgggaagcagatgcttaaagaggaaagactaatctgggattttgccccatttctctggtttttcactcctatatttaattctcacaatcgtgtcgtcacatagtgcaaaaaacaaaattcttgtaaagtccccaggagtttatgcttgggtgaaagttttagcctgagtattttcttcctctaaaaaaggtgggaaatgagacattgaggaattaacatataaatgtctgctatgggtttaagagaactggcgtatttggaatgcttcttacactaacactgtctcattgtaaaatataaaaccccttactctaactacatttttattcctctggtagtgtggtatccaggcaacatatcacttctgctatgtaattctaagaattctcatttctagagtacctgagccaaacaaatacacaacggaagctgcagctgtatcatcactagcaatttgctcatcattatttactacctttgaacctaaggtttcctgcctatgcttttgaaagcaaaaatcagtctcctttgcatgaaaaagagccttagatttttaaacatgttagttaccagaatgctaaaataccagttgattacccaaattattttggaaatctatccataatggaagtctacaacaaacacataaaacagattacactaagagctgagaaattcaaaggaactgaagattctgagagataaactgttcaagtcttagcaatgatactgcacttctctttgacaggttctgggcttaagttagaggccctactggttccaaaccatattccactgactttgcaagtaaaataaatttgattctgaaataggaaacaaaaaaaggagaaataaccgaatagtagaagaaaaactgtttgtaggaagacgatgcagatggaatgatgtggacattgagtaaccatgtcaataaaatatataaaccaaacttaaatttgtgaaataaggaagttggtacctttgttgttacagtgtataaaaacaatttcggaactgctgttgcaaaaagacatatatagttttgcttccttctggtgttaagctgtttatatttcagtttcagttttaacttctaagttgccttgtaattgggactgtgtttcagcatcacaaaaaccaaatatttattatggatgcatctgtatcagcaattaaaaaataaacaagtaaaagtgatactgtaggagaagctgaagctca

SEQ ID NO: 22262 - protein, 373 aa, Homo sapiens; identical to SEQ ID NO: 2899

SEQ ID NO: 22263 - DNA, 4860 bp, Homo sapiens
ggtaggaggcaaccatgtggttccagctgaattttttttttccctctctctttcttcactcctttttctttccaaacagggaaaagtgttccacgaagcggtagcgccttttcgcctcgcgttttcctccctgaccctggtcccggctcccgtccgggcgccagctggtggggcgagcgccgggagcccatctgcccccaggggcacggggcgcggggccggctcccgcccggcacatggctgcagccacctcgcgcgcaccccgaggcgccgcgcccagctcgcccgaggtccgtcggaggcgcccggccgccccggagccaagcagcagctgagcggggaagcgcccgcgtccggggatcgggatgtccctcctccttctcctcttgctagtttcctactatgttggaaccttggggactcacactgagatcaagagagtggcagaggaaaaggtcactttgccctgccaccatcaactggggcttccagaaaaagacactctggatattgaatggctgctcaccgataatgaagggaaccaaaaagtggtgatcacttactccagtcgtcatgtctacaataacttgactgaggaacagaagggccgagtggcctttgcttccaatttcctggcaggagatgcctccttgcagattgaacctctgaagcccagtgatgagggccggtacacctgtaaggttaagaattcagggcgctacgtgtggagccatgtcatcttaaaagtcttagtgagaccatccaagcccaagtgtgagttggaaggagagctgacagaaggaagtgacctgactttgcagtgtgagtcatcctctggcacagagcccattgtgtattactggcagcgaatccgagagaaagagggagaggatgaacgtctgcctcccaaatctaggattgactacaaccaccctggacgagttctgctgcagaatcttaccatgtcctactctggactgtaccagtgcacagcaggcaacgaagctgggaaggaaagctgtgtggtgcgagtaactgtacagtatgtacaaagcatcggcatggttgcaggagcagtgacaggcatagtggctggagccctgctgattttcctcttggtgtggctgctaatccgaaggaaagacaaagaaagatatgaggaagaagagagacctaatgaaattcgagaagatgctgaagctccaaaagcccgtcttgtgaaacccagctcctcttcctcaggctctcggagctcacgctctggttcttcctccactcgctccacagcaaatagtgcctcacgcagccagcggacactgtcaactgacgcagcaccccagccagggctggccacccaggcatacagcctagtggggccagaggtgagaggttctgaaccaaagaaagtccaccatgctaatctgaccaaagcagaaaccacacccagcatgatccccagccagagcagagccttccaaacggtctgaattacaatggacttgactcccacgctttcctaggagtcagggtctttggactcttctcgtcattggagctcaagtcaccagccacacaaccagatgagaggtcatctaagtagcagtgagcattgcacggaacagattcagatgagcattttccttatacaataccaaacaagcaaaaggatgtaagctgattcatctgtaaaaaggcatcttattgtgcctttagaccagagtaagggaaagcaggagtccaaatctatttgttgaccaggacctgtggtgagaaggttggggaaaggtgaggtgaatatacctaaaacttttaatgtgggatattttgtatcagtgctttgattcacaattttcaagaggaaatgggatgctgtttgtaaattttctatgcatttctgcaaacttattggattattagttattcagacagtcaagcagaacccacagccttattacacctgtctacaccatgtactgagctaaccacttctaagaaactccaaaaaaggaaacatgtgtcttctattctgacttaacttcatttgtcataaggtttggatattaatttcaaggggagttgaaatagtgggagatggagaagagtgaatgagtttctcccactctatactaatctcactatttgtattgagcccaaaataactatgaaaggagacaaaaatttgtgacaaaggattgtgaagagctttccatcttcatgatgttatgaggattgttgacaaacattagaaatatataatggagcaattgtggatttcccctcaaatcagatgcctctaaggactttcctgctagatatttctggaaggagaaaatacaacatgtcatttatcaacgtccttagaaagaattcttctagagaaaaagggatctaggaatgctgaaagattacccaacataccattatagtctcttctttctgagaaaatgtgaaaccagaattgcaagactgggtggactagaaagggagattagatcagttttctcttaatatgtcaaggaaggtagccgggcatggtgccaggcacctgtaggaaaatccagcaggtggaggttgcagtgagccaagattatgccattgcactccagcctgggtgacaaagcaagactccatctcaaaaaaaaaaaaaaatcaaggaaggataaaaggaagttcagtattgtaccacacttggaacttcctccatttcttccattttagaaggatatgaacctggaacttttgatgattctaagccttaaactatcaaaaagatcagggattgccaatgcttctaatggcactgcaagtatatgccataaccgttccctcctaaaagtgaaaaatgagagaaattcagtattttcccaggctcagcatccagaagtctagctctgggctggaagaaaagggtactaatatttagggaagagatgagaataagtagtgggtggcaggagagggctgagctagtgcctgctaacattttagttgtatcttggaaagatttagcaaaaataactcaccaggatagctgctgaagagttgatgaatgggagaagaaagatgtttgagaaataaagaaaacagcagcctgcaatacaataacttgcctttttaatagttttgattactcttgatacctacagcacaaatgctggacctgaatcagctcttcaaggaccctagcacaaatgtcaactgatcacctctgggagagtagaaaacttttttttttttgagacgaagtctcgctctgttgcccaggctggagtgcagtggcaccatctcagctcactgcagcgtccgcctcttgggttcaagtgattctcctgccttgtcctcctgagtcgctggtattacaggtgcctgccatcacacccagctaatttttggagttctgatagagacagggtttctccatgttggccaggcttgtctcaagctcctgacctcaagtgacctacccacccttggcctcccacagtgctggaagccactgcacctggctcagaatacttttttttttgagatgcagtcttgctctcatcacgcaggctggagtgcagtggcgtatctcggctcactgcgacctccacctcccgagttcaagcgattctccttcctcagtcccccaagtagcttggattataggtgtgcgccaccacgtacagctaatttttgtatttttagtagagatggggtttcgccatgttgaccaggctggtctcaaaacgcctgacctcaggtgatccacccacctcggccccacaaagtgctaggattacaggtgtgagccaccatgcccggcccagaatactttttaaaagaagagcaggttagaggaaagaaaaaaattgatgctgaatgtggtgatgaaagcatgtttctaaaatgggaagcagatgcttaaagaggaaagactaatctgggattttgccccatttctctggtttttcactcctatatttaattctcacaatcgtgtcgtcacatagtgcaaaaaacaaaattcttgtaaagtccccaggagtttatgcttgggtgaaagttttagcctgagtattttcttcctctaaaaaaggtgggaaatgagacattgaggaattaacatataaatgtctgctatgggtttaagagaactggcgtatttggaatgcttcttacactaacactgtctcattgtaaaatataaaaccccttactctaactacatttttattcctctggtagtgtggtatccaggcaacatatcacttctgctatgtaattctaagaattctcatttctagagtacctgagccaaacaaatacacaacggaagctgcagctgtatcatcactagcaatttgctcatcattatttactacctttgaacctaaggtttcctgcctatgcttttgaaagcaaaaatcagtctcctttgcatgaaaaagagccttagatttttaaacatgttagttaccagaatgctaaaataccagttgattacccaaattattttggaaatctatccataatggaagtctacaacaaacacataaaacagattacactaagagctgagaaattcaaaggaactgaagattctgagagataaactgttcaagtcttagcaatgatactgcacttctctttgacaggttctgggcttaagttagaggccctactggttccaaaccatattccactgactttgcaagtaaaataaatttgattctgaaataggaaacaaaaaaaggagaaataaccgaatagtagaagaaaaactgtttgtaggaagacgatgcagatggaatgatgtggacattgagtaaccatgtcaataaaatatataaaccaaacttaaatttgtgaaataag

SEQ ID NO: 22264 - protein, 373 aa, Homo sapiens; identical to SEQ ID NO: 2899

SEQ ID NO: 22265 - DNA, 391 bp, Homo sapiens
gtactgcctctgacctctctatggcaagccaaatggccatgggaagaccccatggagtgtcagaatgatgccgttgagggcaaggattttagaccggtcatggattctgcctgtgcactgggctctaccactttctagctatctggctactagcaagttaccttaacaatctaagtttcaacctccccattcgtgaaatggagatgatgtcttagtcatagaagtagcaagtctactgcatatcaacagtgtagcactgagcctggctctttataaggaaacaggccgagagacgcaagtcaaacagcaaaggatggtctgctgtctgtctgactccaatgccaatggtctttcctctataacctaaagcaataaaacccctgcaacatct

SEQ ID NO: 22266 - protein, 33 aa, Homo sapiens
MMPLRARILDRSWILPVHWALPLSSYLATSKLP

SEQ ID NO: 22267 - DNA, 567 bp, Homo sapiens
gcagccggccgtcccggctccgagggtgcagcgcgcccgggcgcagcgcgagtgcgtggagccgggctccagcacgaccccgccgctcgggtttgggtgtcctcaggctccgcgctcctcctcccctcctccagatgggactggctctcctctttgcaaagccaggctcgcggggagacgtggtgagcagtagccagcagctggtgtgccgtggacgccgctgaccgccgcgcgcccgaaccgggtgtccacatgagtgcctctcccagcagatccagcagccaacagagcagtcagcagagcagccacgatgatgattctagcaggttcctgagtcctcgagcgcgggaagaaagcactgccagtaactccaaccgcagcacgccggcctgctcgcccatcctccggaagcggtctcgctcgccaaccccgcagaaccaggacggagacaccatggtggagaagggctcagatcactcctcggacaagtccccgtccacaccggagcagggcgtgcagcgcagctgctcctcccagtccggccggagcggcggcaagaattccaag

SEQ ID NO: 22268 - protein, 104 aa, Homo sapiens
MSASPSRSSSQQSSQQSSHDDDSSRFLSPRAREESTASNSNRSTPACSPILRKRSRSPTPQNQDGDTMVEKGSDHSSDKSPSTPEQGVQRSCSSQSGRSGGKNS

SEQ ID NO: 22269 - DNA, 653 bp, Homo sapiens
gcagccggccgtcccggctccgagggtgcagcgcgcccgggcgcagcgcgagtgcgtggagccgggctccagcacgaccccgccgctcgggtttgggtgtcctcaggctccgcgctcctcctcccctcctccagatgggactggctctcctctttgcaaagccaggctcgcggggagacgtggtgagcagtagccagcagctggtgtgccgtggacgccgctgaccgccgcgcgcccgaaccgggtgtccacatgagtgcctctcccagcagatccagcagccaacagagcagtcagcagagcagccacgatgatgattctagcaggttcctgagtcctcgagcgcgggaagaaagcactgccagtaactccaaccgcagcacgccggcctgctcgcccatcctccggaagcggtctcgctcgccaaccccgcagaaccaggacggagacaccatggtggagaagggctcagatcactcctcggacaagtccccgtccacaccggagcagggcgtgcagcgcagctgctcctcccagtccggccggagcggcggcaagaattccgtgttaagccccacctacaagcagagaaatgaagacttcagaaagctctttaagcagcttccagacacggagcgcctcattgttggtga

SEQ ID NO: 22270 - protein, 132 aa, Homo sapiens
MSASPSRSSSQQSSQQSSHDDDSSRFLSPRAREESTASNSNRSTPACSPILRKRSRSPTPQNQDGDTMVEKGSDHSSDKSPSTPEQGVQRSCSSQSGRSGGKNSVLSPTYKQRNEDFRKLFKQLPDTERLIV

SEQ ID NO: 22271 - DNA, 408 bp, Homo sapiens
aactattgttcgccactaaaggaaagcgtgaggcgagcactcactacacctttggagaaagaacactttctttaaatgttctaaagcctcttgctttgagctgcttgttgcccttgtttgcaggaacccatgctggctgcaggcagaagtcgcagagtttcaagcatgtctcatctgtctacagtctcgttctcagaaacttctgtttgggcttcaagacagcgaagggcaggaaagacagacaccagaagtgtcccagctaagatatgcaagttctcagcagtgtcaggggagcaagagtggggcattttagagatcagatgagatgactgcggcacagttaccaacataaacgccaacgtctgtatgtacacagccctttgagattaaaacactgctacacatata

SEQ ID NO: 22272 - protein, 64 aa, Homo sapiens
MLAAGRSRRVSSMSHLSTVSFSETSVWASRQRRAGKTDTRSVPAKICKFSAVSGEQEWGILEIR

SEQ ID NO: 22273 - DNA, 1557 bp, Homo sapiens
aaaaaagggggagaaaggagagaaaggaaagcgcgaggagccgccgccaccaccagcgcagcagtcctggagctgtgaggagattcgggccgtcaccctgcctcccctgcgtcccgccaccggccgcttctgtcctcggacccattccaacaatctcgtaaaacatggtggattactatgaagttctaggcgtgcagagacatgcctcacccgaggatattaaaaaggcatatcggaaactggcactgaagtggcatccagataaaaatcctgagaataaagaagaagcagagagaaaattcaagcaagtagcggaggcatatgaagtgctgtcggatgctaagaaacaggacatctatgacaaatatggcaaagaaggattaaatggtggaggaggaggtggaagtcattttgacagtccatttgaatttggcttcacattccgtaacccagatgatgtcttcagggaattttttggtggaagggacccattttcatttgacttctttgaagacccttttgaggacttctttgggaatcgaaggggtccccgaggaagcagaagccgagggacggggtcgtttttctccgtgttcagtggatttccgtcttttagaagtggattttcttcttttgatacaggatttacttcatttgggtcactaggtcacgggggcctcacttcattctcttccacgtcatttggtggtagtggcatgggcaacttcaaatagatatcaacttcaactaaaatggttaatggcagaaaaatcactacaaagagaattgtcgagaacggtcaagaaagagtagaagttgaagaagatggccagttaaagtccttaacaataaatggtaaggagcaggtgctgcgcttggataacaagtaattcaacgcacgcacttaacagaaatgttaaactataacaagcaccatttgaggattaacaggaacatttttttgaagatttcaaacgaactcgactttcagtataattgtacctaaagtatttataaacagctcatcggagcctctatttgtcatagacttttgagttgattgttgggaccacataataggaccattttttttttgtctttaaaattgttgtaaatctctgtatgcactttgcttttttattaaacgtactccaaggtgagtcttgactctttagtgtaggacaagattgtacactaacaccagcatggacctgcttttcattgtgtctgaaatgtgagccacgtagtgtcggcctgctgtgaagttaacattgccaggacgattcttctacagaaataatttcaaattttttcagcatttagtagtgaaagatattaatacattaatggtaatacatttctggtttaatataaattaaggatgttttctagttgtgcatgaatgctggcaacttagtaagttttgacaattgtttaaatatgtaatgttaagcttaggtttaaaaaagtaaagctggtaaactgggtctttgtcatttgctttaaaaaaaaaaaaaagaaaataaatgcgaatgtgttggtgcattcaaaaaaaaa

SEQ ID NO: 22274 - protein, 189 aa, Homo sapiens [sequence omitted]

SEQ ID NO: 22275 - DNA, 915 bp, Homo sapiens
aggagccgccgccaccaccagcgcagcagtcctggagctgtgaggagattcgggccgtcaccctgcctcccctgcgtcccgccaccggccgcttctgtcctcggacccattccaacaattaaaatggttaatggcagaaaaatcactacaaagagaattgtcgagaacggtcaagaaagagtagaagttgaagaagatggccagttaaagtccttaacaataaatggtaaggagcaggtgctgcgcttggataacaagtaattcaacgcacgcacttaacagaaatgttaaactataacaagcaccatttgaggattaacaggaacatttttttgaagatttcaaacgaactcgactttcagtataattgtacctaaagtatttataaacagctcatcggagcctctatttgtcatagacttttgagttgattgttgggaccacataataggaccattttttttttgtctttaaaattgttgtaaatctctgtatgcactttgcttttttattaaacgtactccaaggtgagtcttgactctttagtgtaggacaagattgtacactaacaccagcatggacctgcttttcattgtgtctgaaatgtgagccacgtagtgtcggcctgctgtgaagttaacattgccaggacgattcttctacagaaataatttcaaattttttcagcatttagtagtgaaagatattaatacattaatggtaatacatttctggtttaatataaattaaggatgttttctagttgtgcatgaatgctggcaacttagtaagttttgacaattgtttaaatatgtaatgttaagcttaggtttaaaaaagtaaagctggtaaactgggtctttgtcatttgctttaaaaaaaaaaaaaagaaaataaatgcgaatgtgttggtgc

SEQ ID NO: 22276 - protein, 45 aa, Homo sapiens [sequence omitted]

SEQ ID NO: 22277 - DNA, 1035 bp, Homo sapiens
cacagtttgtctccatgaggtcatacagctgcttgaggttgctcggagagtaagaagcagaatgagaactagaacagaagctcactttggcctgaaggctcatgtgctgagcatcttcccttgtctgtctccacccctagcctggtgcccagcatgtagaagaccttcatcctagatgcaatgggattaaacttggagaaaatgggattaaacttggacaaacactacctatttggacttgtgatgatggctttcaaacttcttaaagcaatgaagtattttttccagaagaaaccttacacaagaagcccagcacactgagtcaagcatatgtaggtggaagatatctggttgagaccaagtagagataaacctgtagattcaactgtgccaccacagtgaattctaagaatccactgactgtgatctgtaagctcctactccacaggaggtcagggcacacagcttgaaaccggaaggcagaagagtgacagggaagggtcatggactctgaaattagagctatctgtgttttaatactagttccaataggcacatggtcttggataaatggtttaaattatctgagtctcaatttctttctctgcaaaaagggatgattagtacatatgtaatagggtttttatagaaaattgtataacttgttaaacacacatgtactaagtgcttggtgcccagtatgcactgaataaatgctagctccttgcctttcatctctatgacccttcccaaatctctcagccccatattgcttcatgtagtgtgtgtatatttgggaaaatttgtgtgcatatttacagatgggatcctactcttctattgacagactgtcttttcagatgtgccttactttcattgcattggtttttcaactgaaagtgaacataaaggttttaagcatgcctaggtcttatctttttggtcaaatatctaacaccctcaataacagttgtaaatcattcttttgtaatttgatcattcatttttataaagtaaaacacaactgcccactgt

SEQ ID NO: 22278 - protein, 37 aa, Homo sapiens
MRTRTEAHFGLKAHVLSIFPCLSPPLAWCPACRRPSS

SEQ ID NO: 22279 - DNA, 781 bp, Homo sapiens
aacctcaaaaaactagtcattcggaattctgaaagaccacagcactctatgtctacttctattatagattcatatttgaccataattatttatttcaacatttctctgcactaccagactttgagttccctggaactaaaaatattgcttggacctcacgctgtacctgaatacctggcattaagaacttatttgcctcataacccaaattcctgctccccaataaaaaatgagtaacatcagggtataaaatgccagctggaagagtattcgcaaccatatacaatgaagagtcacacttccaagaagaaagccgatgtcccacttcagcatcaaatctaagacactgcatttcactttttctgtacaaatatcataatctgtttgttaatctcttggttttatttcaaaaatgaaactatatttagagagggaacaaattctaccagttgctgttggaagcaaaagatctttttcattcttggatgctttatatttggacagagaaagaatcagaatccatccttctttttcctaaccggaatttgagagacatgagaagggaactaaacacacaggcttcaggatctggtggaaagagataaggtgtctcaacgactgttggcctcatcaagagatactacccctgatcttttcatttcactttcctcgggtctgcctaaactcagtgtctctcctagaaaaccacccaactcatgaaaaactgtttgtaagaaaatgttctcaacacaaagaaataataaaggtttgagatgataaa

SEQ ID NO: 22280 - protein, 62 aa, Homo sapiens
MSTSIIDSYLTIIIYFNISLHYQTLSSLELKILLGPHAVPEYLALRTYLPHNPNSCSPIKNE

SEQ ID NO: 22281 - DNA, 536 bp, Homo sapiens
aacctcaaaaaactagtcattcggaattctgaaagaccacagcactctatgtctacttctattatagattcatatttgaccataattatttatttcaacatttctctgcactaccagactttgagttccctggaactaaaaatattgcttggacctcacgctgtacctgaatacctgagagggaacaaattctaccagttgctgttggaagcaaaagatctttttcattcttggatgctttatatttggacagagaaagaatcagaatccatccttctttttcctaaccggaatttgagagacatgagaagggaactaaacacacaggcttcaggatctggtggaaagagataaggtgtctcaacgactgttggcctcatcaagagatactacccctgatcttttcatttcactttcctcgggtctgcctaaactcagtgtctctcctagaaaaccacccaactcatgaaaaactgtttgtaagaaaatgttctcaacacaaagaaataataaaggtttgagatgataaatatgct

SEQ ID NO: 22282 - protein, 101 aa, Homo sapiens
MSTSIIDSYLTIIIYFNISLHYQTLSSLELKILLGPHAVPEYLRGNKFYQLLLEAKDLFHSWMLYIWTEKESESILLFPNRNLRDMRRELNTQASGSGGKR

SEQ ID NO: 22283 - DNA, 589 bp, Homo sapiens
ggaatcccactctggctatgtctgcagggatggtagatgaagaacacagaacaagaatcatagaagataaggagccacaaaggttcactctgttttcaaaggtgcagtcaaaatgttacacttctaaactgtggcaacgagacacaccctgaagaaagagagcgttacaccttcacaagaaaacagagaaaccaagataccttgtgatgtcttgtacataccaagaaaaatatgtcctaaccttgaaagcccattttgggtgtgagtggaaccacatcattacaaaaccaaaaagctgtatctttctcatccactataccccttcttttccaaatggacacctgagactttgagctacttcatacaacagagtttcacactgggacctcccacgtctacctgcatttcaggcccgaatctttcctggcatcagatttatcatcaagaacctttctgtggttcatttcttggggcacaattctctcgtgatggggactaatcccgtcaaatcatccatttttgttaacattaattgtgatatccattccaggtatctgctttgtgtataaaaaggaaatttctgaagata

SEQ ID NO: 22284 - protein, 44 aa, Homo sapiens
MSAGMVDEEHRTRIIEDKEPQRFTLFSKVQSKCYTSKLWQRDTP

SEQ ID NO: 22285 - DNA, 5282 bp, Homo sapiens
gggagagcgcgggagggcgagagggagggagagcggccgggagatcgagagcgaacgaggcagccgccggcggagaggagggagcgggcgagggccgggcaggaggagcgggcgcggcgcgggcgaggctgggacccgagcgcgctcacttcgccgcaaagtgccaacttcccctggagtgccgggcgcgcaccgtccgggcgcgggggaaagaaaggcagcgggaatttgagatttttgggaagaaagtcggatttcccccgtccccttccccctgttactaatcctcattaaaaagaaaaacaacagtaactgcaaacttgctaccatcccgtacgtcccccactcctggcaccatgaaggcggccgtcgatctcaagccgactctcaccatcatcaagacggaaaaagtcgatctggagcttttcccctccccggatatggaatgtgcagatgtcccactattaactccaagcagcaaagaaatgatgtctcaagcattaaaagctactttcagtggtttcactaaagaacagcaacgactggggatcccaaaagacccccggcagtggacagaaacccatgttcgggactgggtgatgtgggctgtgaatgaattcagcctgaaaggtgtagacttccagaagttctgtatgaatggagcagccctctgcgccctgggtaaagactgctttctcgagctggccccagactttgttggggacatcttatgggaacatctagagatcctgcagaaagaggatgtgaaaccatatcaagttaatggagtcaacccagcctatccagaatcccgctatacctcggattacttcattagctatggtattgagcatgcccagtgtgttccaccatcggagttctcagagcccagcttcatcacagagtcctatcagacgctccatcccatcagctcggaagagctcctctccctcaagtatgagaatgactacccctcggtcattctccgagaccctctccagacagacaccttgcagaatgactactttgctatcaaacaagaagtcgtcaccccagacaacatgtgcatggggaggaccagtcgtggtaaactcgggggccaggactcttttgaaagcatagagagctacgatagttgtgatcgcctcacccagtcctggagcagccagtcatctttcaacagcctgcagcgtgttccctcctatgacagcttcgactcagaggactatccggctgccctgcccaaccacaagcccaagggcaccttcaaggactatgtgcgggaccgtgctgacctcaataaggacaagcctgtcattcctgctgctgccctagctggctacacaggcagtggaccaatccagctatggcagtttcttctggaattactcactgataaatcctgtcagtcttttatcagctggacaggagatggctgggaattcaaactttctgacccagatgaggtggccaggagatggggaaagaggaaaaacaaacctaagatgaattatgagaaactgagccgtggcctacgctactattacgacaaaaacatcatccacaagacagcggggaaacgctacgtgtaccgctttgtgtgtgacctgcagagcctgctggggtacacccctgaggagctgcacgccatgctggacgtcaagccagatgccgacgagtgatggcactgaaggggctggggaaaccctgctgagaccttccaaggacagccgtgttggttggactctgaattttgaattgttattctattttttattttccagaactcattttttaccttcaggggtgggagctaagtcagttgcagctgtaatcaattgtgcgcagttgggaaaggaaagccaggacttgtggggtgggtgggaccagaaattcttgagcaaattttcaggagagggagaagggccttctcagaagcttgaaggctctggcttaacagagaaagagactaatgtgtccaatcatttttaaaaatcatccatgaaaaagtgtcttgagttgtggacccattagcaagtgacattgtcacatcagaactcatgaaactgatgtaaggcaattaatttgcttctgtttttaggtctgggagggcaaaaaagaggtgggtgggatgaaacatgttttggggggggatgcactgaaaatctgagaactatttacctatcactctagttttgaagcaaagatggacttcagtggggaggggccaaaaccgttgttgtgttaaaatttattttattaaattttgtgccagtattttttttcttaaaaatcgtcttaagctctaaggtggtctcagtattgcaatatcatgtaagtttgtttttatttgccggctgaggattctgtcacaatgaaagaaaactgtttatatagaccccattggaaaagcaaaacgctctcactgagatcagggatcccaaattcatgggacttatataagaaggacaattaatgctgatttgggtacaggggaattatgtgtgtgaatgtcatctacaattaaaaaaaattagcacatccctttacttacttgttatcagtggattctcggggtttggacttaatgttgagctaagaagcattaagtctttgaactgaatgtattttgcatccctggttttggacgacagtaaacgtaggagcactgttgaagtcctggaagggagatcgaaggaggaagattgacttggttctttcttagtcctatatctgtagcatagatgacttggaataaaagctgtatgcatgggcattacccctcaggtcctaagaaataagtcctgaatgcatgtcgttccaaactaacactctgtaatttttcttttatgtcttattttccaagagtcctccattttttgcaccccctcaccgccaactctgttattcagtagagagaagtgtacggctttctgattggtgagtgaaaaagtaacttgagacacgacctaagttgaagagtttagacttgctgagttttagaagtgatggaaattaagagagcatttcaataaaatgtgacttggctgtctttggaagagaagtgcaaggctttcctttgaagaatttaaattagtccggtaggatgtcaggtgagactgtgtatgcaaaatgaatggcacaggtgatgccagggcctcttgcttgggtctgatgtcttggcacagggtaagtgaaggttaattccagaagagaggaatgacttgaaggcaaaggaaactaaggaaggaggttcagtgaggaaaataaggttgtccatgagatttgaatagatttttagttcccccaaggtttaaatacaaacatagtcaagcaaggtagtcatctttctgctggttgtgagggggaatctgaaaatggagttttagaggaaaagtcaacatctaactagtgaggaaaagtgcctaatacaattagaatctccctcactctatagttgcccagttgaaaggataaggaggaggggtggcttttatggacttccatgagagaaggaaagaaatatttcaggtaagcttctcagggctggccctttttgggatttggatgagaaattggaagtactaactactttctagcatatctttaagaaaattgattgttatttactcccagatcctcttgcagacccagaattatcaggaacatagctctgtgattcatgagtgtccccatactgatgaattggagcatccatatggaaagcaaaggcagaattatcccagctgtattattttgatcttttggatgcaggtgccttaatgaagctctcaaaatattttaggagctgctcagggagtgttgggtggaactgtttggactacattgttttctcttagattatgtgatttttgttgggcactggcaaaaggtgtgtgtgtgaatgtgtgcatgtgtgtgaatgttgtgtgtgtgtgtgtgtgtgtgtgtgtgtgtgtgtgtgtgtgtgtttgcagacatgcaaaactgcagctgaaataataccttagatttctaggtaagtctttccacatttcaataatgggtaagagtagaaccagggccgggtatcaattattgcttgctgtttgcaaccaggcataaaatcactttctcaaatcatccaccgttcctattaaatttatgccggaaactctccttctgtgagtataactcctgcagttcctatagcagataagatataagaaagtgcctcctagtgctcctccgcccgcttgtttgctaaaattccctttctctctaagtccaccattttcaagatttgtagatagtgtattagttaagacagctttgtcgatctggccagatgttttttctcctttgtccaaaggccagagaccatcccaggaagagtggtgggtggtttatacactggaaatgttgcgtttatgctttttaaaaacacacgttaacttcagaggaaggatgggcaaatctggtctagctgggtgaaacccttattttcccagagatgccttaacctttgttggttttggctttagggttcagagtcacttttgttcccttctccattctggagagggacttcccctacatagagccctgatttttgtggctgtggggattggaggtagcattcaaagatcagatgtgcttttcctcactttggagatgaacactctgggttttacagcattaacctgcctaaccttcatggtgagaaatacaccatctctcttctagtcatgctgtgcatgccgcttactctgttggggtctatataaatttgttgaactcttacctacattccaaagaagtttcaaggaaccataaatatatgtatacatatacatatataaaatatatatattaaaataaaattatcaggaatactgcctcagttattgaacttttttttttaagaatactttttttttaagctgagaagtatagggatgaaaaagatgttatattgtgtttgactattttccaacttgtattttcatataatttatattttttaaaagctgaaaatttagaagcaagatgaaaaaaaggaaaagcaggtgctttttaaaaatcagaactgaggtagcttagagatgtagcgatgtaagtgtcgatgtttttttaaaaaaaaatgcaaaaaaattcttatggcggagttttttgtttgtttattttagtagctgatgctggcacatcattttgctggagagttttttatatactgtagcctgatttcatattgtattttaaactgtgtgaaattaaaaacaaagaatttcattcataatgct

SEQ ID NO: 22286 - protein, 441 aa, Homo sapiens; identical to SEQ ID NO: 2901

SEQ ID NO: 22287 - DNA, 5143 bp, Homo sapiens
agttggaaagagaccacagactttgagggaagctcactcaggatctgctctccggcaaagtagtaagtgaggtgctgagagcagaatgagctactttgtggattctgctgggagcagccccgtcccttactcagcgcctcgtcctgcagtggtgaggcaaggacctagcaacacttatgaagatcctcgaatgaactgtggtttccagtccaattatcaccagcaaagaccttgctaccccttttgggatgagatggcaactcaggaagttcctactggtcttgaacactgtgtctcagatatggaatgtgcagatgtcccactattaactccaagcagcaaagaaatgatgtctcaagcattaaaagctactttcagtggtttcactaaagaacagcaacgactggggatcccaaaagacccccggcagtggacagaaacccatgttcgggactgggtgatgtgggctgtgaatgaattcagcctgaaaggtgtagacttccagaagttctgtatgaatggagcagccctctgcgccctgggtaaagactgctttctcgagctggccccagactttgttggggacatcttatgggaacatctagagatcctgcagaaagaggatgtgaaaccatatcaagttaatggagtcaacccagcctatccagaatcccgctatacctcggattacttcattagctatggtattgagcatgcccagtgtgttccaccatcggagttctcagagcccagcttcatcacagagtcctatcagacgctccatcccatcagctcggaagagctcctctccctcaagtatgagaatgactacccctcggtcattctccgagaccctctccagacagacaccttgcagaatgactactttgctatcaaacaagaagtcgtcaccccagacaacatgtgcatggggaggaccagtcgtggtaaactcgggggccaggactcttttgaaagcatagagagctacgatagttgtgatcgcctcacccagtcctggagcagccagtcatctttcaacagcctgcagcgtgttccctcctatgacagcttcgactcagaggactatccggctgccctgcccaaccacaagcccaagggcaccttcaaggactatgtgcgggaccgtgctgacctcaataaggacaagcctgtcattcctgctgctgccctagctggctacacaggcagtggaccaatccagctatggcagtttcttctggaattactcactgataaatcctgtcagtcttttatcagctggacaggagatggctgggaattcaaactttctgacccagatgaggtggccaggagatggggaaagaggaaaaacaaacctaagatgaattatgagaaactgagccgtggcctacgctactattacgacaaaaacatcatccacaagacagcggggaaacgctacgtgtaccgctttgtgtgtgacctgcagagcctgctggggtacacccctgaggagctgcacgccatgctggacgtcaagccagatgccgacgagtgatggcactgaaggggctggggaaaccctgctgagaccttccaaggacagccgtgttggttggactctgaattttgaattgttattctattttttattttccagaactcattttttaccttcaggggtgggagctaagtcagttgcagctgtaatcaattgtgcgcagttgggaaaggaaagccaggacttgtggggtgggtgggaccagaaattcttgagcaaattttcaggagagggagaagggccttctcagaagcttgaaggctctggcttaacagagaaagagactaatgtgtccaatcatttttaaaaatcatccatgaaaaagtgtcttgagttgtggacccattagcaagtgacattgtcacatcagaactcatgaaactgatgtaaggcaattaatttgcttctgtttttaggtctgggagggcaaaaaagaggtgggtgggatgaaacatgttttggggggggatgcactgaaaatctgagaactatttacctatcactctagttttgaagcaaagatggacttcagtggggaggggccaaaaccgttgttgtgttaaaatttattttattaaattttgtgccagtattttttttcttaaaaatcgtcttaagctctaaggtggtctcagtattgcaatatcatgtaagtttgtttttatttgccggctgaggattctgtcacaatgaaagaaaactgtttatatagaccccattggaaaagcaaaacgctctcactgagatcagggatcccaaattcatgggacttatataagaaggacaattaatgctgatttgggtacaggggaattatgtgtgtgaatgtcatctacaattaaaaaaaattagcacatccctttacttacttgttatcagtggattctcggggtttggacttaatgttgagctaagaagcattaagtctttgaactgaatgtattttgcatccctggttttggacgacagtaaacgtaggagcactgttgaagtcctggaagggagatcgaaggaggaagattgacttggttctttcttagtcctatatctgtagcatagatgacttggaataaaagctgtatgcatgggcattacccctcaggtcctaagaaataagtcctgaatgcatgtcgttccaaactaacactctgtaatttttcttttatgtcttattttccaagagtcctccattttttgcaccccctcaccgccaactctgttattcagtagagagaagtgtacggctttctgattggtgagtgaaaaagtaacttgagacacgacctaagttgaagagtttagacttgctgagttttagaagtgatggaaattaagagagcatttcaataaaatgtgacttggctgtctttggaagagaagtgcaaggctttcctttgaagaatttaaattagtccggtaggatgtcaggtgagactgtgtatgcaaaatgaatggcacaggtgatgccagggcctcttgcttgggtctgatgtcttggcacagggtaagtgaaggttaattccagaagagaggaatgacttgaaggcaaaggaaactaaggaaggaggttcagtgaggaaaataaggttgtccatgagatttgaatagatttttagttcccccaaggtttaaatacaaacatagtcaagcaaggtagtcatctttctgctggttgtgagggggaatctgaaaatggagttttagaggaaaagtcaacatctaactagtgaggaaaagtgcctaatacaattagaatctccctcactctatagttgcccagttgaaaggataaggaggaggggtggcttttatggacttccatgagagaaggaaagaaatatttcaggtaagcttctcagggctggccctttttgggatttggatgagaaattggaagtactaactactttctagcatatctttaagaaaattgattgttatttactcccagatcctcttgcagacccagaattatcaggaacatagctctgtgattcatgagtgtccccatactgatgaattggagcatccatatggaaagcaaaggcagaattatcccagctgtattattttgatcttttggatgcaggtgccttaatgaagctctcaaaatattttaggagctgctcagggagtgttgggtggaactgtttggactacattgttttctcttagattatgtgatttttgttgggcactggcaaaaggtgtgtgtgtgaatgtgtgcatgtgtgtgaatgttgtgtgtgtgtgtgtgtgtgtgtgtgtgtgtgtgtgtgtgtgtgtttgcagacatgcaaaactgcagctgaaataataccttagatttctaggtaagtctttccacatttcaataatgggtaagagtagaaccagggccgggtatcaattattgcttgctgtttgcaaccaggcataaaatcactttctcaaatcatccaccgttcctattaaatttatgccggaaactctccttctgtgagtataactcctgcagttcctatagcagataagatataagaaagtgcctcctagtgctcctccgcccgcttgtttgctaaaattccctttctctctaagtccaccattttcaagatttgtagatagtgtattagttaagacagctttgtcgatctggccagatgttttttctcctttgtccaaaggccagagaccatcccaggaagagtggtgggtggtttatacactggaaatgttgcgtttatgctttttaaaaacacacgttaacttcagaggaaggatgggcaaatctggtctagctgggtgaaacccttattttcccagagatgccttaacctttgttggttttggctttagggttcagagtcacttttgttcccttctccattctggagagggacttcccctacatagagccctgatttttgtggctgtggggattggaggtagcattcaaagatcagatgtgcttttcctcactttggagatgaacactctgggttttacagcattaacctgcctaaccttcatggtgagaaatacaccatctctcttctagtcatgctgtgcatgccgcttactctgttggggtctatataaatttgttgaactcttacctacattccaaagaagtttcaaggaaccataaatatatgtatacatatacatatataaaatatatatattaaaataaaattatcaggaatactgcctcagttattgaacttttttttttaagaatactttttttttaagctgagaagtatagggatgaaaaagatgttatattgtgtttgactattttccaacttgtattttcatataatttatattttttaaaagctgaaaatttagaagcaagatgaaaaaaaggaaaagcaggtgctttttaaaaatcagaactgaggtagcttagagatgtagcgatgtaagtgtcgatgtttttttaaaaaaaaatgcaaaaaaattcttatggcggagttttttgtttgtttattttagtagctgatgctggcacatcattttgctggagagttttttatatactgtagcctgatttcatattgtattttaaactgtgtgaaattaaaaacaaagaatttcattcataatgct

SEQ ID NO: 22288 - protein, 485 aa, Homo sapiens
MSYFVDSAGSSPVPYSAPRPAVVRQGPSNTYEDPRMNCGFQSNYHQQRPCYPFWDEMATQEVPTGLEHCVSDMECADVPLLTPSSKEMMSQALKATFSGFTKEQQRLGIPKDPRQWTETHVRDWVMWAVNEFSLKGVDFQKFCMNGAALCALGKDCFLELAPDFVGDILWEHLEILQKEDVKPYQVNGVNPAYPESRYTSDYFISYGIEHAQCVPPSEFSEPSFITESYQTLHPISSEELLSLKYENDYPSVILRDPLQTDTLQNDYFAIKQEVVTPDNMCMGRTSRGKLGGQDSFESIESYDSCDRLTQSWSSQSSFNSLQRVPSYDSFDSEDYPAALPNHKPKGTFKDYVRDRADLNKDKPVIPAAALAGYTGSGPIQLWQFLLELLTDKSCQSFISWTGDGWEFKLSDPDEVARRWGKRKNKPKMNYEKLSRGLRYYYDKNIIHKTAGKRYVYRFVCDLQSLLGYTPEELHAMLDVKPDADE

SEQ ID NO: 22289 - DNA, 919 bp, Homo sapiens
agcaaattttcaggagagggagaagggccttctcagaagcttgaaggctctggcttaacagagaaagagactaatgtgtccaatcatttttaaaaatcatccatgaaaaagtgtcttgagttgtggacccattagcaagtgacattgtcacatcagaactcatgaaactgatgtaaggcaattaatttgcttctgtttttaggtctgggagggcaaaaaagaggtgggtgggatgaaacatgttttggggggggatgcactgaaaatctgagaactatttacctatcactctagttttgaagcaaagatggacttcagtggggaggggccaaaaccgttgttgtgttaaaatttattttattaaattttgtgccagtattttttttcttaaaaatcgtctatataaatttgttgaactcttacctacattccaaagaagtttcaaggaaccataaatatatgtatacatatacatatataaaatatatatattaaaataaaattatcaggaatactgcctcagttattgaacttttttttttaagaatactttttttttaagctgagaagtatagggatgaaaaagatgttatattgtgtttgactattttccaacttgtattttcatataatttatattttttaaaagctgaaaatttagaagcaagatgaaaaaaaggaaaagcaggtgctttttaaaaatcagaactgaggtagcttagagatgtagcgatgtaagtgtcgatgtttttttaaaaaaaaatgcaaaaaaattcttatggcggagttttttgtttgtttattttagtagctgatgctggcacatcattttgctggagagttttttatatactgtagcctgatttcatattgtattttaaactgtgtgaaattaaaaacaaagaatttcattcataat

SEQ ID NO: 22290 - protein, 34 aa, Homo sapiens
MLAHHFAGEFFIYCSLISYCILNCVKLKTKNFIH

SEQ ID NO: 22291 - DNA, 2219 bp, Homo sapiens
gggagagcgcgggagggcgagagggagggagagcggccgggagatcgagagcgaacgaggcagccgccggcggagaggagggagcgggcgagggccgggcaggaggagcgggcgcggcgcgggcgaggctgggacccgagcgcgctcacttcgccgcaaagtgccaacttcccctggagtgccgggcgcgcaccgtccgggcgcgggggaaagaaaggcagcgggaatttgagatttttgggaagaaagtcggatttcccccgtccccttccccctgttactaatcctcattaaaaagaaaaacaacagtaactgcaaacttgctaccatcccgtacgtcccccactcctggcaccatgaaggcggccgtcgatctcaagccgactctcaccatcatcaagacggaaaaagtcgatctggagcttttcccctccccggatatggaatgtgcagatgtcccactattaactccaagcagcaaagaaatgatgtctcaagcattaaaagctactttcagtggtttcactaaagaacagcaacgactggggatcccaaaagacccccggcagtggacagaaacccatgttcgggactgggtgatgtgggctgtgaatgaattcagcctgaaaggtgtagacttccagaagttctgtatgaatggagcagccctctgcgccctgggtaaagactgctttctcgagctggccccagactttgttggggacatcttatgggaacatctagagatcctgcagaaagaggatgtgaaaccatatcaagttaatggagtcaacccagcctatccagaatcccgctatacctcggattacttcattagctatggtattgagcatgcccagtgtgttccaccatcggagttctcagagcccagcttcatcacagagtcctatcagacgctccatcccatcagctcggaagagctcctctccctcaagtatgagaatgactacccctcggtcattctccgagaccctctccagacagacaccttgcagaatgactactttgctatcaaacaagaagtcgtcaccccagacaacatgtgcatggggaggaccagtcgtggtaaactcgggggccaggactcttttgaaagcatagagagctacgatagttgtggccaggagatggggaaagaggaaaaacaaacctaagatgaattatgagaaactgagccgtggcctacgctactattacgacaaaaacatcatccacaagacagcggggaaacgctacgtgtaccgctttgtgtgtgacctgcagagcctgctggggtacacccctgaggagctgcacgccatgctggacgtcaagccagatgccgacgagtgatggcactgaaggggctggggaaaccctgctgagaccttccaaggacagccgtgttggttggactctgaattttgaattgttattctattttttattttccagaactcattttttaccttcaggggtgggagctaagtcagttgcagctgtaatcaattgtgcgcagttgggaaaggaaagccaggacttgtggggtgggtgggaccagaaattcttgagcaaattttcaggagagggagaagggccttctcagaagcttgaaggctctggcttaacagagaaagagactaatgtgtccaatcatttttaaaaatcatccatgaaaaagtgtcttgagttgtggacccattagcaagtgacattgtcacatcagaactcatgaaactgatgtaaggcaattaatttgcttctgtttttaggtctgggagggcaaaaaagaggtgggtgggatgaaacatgttttggggggggatgcactgaaaatctgagaactatttacctatcactctagttttgaagcaaagatggacttcagtggggaggggccaaaaccgttgttgtgttaaaatttattttattaaattttgtgccagtattttttttcttaaaaatcgtcttaagctctaaggtggtctcagtattgcaatatcatgtaagtttgtttttatttgccggctgaggattctgtcacaatgaaagaaaactgtttatatagaccccattggaaaagcaaaacgctctcactgagatcagggatcccaaattcatgggacttatataagaaggacaattaatgctgatttgggtacaggggaattatgtgtgtgaatgtcatctacaattaaaaaaaattagcacatcccttt

SEQ ID NO: 22292 - protein, 272 aa, Homo sapiens
MKAAVDLKPTLTIIKTEKVDLELFPSPDMECADVPLLTPSSKEMMSQALKATFSGFTKEQQRLGIPKDPRQWTETHVRDWVMWAVNEFSLKGVDFQKFCMNGAALCALGKDCFLELAPDFVGDILWEHLEILQKEDVKPYQVNGVNPAYPESRYTSDYFISYGIEHAQCVPPSEFSEPSFITESYQTLHPISSEELLSLKYENDYPSVILRDPLQTDTLQNDYFAIKQEVVTPDNMCMGRTSRGKLGGQDSFESIESYDSCGQEMGKEEKQT

SEQ ID NO: 22293 - DNA, 2189 bp, Homo sapiens
acggcagccgaaggggccattccgtgtgcagcgctcccgcccaccctccggtctcggcggctctccagagcgtctgtaaacacccagagactgtcatggagggggaggaggaggcggcggcggcgaagggaggcgtttggggccgcctccagggtccgctctgccattcctgaactggtccctcgtccccgtgactctggcatcagggaagcgaactgttaggcgagaggaggaggcagccagaaccatatccccttcttcctcggggcgggggccgggccaggccggctgagccgggggagggctccgggagggagtgcctggccaggccggcctgtctgccgcgatggatgacagtaaggtggttggaggcaaagtaaagaagcccggtaaacgtggtcggaagccagccaaaattgacttgaaagcaaaacttgagaggagccggcagagtgcaagagaatgccgagcccgaaaaaagctgagatatcagtatttggaagagttggtatccagtcgagaaagagctatatgtgccctcagagaggaactggaaatgtacaagcagtggtgcatggcaatggaccaaggaaaaatcccttctgaaataaaggccctactcactggagaagagcagaacaaatctcagcagaactcaagcaggcataccaaggctgggaagacagatgctaatagcaattcctggtgaagattatataaagatgagtcagtgattgaagccaatattctgattcccatggaagatggatgggcaagagtgtacttcttggctccatttactacctactgctcagtagtcatctctgtaaatctgcaatttctaccaaaatgtgtgatcgtagatctcaaaggatcttgctttaactttcaacacttagaaaatctacaaacattcagacctgtctgggttggtattgccacccatgacatttaacatgttgtgatgcttgaaaacacaggagtagagaaaatcgatgaagattgtatttttgcaccttaactccacattgctttattggttaatttatattctttccatgtaattcatgtaattgtatgtctgtgtgtgttttatgtgtcaccacctttcatgtttttgattgccctacaaagagaaaccaaatgagctgattactgactataagttctcagcctttatggacctaatcttatttttatttacttgagtaatgtttattctctgcatgaaccatgatttctcctgtgagccattccagcataagctgtgaatatgtattaacaaatatatacatttctatttttataatccataaggatatgcctgttttaaataacatacatattaacaatatctatcaggaaaaccctcaagacagcttctagttaaaacctttgttgctgtcctctcaaactatatttataaaaatttgctagggccaaatccatacttgcagaataattcatcaaattttatttttaagtgaaaagtaacctttcaggcatttcagcagcatacattgacaatctagggtatatatgtatgtatgtttcttattgtatgtctatatatgtatgtggggaggacaggagtgaatgttcacacacttttcttgcgtactcaactaaattggagaatgtttctgaagaaaattggatgaaattagctgctgagattgagtttctgccttaaaatctgaaacaaaaaaagggacaaattgctggtagatctactgactgtagccatcaccagaacacttagtttcttcccagacatgaatttcctgacaggctctgagccagaaacacactgtgggcgtgcatctggttcagccctggatatgcctccactgtggagggaagcattggaactggagttgtgcacagcaccgcagctagtgggcctggctgggggtgcagaagggcagggtagttctttccatttccccttgcagctacacttactttctccctgactaccaaatggagtgacggttgaagaatcaagctcataatatgatacacccagacagacccagaaatcttttgatttccccagcgagatacttaccactctctcttctctttcccatggttaaaacaggagttgtgttctctgtcgctgctaaattattcttcacttgagtgaagcaaatatttagcttccaaataaagtatattttgttctg

SEQ ID NO: 22294 - protein, 120 aa, Homo sapiens; identical to SEQ ID NO: 2903

SEQ ID NO: 22295 - DNA, 2740 bp, Homo sapiens
acggcagccgaaggggccattccgtgtgcagcgctcccgcccaccctccggtctcggcggctctccagagcgtctgtaaacacccagagactgtcatggagggggaggaggaggcggcggcggcgaagggaggcgtttggggccgcctccagggtccgctctgccattcctgaactggtccctcgtccccgtgactctggcatcagggaagcgaactgttaggcgagaggaggaggcagccagaaccatatccccttcttcctcggggcgggggccgggccaggccggctgagccgggggagggctccgggagggagtgcctggccaggccggcctgtctgccgcgatggatgacagtaaggtggttggaggcaaagtaaagaagcccggtaaacgtggtcggaagccagccaaaattgacttgaaagcaaaacttgagaggagccggcagagtgcaagagaatgccgagcccgaaaaaagctgagatatcagtatttggaagagttggtatccagtcgagaaagagctatatgtgccctcagagaggaactggaaatgtacaagcagtggtgcatggcaatggaccaaggaaaaatcccttctgaaataaaggccctactcactggagaagagcagaacaaatctcagcagaactcaagcaggcataccaaggctgggaagacagatgctaatagcaattcctggtgaagattatataaagatgagtcagtgattgaagccaatattctgattcccatggaagatggatgggcaagagtgtacttcttggctccatttactacctactgctcagtagtcatctctgtaaatctgcaatttctaccaaaatgtgtgatcgtagatctcaaaggatcttgctttaactttcaacacttagaaaatctacaaacattcagacctgtctgggttggtattgccacccatgacatttaacatgttgtgatgcttgaaaacacaggagtagagaaaatcgatgaagattgtatttttgcaccttaactccacattgctttattggttaatttatattctttccatgtaattcatgtaattgtatgtctgtgtgtgttttatgtgtcaccacctttcatgtttttgattgccctacaaagagaaaccaaatgagctgattactgactataagttctcagcctttatggacctaatcttatttttatttacttgagtaatgtttattctctgcatgaaccatgatttctcctgtgagccattccagcataagctgtgaatatgtattaacaaatatatacatttctatttttataatccataaggatatgcctgttttaaataacatacatattaacaatatctatcaggaaaaccctcaagacagcttctagttaaaacctttgttgctgtcctctcaaactatatttataaaaatttgctagggccaaatccatacttgcagaataattcatcaaattttatttttaagtgaaaagtaacctttcaggcatttcagcagcatacattgacaatctagggtatatatgtatgtatgtttcttattgtatgtctatatatgtatgtggggaggacaggagtgaatgttcacacacttttcttgcgtactcaactaaattggagaatgtttctgaagaaaattggatgaaattagctgctgagattgagtttctgccttaaaatctgaaacaaaaaaagggacaaattgctggtagatctactgactgtagccatcaccagaacacttagtttcttcccagacatgaatttcctgacaggctctgagccagaaacacactgtgggcgtgcatctggttcagccctggatatgcctccactgtggagggaagcattggaactggagttgtgcacagcaccgcagctagtgggcctggctgggggtgcagaagggcagggtagttctttccatttccccttgcagctacacttactttctccctgactaccaaatggagtgacggttgaagaatcaagctcataatatgatacacccagacagacccagaaatcttttgatttccccagcgagatacttaccactctctcttctctttcccatggttaaaacaggagttgtgttctctgtcgctgctaaattattcttcacttgagtgaagcaaatatttagcttccaaataaagtatattttgttctgaactggcagtttaagaggagataccgtagtctagattgtctttgaggtagaatatatgatggaccacatagtttaagattacaaggtactttccctcttctctcaggccatgcatttgaataaagtgcctcccttagcctgagctcctaaagacctcttgtacttggttgcaaactcagatctctagtctagtctagtctagtctagtctagtcatgtgtgactgtgtactgagataccactagcccagtttgctgggtctctatgttttggaagttgggggtttaataatatttaatgtctttttaggatcataaacataaataggtttgttgatattcaggccttcagaatttaagggttttaaatatagcattcagattgtaattggtatgtttttgccatctggtccactcaattgtatatttttattttgcaaaacaacccaaaacttactttatgttgctttgttcagtaccttttgaattcccccagaagagttgttttcaaaacaaacattccagaatgaatgtcgctcttcaatggaacgtc

SEQ ID NO: 22296 - protein, 120 aa, Homo sapiens; identical to SEQ ID NO: 2903

SEQ ID NO: 22297 - DNA, 3023 bp, Homo sapiens
acggcagccgaaggggccattccgtgtgcagcgctcccgcccaccctccggtctcggcggctctccagagcgtctgtaaacacccagagactgtcatggagggggaggaggaggcggcggcggcgaagggaggcgtttggggccgcctccagggtccgctctgccattcctgaactggtccctcgtccccgtgactctggcatcagggaagcgaactgttaggcgagaggaggaggcagccagaaccatatccccttcttcctcggggcgggggccgggccaggccggctgagccgggggagggctccgggagggagtgcctggccaggccggcctgtctgccgcgatggatgacagtaaggtggttggaggcaaagtaaagaagcccggtaaacgtggtcggaagccagccaaaattgacttgaaagcaaaacttgagaggagccggcagagtgcaagagaatgccgagcccgaaaaaagctgagatatcagtatttggaagagttggtatccagtcgagaaagagctatatgtgccctcagagaggaactggaaatgtacaagcagtggtgcatggcaatggaccaaggaaaaatcccttctgaaataaaggccctactcactggagaagagcagaacaaatctcagcagaactcaagcaggcataccaaggctgggaagacagatgctaatagcaattcctggtgaagattatataaagatgagtcagtgattgaagccaatattctgattcccatggaagatggatgggcaagagtgtacttcttggctccatttactacctactgctcagtagtcatctctgtaaatctgcaatttctaccaaaatgtgtgatcgtagatctcaaaggatcttgctttaactttcaacacttagaaaatctacaaacattcagacctgtctgggttggtattgccacccatgacatttaacatgttgtgatgcttgaaaacacaggagtagagaaaatcgatgaagattgtatttttgcaccttaactccacattgctttattggttaatttatattctttccatgtaattcatgtaattgtatgtctgtgtgtgttttatgtgtcaccacctttcatgtttttgattgccctacaaagagaaaccaaatgagctgattactgactataagttctcagcctttatggacctaatcttatttttatttacttgagtaatgtttattctctgcatgaaccatgatttctcctgtgagccattccagcataagctgtgaatatgtattaacaaatatatacatttctatttttataatccataaggatatgcctgttttaaataacatacatattaacaatatctatcaggaaaaccctcaagacagcttctagttaaaacctttgttgctgtcctctcaaactatatttataaaaatttgctagggccaaatccatacttgcagaataattcatcaaattttatttttaagtgaaaagtaacctttcaggcatttcagcagcatacattgacaatctagggtatatatgtatgtatgtttcttattgtatgtctatatatgtatgtggggaggacaggagtgaatgttcacacacttttcttgcgtactcaactaaattggagaatgtttctgaagaaaattggatgaaattagctgctgagattgagtttctgccttaaaatctgaaacaaaaaaagggacaaattgctggtagatctactgactgtagccatcaccagaacacttagtttcttcccagacatgaatttcctgacaggctctgagccagaaacacactgtgggcgtgcatctggttcagccctggatatgcctccactgtggagggaagcattggaactggagttgtgcacagcaccgcagctagtgggcctggctgggggtgcagaagggcagggtagttctttccatttccccttgcagctacacttactttctccctgactaccaaatggagtgacggttgaagaatcaagctcataatatgatacacccagacagacccagaaatcttttgatttccccagcgagatacttaccactctctcttctctttcccatggttaaaacaggagttgtgttctctgtcgctgctaaattattcttcacttgagtgaagcaaatatttagcttccaaataaagtatattttgttctgaactggcagtttaagaggagataccgtagtctagattgtctttgaggtagaatatatgatggaccacatagtttaagattacaaggtactttccctcttctctcaggccatgcatttgaataaagtgcctcccttagcctgagctcctaaagacctcttgtacttggttgcaaactcagatctctagtctagtctagtctagtctagtctagtcatgtgtgactgtgtactgagataccactagcccagtttgctgggtctctatgttttggaagttgggggtttaataatatttaatgtctttttaggatcataaacataaataggtttgttgatattcaggccttcagaatttaagggttttaaatatagcattcagattgtaattggtatgtttttgccatctggtccactcaattgtatatttttattttgcaaaacaacccaaaacttactttatgttgctttgttcagtaccttttgaattcccccagaagagttgttttcaaaacaaacattccagaatgaatgtcgctcttcaatggaacgtctttattgtgcttgaagtatttcttctctggttgtaattctaaattacagagtcatttgagctttctcccctcccgctagtatctttacaggagcagggaagagcagtagaggatgtataattttgggcgaagttaaattacaatttatttgaggttattcctaaacctatttatttggtgttttggaggagatcacacactaagagaacgttgattgcctcggctattgtgctggctggacactttggtcacttttgaagcatgttaataaatgtcactgatt

SEQ ID NO: 22298 - protein, 120 aa, Homo sapiens; identical to SEQ ID NO: 2903

SEQ ID NO: 22299 - DNA, 3818 bp, Homo sapiens
acggcagccgaaggggccattccgtgtgcagcgctcccgcccaccctccggtctcggcggctctccagagcgtctgtaaacacccagagactgtcatggagggggaggaggaggcggcggcggcgaagggaggcgtttggggccgcctccagggtccgctctgccattcctgaactggtccctcgtccccgtgactctggcatcagggaagcgaactgttaggcgagaggaggaggcagccagaaccatatccccttcttcctcggggcgggggccgggccaggccggctgagccgggggagggctccgggagggagtgcctggccaggccggcctgtctgccgcgatggatgacagtaaggtggttggaggcaaagtaaagaagcccggtaaacgtggtcggaagccagccaaaattgacttgaaagcaaaacttgagaggagccggcagagtgcaagagaatgccgagcccgaaaaaagctgagatatcagtatttggaagagttggtatccagtcgagaaagagctatatgtgccctcagagaggaactggaaatgtacaagcagtggtgcatggcaatggaccaaggaaaaatcccttctgaaataaaggccctactcactggagaagagcagaacaaatctcagcagaactcaagcaggcataccaaggctgggaagacagatgctaatagcaattcctggtgaagattatataaagatgagtcagtgattgaagccaatattctgattcccatggaagatggatgggcaagagtgtacttcttggctccatttactacctactgctcagtagtcatctctgtaaatctgcaatttctaccaaaatgtgtgatcgtagatctcaaaggatcttgctttaactttcaacacttagaaaatctacaaacattcagacctgtctgggttggtattgccacccatgacatttaacatgttgtgatgcttgaaaacacaggagtagagaaaatcgatgaagattgtatttttgcaccttaactccacattgctttattggttaatttatattctttccatgtaattcatgtaattgtatgtctgtgtgtgttttatgtgtcaccacctttcatgtttttgattgccctacaaagagaaaccaaatgagctgattactgactataagttctcagcctttatggacctaatcttatttttatttacttgagtaatgtttattctctgcatgaaccatgatttctcctgtgagccattccagcataagctgtgaatatgtattaacaaatatatacatttctatttttataatccataaggatatgcctgttttaaataacatacatattaacaatatctatcaggaaaaccctcaagacagcttctagttaaaacctttgttgctgtcctctcaaactatatttataaaaatttgctagggccaaatccatacttgcagaataattcatcaaattttatttttaagtgaaaagtaacctttcaggcatttcagcagcatacattgacaatctagggtatatatgtatgtatgtttcttattgtatgtctatatatgtatgtggggaggacaggagtgaatgttcacacacttttcttgcgtactcaactaaattggagaatgtttctgaagaaaattggatgaaattagctgctgagattgagtttctgccttaaaatctgaaacaaaaaaagggacaaattgctggtagatctactgactgtagccatcaccagaacacttagtttcttcccagacatgaatttcctgacaggctctgagccagaaacacactgtgggcgtgcatctggttcagccctggatatgcctccactgtggagggaagcattggaactggagttgtgcacagcaccgcagctagtgggcctggctgggggtgcagaagggcagggtagttctttccatttccccttgcagctacacttactttctccctgactaccaaatggagtgacggttgaagaatcaagctcataatatgatacacccagacagacccagaaatcttttgatttccccagcgagatacttaccactctctcttctctttcccatggttaaaacaggagttgtgttctctgtcgctgctaaattattcttcacttgagtgaagcaaatatttagcttccaaataaagtatattttgttctgaactggcagtttaagaggagataccgtagtctagattgtctttgaggtagaatatatgatggaccacatagtttaagattacaaggtactttccctcttctctcaggccatgcatttgaataaagtgcctcccttagcctgagctcctaaagacctcttgtacttggttgcaaactcagatctctagtctagtctagtctagtctagtctagtcatgtgtgactgtgtactgagataccactagcccagtttgctgggtctctatgttttggaagttgggggtttaataatatttaatgtctttttaggatcataaacataaataggtttgttgatattcaggccttcagaatttaagggttttaaatatagcattcagattgtaattggtatgtttttgccatctggtccactcaattgtatatttttattttgcaaaacaacccaaaacttactttatgttgctttgttcagtaccttttgaattcccccagaagagttgttttcaaaacaaacattccagaatgaatgtcgctcttcaatggaacgtctttattgtgcttgaagtatttcttctctggttgtaattctaaattacagagtcatttgagctttctcccctcccgctagtatctttacaggagcagggaagagcagtagaggatgtataattttgggcgaagttaaattacaatttatttgaggttattcctaaacctatttatttggtgttttggaggagatcacacactaagagaacgttgattgcctcggctattgtgctggctggacactttggtcacttttgaagcatgttaataaatgtcactgattaaaacagctggagcatttccttccctttccagtgaaggagcagcatagtgaaatcctggcacccctcacctttttgtgatgacaagatggctgacagtcacggagtccaggagaaggtgctgctctccttgctttctgagtaaacagagtaatgttttttttcttattttcccaaagaaagaaaagggggaaaatatatttgtatgtttagaccagccaaattctgtcattattttagtatcaacctgctgtatattagagcaactgaatataatatggaataagtttgaccaggtcaagttttaggatatagttgaatttctttaaaaagttttctattttatctaaaatctttccattatatctaaattagaatgatcatcctgcgcaaattcagattactgtttgctggctaattgacagtatttctcagcatcactatgtagcattctgttttagcatctttgaattatgatcatttgatttggctaattacaaaaagtacaggtttaaactggacttagcttgagttaaaggcaaagaaaatctaaaaacataaatgttatatttcacaagaaatcagttgcatattatccattacatatttagttttaaaaggaggagtcaccttgaattattttctgagtcaccttgagttatttgatctctcagcctgctttctcatctgtaaaaaaggggggaggataactttcacagggtaattggtaggctaaataggagttacagaaaactgttaaatagggaagaactacattaaatttaaatattcacatt

SEQ ID NO: 22300 - protein, 120 aa, Homo sapiens; identical to SEQ ID NO: 2903

SEQ ID NO: 22301 - DNA, 3908 bp, Homo sapiens
acggcagccgaaggggccattccgtgtgcagcgctcccgcccaccctccggtctcggcggctctccagagcgtctgtaaacacccagagactgtcatggagggggaggaggaggcggcggcggcgaagggaggcgtttggggccgcctccagggtccgctctgccattcctgaactggtccctcgtccccgtgactctggcatcagggaagcgaactgttaggcgagaggaggaggcagccagaaccatatccccttcttcctcggggcgggggccgggccaggccggctgagccgggggagggctccgggagggagtgcctggccaggccggcctgtctgccgcgatggatgacagtaaggtggttggaggcaaagtaaagaagcccggtaaacgtggtcggaagccagccaaaattgacttgaaagcaaaacttgagaggagccggcagagtgcaagagaatgccgagcccgaaaaaagctgagatatcagtatttggaagagttggtatccagtcgagaaagagctatatgtgccctcagagaggaactggaaatgtacaagcagtggtgcatggcaatggaccaaggaaaaatcccttctgaaataaaggccctactcactggagaagagcagaacaaatctcagcagaactcaagcaggcataccaaggctgggaagacagatgctaatagcaattcctggtgaagattatataaagatgagtcagtgattgaagccaatattctgattcccatggaagatggatgggcaagagtgtacttcttggctccatttactacctactgctcagtagtcatctctgtaaatctgcaatttctaccaaaatgtgtgatcgtagatctcaaaggatcttgctttaactttcaacacttagaaaatctacaaacattcagacctgtctgggttggtattgccacccatgacatttaacatgttgtgatgcttgaaaacacaggagtagagaaaatcgatgaagattgtatttttgcaccttaactccacattgctttattggttaatttatattctttccatgtaattcatgtaattgtatgtctgtgtgtgttttatgtgtcaccacctttcatgtttttgattgccctacaaagagaaaccaaatgagctgattactgactataagttctcagcctttatggacctaatcttatttttatttacttgagtaatgtttattctctgcatgaaccatgatttctcctgtgagccattccagcataagctgtgaatatgtattaacaaatatatacatttctatttttataatccataaggatatgcctgttttaaataacatacatattaacaatatctatcaggaaaaccctcaagacagcttctagttaaaacctttgttgctgtcctctcaaactatatttataaaaatttgctagggccaaatccatacttgcagaataattcatcaaattttatttttaagtgaaaagtaacctttcaggcatttcagcagcatacattgacaatctagggtatatatgtatgtatgtttcttattgtatgtctatatatgtatgtggggaggacaggagtgaatgttcacacacttttcttgcgtactcaactaaattggagaatgtttctgaagaaaattggatgaaattagctgctgagattgagtttctgccttaaaatctgaaacaaaaaaagggacaaattgctggtagatctactgactgtagccatcaccagaacacttagtttcttcccagacatgaatttcctgacaggctctgagccagaaacacactgtgggcgtgcatctggttcagccctggatatgcctccactgtggagggaagcattggaactggagttgtgcacagcaccgcagctagtgggcctggctgggggtgcagaagggcagggtagttctttccatttccccttgcagctacacttactttctccctgactaccaaatggagtgacggttgaagaatcaagctcataatatgatacacccagacagacccagaaatcttttgatttccccagcgagatacttaccactctctcttctctttcccatggttaaaacaggagttgtgttctctgtcgctgctaaattattcttcacttgagtgaagcaaatatttagcttccaaataaagtatattttgttctgaactggcagtttaagaggagataccgtagtctagattgtctttgaggtagaatatatgatggaccacatagtttaagattacaaggtactttccctcttctctcaggccatgcatttgaataaagtgcctcccttagcctgagctcctaaagacctcttgtacttggttgcaaactcagatctctagtctagtctagtctagtctagtctagtcatgtgtgactgtgtactgagataccactagcccagtttgctgggtctctatgttttggaagttgggggtttaataatatttaatgtctttttaggatcataaacataaataggtttgttgatattcaggccttcagaatttaagggttttaaatatagcattcagattgtaattggtatgtttttgccatctggtccactcaattgtatatttttattttgcaaaacaacccaaaacttactttatgttgctttgttcagtaccttttgaattcccccagaagagttgttttcaaaacaaacattccagaatgaatgtcgctcttcaatggaacgtctttattgtgcttgaagtatttcttctctggttgtaattctaaattacagagtcatttgagctttctcccctcccgctagtatctttacaggagcagggaagagcagtagaggatgtataattttgggcgaagttaaattacaatttatttgaggttattcctaaacctatttatttggtgttttggaggagatcacacactaagagaacgttgattgcctcggctattgtgctggctggacactttggtcacttttgaagcatgttaataaatgtcactgattaaaacagctggagcatttccttccctttccagtgaaggagcagcatagtgaaatcctggcacccctcacctttttgtgatgacaagatggctgacagtcacggagtccaggagaaggtgctgctctccttgctttctgagtaaacagagtaatgttttttttcttattttcccaaagaaagaaaagggggaaaatatatttgtatgtttagaccagccaaattctgtcattattttagtatcaacctgctgtatattagagcaactgaatataatatggaataagtttgaccaggtcaagttttaggatatagttgaatttctttaaaaagttttctattttatctaaaatctttccattatatctaaattagaatgatcatcctgcgcaaattcagattactgtttgctggctaattgacagtatttctcagcatcactatgtagcattctgttttagcatctttgaattatgatcatttgatttggctaattacaaaaagtacaggtttaaactggacttagcttgagttaaaggcaaagaaaatctaaaaacataaatgttatatttcacaagaaatcagttgcatattatccattacatatttagttttaaaaggaggagtcaccttgaattattttctgagtcaccttgagttatttgatctctcagcctgctttctcatctgtaaaaaaggggggaggataactttcacagggtaattggtaggctaaataggagttacagaaaactgttaaatagggaagaactacattaaatttaaatattcacattatgcctgtgtttgactattgttagcatttaagtcactaaagatcaatatatttaatgagttggactctaaatatgtggtactgtaggtat

SEQ ID NO: 22302 - protein, 120 aa, Homo sapiens; identical to SEQ ID NO: 2903

SEQ ID NO: 22303 - DNA, 710 bp, Homo sapiens
atacctacagtaccacatatttagagtccaactcattaaatatattgatctttagtgacttaaatgctaacaatagtcaaacacaggcataatgtgaatatttaaatttaatgtagttcttccctatttaacagttttctgtaactcctatttagcctaccaattaccctgtgaaagttatcctccccccttttttacagatgagaaagcaggctgagagatcaaataactcaaggtgactcagaaaataattcaaggtgactcctccttttaaaactaaatatgtaatggataatatgcaactgatttcttgtgaaatataacatttatgtttttagattttctttgcctttaactcaagctaagtccagtttaaacctgtactttttgtaattagccaaatcaaatgatcataattcaaagatgctaaaacagaatgctacatagtgatgctgagaaatactgtcaattagccagcaaacagtaatctgaatttgcgcaggatgatcattctaatttagatataatggaaagattttagataaaatagaaaactttttaaagaaattcaactatatcctaaaacttgacctggtcaaacttattccatattatattcagttgctctaatatacagcaggttgatactaaaataatgcttcaaaagtgaccaaagtgtccagccagcacaatagccgaggcaatcaacg

SEQ ID NO: 22304 - protein, 39 aa, Homo sapiens
IFKFNVVLPYLTVFCNSYLAYQLPCESYPPPFFTDEKAG

SEQ ID NO: 22305 - DNA, 1751 bp, Homo sapiens
tgtctccctaacaggaagcaggctgtgagccaaggggaaggcagaggacagaaatgaatgtgtttccaggctttcctggtggtttatggcattctccaaactcctatgcaagggctattcctgaccaagaagatctaaagagaacgtctctgaaatcaagtccggatgaagaattaagagaaaaaaagtgaatatggtttttgctcacagaatggataacagcaagccacatttgattattcctacacttctggtgcccctccaaaaccgcagctgcactgaaacagccacacctctgccaagccaatacctgatggaattaagtgaggagcacagttggatgagcaaccaaacagaccttcactatgtgctgaaacccggggaagtggccacagccagcatcttctttgggattctgtggttgttttctatcttcggcaattccctggtttgtttggtcatccataggagtaggaggactcagtctaccaccaactactttgtggtctccatggcatgtgctgaccttctcatcagcgttgccagcacgcctttcgtcctgctccagttcaccactggaaggtggacgctgggtagtgcaacgtgcaaggttgtgcgatattttcaatatctcactccaggtgtccagatctacgttctcctctccatctgcatagaccggttctacaccatcgtctatcctctgagcttcaaggtgtccagagaaaaagccaagaaaatgattgcggcatcgtgggtctttgatgcaggctttgtgacccctgtgctctttttctatggctccaactgggacagtcattgtaactatttcctcccctcctcttgggaaggcactgcctacactgtcatccacttcttggtgggctttgtgattccatctgtcctcataattttattttaccaaaaggtcataaaatatatttggagaataggcacagatggccgaacggtgaggaggacaatgaacattgtccctcggacaaaagtgaaaactatcaagatgttcctcattttaaatctgttgtttttgctctcctggctgccttttcatgtagctcagctatggcacccccatgaacaagactataagaaaagttcccttgttttcacagctatcacatggatatcctttagttcttcagcctctaaacctactctgtattcaatttataatgccaattttcggagagggatgaaagagactttttgcatgtcctctatgaaatgttaccgaagcaatgcctatactatcacaacaagttcaaggatggccaaaaaaaactacgttggcatttcagaaatcccttccatggccaaaactattaccaaagactcgatctatgactcatttgacagagaagccaaggaaaaaaagcttgcttggcccattaactcaaatccaccaaatacttttgtctaagttctcattctttcaattgttatgcaccagagattaaaaagctttaactataaaaacagaagctatttacatatttgttttcactcaactttccaagggaaatgttttattttgtaaaatgcattcatttgtttactgtagtttttgtgggttttattttacttgctttttatgttttaggaaaagcgttcactttgaactttagccaacagtccttttactattaatatattagttacatgcataaaaaagaaaatgctttcttactatttactgttggttcaaaaacataaacctaagccatacacac

SEQ ID NO: 22306 - protein, 45 aa, Homo sapiens
MNVFPGFPGGLWHSPNSYARAIPDQEDLKRTSLKSSPDEELREKK

SEQ ID NO: 22307 - DNA, 1411 bp, Homo sapiens
agaattaagagaaaaaaagtgaatatggtttttgctcacagaatggataacagcaagccacatttgattattcctacacttctggtgcccctccaaaaccgcagctgcactgaaacagccacacctctgccaagccaatacctgatggaattaagtgaggagcacagttggatgagcaaccaaacagaccttcactatgtgctgaaacccggggaagtggccacagccagcatcttctttgggattctgtggttgttttctatcttcggcaattccctggtttgtttggtcatccataggagtaggaggactcagtctaccaccaactactttgtggtctccatggcatgtgctgaccttctcatcagcgttgccagcacgcctttcgtcctgctccagttcaccactggaaggtggacgctgggtagtgcaacgtgcaaggttgtgcgatattttcaatatctcactccaggtgtccagatctacgttctcctctccatctgcatagaccggttctacaccatcgtctatcctctgagcttcaaggtgtccagagaaaaagccaagaaaatgattgcggcatcgtgggtctttgatgcaggctttgtgacccctgtgctctttttctatggctccaactgggacagtcattgtaactatttcctcccctcctcttgggaaggcactgcctacactgtcatccacttcttggtgggctttgtgattccatctgtcctcataattttattttaccaaaaggtcataaaatatatttggagaataggcacagatggccgaacggtgaggaggacaatgaacattgtccctcggacaaaagtgaaaactatcaagatgttcctcattttaaatctgttgtttttgctctcctggctgccttttcatgtagctcagctatggcacccccatgaacaagactataagaaaagttcccttgttttcacagctatcacatggatatcctttagttcttcagcctctaaacctactctgtattcaatttataatgccaattttcggagagggatgaaagagactttttgcatgtcctctatgaaatgttaccgaagcaatgcctatactatcacaacaagttcaaggatggccaaaaaaaactacgttggcatttcagaaatcccttccatggccaaaactattaccaaagactcgatctatgactcatttgacagagaagccaaggaaaaaaagcttgcttggcccattaactcaaatccaccaaatacttttgtctaagttctcattctttcaattgttatgcaccagagattaaaaagctttaactataaaaacagaagctatttacatatttgttttcactcaactttccaagggaaatgttttattttgtaaaatgcattcatttgtttactgt

SEQ ID NO: 22308 - protein, 415 aa, Homo sapiens
MVFAHRMDNSKPHLIIPTLLVPLQNRSCTETATPLPSQYLMELSEEHSWMSNQTDLHYVLKPGEVATASIFFGILWLFSIFGNSLVCLVIHRSRRTQSTTNYFVVSMACADLLISVASTPFVLLQFTTGRWTLGSATCKVVRYFQYLTPGVQIYVLLSICIDRFYTIVYPLSFKVSREKAKKMIAASWVFDAGFVTPVLFFYGSNWDSHCNYFLPSSWEGTAYTVIHFLVGFVIPSVLIILFYQKVIKYIWRIGTDGRTVRRTMNIVPRTKVKTIKMFLILNLLFLLSWLPFHVAQLWHPHEQDYKKSSLVFTAITWISFSSSASKPTLYSIYNANFRRGMKETFCMSSMKCYRSNAYTITTSSRMAKKNYVGISEIPSMAKTITKDSIYDSFDREAKEKKLAWPINSNPPNTFV

SEQ ID NO: 22309 - DNA, 753 bp, Homo sapiens
ccgcctagtgagaggcggtccgatttggcccttggggagtgtccgtcgcgttgatctgatggattcacgtacacaacaccacattctatgagattttgcaggcaaaagtccacaagctcgatatatgggacacctgcaccggcattggatttggccccgcaacatcttaaaggaagcaggctgtgagccaaggggaaggcagaggacagaaatgaatgtgtttccaggctttcctggtggtttatggcattctccaaactcctatgcaagggctattcctgaccaagaagatctaaagagaacgtctctgaaatcaagtccggatgaaggtatgtgatagggatcccttggtattgcgactgaaatttggctcagaggacataatgccttctttttttccaggcaatttggagattttgtcctgccttagatgctggttagaggctttaggtttgttaccagtccagaaaagatgcctaggtagttctgtaaaatgaaaattcatcagagtatgtgtcagttgaaaaattggatggaaattgtgtatagtgataattaatgaaacaaagcactcattgatgaaaaggattttttccccttgaagcctggaaagaggggaaaaaattaccgaaaccaactaggtttcatcatcactgtaataaaagctgtttcatcctttttcagctgcttattctatgcccatgttcccagaggttattggcagggcttggggagctgaagtgggcaggcgtg

SEQ ID NO: 22310 - protein, 70 aa, Homo sapiens
MGHLHRHWIWPRNILKEAGCEPRGRQRTEMNVFPGFPGGLWHSPNSYARAIPDQEDLKRTSLKSSPDEGM

SEQ ID NO: 22311 - DNA, 664 bp, Homo sapiens
gtgtccgtcgcgttgatctgatggattcacgtacacaacaccacattctatgagattttgcaggcaaaagtccacaagctcgatatatgggacacctgcaccggcattggatttggccccgcaacatcttaaaggaacaacctaatacataccccttgtctgcctgatccctggggaacatgctgtcctgtgatgctgaagcctgcagctggtgaactcatggtgaactcgtggcccacctttggattcagacaaatctcccagggagtattggccacctcccctggcagactcagtacccctggcccctgctgtggggttaccttgtcttggttgtggcaggcctactggctgttagttcagcatcatccttcaagagaacagaaaggcttagaataattgattgtcatatctgtgtctgaccatgctattgtggacttggcctgaacagccatagaaatgcaaggaatgaggtttgagggacttgggcagttgtctcaaaaagggagtcaaggcagaaatcccttaccctgagcactgctctcaacatggaggaagcaggctgtgagccaaggggaaggcagaggacagaaatgaatgtgtttccaggctttcctggtggtttatggcattctccaaactcctatgcaagggctattcctga

SEQ ID NO: 22312 - protein, 37 aa, Homo sapiens
MEEAGCEPRGRQRTEMNVFPGFPGGLWHSPNSYARAI

SEQ ID NO: 22313 - DNA, 2191 bp, Homo sapiens
ctttccgcctagtgagaggcggtccgatttggcccttggggagtgtccgtcgcgttgatctgatggattcacgtacacaacaccacattctatgagattttgcaggcaaaagtccacaagctcgatatatgggacacctgcaccggcattggatttggccccgcaacatcttaaaggaacaacctaatacataccccttgtctgcctgatccctggggaacatgctgtcctgtgatgctgaagcctgcagctggtgaactcatggtgaactcgtggcccacctttggattcagacaaatctcccagggagtattggccacctcccctggcagactcagtacccctggcccctgctgtggggttaccttgtcttggttgtggcaggcctactggctgttagttcagcatcatccttcaagagaacagaaaggcttagaataattgattgtcatatctgtgtctgaccatgctattgtggacttggcctgaacagccatagaaatgcaaggaatgaggtttgagggacttgggcagttgtctcaaaaagggagtcaaggcagaaatcccttaccctgagcactgctctcaacatggaggtaactcactgtggtaggcagccttttatttcatgatttgactttttgatgagtccatgctagttctcttgtagaatattatgcattcttgatttggccaattatttcctcataatatcttataacttgtttctccaacccttgcctttttattaaaaaaaaaaactcgacattatatgtacagatttgattatattcgggttaaacatttttagaaagaatacttcagtaacattgagtaggttacatcatttcatgttaggcacataatttcagcttgtctcactattagtaacgctaaatttggtcacttggttaagatgatgaccccccctcccactctcttcactgaaaaaggacacacatccctttgcactttataagtaatctacaaataacccgttcaacaacttttcatcttatactttgaacaccttttgtgatcttttcctgagtcaattatttcactgggggttgcaaaaatggtgttctaactatagtagtctgtatttattaactagcatttttctgtaaagaagaactttctttttttaagagacggagtctagctctgtctcccagattagagtgcagtggcactatcagagctcactgaagcctcaacctcctgggtgcaagcgattctcccacctcagccttctgtgttgctgggaccacaggcacatgccaccgtgcctggtaagagcgttgttttaagaaaaccattttaatgaatttctcagtggaccactgggtagtggtttgtttccaattttgttgaaagcacttggaaagctcttgatttttaaaaggatttgttacctaattattggagctattcactttctcagtactatccccaatattttcagttattcctgtgtttggtccccaggaggtttttaaattcagacaacgcaggatttgaggtaaaggtggaagagagattcagcaatctgtgtaagatggaagaaaagctaagtggaaaccaagaaccagcatgacatctcgactgcaccagttctcagaaaagcagttttagaatgcatacttgtagaagttgaggatctagaaattagttcccataaaactctgcatgctttgggaccccttggaaagtttttacctgaagccagaggtctatagtacagaacactgagcaaagtcttccaggtttggttgatgacaagctaagggcagaaataaaggaatttagagactggctttcaaaacaatagcctggatttcaagcctattgtcttgtttctattttgaatttcagaagccaaatattaatttctttttttccattccttttgtaacatctaaacagtgccaaaacactatctccaaggcaaatggattccccaggcagatgagaagatcacattactcatgttcaaaatattaccccagttgcacaagtattgtggaattttgtgcatttggatggaagacaactgtttctttatcttcttccaatgtcaaaagtaaatttggtgattataactttggcaatatattttaagcagaattagtatattatgtaacatgttttatgaccatccttaataaaattttgggttatgactcct

SEQ ID NO: 22314 - protein, 31 aa, Homo sapiens
MRFCRQKSTSSIYGTPAPALDLAPQHLKGTT

SEQ ID NO: 22315 - DNA, 1631 bp, Homo sapiens
catataagacatgaattccatgagtaaaatcaaacttctgtggcaaggaaacctctctgagtctcgatttcctccgtggtaaaaaggagagggttaaaccacagggtcccgagggtcccttccagctgtcacattctggagcgtatgagatgagattcttctactcaaaacaaaagagccaacagaacagaagaaaatgtttcagacggttccccaaatgccggttctgtggagcagacgcccaagaagcctggcctcagaagacgtcaaacgtaaacagctcgaattaagaatatgtttccttgtttatcagatacatcactgcttgatgaagcaaggaagatatacatgaaaattttaaaaatacatatcgctgacttcatggaatggacatcctgtataagcactgaaaaacaacaacacaataacactaaaattttaggcactcttaaatgatctgcctctaaaagcgttggatgtagcattatgcaattaggtttttccttatttgcttcattgtactacctgtgtatatagtttttaccttttatgtagcacataaactttggggaagggagggcagggtggggctgaggaactgacgtggagcggggtatgaagagcttgctttgatttacagcaagtagataaatatttgacttgcatgaagagaagcaattttggggaagggtttgaattgttttctttaaagatgtaatgtccctttcagagacagctgatacttcatttaaaaaaatcacaaaaatttgaacactggctaaagataattgctatttatttttacaagaagtttattctcatttgggagatctggtgatctcccaagctatctaaagtttgttagatagctgcatgtggcttttttaaaaaagcaacagaaacctatcctcactgccctccccagtctctcttaaagttggaatttaccagttaattactcagcagaatggtgatcactccaggtagtttggggcaaaaatccgaggtgcttgggagttttgaatgttaagaattgaccatctgcttttattaaatttgttgacaaaattttctcattttcttttcacttcgggctgtgtaaacacagtcaaaataattctaaatccctcgatatttttaaagatctgtaagtaacttcacattaaaaaatgaaatattttttaatttaaagcttactctgtccatttatccacaggaaagtgttatttttcaaggaaggttcatgtagagaaaagcacacttgtaggataagtgaaatggatactacatctttaaacagtatttcattgcctgtgtatggaaaaaccatttgaagtgtacctgtgtacataactctgtaaaaacactgaaaaattatactaacttatttatgttaaaagattttttttaatctagacaatatacaagccaaagtggcatgttttgtgcatttgtaaatgctgtgttgggtagaataggttttcccctcttttgttaaataatatggctatgcttaaaaggttgcatactgagccaagtataattttttgtaatgtgtgaaaaagatgccaattattgttacacattaagtaatcaataaagaaaacttccatagctattcattgagtcaa

SEQ ID NO: 22316 - protein, 51 aa, Homo sapiens
MFQTVPQMPVLWSRRPRSLASEDVKRKQLELRICFLVYQIHHCLMKQGRYT

SEQ ID NO: 22317 - DNA, 2427 bp, Homo sapiens
tttcttcttcgtcagcctcccttccaccgccatattgggccactaaaaaaagggggctcgtcttttcggggtgtttttctccccctcccctgtccccgcttgctcacggctctgcgactccgacgccggcaaggtttggagagcggctgggttcgcgggacccgcgggcttgcacccgcccagactcggacgggctttgccaccctctccgcttgcctggtcccctctcctctccgccctcccgctcgccagtccatttgatcagcggagactcggcggccgggccggggcttccccgcagcccctgcgcgctcctagagctcgggccgtggctcgtcggggtctgtgtcttttggctccgagggcagtcgctgggcttccgagaggggttcgggctgcgtaggggcgctttgttttgttcggttttgtttttttgagagtgcgagagaggcggtcgtgcagacccgggagaaagatgtcaaacgtgcgagtgtctaacgggagccctagcctggagcggatggacgccaggcaggcggagcaccccaagccctcggcctgcaggaacctcttcggcccggtggaccacgaagagttaacccgggacttggagaagcactgcagagacatggaagaggcgagccagcgcaagtggaatttcgattttcagaatcacaaacccctagagggcaagtacgagtggcaagaggtggagaagggcagcttgcccgagttctactacagacccccgcggccccccaaaggtgcctgcaaggtgccggcgcaggagagccaggatgtcagcgggagccgcccggcggcgcctttaattggggctccggctaactctgaggacacgcatttggtggacccaaagactgatccgtcggacagccagacggggttagcggagcaatgcgcaggaataaggaagcgacctgcaaccgacgattcttctactcaaaacaaaagagccaacagaacagaagaaaatgtttcagacggttccccaaatgccggttctgtggagcagacgcccaagaagcctggcctcagaagacgtcaaacgtaaacagctcgaattaagaatatgtttccttgtttatcagatacatcactgcttgatgaagcaaggaagatatacatgaaaattttaaaaatacatatcgctgacttcatggaatggacatcctgtataagcactgaaaaacaacaacacaataacactaaaattttaggcactcttaaatgatctgcctctaaaagcgttggatgtagcattatgcaattaggtttttccttatttgcttcattgtactacctgtgtatatagtttttaccttttatgtagcacataaactttggggaagggagggcagggtggggctgaggaactgacgtggagcggggtatgaagagcttgctttgatttacagcaagtagataaatatttgacttgcatgaagagaagcaattttggggaagggtttgaattgttttctttaaagatgtaatgtccctttcagagacagctgatacttcatttaaaaaaatcacaaaaatttgaacactggctaaagataattgctatttatttttacaagaagtttattctcatttgggagatctggtgatctcccaagctatctaaagtttgttagatagctgcatgtggcttttttaaaaaagcaacagaaacctatcctcactgccctccccagtctctcttaaagttggaatttaccagttaattactcagcagaatggtgatcactccaggtagtttggggcaaaaatccgaggtgcttgggagttttgaatgttaagaattgaccatctgcttttattaaatttgttgacaaaattttctcattttcttttcacttcgggctgtgtaaacacagtcaaaataattctaaatccctcgatatttttaaagatctgtaagtaacttcacattaaaaaatgaaatattttttaatttaaagcttactctgtccatttatccacaggaaagtgttatttttcaaggaaggttcatgtagagaaaagcacacttgtaggataagtgaaatggatactacatctttaaacagtatttcattgcctgtgtatggaaaaaccatttgaagtgtacctgtgtacataactctgtaaaaacactgaaaaattatactaacttatttatgttaaaagattttttttaatctagacaatatacaagccaaagtggcatgttttgtgcatttgtaaatgctgtgttgggtagaataggttttcccctcttttgttaaataatatggctatgcttaaaaggttgcatactgagccaagtataattttttgtaatgtgtgaaaaagatgccaattattgttacacattaagtaatcaataaagaaaacttccatagctattcattgagtcaa

SEQ ID NO: 22318 - protein, 198 aa, Homo sapiens; identical to SEQ ID NO: 2907

SEQ ID NO: 22319 - DNA, 2394 bp, Homo sapiens
ggcgggggtgcgcggggcggtcagcgatctgcagcttcgcggggacagagatgtaacccaactcgttcacggatgttccgcgcgccgtgtcaccggctgcgggccaggggtactcggaaggcgcgggcaggagcctggcgaggatgcaccttcccctgccttggaaagagcgtttttgcgggaggaatatgttaaaacaaactcaagatacgaaatgagacttttgaagtgcctttgatttctggtgacggacaccagattgcccccaacttcccatcctcaggaataaaactgcaacgagcaccctgcgcagtgtgagacccaagtgacaggccacaggagggcactcgctggccatggggcatgcaacatacagctctgaatttgctgctttccagaatagccttagtagcttcacagtcttgcctacgcgcccatattcactgggccccacctgcctagcggacgggtgcaatccccggcaagcccgcagggggcgcgcagagcacgtcgtccggggagaactaaaactacatttcccagcatcccgcgcgccgcagacccacttccggagacctcacacaagatggcggcacccgaggaacacgattctccgaccgaagcgtcccagccgattgtggaagaggaggaaactaaaacatttaaagacctgggtgtgacagatgtgttgtgtgaagcttgtgaccagttgggatggacaaaacccaccaagatccagattgaagctattcctttggccttacaaggtcgtgatatcattgggcttgcagaaactggctctggaaagacaggcgcctttgctttgcccattctaaacgcactgctggagaccccgcagcgtttgtttgccctagttcttaccccgactcgggagctggcctttcagatctcagagcagtttgaagccctggggtcctctattggagtgcagagtgctgtgattgtaggtggaattgattcaatgtctcaatctttggcccttgcaaaaaaaccacatataataatagcaactcctggtcgactgattgaccacttggaaaatacgaaaggtttcaacttgagagctctcaaatacttggtcatggatgaagccgaccgaatactgaatatggattttgagacagaggttgacaagatcctcaaagtgattcctcgagatcggaaaacattcctcttctctgccaccatgaccaagaaggttcaaaaacttcagcgagcagctctgaagaatcctgtgaaatgtgccgtttcctctaaataccagacagttgaaaaattacagcaatattatatttttattccctctaaattcaaggatacctacctggtttatattctaaatgaattggctggaaactcctttatgatattctgcagcacctgtaataatacccagagaacagctttgctactgcgaaatcttggcttcactgccatccccctccatggacaaatgagtcagagtaagcgcctaggatcccttaataagtttaaggccaaggcccgttccattcttctagcaactgacgttgccagccgaggtttggacatacctcatgtagatgtggttgtcaactttgacattcctacccattccaaggattacatccatcgagtaggtcgaacagctagagctgggcgctccggaaaggctattacttttgtcacacagtatgatgtggaactcttccagcgcatagaacacttaattgggaagaaactaccaggttttccaacacaggatgatgaggttatgatgctgacagaacgcgtcgctgaagcccaaaggtttgcccgaatggagttaagggagcatggagaaaagaagaaacgctcgcgagaggatgctggagataatgatgacacagagggtgctattggtgtcaggaacaaggtggctggaggaaaaatgaagaagcggaaaggccgttaatcacttttatgaaggctcgagttctgctgttctgtaaaagagaattggagaatgaaacctgctccaacagagatcatgagactgaaattggtcagaattgtgtccagaatgtgctcagctaattcagtattcttccccattctgggttggagtttactgcagagtaattcttacagtgctgatgtcaagactgttactgttcttcgactttgattccttgctcatgacatgagtagggtgtgctcttctgtcacttcacacagaccttttgccttttttagctgcaagtcaaggactaggttgatgatgcccatgacctgtaattgtaaagaagcttggacatctgcaaatgatatttaaaccatcttggcttgtgctttattcaaactaatgtgaaacaataaatttaaatattatttttaaaagattctaactcctta

SEQ ID NO: 22320 - protein, 455 aa, Homo sapiens; identical to SEQ ID NO: 2911

SEQ ID NO: 22321 - DNA, 4637 bp, Homo sapiens
cgggggtgcgcggggcggtcagcgatctgcagcttcgcggggacagagatgtaacccaactcgttcacggatgttccgcgcgccgtgtcaccggctgcgggccaggggtactcggaaggcgcgggcaggagcctggcgaggatgcaccttcccctgccttggaaagggaatggagaggccggcggcccgggagccgcatgggcccgacgcgctgcggcgcttccagggactgctgctggaccgccgaggccggctgcacggccaggtgctgcgcctgcgcgaggtggcccggcgcctggagcgcctgcgcaggcgctccctcgtagccaacgtggccggcagctcgctgagcgcaacgggcgccctcgccgccatcgtggggctctcgctcagcccggtcaccctggggacctcgctgctggtgtcggccgtggggctgggggtggccacagccggaggggccgtcaccatcacgtccgatctctcgctgatcttctgcaactcccgggagctgcggagggtgcaggagatcgcggccacctgccaggaccagatgcgagagatcctgagctgcctcgagtttttctgccgctggcagggctgcggggaccgccagctgctgcagtgcgggaggaacgcctccatcgccctgtacaattctgtctacttcatcgtcttctttggctcacgtggcttcctcatccccaggcgggcggagggggacaccaaggttagccaggccgtgctgaaggccaagattcagaaactggccgagagcctggagtcctgcaccggggctctggacgaactcagcgagcagctggagtctcgggttcagctctgcaccaagtccagtcgtggccacgacctcaagatctctgctgaccagcgtgcagggctgtttttctgagaacatcctttccccctaatgaccgaggccagcaaatcatcctcatgggatgctccagaatttgtagctcccttaggaaaacaccaagctgggttaggagccgaaggcaaaggatgagaaaaactgtttttgaagtgggcaggtccccaaagcccttcttttcccatcactgtgacatctgcctgggcttgagtgctacggacttttcagtcttcctagtggaaaaatgtgacccaaaaactctttttcctttatcaaaaactttctgtctaaacacagctgggcaggcactcctgttttaaagttatttcggggtccctgaccctgccctggtggcttggcctgagactggagagagtgccatcctctgggtcctctccaagtcctactagtctttgaagtcctcaaaatgtgcgtgaggaaggcgtttgcctctattccagaatttctgatacaaagaactccagaatccagagcaaatcagcccttctctgaacgttgtaggatggttcagaacccagagaggaccctggtgctgatatctcctcctcttccctttcccctcagcttacttactcccagatgcggcctgggtatgaagtaggcctttcctgagtggctcccaatccagtcctccaagtactcagaggggaagcccgtgaagccgtcatctaagtcctgctccctcacatgaagctgagggccagatagatggagcgactgccaacttcatttcccgacatcattgtgttcagaagagagtgatgggttttgagttagacagtcctgggcttgagacaggctttgtcactactgtgtgagtgtagccacctaatctctctgagactgtgtaaaacaaagatgataaaatctcaccctgttgtgagatattaaatgagccaaagtgcctagcatgatggtgctggctcatatagtgtagtccctggaatggcaaattaacatcacccaggaacttgttagaaaggcaaattcttggacacaaccctcctgatttatggaatcagaaactctggctgtggggcccagcaacctgagtttaaacaatttctctgggtggttctgcggcacactaaggtttgaaaatcactgcaacaaatgctaacttctaatccccttgatgagctttcacgaagtctcacggcttctctagggactccatggtcttcagagtcgttcacagatgaccaaggacagactgtgtcccagaagccaaaatgagagagagagagagagagcacgcgtacgtgcaccctggggcagtgtctcaccgtatgaacaagggatgtaacactaaaagcccattagggggcagtgtttcccgcctgttgtagaaactggtacagaaaggaatatgaagttcctgaaactgacctttgtctattattaccttctctgaaaagtgccagtccatgtattttttatttattttaagtttgtaatttaatttttaattattgtttagtgtttgcatttaattttatttaatcaccacatttagaaaataataagagcaagtttctaaatgggagactgctgaggctctttgcaagagatgagattaagtttgagtttctaaggcagggcatgagctggaaatagcattgctttccttgattgtctctctccttcagggagattctttttctctagtgttttaagtgatcctttgaagtaagtgtggagagtcttgaatggcaagaccaggagctgagtttaagcttgtaatggaagcttgcattgtgggatatataactgaggaagcatatttatcctgaaggtattttgccagaaggtatcacttgacctggaaaaggaatctatttagttcaggaaagataaaaagtttagaggtatgtgaaggaagcacttagaacttgcaagcctgatgtcctatcaagttatgtcttctgggtgacagacaaaatcgcttgtcttatggtggtgatgtgttgcattttcactttggggtctgtaagaaactgtcagtgaaaatatgtacaattccttcaatttccattcttaacaactgtaatgttgaaaaataagttgaaaagtctttgggaccatacatgcaaaaacggtgcctctgttacttaattatttaatattctataaatgtacccaatctgtccgcacccttcccagtgatggggcagtatgtctgaggaagtataatttcagtactggggtcggggagaggaggtgatgtttctacatttttattttttctataaattgcaattggtctgtatgctggtttattttgaaatttatattggtttcttttcaagctggtgtcatctcctagactgtttcacccagatgctagcattttttttttttttttgagacagagtctcactctgtcacctaggctggagttgcagtggtttgatctcggctcactgcaacctccgactcctgggttcaagcaattcttctgcctcagcctcctgagtagctgggattacagatgtgcaccagcacacccggctaattttttgtatttttagtagagacagggtttcgccatgttggccaggctggtcttgaactcctggccttatgtgatccgcccaccttggcttcccaaagtgctgggattacaggcatgagccacctcgcctggccagatgctagcattttagatcaaacaattcattttagatgaattgttttgtttcacaatcattttaaatcattttagaatgtacttcacattattagttgtgttatggcataaaggtacaaccattccctaactccatcttttattaatgcttaagtttaaattatattcttccaatgcctaagctattccctagaattaaactgggcacttttggaagcagcaacagtaacagcagcagcaaacttttcctctcatattttgggtgtatcaaaagttctagacttttgaagttatgatttcagtggcccactttatttctaaggaagagtgtctactttggaacgatactttgcacatagtaggaactcaagaaatacatttgaataattataattaactgtttagctatcttaatgagaatttgttgacaacaaaagatcatccatcgccttatgtgtgagtaagattggagcctctatcaagatttagtcaagttcagttagattgattctagaaacaaatatttatttctttcttttacggggatgtgaataaggcttttccttaaggccttcattctttaaacaaacaggttgaaatggtatgttgtaaaagagaagacgggagagaggtatttagatgataagtgtacttcacaaaaatgccaaagtttgaaaaataggtatgtttgttctaaatgtttaagtgcttctctgttaggttctggggcttgcaatcatttgaattgttctgtttcacaataaaggagattcactgggttctgcattttcaggattcaatagaactgctccattaaaaaaataatccttagcaagcattcgaatcctaactgctttgatgcacttgccctcgggcacctgtcatttccaatatggtaggtgtcaaagtcaaaagtatttactgggagaaaaaagagaggagtggttgtagaagtctccctaaatcagacatgtcaagcaatcagccaacgtggtgtatttctcattcaatattttagtgtgaattgagacactgagataaagacatcgtgcagagataaatggggatacagtt

SEQ ID NO: 22322 - protein, 279 aa, Homo sapiens
MFRAPCHRLRARGTRKARAGAWRGCTFPCLGKGMERPAAREPHGPDALRRFQGLLLDRRGRLHGQVLRLREVARRLERLRRRSLVANVAGSSLSATGALAAIVGLSLSPVTLGTSLLVSAVGLGVATAGGAVTITSDLSLIFCNSRELRRVQEIAATCQDQMREILSCLEFFCRWQGCGDRQLLQCGRNASIALYNSVYFIVFFGSRGFLIPRRAEGDTKVSQAVLKAKIQKLAESLESCTGALDELSEQLESRVQLCTKSSRGHDLKISADQRAGLFF

SEQ ID NO: 22323 - DNA, 266 bp, Homo sapiens
ttcaaacctggttggacagataattataagccttaatgcaatgacaaatttcaaggtccctccaggcagtgactttcagccttccctctacacatggaaaggaatgtgcccatattacctggaaatcagaatgccaattactcaataaccatgtatttaaatagccatgatgaaacaggaatttagcagaggttacctgggaaaaaaacaaacccattaattatgtctctcaaagtccttgtaccttttgtaacttttttgtacct

SEQ ID NO: 22324 - protein, 35 aa, Homo sapiens
MTNFKVPPGSDFQPSLYTWKGMCPYYLEIRMPITQ

SEQ ID NO: 22325 - DNA, 914 bp, Homo sapiens
catagtgactcacacctgtagtcctagctattcaggacgctgaggcaggaggatcacttgcacccaggaggtcaaggctgcagtgagctataatggtaccactgcaacacagcctggatgatagagaccttgtctcaaaaaaaaagcaaaaaaaaaaaaaacaaaaaaaaaccaactggggccgggtgcagtggctcacccctgtaatcccacatttgtttaatttcatatagtaaagacacaataacaaattttaggaacaaatgaaggcattttgttcaaaagttctgtgtggtcagtttccacaaaaaaaaatctgtggaccacatcctcagacttctcttttaaattgtttgttgggcacttccaacacatcaccctagagagactacactgaaaatggtagttggccttcaaactagccttcagatctgttcaactctttttttgttttgttttgttttgttgaggcagggtctcactctgtcactcaagtgggagtgcaatggcaccatcacgcctcaccgcagccttgacctcctgagatcaagcaatcctcctgccttattttttgactttttgtagagacaagttgtcactgtgttaaactcttgatgcagctgaaccgcggcattagctgtactagtttgaattctgagtcctcgaaccatgaggaaattcagtgtaggaaggacgagaaagagctttttaagcataggaatcttcaggccccagccctggagagtctaattcaagaggtctggagtgggatctgggagaatacaggtgattcctacctgcagccaggtttgtgaaccactgctctaggaactggtagtgtttgtttgtttgtttgtttgtttgtttgtttgtttgagacggagtcttgctctgttgcccaggctggagtgcag

SEQ ID NO: 22326 - protein, 46 aa, Homo sapiens [sequence omitted]

SEQ ID NO: 22327 - DNA, 4845 bp, Homo sapiens
gatgaagcccatcgttaacgttccctgggagagaagcagaagatagcattattcctatttccatatgcagagataaggtcctgagaacttgtgtggctccccccggattccagaacaggtctttgagaactcgtctcatgatccactggaaacagacccgttcccctagcgtggcagtggctgctccgctgaactcgtgccaagttcccgctggcgtccgggcagcagggcgggagcggcggctggcacggagactccaggctgaccgcgtgtctatgtccccgcagggaatggagaggccggcggcccgggagccgcatgggcccgacgcgctgcggcgcttccagggactgctgctggaccgccgaggccggctgcacggccaggtgctgcgcctgcgcgaggtggcccggcgcctggagcgcctgcgcaggcgctccctcgtagccaacgtggccggcagctcgctgagcgcaacgggcgccctcgccgccatcgtggggctctcgctcagcccggtcaccctggggacctcgctgctggtgtcggccgtggggctgggggtggccacagccggaggggccgtcaccatcacgtccgatctctcgctgatcttctgcaactcccgggagctgcggagggtgcaggagatcgcggccacctgccaggaccagatgcgagagatcctgagctgcctcgagtttttctgccgctggcagggctgcggggaccgccagctgctgcagtgcgggaggaacgcctccatcgccctgtacaattctgtctacttcatcgtcttctttggctcacgtggcttcctcatccccaggcgggcggagggggacaccaaggttagccaggccgtgctgaaggccaagattcagaaactggccgagagcctggagtcctgcaccggggctctggacgaactcagcgagcagctggagtctcgggttcagctctgcaccaagtccagtcgtggccacgacctcaagatctctgctgaccagcgtgcagggctgtttttctgagaacatcctttccccctaatgaccgaggccagcaaatcatcctcatgggatgctccagaatttgtagctcccttaggaaaacaccaagctgggttaggagccgaaggcaaaggatgagaaaaactgtttttgaagtgggcaggtccccaaagcccttcttttcccatcactgtgacatctgcctgggcttgagtgctacggacttttcagtcttcctagtggaaaaatgtgacccaaaaactctttttcctttatcaaaaactttctgtctaaacacagctgggcaggcactcctgttttaaagttatttcggggtccctgaccctgccctggtggcttggcctgagactggagagagtgccatcctctgggtcctctccaagtcctactagtctttgaagtcctcaaaatgtgcgtgaggaaggcgtttgcctctattccagaatttctgatacaaagaactccagaatccagagcaaatcagcccttctctgaacgttgtaggatggttcagaacccagagaggaccctggtgctgatatctcctcctcttccctttcccctcagcttacttactcccagatgcggcctgggtatgaagtaggcctttcctgagtggctcccaatccagtcctccaagtactcagaggggaagcccgtgaagccgtcatctaagtcctgctccctcacatgaagctgagggccagatagatggagcgactgccaacttcatttcccgacatcattgtgttcagaagagagtgatgggttttgagttagacagtcctgggcttgagacaggctttgtcactactgtgtgagtgtagccacctaatctctctgagactgtgtaaaacaaagatgataaaatctcaccctgttgtgagatattaaatgagccaaagtgcctagcatgatggtgctggctcatatagtgtagtccctggaatggcaaattaacatcacccaggaacttgttagaaaggcaaattcttggacacaaccctcctgatttatggaatcagaaactctggctgtggggcccagcaacctgagtttaaacaatttctctgggtggttctgcggcacactaaggtttgaaaatcactgcaacaaatgctaacttctaatccccttgatgagctttcacgaagtctcacggcttctctagggactccatggtcttcagagtcgttcacagatgaccaaggacagactgtgtcccagaagccaaaatgagagagagagagagagagcacgcgtacgtgcaccctggggcagtgtctcaccgtatgaacaagggatgtaacactaaaagcccattagggggcagtgtttcccgcctgttgtagaaactggtacagaaaggaatatgaagttcctgaaactgacctttgtctattattaccttctctgaaaagtgccagtccatgtattttttatttattttaagtttgtaatttaatttttaattattgtttagtgtttgcatttaattttatttaatcaccacatttagaaaataataagagcaagtttctaaatgggagactgctgaggctctttgcaagagatgagattaagtttgagtttctaaggcagggcatgagctggaaatagcattgctttccttgattgtctctctccttcagggagattctttttctctagtgttttaagtgatcctttgaagtaagtgtggagagtcttgaatggcaagaccaggagctgagtttaagcttgtaatggaagcttgcattgtgggatatataactgaggaagcatatttatcctgaaggtattttgccagaaggtatcacttgacctggaaaaggaatctatttagttcaggaaagataaaaagtttagaggtatgtgaaggaagcacttagaacttgcaagcctgatgtcctatcaagttatgtcttctgggtgacagacaaaatcgcttgtcttatggtggtgatgtgttgcattttcactttggggtctgtaagaaactgtcagtgaaaatatgtacaattccttcaatttccattcttaacaactgtaatgttgaaaaataagttgaaaagtctttgggaccatacatgcaaaaacggtgcctctgttacttaattatttaatattctataaatgtacccaatctgtccgcacccttcccagtgatggggcagtatgtctgaggaagtataatttcagtactggggtcggggagaggaggtgatgtttctacatttttattttttctataaattgcaattggtctgtatgctggtttattttgaaatttatattggtttcttttcaagctggtgtcatctcctagactgtttcacccagatgctagcattttttttttttttttgagacagagtctcactctgtcacctaggctggagttgcagtggtttgatctcggctcactgcaacctccgactcctgggttcaagcaattcttctgcctcagcctcctgagtagctgggattacagatgtgcaccagcacacccggctaattttttgtatttttagtagagacagggtttcgccatgttggccaggctggtcttgaactcctggccttatgtgatccgcccaccttggcttcccaaagtgctgggattacaggcatgagccacctcgcctggccagatgctagcattttagatcaaacaattcattttagatgaattgttttgtttcacaatcattttaaatcattttagaatgtacttcacattattagttgtgttatggcataaaggtacaaccattccctaactccatcttttattaatgcttaagtttaaattatattcttccaatgcctaagctattccctagaattaaactgggcacttttggaagcagcaacagtaacagcagcagcaaacttttcctctcatattttgggtgtatcaaaagttctagacttttgaagttatgatttcagtggcccactttatttctaaggaagagtgtctactttggaacgatactttgcacatagtaggaactcaagaaatacatttgaataattataattaactgtttagctatcttaatgagaatttgttgacaacaaaagatcatccatcgccttatgtgtgagtaagattggagcctctatcaagatttagtcaagttcagttagattgattctagaaacaaatatttatttctttcttttacggggatgtgaataaggcttttccttaaggccttcattctttaaacaaacaggttgaaatggtatgttgtaaaagagaagacgggagagaggtatttagatgataagtgtacttcacaaaaatgccaaagtttgaaaaataggtatgtttgttctaaatgtttaagtgcttctctgttaggttctggggcttgcaatcatttgaattgttctgtttcacaataaaggagattcactgggttctgcattttcaggattcaatagaactgctccattaaaaaaataatccttagcaagcattcgaatcctaactgctttgatgcacttgccctcgggcacctgtcatttccaatatggtaggtgtcaaagtcaaaagtatttactgggagaaaaaagagaggagtggttgtagaagtctccctaaatcagacatgtcaagcaatcagccaacgtggtgtatttctcattcaatattttagtgtgaattgagacactgagataaagacatcgtgcagagataaatggggatacagttaaatgtagcaactcttgagttcattttttcccactgtagcaaaattaatgctttctctttattgaaataaattgctcattcctcaaa

SEQ ID NO: 22328 - protein, 297 aa, Homo sapiens [sequence omitted]

SEQ ID NO: 22329 - DNA, 2347 bp, Homo sapiens
ctttgtctattattaccttctctgaaaagtgccagtccatgtattttttatttattttaagtttgtaatttaatttttaattattgtttagtgtttgcatttaattttatttaatcaccacatttagaaaataataagagcaagtttctaaatgggagactgctgaggctctttgcaagagatgagattaagtttgagtttctaaggcagggcatgagctggaaatagcattgctttctcttgaatggcaagaccaggagctgagtttaagcttgtaatggaagcttgcattgtgggatatataactgaggaagcatatttatcctgaaggtattttgccagaaggtatcacttgacctggaaaaggaatctatttagttcaggaaagataaaaagtttagaggtatgtgaaggaagcacttagaacttgcaagcctgatgtcctatcaagttatgtcttctgggtgacagacaaaatcgcttgtcttatggtggtgatgtgttgcattttcactttggggtctgtaagaaactgtcagtgaaaatatgtacaattccttcaatttccattcttaacaactgtaatgttgaaaaataagttgaaaagtctttgggaccatacatgcaaaaacggtgcctctgttacttaattatttaatattctataaatgtacccaatctgtccgcacccttcccagtgatggggcagtatgtctgaggaagtataatttcagtactggggtcggggagaggaggtgatgtttctacatttttattttttctataaattgcaattggtctgtatgctggtttattttgaaatttatattggtttcttttcaagctggtgtcatctcctagactgtttcacccagatgctagcattttttttttttttttgagacagagtctcactctgtcacctaggctggagttgcagtggtttgatctcggctcactgcaacctccgactcctgggttcaagcaattcttctgcctcagcctcctgagtagctgggattacagatgtgcaccagcacacccggctaattttttgtatttttagtagagacagggtttcgccatgttggccaggctggtcttgaactcctggccttatgtgatccgcccaccttggcttcccaaagtgctgggattacaggcatgagccacctcgcctggccagatgctagcattttagatcaaacaattcattttagatgaattgttttgtttcacaatcattttaaatcattttagaatgtacttcacattattagttgtgttatggcataaaggtacaaccattccctaactccatcttttattaatgcttaagtttaaattatattcttccaatgcctaagctattccctagaattaaactgggcacttttggaagcagcaacagtaacagcagcagcaaacttttcctctcatattttgggtgtatcaaaagttctagacttttgaagttatgatttcagtggcccactttatttctaaggaagagtgtctactttggaacgatactttgcacatagtaggaactcaagaaatacatttgaataattataattaactgtttagctatcttaatgagaatttgttgacaacaaaagatcatccatcgccttatgtgtgagtaagattggagcctctatcaagatttagtcaagttcagttagattgattctagaaacaaatatttatttctttcttttacggggatgtgaataaggcttttccttaaggccttcattctttaaacaaacaggttgaaatggtatgttgtaaaagagaagacgggagagaggtatttagatgataagtgtacttcacaaaaatgccaaagtttgaaaaataggtatgtttgttctaaatgtttaagtgcttctctgttaggttctggggcttgcaatcatttgaattgttctgtttcacaataaaggagattcactgggttctgcattttcaggattcaatagaactgctccattaaaaaaataatccttagcaagcattcgaatcctaactgctttgatgcacttgccctcgggcacctgtcatttccaatatggtaggtgtcaaagtcaaaagtatttactgggagaaaaaagagaggagtggttgtagaagtctccctaaatcagacatgtcaagcaatcagccaacgtggtgtatttctcattcaatattttagtgtgaattgagacactgagataaagacatcgtgcagagataaatggggatacagttaaatgtagcaactcttgagttcattttttcccactgtagcaaaattaatgctttctctttattgaaataaattgctcattcctcaaat

SEQ ID NO: 22330 - protein, 47 aa, Homo sapiens [sequence omitted]

SEQ ID NO: 22331 - DNA, 1683 bp, Homo sapiens
acttccggagacctcacacaagatggcggcacccgaggaacacgattctccgaccgaagcgtcccagccgattgtggaagaggaggaaactaaaacatttaaagacctgggtgtgacagatgtgttgtgtgaagcttgtgaccagttgggatggacaaaacccaccaagatccagattgaagctattcctttggccttacaaggtcgtgatatcattgggcttgcagaaactggctctggaaagacaggcgcctttgctttgcccattctaaacgcactgctggagaccccgcagcgtttgtttgccctagttcttaccccgactcgggagctggcctttcagatctcagagcagtttgaagccctggggtcctctattggagtgcagagtgctgtgattgtaggtggaattgattcaatgtctcaatctttggcccttgcaaaaaaaccacatataataatagcaactcctggtcgactgattgaccacttggaaaatacgaaaggtttcaacttgagagctctcaaatacttggtcatggatgaagccgaccgaatactgaatatggattttgagacagaggttgacaagatcctcaaagtgattcctcgagatcggaaaacattcctcttctctgccaccatgaccaagaaggttcaaaaacttcagcgagcagctctgaagaatcctgtgaaatgtgccgtttcctctaaataccagacagttgaaaaattacagcaatattatatttttattccctctaaattcaagagtaagcgcctaggatcccttaataagtttaaggccaaggcccgttccattcttctagcaactgacgttgccagccgaggtttggacatacctcatgtagatgtggttgtcaactttgacattcctacccattccaaggattacatccatcgagtaggtcgaacagctagagctgggcgctccggaaaggctattacttttgtcacacagtatgatgtggaactcttccagcgcatagaacacttaattgggaagaaactaccaggttttccaacacaggatgatgaggttatgatgctgacagaacgcgtcgctgaagcccaaaggtttgcccgaatggagttaagggagcatggagaaaagaagaaacgctcgcgagaggatgctggagataatgatgacacagagggtgctattggtgtcaggaacaaggtggctggaggaaaaatgaagaagcggaaaggccgttaatcacttttatgaaggctcgagttctgctgttctgtaaaagagaattggagaatgaaacctgctccaacagagatcatgagactgaaattggtcagaattgtgtccagaatgtgctcagctaattcagtattcttccccattctgggttggagtttactgcagagtaattcttacagtgctgatgtcaagactgttactgttcttcgactttgattccttgctcatgacatgagtagggtgtgctcttctgtcacttcacacagaccttttgccttttttagctgcaagtcaaggactaggttgatgatgcccatgacctgtaattgtaaagaagcttggacatctgcaaatgatatttaaaccatcttggcttgtgctttattcaaactaatgtgaaacaataaatttaaatattatttttaaaagattctaactcctta

SEQ ID NO: 22332 - protein, 406 aa, Homo sapiens; identical to SEQ ID NO: 2913

SEQ ID NO: 22333 - DNA, 2380 bp, Homo sapiens
acttccggagacctcacacaagatggcggcacccgaggaacacgattctccgaccgaagcgtcccagccgattgtggaagaggaggaaactaaaacatttaaagacctgggtgtgacagatgtgttgtgtgaagcttgtgaccagttgggatggacaaaacccaccaagatccagattgaagctattcctttggccttacaaggtcgtgatatcattgggcttgcagaaactggctctggaaagacaggcgcctttgctttgcccattctaaacgcactgctggagaccccgcagcgtttgtttgccctagttcttaccccgactcgggagctggcctttcagatctcagagcagtttgaagccctggggtcctctattggagtgcagagtgctgtgattgtaggtggaattgattcaatgtctcaatctttggcccttgcaaaaaaaccacatataataatagcaactcctggtcgactgattgaccacttggaaaatacgaaaggtttcaacttgagagctctcaaatacttggtcatggatgaagccgaccgaatactgaatatggattttgagacagaggttgacaagatcctcaaagtgattcctcgagatcggaaaacattcctcttctctgccaccatgaccaagaaggttcaaaaacttcagcgagcagctctgaagaatcctgtgaaatgtgccgtttcctctaaataccagacagttgaaaaattacagcaatattatatttttattccctctaaattcaaggtaaaatgtttactttgatcattcctgcctctccctcttcttttcaccaaagcatctgaaaatgtgtcaactcttgattaggtaagagctgtaatgcagattggcatcctgtctgtttgctttagagtgcatatcgtgcttatattatcaccgataagccagacatgccaggaattcacaacacattaaatcacaatactgaggtcatgatgtaatcatataattccttcccatccccatccttgaggtaatttttcctttgtctgcttattatgtggcttttatttaggatgaagcccctggttttgtgctttgatataaggacttctcctgtttgctgagtacagatctcctgcctgccttaaggctaagtggggaatatgtggttcacagagatgataatgctggttaaggaatgcaaagctggcagctggaggtctggataattgaaaagcgactataggcttagtctttaccttatgtatatgccaggtctccaatcctgtctcccaggttcaatgacatatattgttttgggtttgtaacttaggatacctacctggtttatattctaaatgaattggctggaaactcctttatgatattctgcagcacctgtaataatacccagagaacagctttgctactgcgaaatcttggcttcactgccatccccctccatggacaaatgagtcagagtaagcgcctaggatcccttaataagtttaaggccaaggcccgttccattcttctagcaactgacgttgccagccgaggtttggacatacctcatgtagatgtggttgtcaactttgacattcctacccattccaaggattacatccatcgagtaggtcgaacagctagagctgggcgctccggaaaggctattacttttgtcacacagtatgatgtggaactcttccagcgcatagaacacttaattgggaagaaactaccaggttttccaacacaggatgatgaggttatgatgctgacagaacgcgtcgctgaagcccaaaggtttgcccgaatggagttaagggagcatggagaaaagaagaaacgctcgcgagaggatgctggagataatgatgacacagagggtgctattggtgtcaggaacaaggtggctggaggaaaaatgaagaagcggaaaggccgttaatcacttttatgaaggctcgagttctgctgttctgtaaaagagaattggagaatgaaacctgctccaacagagatcatgagactgaaattggtcagaattgtgtccagaatgtgctcagctaattcagtattcttccccattctgggttggagtttactgcagagtaattcttacagtgctgatgtcaagactgttactgttcttcgactttgattccttgctcatgacatgagtagggtgtgctcttctgtcacttcacacagaccttttgccttttttagctgcaagtcaaggactaggttgatgatgcccatgacctgtaattgtaaagaagcttggacatctgcaaatgatatttaaaccatcttggcttgtgctttattcaaactaatgtgaaacaataaatttaaatattatttttaaaagattctaactcctta

SEQ ID NO: 22334 - protein, 255 aa, Homo sapiens [sequence omitted]

SEQ ID NO: 22335 - DNA, 628 bp, Homo sapiens
gacctcacacaagatggcggcacccgaggaacacgattctccgaccgaagcgtcccagccgattgtggaagaggaggaaactaaaacatttaaagacctgggtgtgacagatgtgttgtgtgaagcttgtgaccagttgggatggacaaaacccaccaagatccagattgaagctattcctttggccttacaaggtaggttgtatgacttcgtacagatttaatataaagttatctcaattagataccccttttgaaagctgttgcttgcatacttcaagtgaaataaggatatggtcactaaaggtacaaagtttgggtaatggtatttgaaaatgtcattctccaattttactgagcttactttctgtcttaatagctgaaagggtttgttctctgccacagatgctgactttaaggaagccctaggttaaagttaaagtatattaacgacaatcttggtagactttatgcatcagtgggcgcacacttagggaaggatgcctggaacacatatgtgtgtcttgaggagttgagaattcttgctgtgagccatgtttatcagatttgtaaaacagtggttaaagcagattgatggctactggaactgaaactaatgggatgaactt

SEQ ID NO: 22336 - protein, 69 aa, Homo sapiens
MAAPEEHDSPTEASQPIVEEEETKTFKDLGVTDVLCEACDQLGWTKPTKIQIEAIPLALQGRLYDFVQI

SEQ ID NO: 22337 - DNA, 2702 bp, Homo sapiens
ctcacacaagatggcggcacccgaggaacacgattctccgaccgaagcgtcccagccgattgtggaagaggaggaaactaaaacatttaaagacctgggtgtgacagatgtgttgtgtgaagcttgtgaccagttgggatggacaaaacccaccaagatccagattgaagctattcctttggccttacaagctgtgattgtaggtggaattgattcaatgtctcaatctttggcccttgcaaaaaaaccacatataataatagcaactcctggtcgactgattgaccacttggaaaatacgaaaggtttcaacttgagagctctcaaatacttggtcatggatgaagccgaccgaatactgaatatggattttgagacagaggttgacaagatcctcaaagtgattcctcgagatcggaaaacattcctcttctctgccaccatgaccaagaaggttcaaaaacttcagcgagcagctctgaagaatcctgtgaaatgtgccgtttcctctaaataccagacagttgaaaaattacagcaatattatatttttattccctctaaattcaaggtaaaatgtttactttgatcattcctgcctctccctcttcttttcaccaaagcatctgaaaatgtgtcaactcttgattaggtaagagctgtaatgcagattggcatcctgtctgtttgctttagagtgcatatcgtgcttatattatcaccgataagccagacatgccaggaattcacaacacattaaatcacaatactgaggtcatgatgtaatcatataattccttcccatccccatccttgaggtaatttttcctttgtctgcttattatgtggcttttatttaggatgaagcccctggttttgtgctttgatataaggacttctcctgtttgctgagtacagatctcctgcctgccttaaggctaagtggggaatatgtggttcacagagatgataatgctggttaaggaatgcaaagctggcagctggaggtctggataattgaaaagcgactataggcttagtctttaccttatgtatatgccaggtctccaatcctgtctcccaggttcaatgacatatattgttttgggtttgtaacttaggatacctacctggtttatattctaaatgaattggctggaaactcctttatgatattctgcagcacctgtaataatacccagagaacagctttgctactgcgaaatcttggcttcactgccatccccctccatggacaaatgagtcaggtaaggattcatcatcatcatcagccatgcactggtggcgtgagcgagataaacctcctaacagtaggtttgtacaataaggccatagggcaccgatgcctgtttccataattgttgtaattttatgggctttgaagtgttgctctagatacttactttctcctttcagggtagcgagaggctcccattagaatatttcatatgtacctgtctggtttgcaagctgttgagttgatttattcagccctagtggtaataatgactctggcctctaaaaacattaataaattatttcccagttacctttctatcgtgtcaaactacccttattttgtatcatatatatttttttaattttttgttgcttccatatttctgttttgacctgtgaagccccattcaaaacttagggggaaaaacctttaaaaaatttatgtctgtttgttctcgtgtttgtctattttgtgttttgtattccaaaacataggttaagttttccaacatttctttttcattacctcagagtaagcgcctaggatcccttaataagtttaaggccaaggcccgttccattcttctagcaactgacgttgccagccgaggtttggacatacctcatgtagatgtggttgtcaactttgacattcctacccattccaaggattacatccatcgagtaggtcgaacagctagagctgggcgctccggaaaggctattacttttgtcacacagtatgatgtggaactcttccagcgcatagaacacttaattgggaagaaactaccaggttttccaacacaggatgatgaggttatgatgctgacagaacgcgtcgctgaagcccaaaggtttgcccgaatggagttaagggagcatggagaaaagaagaaacgctcgcgagaggatgctggagataatgatgacacagagggtgctattggtgtcaggaacaaggtggctggaggaaaaatgaagaagcggaaaggccgttaatcacttttatgaaggctcgagttctgctgttctgtaaaagagaattggagaatgaaacctgctccaacagagatcatgagactgaaattggtcagaattgtgtccagaatgtgctcagctaattcagtattcttccccattctgggttggagtttactgcagagtaattcttacagtgctgatgtcaagactgttactgttcttcgactttgattccttgctcatgacatgagtagggtgtgctcttctgtcacttcacacagaccttttgccttttttagctgcaagtcaaggactaggttgatgatgcccatgacctgtaattgtaaagaagcttggacatctgcaaatgatatttaaaccatcttggcttgtgctttattcaaactaatgtgaaacaataaatttaaatattatttttaaaagattctaactcctta

SEQ ID NO: 22338 - protein, 192 aa, Homo sapiens
MAAPEEHDSPTEASQPIVEEEETKTFKDLGVTDVLCEACDQLGWTKPTKIQIEAIPLALQAVIVGGIDSMSQSLALAKKPHIIIATPGRLIDHLENTKGFNLRALKYLVMDEADRILNMDFETEVDKILKVIPRDRKTFLFSATMTKKVQKLQRAALKNPVKCAVSSKYQTVEKLQQYYIFIPSKFKVKCLL

SEQ ID NO: 22339 - DNA, 566 bp, Homo sapiens
acacaagatggcggcacccgaggaacacgattctccgaccgaagcgtcccagccgattgtggaagaggaggaaactaaaacatttaaagacctgggtgtgacagatgtgttgtgtgaagcttgtgaccagttgggatggacaaaacccaccaagatccagattgaagctattcctttggccttacaaggtcgtgatatcattgggcttgcagaaactggctctggaaagacaggcgcctttgctttgcccattctaaacgcactgctggagaccccgcagcgtttgtttgccctagttcttaccccgactcgggagctggcctttcagatctcagagcagtttgaagccctggggtcctctattggagtgcagagtggtaagtgtctgagagggaagggatcctaggttgccatcacaagtgaagaatgagtgtggaggaaggagaatggaggaaagtattgctagcataatttattgacctaaagagctaatgttgtatttgagctttgggaagagtattaattgtaagggaagaacaaatctaagtagaaatctggcattggct

SEQ ID NO: 22340 - protein, 132 aa, Homo sapiens
MAAPEEHDSPTEASQPIVEEEETKTFKDLGVTDVLCEACDQLGWTKPTKIQIEAIPLALQGRDIIGLAETGSGKTGAFALPILNALLETPQRLFALVLTPTRELAFQISEQFEALGSSIGVQSGKCLRGKGS

SEQ ID NO: 22341 - DNA, 1471 bp, Homo sapiens
catatttctgttttgacctgtgaagccccattcaaaacttagggggaaaaacctttaaaaaatttatgtctgtttgttctcgtgtttgtctattttgtgttttgtattccaaaacataggttaagttttccaacatttctttttcattacctcagagtaagcgcctaggatcccttaataagtttaaggccaaggcccgttccattcttctagcaactgacgttgccagccgaggtttggacatacctcatgtagatgtggttgtcaactttgacattcctacccattccaaggattacatccatcgagtaggtcgaacagctagagctgggcgctccggaaaggctattacttttgtcacacagtaagtaaatcagctttagggccgagcaatgtagagaaaagagcagaactttcaagccactggctgagaacctgacactaccatttactacactaatcactttcatactgaaaaccaggatgaaggagttgaaagatgggaataataatacctatctagcagggttttggtgaaaattggagattatatatgtaaaagatctagtatagtatttggcatgtagaatggtacctagagctggagagcaattgcctttgtgtcaactcagaaagtattagaataactatttccaattgttttttttaaagaaacaaatttttatgtacccaaggctgttctgtgaataaataccttgagggattttctccctccctcctttcctttttttttttgtatttgtctcgctctgtcgcctaggctggagtgcagtggtgcagtcttggctaagtgcaccttccaccccctgggctcaagcaatcctcctacctcaccatagcttcccaagtagctgggaccacaggtgcatgccagcacacctggctttttaaaaaatatttttagtagagatagggttttgtcatgttggccaggctggtcttgaactcctgagctcaagcgatccacctgccttagcctctcatagtgctgggattacaggcacaagccacctgcctggccgatttttgtttctttttctttttttaagcagcaaggtttcactctgttgaccaggctggagtgcagtgacttgatcatagctcactgcagcttcaaactcctgggctcaagtagtcctcatacctcagtctcctgaatggctgggattacaggcacatgccaccacggttggctaatttttaattttttatagagatggcatctcactgtgttgtccaggctggtctggaactcctggtctcaagtgattctcctgctttgacctcccaaagcgttgggattacaggtgcaagccaccatgcctggcctcccttgagtgattttctaatgggctatgcacagagattgcacttaacccatatttagaaaagaaataatatgttcaatattgtttaaacctatggttcctattgcgttgtatcatataat

SEQ ID NO: 22342 - protein, 56 aa, Homo sapiens
MASHCVVQAGLELLVSSDSPALTSQSVGITGASHHAWPPLSDFLMGYAQRLHLTHI

SEQ ID NO: 22343 - DNA, 1805 bp, Homo sapiens
tgacactaccatttactacactaatcactttcatactgaaaaccaggatgaaggagttgaaagatgggaataataatacctatctagcagggttttggtgaaaattggagattatatatgtaaaagatctagtatagtatttggcatgtagaatggtacctagagctggagagcaattgcctttgtgtcaactcagaaagtattagaataactatttccaattgttttttttaaagaaacaaatttttatgtacccaaggctgttctgtgaataaataccttgagggattttctccctccctcctttcctttttttttttgtatttgtctcgctctgtcgcctaggctggagtgcagtggtgcagtcttggctaagtgcaccttccaccccctgggctcaagcaatcctcctacctcaccatagcttcccaagtagctgggaccacaggtgcatgccagcacacctggctttttaaaaaatatttttagtagagatagggttttgtcatgttggccaggctggtcttgaactcctgagctcaagcgatccacctgccttagcctctcatagtgctgggattacaggcacaagccacctgcctggccgatttttgtttctttttctttttttaagcagcaaggtttcactctgttgaccaggctggagtgcagtgacttgatcatagctcactgcagcttcaaactcctgggctcaagtagtcctcatacctcagtctcctgaatggctgggattacaggcacatgccaccacggttggctaatttttaattttttatagagatggcatctcactgtgttgtccaggctggtctggaactcctggtctcaagtgattctcctgctttgacctcccaaagcgttgggattacaggtgcaagccaccatgcctggcctcccttgagtgattttctaatgggctatgcacagagattgcacttaacccatatttagaaaagaaataatatgttcaatattgtttaaacctatggttcctattgcgttgtatcatataataatagtttgggaatggacaggcatttgcgttaccaggcaaccagagctgtgcagttttccttcctcaggtatgatgtggaactcttccagcgcatagaacacttaattgggaagaaactaccaggttttccaacacaggatgatgaggttatgatgctgacagaacgcgtcgctgaagcccaaaggtttgcccgaatggagttaagggagcatggagaaaagaagaaacgctcgcgagaggatgctggagataatgatgacacagagggtgctattggtgtcaggaacaaggtggctggaggaaaaatgaagaagcggaaaggccgttaatcacttttatgaaggctcgagttctgctgttctgtaaaagagaattggagaatgaaacctgctccaacagagatcatgagactgaaattggtcagaattgtgtccagaatgtgctcagctaattcagtattcttccccattctgggttggagtttactgcagagtaattcttacagtgctgatgtcaagactgttactgttcttcgactttgattccttgctcatgacatgagtagggtgtgctcttctgtcacttcacacagaccttttgccttttttagctgcaagtcaaggactaggttgatgatgcccatgacctgtaattgtaaagaagcttggacatctgcaaatgatatttaaaccatcttggcttgtgctttattcaaactaatgtgaaacaataaatttaaatattatttttaaaagattctaactcctta

SEQ ID NO: 22344 - protein, 105 aa, Homo sapiens [sequence omitted]

SEQ ID NO: 22345 - DNA, 801 bp, Homo sapiens
aaatgagttcagaggtggcagatgttaatgtcagcttacgttgaggtaagccacaaattctcgtgtttttttcagagttccccatcaggtggaacaaaacttgtcctgttacctaccctcaaagacaaaccagcaaccagttcaccacccatccaccctttcagtgtcttcttgttgatctttggagaaaggcatggcctggcaggctctgcatggtgccacaggcctatctagctcctgtctctcctgcatttccttccctactggctgctttcactctttaagctcctgcccaccccagggactttgcacatgctattttttctacctcctctgctcttctgccctctttatttaggcaacttctactcatccttcagatcccaggtcaagcatatccttcttcagggaaggtttgcttgacatcgctgatggggtcaaatcctccttttagaggctatcaccacacgctgcatctgtattttataacacttgtcacagtattatatttgtctggttctttgattgatatctattactctcatgcaacctccgcctcagcctcccaaagtgctggggttacaggcgtcagccaccgcacctggcccttctgagggctttttattccttctatgttctcgtaactcctctcagagtttttaggtgacctctgttgattgacagatccagaagtttggaagatgtgtcagcctgaatttacagattgggaagccgaagaggaagggtttagccacctgcccaagattgtgagaattggcagttattcaccagataaccagg

SEQ ID NO: 22346 - protein, 60 aa, Homo sapiens [sequence omitted]

SEQ ID NO: 22347 - DNA, 1516 bp, Homo sapiens
tttcatttccattactaatgcctgcaattgctgataatagacgtgccccaggaatcgctgcaagggaaatggagcaagtcagggtctccttctgtggcccagtctggaatgttagtggtgcaatctcgactcactgcaacctccgcctcccggattcaagtgattctcctgcctcagcctcccaagtagctgggattacacgtacgcaccaccatgcccggcaaatttttgtatttttagtagagatagggtttcaacatattggccaggctggtctcaaactcgtgacctcaagtgatctgcccgcctcagcctcccaaaatgctgggattataggcgtgaaccatcacaccgggccattccaatcactcttcatttcctgcatctcaaagcaacgctgtcaaacagttggagttgattttctaggcctttctgttttccccctcctgcttgccattgcagggcctcctctggtcactcgtaccagtgagagatcaggctcctttaggaagtactcacagcggaaaatcagcttgaaactgcctttggaaaagtatgactgagacagtgaaggagatcaaacttaactgactccctcttgctcctaacctccagactgtccttattcattcctgggtgtaggccgaactaactttgggagaaacttagtttatagtttaaacaaagacggtaacaaccctttcttaaagcagacctccttcttgcctggggactagattgcctttgtaggatgaacattaaccacaagattagaaattatggtttaggagtcatgcagctggagctacaagattccaaccctcccctaaactgctcctaagatcagtgcttctttcccaagcggctgccgaagatggcggaggtacaggtcctggtgcttgatggtcgaggccatctcctgggccacctggcggccatcgtggctaaacaggtactgctgggccggaaggtggtggttgtatgctgtgaaggcatcaacatttctggcaatttctacagaaacaagttgaagtacctggctttcctccgcaagcggatgaacagcaacccttcccgaggcccctaccccctccaggcccccagccgcatcttctggcagaccatgcgaggtatgccgccccacaagaccaagccaggccaggccgctctggactgcctcaaggtgtttgacggcatcccaccgccctacgacaagaaaaagcggatggtggttcctgctgccctcaaggttgtgcgtctgaagcctgcaagaaagtttgcctatctggggcgcctggctcacgaggttggctggaagtaccaggcagtgacagccaccctggaggagaagaggaaagagaaagccaagatccactaccggaagaagaaacagttcatgaggctatggaaacaggccgagaagaacgtggagaagaaaattgacaaatacacagaagtcctcaagacccacggactcctggtctgagcccaataaagactgttaattcctcaaaaa

SEQ ID NO: 22348 - protein, 181 aa, Homo sapiens
MPAIADNRRAPGIAAREMEQVRVSFCGPVWNVSGAISTHCNLRLPDSSDSPASASQVAGITRTHHHARQIFVFLVEIGFQHIGQAGLKLVTSSDLPASASQNAGIIGVNHHTGPFQSLFISCISKQRCQTVGVDFLGLSVFPLLLAIAGPPLVTRTSERSGSFRKYSQRKISLKLPLEKYD

SEQ ID NO: 22349 - DNA, 660 bp, Homo sapiens
ctttcccaagcggctgccgaagatggcggaggtacaggtcctggtgcttgatggtcgaggccatctcctgggccacctggcggccatcgtggctaaacaggtactgctgggccggaaggtggtggttgtatgctgtgaaggcatcaacatttctggcaatttctacagaaacaagttgaagtacctggctttcctccgcaagcggatgaacagcaacccttcccgaggcccctaccccctccaggcccccagccgcatcttctggcagaccatgcgaggtatgccgccccacaagaccaagccaggccaggccgctctggactgcctcaaggtgtttgacggcatcccaccgccctacgacaagaaaaagcggatggtggttcctgctgccctcaaggttgtgcgtctgaagcctgcaagaaagtttgcctatctggggcgcctggctcacgaggttggctggaagtaccaggcagtgacagccaccctggaggagaagaggaaagagaaagccaagatccactaccggaagaagaaacagttcatgaggctatggaaacaggccgagaagaacgtggagaagaaaattgacaaatacacagaagtcctcaagacccacggactcctggtctgagcccaataaagactgttaattcctca

SEQ ID NO: 22350 - protein, 203 aa, Homo sapiens; identical to SEQ ID NO: 2915

SEQ ID NO: 22351 - DNA, 3089 bp, Homo sapiens
aatttcatctggcgcccccgttcaatcagcctgcattgtcgaggctttaggagaggcagttaggaaaggagagatactgatctctcagccccagggcagcactaatggtgcctgtctagactctgacaggtggagctgctgagctaactacggacctggtgggggaagttttccttggctttcacgtggctttggctggggagccctgagaaggtggctgcctcctttttctgaagcctggcttcccatacggcagtggctgggggagagtgatggagagaaaggctaagctaaggtcaaagaaagtggaggaaggctggcttgtcccgctggacttgacggcggagctgctgcaatctcgcgggctgggcccttgccccgggtggacccgagtgcctgcggggaggcgggtgtggctcccccgggaggtgacagctggcggggcccgtaaggagctggtctgctccggctcccctctcgtagccggcgccctgggaccagcgcgtgagcacgtctcggaggagtccgatgcgctgggcagggccgggtggtcacccccgcccagcttccaggggtgactgtgcctctgacgtcagacggtttttgggtcattccctggcacggggactttattttcataacagcatgaagtgccgtggaactggaataggcgtgtcctctccctcgaccctccccctccttgtccctctgctcacccctcgctcgttccctccctccggcgagggccgcctttataacaactgctcagagtgcgagggcgggatagctgtccaaggtctcccccagcactgaggagctcgcctgctgccctcttgcgcgcgggaagcagcaccaagttcacggccaacgccttggcactagggtccagaatggctacaacagtccctgatggttgccgcaatggcctgaaatccaagtactacagactttgtgataaggctgaagcttggggcatcgtcctagaaacggtggccacagccggggttgtgacctcggtggccttcatgctcactctcccgatcctcgtctgcaaggtgcaggactccaacaggcgaaaaatgctgcctactcagtttctcttcctcctgggtgtgttgggcatctttggcctcaccttcgccttcatcatcggactggacgggagcacagggcccacacgcttcttcctctttgggatcctcttttccatctgcttctcctgcctgctggctcatgctgtcagtctgaccaagctcgtccgggggaggaagcccctttccctgttggtgattctgggtctggccgtgggcttcagcctagtccaggatgttatcgctattgaatatattgtcctgaccatgaataggaccaacgtcaatgtcttttctgagctttccgctcctcgtcgcaatgaagactttgtcctcctgctcacctacgtcctcttcttgatggcgctgaccttcctcatgtcctccttcaccttctgtggttccttcacgggctggaagagacatggggcccacatctacctcacgatgctcctctccattgccatctgggtggcctggatcaccctgctcatgcttcctgactttgaccgcaggtgggatgacaccatcctcagctccgccttggctgccaatggctgggtgttcctgttggcttatgttagtcccgagttttggctgctcacaaagcaacgaaaccccatggattatcctgttgaggatgctttctgtaaacctcaactcgtgaagaagagctatggtgtggagaacagagcctactctcaagaggaaatcactcaaggttttgaagagacaggggacacgctctatgccccctattccacacattttcagctgcagaaccagcctccccaaaaggaattctccatcccacgggcccacgcttggccgagcccttacaaagactatgaagtaaagaaagagggcagctaactctgtcctgaagagtgggacaaatgcagccgggcggcagatctagcgggagctcaaagggatgtgggcgaaatcttgagtcttctgagaaaactgtacaagacactacgggaacagtttgcctccctcccagcctcaaccacaattcttccatgctggggctgatgtgggctagtaagactccagttcttagaggcgctgtagtatttttttttttttgtctcatcctttggatacttcttttaagtgggagtctcaggcaactcaagtttagacccttactctttttgtttgttttttgaaacaggatcttgctctgtcacccaggcttgagtgcagtggtgcgatcacagcccagtgcagcctcgaccacctgtgctcaagcaatcctcccatctccatctcccaaagtgctgggatgacaggcgtgagccacagctcccagcctaggcccttaatcttgctgttattttccatggactaaaggtctggtcatctgagctcacgctggctcacacagctctaggggcctgctcctctaactcacagtgggttttgtgaggctctgtggcccagagcagacctgcatatctgagcaaaaatagcaaaagcctctctcagcccactggcctgaatctacactggaagccaacttgctggcacccccgctccccaacccttcttgcctgggtaggagaggctaaagatcaccctaaatttactcatctctctagtgctgcctcacattgggcctcagcagctccccagcaccaattcacaggtcacccctctcttcttgcactgtccccaaacttgctgtcaattccgagatctaatctccccctacgctctgccaggaattctttcagacctcactagcacaagcccggttgctccttgtcaggagaatttgtagatcattctcacttcaaattcctggggctgatacttctctcatcttgcaccccaacctctgtaaatagatttaccgcatttacggctgcattctgtaagtgggcatggtctcctaatggaggagtgttcattgtataataagttattcacctgagtatgcaataaagatgtggtggccactctttcatggtggtggcagcagttaccagt

SEQ ID NO: 22352 - protein, 357 aa, Homo sapiens; identical to SEQ ID NO: 2929

SEQ ID NO: 22353 - DNA, 7378 bp, Homo sapiens
aatttcatctggcgcccccgttcaatcagcctgcattgtcgaggctttaggagaggcagttaggaaaggagagatactgatctctcagccccagggcagcactaatggtgcctgtctagactctgacaggtggagctgctgagctaactacggacctggtgggggaagttttccttggctttcacgtggctttggctggggagccctgagaaggtggctgcctcctttttctgaagcctggcttcccatacggcagtggctgggggagagtgatggagagaaaggctaagctaaggtcaaagaaagtggaggaaggctggcttgtcccgctggacttgacggcggagctgctgcaatctcgcgggctgggcccttgccccgggtggacccgagtgcctgcggggaggcgggtgtggctcccccgggaggtgacagctggcggggcccgtaaggagctggtctgctccggctcccctctcgtagccggcgccctgggaccagcgcgtgagcacgtctcggaggagtccgatgcgctgggcagggccgggtggtcacccccgcccagcttccaggggtgactgtgcctctgacgtcagacggtttttgggtcattccctggcacggggactttattttcataacagcatgaagtgccgtggaactggaataggcgtgtcctctccctcgaccctccccctccttgtccctctgctcacccctcgctcgttccctccctccggcgagggccgcctttataacaactgctcagagtgcgagggcgggatagctgtccaaggtctcccccagcactgaggagctcgcctgctgccctcttgcgcgcgggaagcagcaccaagttcacggccaacgccttggcactagggtccagaatggctacaacagtccctgatggttgccgcaatggcctgaaatccaagtactacagactttgtgataaggctgaagcttggggcatcgtcctagaaacggtggccacagccggggttgtgacctcggtggccttcatgctcactctcccgatcctcgtctgcaaggtgcaggactccaacaggcgaaaaatgctgcctactcagtttctcttcctcctgggtgtgttgggcatctttggcctcaccttcgccttcatcatcggactggacgggagcacagggcccacacgcttcttcctctttgggatcctcttttccatctgcttctcctgcctgctggctcatgctgtcagtctgaccaagctcgtccgggggaggaagcccctttccctgttggtgattctgggtctggccgtgggcttcagcctagtccaggatgttatcgctattgaatatattgtcctgaccatgaataggaccaacgtcaatgtcttttctgagctttccgctcctcgtcgcaatgaagactttgtcctcctgctcacctacgtcctcttcttgatggcgctgaccttcctcatgtcctccttcaccttctgtggttccttcacgggctggaagagacatggggcccacatctacctcacgatgctcctctccattgccatctgggtggcctggatcaccctgctcatgcttcctgactttgaccgcaggtgggatgacaccatcctcagctccgccttggctgccaatggctgggtgttcctgttggcttatgttagtcccgagttttggctgctcacaaagcaacgaaaccccatggattatcctgttgaggatgctttctgtaaacctcaactcgtgaagaagagctatggtgtggagaacagagcctactctcaagaggaaatcactcaaggttttgaagagacaggggacacgctctatgccccctattccacacattttcagctgcagaaccagcctccccaaaaggaattctccatcccacgggcccacgcttggccgagcccttacaaagactatgaagtaaagaaagagggcagctaactctgtcctgaagagtgggacaaatgcagccgggcggcagatctagcgggagctcaaagggatgtgggcgaaatcttgagtcttctgagaaaactgtacaagacactacgggaacagtttgcctccctcccagcctcaaccacaattcttccatgctggggctgatgtgggctagtaagactccagttcttagaggcgctgtagtatttttttttttttgtctcatcctttggatacttcttttaagtgggagtctcaggcaactcaagtttagacccttactctttttgtttgttttttgaaacaggatcttgctctgtcacccaggcttgagtgcagtggtgcgatcacagcccagtgcagcctcgaccacctgtgctcaagcaatcctcccatctccatctcccaaagtgctgggatgacaggcgtgagccacagctcccagcctaggcccttaatcttgctgttattttccatggactaaaggtctggtcatctgagctcacgctggctcacacagctctaggggcctgctcctctaactcacagtgggttttgtgaggctctgtggcccagagcagacctgcatatctgagcaaaaatagcaaaagcctctctcagcccactggcctgaatctacactggaagccaacttgctggcacccccgctccccaacccttcttgcctgggtaggagaggctaaagatcaccctaaatttactcatctctctagtgctgcctcacattgggcctcagcagctccccagcaccaattcacaggtcacccctctcttcttgcactgtccccaaacttgctgtcaattccgagatctaatctccccctacgctctgccaggaattctttcagacctcactagcacaagcccggttgctccttgtcaggagaatttgtagatcattctcacttcaaattcctggggctgatacttctctcatcttgcaccccaacctctgtaaatagatttaccgcatttacggctgcattctgtaagtgggcatggtctcctaatggaggagtgttcattgtataataagttattcacctgagtatgcaataaagatgtggtggccactctttcatggtggtggcagcagttaccagtaatgagcattagactctgggggatagaacacgggctgccctgagagcttcatgttggagctgaagttcaaggttcacttcctttgggtttgtacttgacccttcttcatgtgtctctcccgttccctctaaaacaagtgtgtttcccctcatttttgaggctgtcaatggtgtgagagccaggatcatcacggggcctgaggttttactccagaaaagcagaggagtggcaaccttggcttggggtttggcagcccaggaaaggcagggaggagagctcaaagccggtttcatgtttcacccaaggtctaattgtgggagaggacaaatccagatcccctgtttgacagaattagttcacaaatgtctcttggcaaaaacatgtgacacctaaccatgataattgacttaatccaagaaagagctctgtagggcagagcaataggaaatctctctttcgttatggaaaaaaaataatccctctacatagaaactgagtgacatgtaaaaatgtgtagctaagtcagggagttacttcctaagagcctgacgctctgcttttcatcaaaaggaaaaaccagcgtgaggcagaggcgagggaggtggaggtgagtggatgatgtgctgagttagggatgtttatatgccgcaaaggtttggttggtaggcttcgcgctaagattagcctggctttgtactgaaaagggggaaggacacatagtgacacagatccttctggtctttcccaggaggtgtgacctaatgaggtttgttgtgagaataaagcaatgtggtttcacatatattatctatcataggctagggactcaagaaatgcatattccccccccactttctttctctctttccttccttccttcctttcttctttctttctttctttctttctttctttctttctttctttctttctctctctctctctctctctctttctttctttctttttgagatagagtctcactctgtcatccaggctggagtgcagtggcatgatctcagctcactgcagcctccgcatcctgggttcaagcgattttcgtgcctcggccttctgagtagctgggattacaggcgtgcgtgcgccaccacgcctggctaatttttgtatttttagtacagacgaggtttcaccatgttgaccaggctggtcttgaactcctgatcttaagtgatctgcccgccttggcctcccaaagtgctgggattacgggtgggaatcaccatgcccagcctcctttccatcttttctttccttctctggtcttcatactaccaaccaagcaagggaggaggagtaaaaggtaaaatcacaaaatactctggatcggcatttttttttttttttttttttgagacagggtctagctctatggcccaggctggagtgcagtggcacaatcatagctcactgcagcctcaactttctgtgctcgagtgattctcctgcctcagtctcctgagtagctgggaccacagacgtgcactaccacacttggctaattttattttttcagagatcacatgtggtttgagggaggatagagaggacagggtgtcaagaacagcatttttaccaagttgatataaaaatgaaacaggatccaggcatgggtctttacactgatagttacagtaagttttaaaatctgagcagcaatttgaatcacttgttgaaaaacacacaaaatatattttttgtagaggtgggggtcttgctctgttgcccaggctggtcttgaactcgagattctcctgctttggcctcccacaagtgctgggattacaggcgtgagctactgcacccggcctgctttctttttagtgaaaaggatctgtgggagcttttattcccatggctgccttcctcaagtcaacctctttccccggaaatggcatcatctctggactgttgtttctccttcttccttctcctccttctcctcctcctcctcctccaccatgcccggctgatttttgtatttttagtagagacagggtttcactatatgggccaggcagatctcgaactccaaacctcgtgatccacctaccttggcctctgaaagtgctgggataccgtggcctctgaaagtgctgggattacaggcatgagccaccgcgcccggccccgttgtttcccttctaagaaacgcagtggtctctgaagcctgcaggggcaggccagccctgcactgaacgcctgttcttgccaggtggcagaaggttgctgctcatttgagcagtacctgtcacccctcctcccactgctgcggctgttaactcatcttcaggtctcacaccttctgcacataaataagctatttttaaaagttattatttttttactctttcttttctttggagagggtaccaaaggatagctgttctgtttaagtagggacctctcatggcctacaggctttgacatctgagaatcaaactggagaacattccgaagccgttcttataagtgtctccatctctacctgggctgaaatggaatgtgcaaatgtagcccagcctggtccttgggtgttgccagttgattgatgactgggagccaaagtggcatctcctttgacctaaacgggcgatgatgaaataaaactcaacagcctttctctcatcttgcattgtgagatgcgaaatagagcgtgtctctctgcctctcattttaggctgaggccgtccaaagcggccatgccccatgtttccactagatggcgctgacacttcaggcatcaaccctcatggcctctcagccttgcaaaggcagccacttaaagtcggtgtcctgtgtggggcaccaagctgagctgcagacacccagtaggcgcgaggcaaatgcgtcccattttaagaggcttgtatttatgagctctttgcttcctccctcccactaactttaaagaattgctctccatctcctttggcaaagttcctttgccctttgtcttatttttgtgaaaccctccaaggtatttccagtccatttgcatccaatctggcatctttacggagagcggtctcatatgctattgttgttaacgtggactagtatttatgtgttgagaacactggctgtttgtcaggaaaagtgtgccaaaacaaagagtacggccggccctggaaatgcatcagcaaaacccatttcccccgtgcactcattctgagcttccttccttcatttctgtcattactgctgagaactggactgtgcccagctgacctttcccttccttgccctcatcttgctgccagggtctgcaggtttgccaccgtcccggccccagtctgaaacatgggattatttcagaattggaggtggcagcttcagaaaaaaatccttctcgtgtgttgactgctgagatccaggaactgggaaatcaacccccagtttgtagattgctctctttggaaattctgtggcccaacctcgtggctgttttctggaattccttctatcggggcagacagtgctgtgcctttcttgacttcaggatgttccaaggatgctgctggatctgtgtgtgtgtgtgtgtgtgtgtgtgtgtgtgtgtgtgtgcgtgcgtgcgtgtatgtgcgcctgaccctgatttctgcaacctccagatttctttcttgacccttcaaagtggaacagtccagtgccaaaaattttagagtttgagaaggtcacagaaatcctctagttggtgcctccacagtcttcattttacagaggaactcagggctaatggagttaatgcaactagatcagggttttgggtctgtgttctttctaccgtcagcacctgtgtggtcaattctggacacttcccagagaagtctttgagtagagaatcctactcaaatttcactgtatattttaagcattcctctcctttccctttgcctcccctgttgccttttcttcccctgatttctcctctggtcatctcctctcccttctgcgtgtaagccatgggaaagggatgagggaggacagcttctggttaaacacaggtccctcttccacatcaaatgaacattggcttcctgggacagaaggccttcaaaggagggattgcaaagcaaggcaaagcgttctgtcttcattttccccatccccatgagacaagactgatggaaagggtggtggggcaacactgcttaatggatgccttttcacatcatttcagtttttagccctcatgactgtattttctaatcagagacaataacattttaaataaaacaacgacaaagaagtctgagtcaggtggt

SEQ ID NO: 22354 - protein, 357 aa, Homo sapiens; identical to SEQ ID NO: 2929

SEQ ID NO: 22355 - DNA, 1920 bp, Homo sapiens
gcttcccatacggcagtggctgggggagagtgatggagagaaaggctaagctaaggtcaaagaaagtggaggaaggctggcttgtcccgctggacttgacggcggagctgctgcaatctcgcgggctgggcccttgccccgggtggacccgagtgcctgcggggaggcgggtgtggctcccccgggaggtgacagctggcggggcccgtaaggagctggtctgctccggctcccctctcgtagccggcgccctgggaccagcgcgtgagcacgtctcggaggagtccgatgcgctgggcagggccgggtggtcacccccgcccagcttccaggggtgactgtgcctctgacgtcagacggtttttgggtcattccctggcacggggactttattttcataacagcatgaagtgccgtggaactggaataggcgtgtcctctccctcgaccctccccctccttgtccctctgctcacccctcgctcgttccctccctccggcgagggccgcctttataacaactgctcagagtgcgagggcgggatagctgtccaaggtctcccccagcactgaggagctcgcctgctgccctcttgcgcgcgggaagcagcaccaagttcacggccaacgccttggcactagggttttgaagagacaggggacacgctctatgccccctattccacacattttcagctgcagaaccagcctccccaaaaggaattctccatcccacgggcccacgcttggccgagcccttacaaagactatgaagtaaagaaagagggcagctaactctgtcctgaagagtgggacaaatgcagccgggcggcagatctagcgggagctcaaagggatgtgggcgaaatcttgagtcttctgagaaaactgtacaagacactacgggaacagtttgcctccctcccagcctcaaccacaattcttccatgctggggctgatgtgggctagtaagactccagttcttagaggcgctgtagtatttttttttttttgtctcatcctttggatacttcttttaagtgggagtctcaggcaactcaagtttagacccttactctttttgtttgttttttgaaacaggatcttgctctgtcacccaggcttgagtgcagtggtgcgatcacagcccagtgcagcctcgaccacctgtgctcaagcaatcctcccatctccatctcccaaagtgctgggatgacaggcgtgagccacagctcccagcctaggcccttaatcttgctgttattttccatggactaaaggtctggtcatctgagctcacgctggctcacacagctctaggggcctgctcctctaactcacagtgggttttgtgaggctctgtggcccagagcagacctgcatatctgagcaaaaatagcaaaagcctctctcagcccactggcctgaatctacactggaagccaacttgctggcacccccgctccccaacccttcttgcctgggtaggagaggctaaagatcaccctaaatttactcatctctctagtgctgcctcacattgggcctcagcagctccccagcaccaattcacaggtcacccctctcttcttgcactgtccccaaacttgctgtcaattccgagatctaatctccccctacgctctgccaggaattctttcagacctcactagcacaagcccggttgctccttgtcaggagaatttgtagatcattctcacttcaaattcctggggctgatacttctctcatcttgcaccccaacctctgtaaatagatttaccgcatttacggctgcattctgtaagtgggcatggtctcctaatggaggagtgttcattgtataataagttattcacctgagtatgcaataaagatgtggtggccactctttcatggtggtggcagcagttaccagt

SEQ ID NO: 22356 - protein, 35 aa, Homo sapiens
MPPIPHIFSCRTSLPKRNSPSHGPTLGRALTKTMK

SEQ ID NO: 22357 - DNA, 6209 bp, Homo sapiens
gcttcccatacggcagtggctgggggagagtgatggagagaaaggctaagctaaggtcaaagaaagtggaggaaggctggcttgtcccgctggacttgacggcggagctgctgcaatctcgcgggctgggcccttgccccgggtggacccgagtgcctgcggggaggcgggtgtggctcccccgggaggtgacagctggcggggcccgtaaggagctggtctgctccggctcccctctcgtagccggcgccctgggaccagcgcgtgagcacgtctcggaggagtccgatgcgctgggcagggccgggtggtcacccccgcccagcttccaggggtgactgtgcctctgacgtcagacggtttttgggtcattccctggcacggggactttattttcataacagcatgaagtgccgtggaactggaataggcgtgtcctctccctcgaccctccccctccttgtccctctgctcacccctcgctcgttccctccctccggcgagggccgcctttataacaactgctcagagtgcgagggcgggatagctgtccaaggtctcccccagcactgaggagctcgcctgctgccctcttgcgcgcgggaagcagcaccaagttcacggccaacgccttggcactagggttttgaagagacaggggacacgctctatgccccctattccacacattttcagctgcagaaccagcctccccaaaaggaattctccatcccacgggcccacgcttggccgagcccttacaaagactatgaagtaaagaaagagggcagctaactctgtcctgaagagtgggacaaatgcagccgggcggcagatctagcgggagctcaaagggatgtgggcgaaatcttgagtcttctgagaaaactgtacaagacactacgggaacagtttgcctccctcccagcctcaaccacaattcttccatgctggggctgatgtgggctagtaagactccagttcttagaggcgctgtagtatttttttttttttgtctcatcctttggatacttcttttaagtgggagtctcaggcaactcaagtttagacccttactctttttgtttgttttttgaaacaggatcttgctctgtcacccaggcttgagtgcagtggtgcgatcacagcccagtgcagcctcgaccacctgtgctcaagcaatcctcccatctccatctcccaaagtgctgggatgacaggcgtgagccacagctcccagcctaggcccttaatcttgctgttattttccatggactaaaggtctggtcatctgagctcacgctggctcacacagctctaggggcctgctcctctaactcacagtgggttttgtgaggctctgtggcccagagcagacctgcatatctgagcaaaaatagcaaaagcctctctcagcccactggcctgaatctacactggaagccaacttgctggcacccccgctccccaacccttcttgcctgggtaggagaggctaaagatcaccctaaatttactcatctctctagtgctgcctcacattgggcctcagcagctccccagcaccaattcacaggtcacccctctcttcttgcactgtccccaaacttgctgtcaattccgagatctaatctccccctacgctctgccaggaattctttcagacctcactagcacaagcccggttgctccttgtcaggagaatttgtagatcattctcacttcaaattcctggggctgatacttctctcatcttgcaccccaacctctgtaaatagatttaccgcatttacggctgcattctgtaagtgggcatggtctcctaatggaggagtgttcattgtataataagttattcacctgagtatgcaataaagatgtggtggccactctttcatggtggtggcagcagttaccagtaatgagcattagactctgggggatagaacacgggctgccctgagagcttcatgttggagctgaagttcaaggttcacttcctttgggtttgtacttgacccttcttcatgtgtctctcccgttccctctaaaacaagtgtgtttcccctcatttttgaggctgtcaatggtgtgagagccaggatcatcacggggcctgaggttttactccagaaaagcagaggagtggcaaccttggcttggggtttggcagcccaggaaaggcagggaggagagctcaaagccggtttcatgtttcacccaaggtctaattgtgggagaggacaaatccagatcccctgtttgacagaattagttcacaaatgtctcttggcaaaaacatgtgacacctaaccatgataattgacttaatccaagaaagagctctgtagggcagagcaataggaaatctctctttcgttatggaaaaaaaataatccctctacatagaaactgagtgacatgtaaaaatgtgtagctaagtcagggagttacttcctaagagcctgacgctctgcttttcatcaaaaggaaaaaccagcgtgaggcagaggcgagggaggtggaggtgagtggatgatgtgctgagttagggatgtttatatgccgcaaaggtttggttggtaggcttcgcgctaagattagcctggctttgtactgaaaagggggaaggacacatagtgacacagatccttctggtctttcccaggaggtgtgacctaatgaggtttgttgtgagaataaagcaatgtggtttcacatatattatctatcataggctagggactcaagaaatgcatattccccccccactttctttctctctttccttccttccttcctttcttctttctttctttctttctttctttctttctttctttctttctttctctctctctctctctctctctttctttctttctttttgagatagagtctcactctgtcatccaggctggagtgcagtggcatgatctcagctcactgcagcctccgcatcctgggttcaagcgattttcgtgcctcggccttctgagtagctgggattacaggcgtgcgtgcgccaccacgcctggctaatttttgtatttttagtacagacgaggtttcaccatgttgaccaggctggtcttgaactcctgatcttaagtgatctgcccgccttggcctcccaaagtgctgggattacgggtgggaatcaccatgcccagcctcctttccatcttttctttccttctctggtcttcatactaccaaccaagcaagggaggaggagtaaaaggtaaaatcacaaaatactctggatcggcatttttttttttttttttttttgagacagggtctagctctatggcccaggctggagtgcagtggcacaatcatagctcactgcagcctcaactttctgtgctcgagtgattctcctgcctcagtctcctgagtagctgggaccacagacgtgcactaccacacttggctaattttattttttcagagatcacatgtggtttgagggaggatagagaggacagggtgtcaagaacagcatttttaccaagttgatataaaaatgaaacaggatccaggcatgggtctttacactgatagttacagtaagttttaaaatctgagcagcaatttgaatcacttgttgaaaaacacacaaaatatattttttgtagaggtgggggtcttgctctgttgcccaggctggtcttgaactcgagattctcctgctttggcctcccacaagtgctgggattacaggcgtgagctactgcacccggcctgctttctttttagtgaaaaggatctgtgggagcttttattcccatggctgccttcctcaagtcaacctctttccccggaaatggcatcatctctggactgttgtttctccttcttccttctcctccttctcctcctcctcctcctccaccatgcccggctgatttttgtatttttagtagagacagggtttcactatatgggccaggcagatctcgaactccaaacctcgtgatccacctaccttggcctctgaaagtgctgggataccgtggcctctgaaagtgctgggattacaggcatgagccaccgcgcccggccccgttgtttcccttctaagaaacgcagtggtctctgaagcctgcaggggcaggccagccctgcactgaacgcctgttcttgccaggtggcagaaggttgctgctcatttgagcagtacctgtcacccctcctcccactgctgcggctgttaactcatcttcaggtctcacaccttctgcacataaataagctatttttaaaagttattatttttttactctttcttttctttggagagggtaccaaaggatagctgttctgtttaagtagggacctctcatggcctacaggctttgacatctgagaatcaaactggagaacattccgaagccgttcttataagtgtctccatctctacctgggctgaaatggaatgtgcaaatgtagcccagcctggtccttgggtgttgccagttgattgatgactgggagccaaagtggcatctcctttgacctaaacgggcgatgatgaaataaaactcaacagcctttctctcatcttgcattgtgagatgcgaaatagagcgtgtctctctgcctctcattttaggctgaggccgtccaaagcggccatgccccatgtttccactagatggcgctgacacttcaggcatcaaccctcatggcctctcagccttgcaaaggcagccacttaaagtcggtgtcctgtgtggggcaccaagctgagctgcagacacccagtaggcgcgaggcaaatgcgtcccattttaagaggcttgtatttatgagctctttgcttcctccctcccactaactttaaagaattgctctccatctcctttggcaaagttcctttgccctttgtcttatttttgtgaaaccctccaaggtatttccagtccatttgcatccaatctggcatctttacggagagcggtctcatatgctattgttgttaacgtggactagtatttatgtgttgagaacactggctgtttgtcaggaaaagtgtgccaaaacaaagagtacggccggccctggaaatgcatcagcaaaacccatttcccccgtgcactcattctgagcttccttccttcatttctgtcattactgctgagaactggactgtgcccagctgacctttcccttccttgccctcatcttgctgccagggtctgcaggtttgccaccgtcccggccccagtctgaaacatgggattatttcagaattggaggtggcagcttcagaaaaaaatccttctcgtgtgttgactgctgagatccaggaactgggaaatcaacccccagtttgtagattgctctctttggaaattctgtggcccaacctcgtggctgttttctggaattccttctatcggggcagacagtgctgtgcctttcttgacttcaggatgttccaaggatgctgctggatctgtgtgtgtgtgtgtgtgtgtgtgtgtgtgtgtgtgtgtgcgtgcgtgcgtgtatgtgcgcctgaccctgatttctgcaacctccagatttctttcttgacccttcaaagtggaacagtccagtgccaaaaattttagagtttgagaaggtcacagaaatcctctagttggtgcctccacagtcttcattttacagaggaactcagggctaatggagttaatgcaactagatcagggttttgggtctgtgttctttctaccgtcagcacctgtgtggtcaattctggacacttcccagagaagtctttgagtagagaatcctactcaaatttcactgtatattttaagcattcctctcctttccctttgcctcccctgttgccttttcttcccctgatttctcctctggtcatctcctctcccttctgcgtgtaagccatgggaaagggatgagggaggacagcttctggttaaacacaggtccctcttccacatcaaatgaacattggcttcctgggacagaaggccttcaaaggagggattgcaaagcaaggcaaagcgttctgtcttcattttccccatccccatgagacaagactgatggaaagggtggtggggcaacactgcttaatggatgccttttcacatcatttcagtttttagccctcatgactgtattttctaatcagagacaataacattttaaataaaacaacgacaaagaagtctgagtcaggtggt

SEQ ID NO: 22358 - protein, 35 aa, Homo sapiens; identical to SEQ ID NO: 22356

SEQ ID NO: 22359 - DNA, 821 bp, Homo sapiens
gtgtggacagcctacaccaagggaagagtcaggggagaaggaacacaagactccggaagcatgccagcgtataaaaccacttgggacagaactggagtcagagataccaatttgggaaggagaaggatctagtgacagaaacttgggagtgcccagtggacactttgcctcattggttcgtgcctcagcttccaatctggacatggagcacaataacagtgggcccactgctctccgaattcctgcgcgcacttgaagggagtgtctggtgcaggcatgcagggaggaagaatgactctgagcttgaccattcaacttcgaaactttaacatcaatggatcagcacacactggtgtacggtctgctatgcatgcagccctgtgctaggcaaaagaagtatcagaccaggaactgacagcctcactgcaacaggaagagaggcttcacacaataagcgtttcattcaaccaggctggacctgtgcttattgagttgaacatcactgagcacaaaatgcaagccagacaccataagagctgtaaggatgataaagatgtctttctaccctcgagagctctaagtgtggtcaggagagaaacacatgcaaagattatgctggctggaaggaaatgctggaatgaaggtggaaggtacatccagaatgttctgggggtgaggaatagcgaatgatgggttctgacttagaacatgaagggaaggtattaagaaagaggtgatattaagcatttattgagcatctctactttttttgtgtatgtgaccttgtttggaaatacaatatctcttcttgatgctggcaa

SEQ ID NO: 22360 - protein, 58 aa, Homo sapiens
MQARHHKSCKDDKDVFLPSRALSVVRRETHAKIMLAGRKCWNEGGRYIQNVLGVRNSE

SEQ ID NO: 22361 - DNA, 447 bp, Homo sapiens
tgtggacagcctacaccaagggaagagtcaggggagaaggaacacaagactccggaagcatgccagcgtataaaaccttctctctctgtgacctgtaatttgagggtgacaaaaaagaacttcccatgaaagaacaaacaaacatgacaccacctgggaccattgaagttggatttcccctggtaaggtctgatgttataccctttaatcatctttgttgggttctgccaagcctccccaaacttcccacacttctcattagtggatcagtgggtatccttgctagagactgaccgattgtgggtacaatggcacggttgttcttgctgaccacacatctgtttatacagtaccatgattgtttcttgagcaaacaaaagcaaagacagtggtaagttgtttccctactatcagctcatgacctaccataacacttaggacgtttca

SEQ ID NO: 22362 - protein, 55 aa, Homo sapiens
MKEQTNMTPPGTIEVGFPLVRSDVIPFNHLCWVLPSLPKLPTLLISGSVGILARD

SEQ ID NO: 22363 - DNA, 729 bp, Homo sapiens
ctacaccaagggaagagtcaggggagaaggaacacaagactccggaagcatgccagcgtataaaaccacactttgcctcattggttcgtgcctcagcttccaatctggacatggagcacaataacagtgggcccactgctctccgaattcctgcgcgcacttgaagggagtgtctggtgcaggcatgcagggaggaagaatgactctgagcttgaccattcaacttcgaaactttaacatcaatggatcagcacacactggtgtacggtctgctatgcatgcagccctgtgctaggcaaaagaagtatcagaccaggaactgacagcctcactgcaacaggaagagaggcttcacacaataagcgtttcattcaaccaggctggacctgtgcttattgagttgaacatcactgagcacaaaatgcaagccagacaccataagagctgtaaggatgataaagatgtctttctaccctcgagagctctaagtgtggtcaggagagaaacacatgcaaagattatgctggctggaaggaaatgctggaatgaaggtggaaggtacatccagaatgttctgggggtgaggaatagcgaatgatgggttctgacttagaacatgaagggaaggtattaagaaagaggtgatattaagcatttattgagcatctctactttttttgtgtatgtgaccttgtttggaaatacaatatctcttcttgatgctggcaa

SEQ ID NO: 22364 - protein, 58 aa, Homo sapiens; identical to SEQ ID NO: 22360

SEQ ID NO: 22365 - DNA, 804 bp, Homo sapiens
caggggagaaggaacacaagactccggaagcatgccagcgtataaaaccaactgcacaaacaagccagaaactgaaccctacccggaatcccctggtgtatgaagggagcctagctctggctgactctgcttgtgttcacagacactttgcctcattggttcgtgcctcagcttccaatctggacatggagcacaataacagtgggcccactgctctccgaattcctgcgcgcacttgaagggagtgtctggtgcaggcatgcagggaggaagaatgactctgagcttgaccattcaacttcgaaactttaacatcaatggatcagcacacactggtgtacggtctgctatgcatgcagccctgtgctaggcaaaagaagtatcagaccaggaactgacagcctcactgcaacaggaagagaggcttcacacaataagcgtttcattcaaccaggctggacctgtgcttattgagttgaacatcactgagcacaaaatgcaagccagacaccataagagctgtaaggatgataaagatgtctttctaccctcgagagctctaagtgtggtcaggagagaaacacatgcaaagattatgctggctggaaggaaatgctggaatgaaggtggaaggtacatccagaatgttctgggggtgaggaatagcgaatgatgggttctgacttagaacatgaagggaaggtattaagaaagaggtgatattaagcatttattgagcatctctactttttttgtgtatgtgaccttgtttggaaatacaatatctcttcttgatgctggcaa

SEQ ID NO: 22366 - protein, 58 aa, Homo sapiens; identical to SEQ ID NO: 22360

SEQ ID NO: 22367 - DNA, 1041 bp, Homo sapiens
accatgtacaaggactgcatcgagtccactggagactattttcttctctgtgacgccgaggggccatggggcatcattctggagtccctggccatacttggcatcgtggtcacaattctgctactcttagcatttctcttcctcatgcgaaagatccaagactgcagccagtggaatgtcctccccacccagctcctcttcctcctgagtgtcctggggctcttcggactcgcttttgccttcatcatcgagctcaatcaacaaactgcccccgtacgctactttctctttggggttctctttgctctctgtttctcatgcctcttagctcatgcctccaatctagtgaagctggttcggggttgtgtctccttctcctggacgacaattctgtgcattgctattggttgcagtctgttgcaaatcattattgccactgagtatgtgactctcatcatgaccagaggtatgatgtttgtgaatatgacaccctgccagctcaatgtggactttgttgtactcctggtctatgtcctcttcctgatggccctcacattcttcgtctccaaagccaccttctgtggcccgtgtgagaactggaagcagcatggaaggctcatctttatcactgtgctcttctccatcatcatctgggtggtgtggatctccatgctcctgagaggcaacccgcagttccagcgacagccccagtgggacgacccggtcgtctgcattgctctggtcaccaacgcatgggttttcctgctgctgtacatcgtccctgagctctgcattctctacagatcgtgtagacaggagtgccctttacaaggcaatgcctgccccgtcacagcctaccaacacagcttccaagtggagaaccaggagctctccagagcccgagacagtgatggagctgaggaggatgtagcattaacttcatatggtactcccattcagccgcagactgttgatcccacacaagagtgtttcatcccacaggctaaactaagcccccagcaagatgcaggaggagtataa

SEQ ID NO: 22368 - protein, 345 aa, Homo sapiens; identical to SEQ ID NO: 2931

SEQ ID NO: 22369 - DNA, 399 bp, Homo sapiens
gtacaatggcacggttgttcttgctgaccacacatctgtttatacagtaccatgattgtttcttgagcaaacaaaagcaaagacagtgtagagacggggtttcactatgttggccaagctggtctcagactcctgacctcgtgatctgcccgccttggcctcccaaagtgctgggattacaggattttcttcaccttatctcctctatgactcttcctgccttccctcatcattctagacctcgctgatcaccttccaccaggaactatacaagacttggggtctgttctgttcaaaattacagaaaccctattttctgcctattagttaacttatgaatacatattaagtaataatgaattgaaataaatgaataataaatgtctcaatttctgttat

SEQ ID NO: 22370 - protein, 80 aa, Homo sapiens
MARLFLLTTHLFIQYHDCFLSKQKQRQCRDGVSLCWPSWSQTPDLVICPPWPPKVLGLQDFLHLISSMTLPAFPHHSRPR

SEQ ID NO: 22371 - DNA, 836 bp, Homo sapiens
ttgttcttgctgaccacacatctgtttatacagtaccatgattgtttcttgagcaaacaaaagcaaagacagtgcaacgaaaacacaaaaagttttatcttctagtaagaactatgagaagtattttcaggaaagattgactctgcaattctgccacaaaactcagtgatgtgattatgcctcaccaacaagcaatggaaaacttttatgggaaaaagtgtgtagtatcaatttccaacttttggtcaactgaactgaaaagaatcaatggatgtatttatctgaacaggatttaatttgaatgcgcaactagccacagattacagctcaaaaaaagtgtatgtacttaaaaggaagcttatgtgaatttttttgagcctggtgaacattatgtgtgctgtacaatatataaaataacatcatcattacatattagaaataaaatgtgagaaatcagatgcctattaagacacaaaaattgatgtaaaactatgatattgggttttggataatagcccagatgtttcagaaaaggaattaatgagttttgacatatttccagataattaaaattagccactatttcccccaggttgttggggtccaagcatccttgttgccatggataatgtattttattccttaacaaagtggagtcaggtggcttgaatcaaaatatgacccagaaattattatgaaaatgtcacataagcaagttactttctttctcctaatgatcacacatctgagtctttactcagaattaggatataatggctcttcctctcgctttttgtaaaccttgaaggattttaaatagtaaatgttttgaaaag

SEQ ID NO: 22372 - protein, 39 aa, Homo sapiens
MPHQQAMENFYGKKCVVSISNFWSTELKRINGCIYLNRI

SEQ ID NO: 22373 - DNA, 822 bp, Homo sapiens
ccagcactacagcctaagcttccagagtggacacggagaagggcatcagaaaaccattctggtgaggtccacacccataagtcaccatgtacaaggactgcatcgagtccactggagactattttcttctctgtgacgccgaggggccatggggcatcattctggagtccctggccatacttggcatcgtggtcacaattctgctactcttagcatttctcttcctcatgcgaaagatccaagactgcagccagtggaatgtcctccccacccagctcctcttcctcctgagtgtcctggggctcttcggactcgcttttgccttcatcatcgagctcaatcaacaaactgcccccgtacgctactttctctttggggttctctttgctctctgtttctcatgcctcttagctcatgcctccaatctagtgaagctggttcggggttgtgtctccttctcctggacgacaattctgtgcattgctattggttgcagtctgttgcaaatcattattgccactgagtatgtgactctcatcatgaccagaggtatgatgtttgtgaatatgacaccctgccagctcaatgtggactttgttgtactcctggtctatgtcctcttcctgatggccctcacattcttcgtctccaaagccaccttctgtggcccgtgtgagaactggaagcagcatggaaggctcatctttatcactgtgctcttctccatcatcatctgggtggtgtggatctccatgctcctgagaggcaacccgcagttccagcgacagccccagtgggacgacccggtcgtctgcattgctc

SEQ ID NO: 22374 - protein, 244 aa, Homo sapiens
MYKDCIESTGDYFLLCDAEGPWGIILESLAILGIVVTILLLLAFLFLMRKIQDCSQWNVLPTQLLFLLSVLGLFGLAFAFIIELNQQTAPVRYFLFGVLFALCFSCLLAHASNLVKLVRGCVSFSWTTILCIAIGCSLLQIIIATEYVTLIMTRGMMFVNMTPCQLNVDFVVLLVYVLFLMALTFFVSKATFCGPCENWKQHGRLIFITVLFSIIIWVVWISMLLRGNPQFQRQPQWDDPVVCI

SEQ ID NO: 22375 - DNA, 6238 bp, Homo sapiens
tttgaatttgcatctcttcaagacacaagattaaaacaaaatttacgctaaattggattttaaattatcttccgttcatttatccttcgtctttcttatgtggatatgcaagcgagaagaagggactggacattcccaacatgctcactcccttaatctgtccgtctagaggtttggcttctacaaaccaagggagtcgacgagttgaagatgaagcccagagcggagtgctgttctcccaagttctggttggtgttggccgtcctggccgtgtcaggcagcagagctcgttctcagaagagcccccccagcattggcattgctgtcatcctcgtgggcacttccgacgaggtggccatcaaggatgcccacgagaaagatgatttccaccatctctccgtggtaccccgggtggaactggtagccatgaatgagaccgacccaaagagcatcatcacccgcatctgtgatctcatgtctgaccggaagatccagggggtggtgtttgctgatgacacagaccaggaagccatcgcccagatcctcgatttcatttcagcacagactctcacccccatcctgggcatccacgggggctcctctatgataatggcagataaggatgaatcctccatgttcttccagtttggcccatcaattgaacagcaagcttccgtaatgctcaacatcatggaagaatatgactggtacatcttttctatcgtcaccacctatttccctggctaccaggactttgtaaacaagatccgcagcaccattgagaatagctttgtgggctgggagctagaggaggtcctcctactggacatgtccctggacgatggagattctaagatccagaatcagctcaagaaacttcaaagccccatcattcttctttactgtaccaaggaagaagccacctacatctttgaagtggccaactcagtagggctgactggctatggctacacgtggatcgtgcccagtctggtggcaggggatacagacacagtgcctgcggagttccccactgggctcatctctgtatcatatgatgaatgggactatggcctccccgccagagtgagagatggaattgccataatcaccactgctgcttctgacatgctgtctgagcacagcttcatccctgagcccaaaagcagttgttacaacacccacgagaagagaatctaccagtccaatatgctaaataggtatctgatcaatgtcacttttgaggggaggaatttgtccttcagtgaagatggctaccagatgcacccgaaactggtgataattcttctgaacaaggagaggaagtgggaaagggtggggaagtggaaagacaagtccctgcagatgaagtactatgtgtggccccgaatgtgtccagagactgaagagcaggaggatgaccatctgagcattgtgaccctggaggaggcaccatttgtcattgtggaaagtgtggaccctctgagtggaacctgcatgaggaacacagtcccctgccaaaaacgcatagtcactgagaataaaacagacgaggagccgggttacatcaaaaaatgctgcaaggggttctgtattgacatccttaagaaaatttctaaatctgtgaagttcacctatgacctttacctggttaccaatggcaagcatgggaagaaaatcaatggaacctggaatggtatgattggagaggtggtcatgaagagggcctacatggcagtgggctcactcaccatcaatgaggaacgatcggaggtggtcgacttctctgtgcccttcatagagacaggcatcagtgtcatggtgtcacgcagcaatgggactgtctcaccttctgccttcttagagccattcagcgctgacgtatgggtgatgatgtttgtgatgctgctcatcgtctcagccgtggctgtctttgtctttgagtacttcagccctgtgggttataacaggtgcctcgctgatggcagagagcctggtggaccctctttcaccatcggcaaagctatttggttgctctggggtctggtgtttaacaactccgtacctgtgcagaacccaaaggggaccacctccaagatcatggtgtcagtgtgggccttctttgctgtcatcttcctggccagctacactgccaacttagctgccttcatgatccaagaggaatatgtggaccaggtttctggcctgagcgacaaaaagttccagagacctaatgacttctcaccccctttccgctttgggaccgtgcccaacggcagcacagagagaaatattcgcaataactatgcagaaatgcatgcctacatgggaaagttcaaccagaggggtgtagatgatgcattgctctccctgaaaacagggaaactggatgccttcatctatgatgcagcagtgctgaactatatggcaggcagagatgaaggctgcaagctggtgaccattggcagtgggaaggtctttgcttccactggctatggcattgccatccaaaaagattctgggtggaagcgccaggtggaccttgctatcctgcagctctttggagatggggagatggaagaactggaagctctctggctcactggcatttgtcacaatgagaagaatgaggtcatgagcagccagctggacattgacaacatggcaggggtcttctacatgttgggggcggccatggctctcagcctcatcaccttcatctgcgaacaccttttctattggcagttccgacattgctttatgggtgtctgttctggcaagcctggcatggtcttctccatcagcagaggtatctacagctgcatccatggggtggcgatcgaggagcgccagtctgtaatgaactcccccaccgcaaccatgaacaacacacactccaacatcctgcgcctgctgcgcacggccaagaacatggctaacctgtctggtgtgaatggctcaccgcagagcgccctggacttcatccgacgggagtcatccgtctatgacatctcagagcaccgccgcagcttcacgcattctgactgcaaatcctacaacaacccgccctgtgaggagaacctcttcagtgactacatcagtgaggtagagagaacgttcgggaacctgcagctgaaggacagcaacgtgtaccaagatcactaccaccatcaccaccggccccatagtattggcagtgccagctccatcgatgggctctacgactgtgacaacccacccttcaccacccagtccaggtccatcagcaagaagcccctggacatcggcctcccctcctccaagcacagccagctcagtgacctgtacggcaaattctccttcaagagcgaccgctacagtggccacgacgacttgatccgctccgatgtctctgacatctcaacccacaccgtcacctatgggaacatcgagggcaatgccgccaagaggcgtaagcagcaatataaggacagcctgaagaagcggcctgcctcggccaagtcccgcagggagtttgacgagatcgagctggcctaccgtcgccgaccgccccgctcccctgaccacaagcgctacttcagggacaaggaagggctacgggacttctacctggaccagttccgaacaaaggagaactcaccccactgggagcacgtagacctgaccgacatctacaaggagcggagtgatgactttaagcgcgactccgtcagcggaggagggccctgtaccaacaggtctcacatcaagcacgggacgggcgacaaacacggcgtggtcagcggggtacctgcaccttgggagaagaacctgaccaacgtggagtgggaggaccggtccgggggcaacttctgccgcagctgtccctccaagctgcacaactactccacgacggtgacgggtcagaactcgggcaggcaggcgtgcatccggtgtgaggcttgcaagaaagcaggcaacctgtatgacatcagtgaggacaactccctgcaggaactggaccagccggctgccccagtggcggtgacgtcaaacgcctccaccactaagtaccctcagagcccgactaattccaaggcccagaagaagaaccggaacaaactgcgccggcagcactcctacgacaccttcgtggacctgcagaaggaagaagccgccctggccccgcgcagcgtaagcctgaaagacaagggccgattcatggatgggagcccctacgcccacatgtttgagatgtcagctggcgagagcacctttgccaacaacaagtcctcagtgcccactgccggacatcaccaccacaacaaccccggcggcgggtacatgctcagcaagtcgctctaccctgaccgggtcacgcaaaaccctttcatccccacttttggggacgaccagtgcttgctccatggcagcaaatcctacttcttcaggcagcccacggtggcgggggcgtcgaaagccaggccggacttccgggcccttgtcaccaacaagccggtggtctcggcccttcatggggccgtgccagcccgtttccagaaggacatctgtatagggaaccagtccaacccctgtgtgcctaacaacaaaaaccccagggctttcaatggctccagcaatgggcatgtttatgagaaactttctagtattgagtctgatgtctgagtgagggaacagagaggttaaggtgggtacgggagggtaaggctgtgggtcgcgtgatgcgcatgtcacggagggtgacgggggtgaacttggttcccatttgctcctttcttgttttaatttatttatgggatcctggagttctggttcctactgggggcaaccctggtgaccagcaccatctctcctccttttcacagttctctccttcttccccccgctgtcagccattcctgttcccatgagatgatgccatgggccctctcagcaggggagggtagagcggagaaaggaagggctgcatgcgggcttcctcctggtgtggaagagctccttgatatcctctttgagtgaagctgggagaaccaaaaagaggctatgtgagcacaaaggtagcttttcccaaactgatcttttcatttaggtgaggaagcaaaagcatctatgtgagaccatttagcacactgcttgtgaaaggaaagaggctctggctaaattcatgctgcttagatgacatctgtctaggaatcatgtgccaagcagaggttgggaggccatttgtgtttatatataagccaaaaaatgcttgcttcaaccccatgagactcgatagtggtggtgaacagaacaaaaggtcattggtggcagagtggattcttgaacaaactggaaagtacgttatgatagtgtcccacggtgccttggggacaagagcaggtggattgtgcgtgcatgtgtgttcatgcacacttgcacccatgtgtagtcaggtgcctcaagagaaggcaaccttgactctttctattgtttctttcaatatccccaagcagtgtgattgtttggcttatatacagacagagatggccatgtattacctgaattttggctgtgtctcccttcatccttctggaataaggagaatgaaaattcttgataaagaagattctgtggtctaaacaaaaaaaggcggtgagcaatcctgcaagaacaaggtacataaacaagtcctcagtggttggcaattgtttcaaccagtttgaaccaagaactttccaggaaggctaaagggaaaccgaattttcacagccatgattcttttgcccacacttgggagcaaaagattctacaaagctcttttgagcatttagactctcgactggccaaggtttggggaagaacgaagccacctttgaagaagtaaggagtcgtgtatggtagggtaagtgagagagggggatgtttccaatgctttgatcccttcttacttaacctgaagctagacgagcaggcttcttccccccaaaactgattacaactgctacagagcagacagttaagagaaatgagcttgacctttaagagaaatgagctgcactccatgagtgcagctctggaggtacgaaaagaggggaagagacttggaaatgggagacgggggcagagagggaccctccaccacctctttgggcctggctccctgggaatgtgacttgagcccagagtgaacactcttggtagaagcccttctaccttcctgcaacaccttgtttccctctcagattgtaccattgag

SEQ ID NO: 22376 - protein, 1484 aa, Homo sapiens [sequence omitted]

SEQ ID NO: 22377 - DNA, 661 bp, Homo sapiens
actttcactttaataaatcttgccactgcacactctttgggtctgtgtgtttctctaatcgagctgtaacactcatcactgcagtccacagcttcatttcttgaagcctgtgagaccacgaacccttcaatcgagaaaaaccttcgataaggagaagacttctcatctcatttctggggtctggtccgggatttctccaaagcgaatagaatccatgaagctgcaaatggttctacaaatggagccccaagtgaccaccactagcacctactatcaagcacccctagacccacccaccaacctgttctcacaccacgacaccaaagactcccctcctgaggaaacctcaactgcagtgccccttctaccccccagttcagcaggaagtagctagaacaatcgtcatccaacttcccaacagcacttgggctttcctgttgaaaggggggactgagggactaagtggctaaattggctggacttcctgggtcaatagggacttccctaaagtgactttcccctaagccaaaatgagtcatagctgcaagctaagagattaaaacttcaaccaatcaaaggggattttcccctaagccaaaattagtcatagctgcaagctaaagggattgaaacttcaaccaatcaaaggggactttcccct

SEQ ID NO: 22378 - protein, 59 aa, Homo sapiens
MKLQMVLQMEPQVTTTSTYYQAPLDPPTNLFSHHDTKDSPPEETSTAVPLLPPSSAGSS

SEQ ID NO: 22379 - DNA, 358 bp, Homo sapiens
gcctcctgcgtggaaaagagaaggaagcccgaggtggtggcgctgcgtctctcagttgcagtgtgaggtatgagacaccacacctagccctgaagctgctcttggttgggggtcatcccacacctaagaaagaaagatgatggctctaaagaagatgaaaaagtcattggtgtcaatcaactctaggctccaactcattatgaaaggcagaaagtaggctgggcaccgtggctcacgcctgtaatcccagcactttgggaggccgaggcaggtggatcatgaggtcaagagatcgaaaccatcctggccaatgtggtgaaacaccatctccactaaaaatacaaaaataagctgggcg

SEQ ID NO: 22380 - protein, 45 aa, Homo sapiens
LLRGKEKEARGGGAASLSCSVRYETPHLALKLLLVGGHPTPKKER

SEQ ID NO: 22381 - DNA, 3552 bp, Homo sapiens
agcgggtttgtttttgaatctgcggaggcggcggcggtggcagcggcggcgcggcgactgaagcgcgcgaaaagctgaggcggcaacgtcggggacggctgcgcgggacggctctgtaggaaggaacttggttccccctccctcagcttccgccccaaaagattcagaatggacagtttagaagaacctcagaaaaaagtctttaaggctcgaaaaacgatgagagtgagtgatcgtcagcaacttgaagcagtgtacaaggtcaaagaagaactgttgaaaactgatgtcaagctgttaaatggcaaccatgaaaatggagatttggacccaacctcacctttggaaaacatggattacattaaagacaaggaagaggtgaatggcattgaagagatttgttttgatcctgaaggaagtaaagcagaatggaaggaaacaccctgtatcctaagtgttaatgtaaaaaacaagcaggatgatgatttaaattgtgaacctttgtctccccataatataactccagaaccagtctctaaactgcctgctgaaccagtttctggtgatccagcccctggtgatctggatgccggagatccagcctccggagtactggcctctggtgattccacctctggtgatcccacctctagcgagccctcctctagtgatgctgcctctggtgatgcaacctctggtgatgccccttctggtgatgtgtcccctggtgatgccacctctggtgatgccactgctgatgatctctcctctggtgatcccacctctagtgatcccatcccaggtgaaccggtccctgttgaacccatttctggtgattgtgccgctgatgatatagcctctagtgaaataacttctgttgatctggcttctggagcaccagcttccactgatccagcctctgatgatctggcctctggtgatctatcctctagtgaactggcctctgatgatctggccactggtgaactggcctctgatgagctgacttctgaatcaacctttgatcgtacctttgaaccaaagtctgtaccagtttgtgaaccagttcctgaaattgacaatatagaaccaagtagcaataaagatgatgattttcttgaaaaaaatggagctgatgaaaaattagagcaaattcagagtaaagactcattggatgagaaaaataaagctgataataatattgatgctaatgaagaaactctagaaacagatgatacaactatttgttcagatcgacctcctgaaaatgaaaagaaggtagaggaagatattatcacagagcttgctcttggagaagatgctatatctagcagtatggaaattgaccaaggtgaaaagaatgaagatgaaacttctgcagatcttgtagaaacgattaatgaaaatgttattgaagataacaaaagtgagaatatcttagaaaatacagactctatggagacagatgaaatcattcctattttggaaaagcttgcaccttctgaggatgaacttacttgcttttctaaaacatctctccttccaatcgatgagacaaatccagatttggaagagaaaatggaaagttcttttggttcaccatctaaacaagaaagtagtgagagtttgccaaaagaagcctttctggtcctctctgatgaagaggatatttcgggtgaaaaagatgagtctgaagttatatcgcaaaatgaaacgtgctctccagcagaagtagaaagtaatgaaaaggacaacaaacctgaggaagaagagcaagtaatacatgaagatgatgaaagaccttctgagaaaaatgaattttctagacgaaaacgttctaaatcagaagacatggacaatgtacagtctaaacgtcgtcgatatatggaagaagaatatgaggcagaatttcaagtaaagattacagccaaaggagacattaaccagaaacttcaaaaggttatacagtggttgctggaagaaaaattgtgtgcgctgcagtgtgctgtatttgataagactttggcagaattgaaaacacgagtggaaaagattgaatgtaacaagaggcataaaacagttctcactgaactacaggccaagatagccaggttaaccaaacgctttgaagcagccaaagaagatcttaagaaaagacatgaacatccacccaacccaccagtatcaccaggaaaaactgtaaatgatgtcaacagcaataataacatgtcttacagaaatgcaggcacagtgagacagatgctggagtccaaaagaaatgtaagcgagagtgcaccaccatcctttcaaactcctgtgaatacagtatcttcaaccaatcttgtcactcctccagcagttgtcagtagtcaacctaaattgcagactccagtgacttcgggttccctcacagcaacgtcagttcttcctgcacccaatacagctactgtagttgctactactcaggtgcctagtggaaatccccagcctacaatctctttacagcctttgccagtgattttgcatgtacctgttgcagtatcctcccagcctcagcttctacagagccatccagggactttggtgactaatcaaccatctggcaatgttgaattcatttctgtgcaaagcccacctacagtgagtggtcttaccaaaaatccagtatccttgccatccttgccaaatcccactaaaccaaacaacgttccttctgtgcccagtcctagtattcaaaggaaccctactgccagtgctgcaccattgggaacaacacttgctgtgcaggctgttccaacagcacactctattgtacaagccacaaggacttctttacccacagtgggcccatcaggactctatagtccatcaactaatcgaggtcctatacagatgaaaattccaatttctgcatttagtacttcgtctgctgcagaacagaacagcaataccaccccaagaattgaaaaccagacaaacaaaacaatagatgcttctgtcagtaagaaagcagctgatagcacatcacagtgtggaaaagccactggcagtgattcaagtggtgtcattgatctcacaatggatgatgaagagagtggagcttcacaaggtacttcaatagtaattgtactaagcaacgttttgataccattttttttgtcttaatacggtacagtattctacaaagacagatgtttatggcattatgcttggtttatttgtgttctttttggaatggaagttttttagattagaattttaaaatttggccaggtgcagtgtctcacacctgtaatcccagtgctttgggaggccaaggcaggaggatcgaggcaagaggtcaggagtttgagaccagcccgggcaatgcggtgaaaccccgtctctataaaaaatttaaaaattagctgggtgtgatggcatgtgtctgtggtcccagctgcatgggaggctgaggcaggaggatagcttgagcctgggaggttgaggctgccgtgagctgtgtttatgccactgcattccatcctgggtgacagaatgaggccctgtctc

SEQ ID NO: 22382 - protein, 998 aa, Homo sapiens
MDSLEEPQKKVFKARKTMRVSDRQQLEAVYKVKEELLKTDVKLLNGNHENGDLDPTSPLENMDYIKDKEEVNGIEEICFDPEGSKAEWKETPCILSVNVKNKQDDDLNCEPLSPHNITPEPVSKLPAEPVSGDPAPGDLDAGDPASGVLASGDSTSGDPTSSEPSSSDAASGDATSGDAPSGDVSPGDATSGDATADDLSSGDPTSSDPIPGEPVPVEPISGDCAADDIASSEITSVDLASGAPASTDPASDDLASGDLSSSELASDDLATGELASDELTSESTFDRTFEPKSVPVCEPVPEIDNIEPSSNKDDDFLEKNGADEKLEQIQSKDSLDEKNKADNNIDANEETLETDDTTICSDRPPENEKKVEEDIITELALGEDAISSSMEIDQGEKNEDETSADLVETINENVIEDNKSENILENTDSMETDEIIPILEKLAPSEDELTCFSKTSLLPIDETNPDLEEKMESSFGSPSKQESSESLPKEAFLVLSDEEDISGEKDESEVISQNETCSPAEVESNEKDNKPEEEEQVIHEDDERPSEKNEFSRRKRSKSEDMDNVQSKRRRYMEEEYEAEFQVKITAKGDINQKLQKVIQWLLEEKLCALQCAVFDKTLAELKTRVEKIECNKRHKTVLTELQAKIARLTKRFEAAKEDLKKRHEHPPNPPVSPGKTVNDVNSNNNMSYRNAGTVRQMLESKRNVSESAPPSFQTPVNTVSSTNLVTPPAVVSSQPKLQTPVTSGSLTATSVLPAPNTATVVATTQVPSGNPQPTISLQPLPVILHVPVAVSSQPQLLQSHPGTLVTNQPSGNVEFISVQSPPTVSGLTKNPVSLPSLPNPTKPNNVPSVPSPSIQRNPTASAAPLGTTLAVQAVPTAHSIVQATRTSLPTVGPSGLYSPSTNRGPIQMKIPISAFSTSSAAEQNSNTTPRIENQTNKTIDASVSKKAADSTSQCGKATGSDSSGVIDLTMDDEESGASQGTSIVIVLSNVLIPFFLS

SEQ ID NO: 22383 - DNA, 4353 bp, Homo sapiens
agcgggtttgtttttgaatctgcggaggcggcggcggtggcagcggcggcgcggcgactgaagcgcgcgaaaagctgaggcggcaacgtcggggacggctgcgcgggacggctctgtaggaaggaacttggttccccctccctcagcttccgccccaaaagattcagaatggacagtttagaagaacctcagaaaaaagtctttaaggctcgaaaaacgatgagagtgagtgatcgtcagcaacttgaagcagtgtacaaggtcaaagaagaactgttgaaaactgatgtcaagctgttaaatggcaaccatgaaaatggagatttggacccaacctcacctttggaaaacatggattacattaaagacaaggaagaggtgaatggcattgaagagatttgttttgatcctgaaggaagtaaagcagaatggaaggaaacaccctgtatcctaagtgttaatgtaaaaaacaagcaggatgatgatttaaattgtgaacctttgtctccccataatataactccagaaccagtctctaaactgcctgctgaaccagtttctggtgatccagcccctggtgatctggatgccggagatccagcctccggagtactggcctctggtgattccacctctggtgatcccacctctagcgagccctcctctagtgatgctgcctctggtgatgcaacctctggtgatgccccttctggtgatgtgtcccctggtgatgccacctctggtgatgccactgctgatgatctctcctctggtgatcccacctctagtgatcccatcccaggtgaaccggtccctgttgaacccatttctggtgattgtgccgctgatgatatagcctctagtgaaataacttctgttgatctggcttctggagcaccagcttccactgatccagcctctgatgatctggcctctggtgatctatcctctagtgaactggcctctgatgatctggccactggtgaactggcctctgatgagctgacttctgaatcaacctttgatcgtacctttgaaccaaagtctgtaccagtttgtgaaccagttcctgaaattgacaatatagaaccaagtagcaataaagatgatgattttcttgaaaaaaatggagctgatgaaaaattagagcaaattcagagtaaagactcattggatgagaaaaataaagctgataataatattgatgctaatgaagaaactctagaaacagatgatacaactatttgttcagatcgacctcctgaaaatgaaaagaaggtagaggaagatattatcacagagcttgctcttggagaagatgctatatctagcagtatggaaattgaccaaggtgaaaagaatgaagatgaaacttctgcagatcttgtagaaacgattaatgaaaatgttattgaagataacaaaagtgagaatatcttagaaaatacagactctatggagacagatgaaatcattcctattttggaaaagcttgcaccttctgaggatgaacttacttgcttttctaaaacatctctccttccaatcgatgagacaaatccagatttggaagagaaaatggaaagttcttttggttcaccatctaaacaagaaagtagtgagagtttgccaaaagaagcctttctggtcctctctgatgaagaggatatttcgggtgaaaaagatgagtctgaagttatatcgcaaaatgaaacgtgctctccagcagaagtagaaagtaatgaaaaggacaacaaacctgaggaagaagagcaagtaatacatgaagatgatgaaagaccttctgagaaaaatgaattttctagacgaaaacgttctaaatcagaagacatggacaatgtacagtctaaacgtcgtcgatatatggaagaagaatatgaggcagaatttcaagtaaagattacagccaaaggagacattaaccagaaacttcaaaaggttatacagtggttgctggaagaaaaattgtgtgcgctgcagtgtgctgtatttgataagactttggcagaattgaaaacacgagtggaaaagattgaatgtaacaagaggcataaaacagttctcactgaactacaggccaagatagccaggttaaccaaacgctttgaagcagccaaagaagatcttaagaaaagacatgaacatccacccaacccaccagtatcaccaggaaaaactgtaaatgatgtcaacagcaataataacatgtcttacagaaatgcaggcacagtgagacagatgctggagtccaaaagaaatgtaagcgagagtgcaccaccatcctttcaaactcctgtgaatacagtatcttcaaccaatcttgtcactcctccagcagttgtcagtagtcaacctaaattgcagactccagtgacttcgggttccctcacagcaacgtcagttcttcctgcacccaatacagctactgtagttgctactactcaggtgcctagtggaaatccccagcctacaatctctttacagcctttgccagtgattttgcatgtacctgttgcagtatcctcccagcctcagcttctacagagccatccagggactttggtgactaatcaaccatctggcaatgttgaattcatttctgtgcaaagcccacctacagtgagtggtcttaccaaaaatccagtatccttgccatccttgccaaatcccactaaaccaaacaacgttccttctgtgcccagtcctagtattcaaaggaaccctactgccagtgctgcaccattgggaacaacacttgctgtgcaggctgttccaacagcacactctattgtacaagccacaaggacttctttacccacagtgggcccatcaggactctatagtccatcaactaatcgaggtcctatacagatgaaaattccaatttctgcatttagtacttcgtctgctgcagaacagaacagcaataccaccccaagaattgaaaaccagacaaacaaaacaatagatgcttctgtcagtaagaaagcagctgatagcacatcacagtgtggaaaagccactggcagtgattcaagtggtgtcattgatctcacaatggatgatgaagagagtggagcttcacaagaccccaaaaaactaaatcacactcctgtatcaaccatgagttcttctcagcctgtgtcacgaccattgcaacccatacaaccagcaccgcctcttcaaccatctggggtgccaacaagtggaccatctcagaccaccatacacttactacctacagctccaactaccgtgaatgtaacacatcgtccagtaactcaggtgaccacaagactccctgtaccaagagctcctgcaaaccaccaggtggtttatacaactcttcctgcaccaccagctcaggctcccttgcgaggaactgttatgcaggctcctgctgttcggcaggtcaatccccaaaatagtaagagatttttcttgtatatggccccaagatacatgtagttctcttcagcatttagttggaatggcatataataatgttaaattttgcaaaaatttcttataatgtcatattaaaagtattgttataagttcaagagatctgtactacaacatagaaactatagtatagttaaaatcaatgtagtatattcttgaaaatagctgatagagcagattttaagtattgtcaccacacacaaaaaaggtaagtatgtgagatcatgcatatgtcagctagatttagccattctgcagtgtatgcatatttcaaacatgttgtataccataaatatatataatttttgtcaattaaaaaatagttttcaaaaaagaaatggcagtataaccaaaactaatctattattatttttcttcccttaggagagttaaacagagaaaattgttgatgtatactagttgatttgtgctctgagtgttgtctttaatttaactttatttatggcctgtattagtatagtacacaatttgatattggtatattctctactctattaagaaacaccttacctagttagagtgggaatggtcaattgtgatttaccccagatgatggaaatcatggtaaaggatagccttcaatgagagtcttaaagatatggaaagtggctgagaaaagaagggaaaatgttaaagaaagcttgtagtttcttgtatatatcatatattagttacatacatatgttacatgcatgttacatatgtagatgacattttaaaattatatattaaccacatgtatataagcagtagtagaatatatcacataaacacaagcttatataaaaggtatatttaaactttaaagtaaagaaaaataataaaatgaactacgtatgaactctt

SEQ ID NO: 22384 - protein, 1106 aa, Homo sapiens
MDSLEEPQKKVFKARKTMRVSDRQQLEAVYKVKEELLKTDVKLLNGNHENGDLDPTSPLENMDYIKDKEEVNGIEEICFDPEGSKAEWKETPCILSVNVKNKQDDDLNCEPLSPHNITPEPVSKLPAEPVSGDPAPGDLDAGDPASGVLASGDSTSGDPTSSEPSSSDAASGDATSGDAPSGDVSPGDATSGDATADDLSSGDPTSSDPIPGEPVPVEPISGDCAADDIASSEITSVDLASGAPASTDPASDDLASGDLSSSELASDDLATGELASDELTSESTFDRTFEPKSVPVCEPVPEIDNIEPSSNKDDDFLEKNGADEKLEQIQSKDSLDEKNKADNNIDANEETLETDDTTICSDRPPENEKKVEEDIITELALGEDAISSSMEIDQGEKNEDETSADLVETINENVIEDNKSENILENTDSMETDEIIPILEKLAPSEDELTCFSKTSLLPIDETNPDLEEKMESSFGSPSKQESSESLPKEAFLVLSDEEDISGEKDESEVISQNETCSPAEVESNEKDNKPEEEEQVIHEDDERPSEKNEFSRRKRSKSEDMDNVQSKRRRYMEEEYEAEFQVKITAKGDINQKLQKVIQWLLEEKLCALQCAVFDKTLAELKTRVEKIECNKRHKTVLTELQAKIARLTKRFEAAKEDLKKRHEHPPNPPVSPGKTVNDVNSNNNMSYRNAGTVRQMLESKRNVSESAPPSFQTPVNTVSSTNLVTPPAVVSSQPKLQTPVTSGSLTATSVLPAPNTATVVATTQVPSGNPQPTISLQPLPVILHVPVAVSSQPQLLQSHPGTLVTNQPSGNVEFISVQSPPTVSGLTKNPVSLPSLPNPTKPNNVPSVPSPSIQRNPTASAAPLGTTLAVQAVPTAHSIVQATRTSLPTVGPSGLYSPSTNRGPIQMKIPISAFSTSSAAEQNSNTTPRIENQTNKTIDASVSKKAADSTSQCGKATGSDSSGVIDLTMDDEESGASQDPKKLNHTPVSTMSSSQPVSRPLQPIQPAPPLQPSGVPTSGPSQTTIHLLPTAPTTVNVTHRPVTQVTTRLPVPRAPANHQVVYTTLPAPPAQAPLRGTVMQAPAVRQVNPQNSKRFFLYMAPRYM

SEQ ID NO: 22385 - DNA, 4874 bp, Homo sapiens
agcgggtttgtttttgaatctgcggaggcggcggcggtggcagcggcggcgcggcgactgaagcgcgcgaaaagctgaggcggcaacgtcggggacggctgcgcgggacggctctgtaggaaggaacttggttccccctccctcagcttccgccccaaaagattcagaatggacagtttagaagaacctcagaaaaaagtctttaaggctcgaaaaacgatgagagtgagtgatcgtcagcaacttgaagcagtgtacaaggtcaaagaagaactgttgaaaactgatgtcaagctgttaaatggcaaccatgaaaatggagatttggacccaacctcacctttggaaaacatggattacattaaagacaaggaagaggtgaatggcattgaagagatttgttttgatcctgaaggaagtaaagcagaatggaaggaaacaccctgtatcctaagtgttaatgtaaaaaacaagcaggatgatgatttaaattgtgaacctttgtctccccataatataactccagaaccagtctctaaactgcctgctgaaccagtttctggtgatccagcccctggtgatctggatgccggagatccagcctccggagtactggcctctggtgattccacctctggtgatcccacctctagcgagccctcctctagtgatgctgcctctggtgatgcaacctctggtgatgccccttctggtgatgtgtcccctggtgatgccacctctggtgatgccactgctgatgatctctcctctggtgatcccacctctagtgatcccatcccaggtgaaccggtccctgttgaacccatttctggtgattgtgccgctgatgatatagcctctagtgaaataacttctgttgatctggcttctggagcaccagcttccactgatccagcctctgatgatctggcctctggtgatctatcctctagtgaactggcctctgatgatctggccactggtgaactggcctctgatgagctgacttctgaatcaacctttgatcgtacctttgaaccaaagtctgtaccagtttgtgaaccagttcctgaaattgacaatatagaaccaagtagcaataaagatgatgattttcttgaaaaaaatggagctgatgaaaaattagagcaaattcagagtaaagactcattggatgagaaaaataaagctgataataatattgatgctaatgaagaaactctagaaacagatgatacaactatttgttcagatcgacctcctgaaaatgaaaagaaggtagaggaagatattatcacagagcttgctcttggagaagatgctatatctagcagtatggaaattgaccaaggtgaaaagaatgaagatgaaacttctgcagatcttgtagaaacgattaatgaaaatgttattgaagataacaaaagtgagaatatcttagaaaatacagactctatggagacagatgaaatcattcctattttggaaaagcttgcaccttctgaggatgaacttacttgcttttctaaaacatctctccttccaatcgatgagacaaatccagatttggaagagaaaatggaaagttcttttggttcaccatctaaacaagaaagtagtgagagtttgccaaaagaagcctttctggtcctctctgatgaagaggatatttcgggtgaaaaagatgagtctgaagttatatcgcaaaatgaaacgtgctctccagcagaagtagaaagtaatgaaaaggacaacaaacctgaggaagaagagcaagtaatacatgaagatgatgaaagaccttctgagaaaaatgaattttctagacgaaaacgttctaaatcagaagacatggacaatgtacagtctaaacgtcgtcgatatatggaagaagaatatgaggcagaatttcaagtaaagattacagccaaaggagacattaaccagaaacttcaaaaggttatacagtggttgctggaagaaaaattgtgtgcgctgcagtgtgctgtatttgataagactttggcagaattgaaaacacgagtggaaaagattgaatgtaacaagaggcataaaacagttctcactgaactacaggccaagatagccaggttaaccaaacgctttgaagcagccaaagaagatcttaagaaaagacatgaacatccacccaacccaccagtatcaccaggaaaaactgtaaatgatgtcaacagcaataataacatgtcttacagaaatgcaggcacagtgagacagatgctggagtccaaaagaaatgtaagcgagagtgcaccaccatcctttcaaactcctgtgaatacagtatcttcaaccaatcttgtcactcctccagcagttgtcagtagtcaacctaaattgcagactccagtgacttcgggttccctcacagcaacgtcagttcttcctgcacccaatacagctactgtagttgctactactcaggtgcctagtggaaatccccagcctacaatctctttacagcctttgccagtgattttgcatgtacctgttgcagtatcctcccagcctcagcttctacagagccatccagggactttggtgactaatcaaccatctggcaatgttgaattcatttctgtgcaaagcccacctacagtgagtggtcttaccaaaaatccagtatccttgccatccttgccaaatcccactaaaccaaacaacgttccttctgtgcccagtcctagtattcaaaggaaccctactgccagtgctgcaccattgggaacaacacttgctgtgcaggctgttccaacagcacactctattgtacaagccacaaggacttctttacccacagtgggcccatcaggactctatagtccatcaactaatcgaggtcctatacagatgaaaattccaatttctgcatttagtacttcgtctgctgcagaacagaacagcaataccaccccaagaattgaaaaccagacaaacaaaacaatagatgcttctgtcagtaagaaagcagctgatagcacatcacagtgtggaaaagccactggcagtgattcaagtggtgtcattgatctcacaatggatgatgaagagagtggagcttcacaagaccccaaaaaactaaatcacactcctgtatcaaccatgagttcttctcagcctgtgtcacgaccattgcaacccatacaaccagcaccgcctcttcaaccatctggggtgccaacaagtggaccatctcagaccaccatacacttactacctacagctccaactaccgtgaatgtaacacatcgtccagtaactcaggtgaccacaagactccctgtaccaagagctcctgcaaaccaccaggtggtttatacaactcttcctgcaccaccagctcaggctcccttgcgaggaactgttatgcaggctcctgctgttcggcaggtcaatccccaaaatagtgttacagttcgagtgcctcaaacaaccacatatgttgtaaacaatggactaaccctgggatcaacaggacctcagctcacagtgcatcaccgaccaccacaagtgcatactgagcccccacgccccgtgcacccagcacccttaccagaagctccacaaccacagcgtctgcccccagaagctgccagcacatctctgcctcagaagccacacttgaagttagcacgcgttcagagtcaaaatggcatagtactgtcatggagtgtcctggaggtggatcgaagctgtgccactgttgatagctaccatctctatgcttaccatgaggaacccagtgccactgtgccctcacaatggaaaaagattggggaagtcaaggcacttcccttgcccatggcatgtactctcacccagtttgtatctggtagcaaatactactttgcagtacgagccaaggatatttatggacgttttgggcctttctgtgatcctcagtcaacagatgtgatctcttctacccagagcagttaaaccttggagcctttatattttcctcttttaaaatttccaccttttggtcttgtttttaatcttgtgcatgataccccatgtaaaatccaccttgtgcaagatttcttggacagatgtgtgtatacactacatttgtttataaccagaagcaaaataaactcagcccacaaagctagaatcttttcctggacagtttaggctttggggtttggaaatgtaaatgtgtaccttgctttagttttgaggctggggaatatgtgtgggtgtttatgtgtgtttttccttatgtaggtgttattgcattggagtctcccattttcattctcaaatttacctcttaaagtacgaagtaagtagatcaaaggatttgagatgtgtaactggcatgattctgcttttgaaggatctatagtatcattttagttaagtgggtcaaacagaatcaaaacaaaacccaaagaaataaataaaaaacaaaatggctaaatagtttaaaataggttaattcgaacacaggaaaggatctatttgttgtttcttttgtctggtctcctgagttgttaattaggtgaaaaaagatctgcaatggccccctccctttcctaatctggcttttacatttattttgtgccttaaagattaactacaaagataaacatggccaaaaataaataaataaatatggccatatgtccgttgttgcttagtcttcccttgcagccttttacccttgatttctccttcatctctaccaaatatagcacaactcctcaagtaattttttttttttaagatggagttttgctcttgttgcccaggctagagtgcggtggcacaatcttggctcactgcaacctctgcctcctgggttcaagcaattcttctgtctcagc

SEQ ID NO: 22386 - protein, 1270 aa, Homo sapiens; identical to SEQ ID NO: 2935

SEQ ID NO: 22387 - DNA, 4774 bp, Homo sapiens
gtagctgcttaggcagcaagtatgtcagtgaggagacttgtcacatgcatcaggaccagagattcagaatggacagtttagaagaacctcagaaaaaagtctttaaggctcgaaaaacgatgagagtgagtgatcgtcagcaacttgaagcagtgtacaaggtcaaagaagaactgttgaaaactgatgtcaagctgttaaatggcaaccatgaaaatggagatttggacccaacctcacctttggaaaacatggattacattaaagacaaggaagaggtgaatggcattgaagagatttgttttgatcctgaaggaagtaaagcagaatggaaggaaacaccctgtatcctaagtgttaatgtaaaaaacaagcaggatgatgatttaaattgtgaacctttgtctccccataatataactccagaaccagtctctaaactgcctgctgaaccagtttctggtgatccagcccctggtgatctggatgccggagatccagcctccggagtactggcctctggtgattccacctctggtgatcccacctctagcgagccctcctctagtgatgctgcctctggtgatgcaacctctggtgatgccccttctggtgatgtgtcccctggtgatgccacctctggtgatgccactgctgatgatctctcctctggtgatcccacctctagtgatcccatcccaggtgaaccggtccctgttgaacccatttctggtgattgtgccgctgatgatatagcctctagtgaaataacttctgttgatctggcttctggagcaccagcttccactgatccagcctctgatgatctggcctctggtgatctatcctctagtgaactggcctctgatgatctggccactggtgaactggcctctgatgagctgacttctgaatcaacctttgatcgtacctttgaaccaaagtctgtaccagtttgtgaaccagttcctgaaattgacaatatagaaccaagtagcaataaagatgatgattttcttgaaaaaaatggagctgatgaaaaattagagcaaattcagagtaaagactcattggatgagaaaaataaagctgataataatattgatgctaatgaagaaactctagaaacagatgatacaactatttgttcagatcgacctcctgaaaatgaaaagaaggtagaggaagatattatcacagagcttgctcttggagaagatgctatatctagcagtatggaaattgaccaaggtgaaaagaatgaagatgaaacttctgcagatcttgtagaaacgattaatgaaaatgttattgaagataacaaaagtgagaatatcttagaaaatacagactctatggagacagatgaaatcattcctattttggaaaagcttgcaccttctgaggatgaacttacttgcttttctaaaacatctctccttccaatcgatgagacaaatccagatttggaagagaaaatggaaagttcttttggttcaccatctaaacaagaaagtagtgagagtttgccaaaagaagcctttctggtcctctctgatgaagaggatatttcgggtgaaaaagatgagtctgaagttatatcgcaaaatgaaacgtgctctccagcagaagtagaaagtaatgaaaaggacaacaaacctgaggaagaagagcaagtaatacatgaagatgatgaaagaccttctgagaaaaatgaattttctagacgaaaacgttctaaatcagaagacatggacaatgtacagtctaaacgtcgtcgatatatggaagaagaatatgaggcagaatttcaagtaaagattacagccaaaggagacattaaccagaaacttcaaaaggttatacagtggttgctggaagaaaaattgtgtgcgctgcagtgtgctgtatttgataagactttggcagaattgaaaacacgagtggaaaagattgaatgtaacaagaggcataaaacagttctcactgaactacaggccaagatagccaggttaaccaaacgctttgaagcagccaaagaagatcttaagaaaagacatgaacatccacccaacccaccagtatcaccaggaaaaactgtaaatgatgtcaacagcaataataacatgtcttacagaaatgcaggcacagtgagacagatgctggagtccaaaagaaatgtaagcgagagtgcaccaccatcctttcaaactcctgtgaatacagtatcttcaaccaatcttgtcactcctccagcagttgtcagtagtcaacctaaattgcagactccagtgacttcgggttccctcacagcaacgtcagttcttcctgcacccaatacagctactgtagttgctactactcaggtgcctagtggaaatccccagcctacaatctctttacagcctttgccagtgattttgcatgtacctgttgcagtatcctcccagcctcagcttctacagagccatccagggactttggtgactaatcaaccatctggcaatgttgaattcatttctgtgcaaagcccacctacagtgagtggtcttaccaaaaatccagtatccttgccatccttgccaaatcccactaaaccaaacaacgttccttctgtgcccagtcctagtattcaaaggaaccctactgccagtgctgcaccattgggaacaacacttgctgtgcaggctgttccaacagcacactctattgtacaagccacaaggacttctttacccacagtgggcccatcaggactctatagtccatcaactaatcgaggtcctatacagatgaaaattccaatttctgcatttagtacttcgtctgctgcagaacagaacagcaataccaccccaagaattgaaaaccagacaaacaaaacaatagatgcttctgtcagtaagaaagcagctgatagcacatcacagtgtggaaaagccactggcagtgattcaagtggtgtcattgatctcacaatggatgatgaagagagtggagcttcacaagaccccaaaaaactaaatcacactcctgtatcaaccatgagttcttctcagcctgtgtcacgaccattgcaacccatacaaccagcaccgcctcttcaaccatctggggtgccaacaagtggaccatctcagaccaccatacacttactacctacagctccaactaccgtgaatgtaacacatcgtccagtaactcaggtgaccacaagactccctgtaccaagagctcctgcaaaccaccaggtggtttatacaactcttcctgcaccaccagctcaggctcccttgcgaggaactgttatgcaggctcctgctgttcggcaggtcaatccccaaaatagtgttacagttcgagtgcctcaaacaaccacatatgttgtaaacaatggactaaccctgggatcaacaggacctcagctcacagtgcatcaccgaccaccacaagtgcatactgagcccccacgccccgtgcacccagcacccttaccagaagctccacaaccacagcgtctgcccccagaagctgccagcacatctctgcctcagaagccacacttgaagttagcacgcgttcagagtcaaaatggcatagtactgtcatggagtgtcctggaggtggatcgaagctgtgccactgttgatagctaccatctctatgcttaccatgaggaacccagtgccactgtgccctcacaatggaaaaagattggggaagtcaaggcacttcccttgcccatggcatgtactctcacccagtttgtatctggtagcaaatactactttgcagtacgagccaaggatatttatggacgttttgggcctttctgtgatcctcagtcaacagatgtgatctcttctacccagagcagttaaaccttggagcctttatattttcctcttttaaaatttccaccttttggtcttgtttttaatcttgtgcatgataccccatgtaaaatccaccttgtgcaagatttcttggacagatgtgtgtatacactacatttgtttataaccagaagcaaaataaactcagcccacaaagctagaatcttttcctggacagtttaggctttggggtttggaaatgtaaatgtgtaccttgctttagttttgaggctggggaatatgtgtgggtgtttatgtgtgtttttccttatgtaggtgttattgcattggagtctcccattttcattctcaaatttacctcttaaagtacgaagtaagtagatcaaaggatttgagatgtgtaactggcatgattctgcttttgaaggatctatagtatcattttagttaagtgggtcaaacagaatcaaaacaaaacccaaagaaataaataaaaaacaaaatggctaaatagtttaaaataggttaattcgaacacaggaaaggatctatttgttgtttcttttgtctggtctcctgagttgttaattaggtgaaaaaagatctgcaatggccccctccctttcctaatctggcttttacatttattttgtgccttaaagattaactacaaagataaacatggccaaaaataaataaataaatatggccatatgtccgttgttgcttagtcttcccttgcagccttttacccttgatttctccttcatctctaccaaatatagcacaactcctcaagtaattttttttttttaagatggagttttgctcttgttgcccaggctagagtgcggtggcacaatcttggctcactgcaacctctgcctcctgggttcaagcaattcttctgtctcagc

SEQ ID NO: 22388 - protein, 1278 aa, Homo sapiens
MHQDQRFRMDSLEEPQKKVFKARKTMRVSDRQQLEAVYKVKEELLKTDVKLLNGNHENGDLDPTSPLENMDYIKDKEEVNGIEEICFDPEGSKAEWKETPCILSVNVKNKQDDDLNCEPLSPHNITPEPVSKLPAEPVSGDPAPGDLDAGDPASGVLASGDSTSGDPTSSEPSSSDAASGDATSGDAPSGDVSPGDATSGDATADDLSSGDPTSSDPIPGEPVPVEPISGDCAADDIASSEITSVDLASGAPASTDPASDDLASGDLSSSELASDDLATGELASDELTSESTFDRTFEPKSVPVCEPVPEIDNIEPSSNKDDDFLEKNGADEKLEQIQSKDSLDEKNKADNNIDANEETLETDDTTICSDRPPENEKKVEEDIITELALGEDAISSSMEIDQGEKNEDETSADLVETINENVIEDNKSENILENTDSMETDEIIPILEKLAPSEDELTCFSKTSLLPIDETNPDLEEKMESSFGSPSKQESSESLPKEAFLVLSDEEDISGEKDESEVISQNETCSPAEVESNEKDNKPEEEEQVIHEDDERPSEKNEFSRRKRSKSEDMDNVQSKRRRYMEEEYEAEFQVKITAKGDINQKLQKVIQWLLEEKLCALQCAVFDKTLAELKTRVEKIECNKRHKTVLTELQAKIARLTKRFEAAKEDLKKRHEHPPNPPVSPGKTVNDVNSNNNMSYRNAGTVRQMLESKRNVSESAPPSFQTPVNTVSSTNLVTPPAVVSSQPKLQTPVTSGSLTATSVLPAPNTATVVATTQVPSGNPQPTISLQPLPVILHVPVAVSSQPQLLQSHPGTLVTNQPSGNVEFISVQSPPTVSGLTKNPVSLPSLPNPTKPNNVPSVPSPSIQRNPTASAAPLGTTLAVQAVPTAHSIVQATRTSLPTVGPSGLYSPSTNRGPIQMKIPISAFSTSSAAEQNSNTTPRIENQTNKTIDASVSKKAADSTSQCGKATGSDSSGVIDLTMDDEESGASQDPKKLNHTPVSTMSSSQPVSRPLQPIQPAPPLQPSGVPTSGPSQTTIHLLPTAPTTVNVTHRPVTQVTTRLPVPRAPANHQVVYTTLPAPPAQAPLRGTVMQAPAVRQVNPQNSVTVRVPQTTTYVVNNGLTLGSTGPQLTVHHRPPQVHTEPPRPVHPAPLPEAPQPQRLPPEAASTSLPQKPHLKLARVQSQNGIVLSWSVLEVDRSCATVDSYHLYAYHEEPSATVPSQWKKIGEVKALPLPMACTLTQFVSGSKYYFAVRAKDIYGRFGPFCDPQSTDVISSTQSS

SEQ ID NO: 22389 - DNA, 1676 bp, Homo sapiens
agtctcacacagtaggtttcctgggagagttggaattcaaatctgtgaatctgtctacagtctacagagttcatgttcttaattgggttattaaaagtgatgaatttttttaaaggaatgcttacttttaatattcagaatggacagtttagaagaacctcagaaaaaagtctttaaggctcgaaaaacgatgagagtgagtgatcgtcagcaacttgaagcagtgtacaaggtcaaagaagaactgttgaaaactgatgtcaagctgttaaatggcaaccatgaaaatggagatttggacccaacctcacctttggaaaacatggattacattaaagacaaggaagaggtgaatggcattgaagagatttgttttgatcctgaaggaagtaaagcagaatggaaggaaacaccctgtatcctaagtgttaatgtaaaaaacaagcaggatgatgatttaaattgtgaacctttgtctccccataatataactccagaaccagtctctaaactgcctgctgaaccagtttctggtgatccagcccctggtgatctggatgccggagatccagcctccggagtactggcctctggtgattccacctctggtgatcccacctctagcgagccctcctctagtgatgctgcctctggtgatgcaacctctggtgatgccccttctggtgatgtgtcccctggtgatgccacctctggtgatgccactgctgatgatctctcctctggtgatcccacctctagtgatcccatcccaggtgaaccggtccctgttgaacccatttctggtgattgtgccgctgatgatatagcctctagtgaaataacttctgttgatctggcttctggagcaccagcttccactgatccagcctctgatgatctggcctctggtgatctatcctctagtgaactggcctctgatgatctggccactggtgaactggcctctgatgagctgacttctgaatcaacctttgatcgtacctttgaaccaaagtctgtaccagtttgtgaaccagttcctgaaattgacaatatagaaccaagtagcaataaagatgatgattttcttgaaaaaaatggagctgatgaaaaattagagcaaattcagagtaaagactcattggatgagaaaaataaagctgataataatattgatgctaatgaagaaactctagaaacagatgatacaactatttgttcagatcgacctcctgaaaatgaaaagaaggtagaggaagatattatcacagagcttgctcttggagaagatgctatatctagcagtatggaaattgaccaaggtgaaaagaatgaagatgaaacttctgcagatcttgtagaaacgattaatgaaaatgttattgaagataacaaaagtgagaatatcttagaaaatacagactctatggagacagatgaaatcattcctattttggaaaagcttgcaccttctgaggatgaacttacttgcttttctaaaacatctctccttccaatcgatgagacaaatccagatttggaagagaaaatggaaagttcttttggttcaccatctaaacaagaaagtagtgagagtttgccaaaagaagcctttctggtcctctctgatgaagaggatatttcgggtgaaaaagatgagtctgaagttatatcgc

SEQ ID NO: 22390 - protein, 34 aa, Homo sapiens
MFLIGLLKVMNFFKGMLTFNIQNGQFRRTSEKSL

SEQ ID NO: 22391 - DNA, 4144 bp, Homo sapiens
tagtatacaacaagcagtaggttttctatgtcttaaacattacatgaaatgtgctgcttgcatctcttctaagatcaatttgtattaagtctacaattaggtggcttctgtttcagttattaaactctctttctcttttttcttaaagattcagaatggacagtttagaagaacctcagaaaaaagtctttaaggctcgaaaaacgatgagagtgagtgatcgtcagcaacttgaagcagtgtacaaggtcaaagaagaactgttgaaaactgatgtcaagctgttaaatggcaaccatgaaaatggagatttggacccaacctcacctttggaaaacatggattacattaaagacaaggaagaggtgaatggcattgaagagatttgttttgatcctgaaggaagtaaagcagaatggaaggaaacaccctgtatcctaagtgttaatgtaaaaaacaagcaggatgatgatttaaattgtgaacctttgtctccccataatataactccagaaccagtctctaaactgcctgctgaaccagtttctggtgatccagcccctggtgatctggatgccggagatccagcctccggagtactggcctctggtgattccacctctggtgatcccacctctagcgagccctcctctagtgatgctgcctctggtgatgcaacctctggtgatgccccttctggtgatgtgtcccctggtgatgccacctctggtgatgccactgctgatgatctctcctctggtgatcccacctctagtgatcccatcccaggtgaaccggtccctgttgaacccatttctggtgattgtgccgctgatgatatagcctctagtgaaataacttctgttgatctggcttctggagcaccagcttccactgatccagcctctgatgatctggcctctggtgatctatcctctagtgaactggcctctgatgatctggccactggtgaactggcctctgatgagctgacttctgaatcaacctttgatcgtacctttgaaccaaagtctgtaccagtttgtgaaccagttcctgaaattgacaatatagaaccaagtagcaataaagatgatgattttcttgaaaaaaatggagctgatgaaaaattagagcaaattcagagtaaagactcattggatgagaaaaataaagctgataataatattgatgctaatgaagaaactctagaaacagatgatacaactatttgttcagatcgacctcctgaaaatgaaaagaaggtagaggaagatattatcacagagcttgctcttggagaagatgctatatctagcagtatggaaattgaccaaggtgaaaagaatgaagatgaaacttctgcagatcttgtagaaacgattaatgaaaatgttattgaagataacaaaagtgagaatatcttagaaaatacagactctatggagacagatgaaatcattcctattttggaaaagcttgcaccttctgaggatgaacttacttgcttttctaaaacatctctccttccaatcgatgagacaaatccagatttggaagagaaaatggaaagttcttttggttcaccatctaaacaagaaagtagtgagagtttgccaaaagaagcctttctggtcctctctgatgaagaggatatttcgggtgaaaaagatgagtctgaagttatatcgcaaaatgaaacgtgctctccagcagaagtagaaagtaatgaaaaggacaacaaacctgaggaagaagagcaagtaatacatgaagatgatgaaagaccttctgagaaaaatgaattttctagacgaaaacgttctaaatcagaagacatggacaatgtacagtctaaacgtcgtcgatatatggaagaagaatatgaggcagaatttcaagtaaagattacagccaaaggagacattaaccagaaacttcaaaaggttatacagtggttgctggaagaaaaattgtgtgcgctgcagtgtgctgtatttgataagactttggcagaattgaaaacacgagtggaaaagattgaatgtaacaagaggcataaaacagttctcactgaactacaggccaagatagccaggttaaccaaacgctttgaagcagccaaagaagatcttaagaaaagacatgaacatccacccaacccaccagtatcaccaggaaaaactgtaaatgatgtcaacagcaataataacatgtcttacagaaatgcaggcacagtgagacagatgctggagtccaaaagaaatgtaagcgagagtgcaccaccatcctttcaaactcctgtgaatacagtatcttcaaccaatcttgtcactcctccagcagttgtcagtagtcaacctaaattgcagactccagtgacttcgggttccctcacagcaacgtcagttcttcctgcacccaatacagctactgtagttgctactactcaggtgcctagtggaaatccccagcctacaatctctttacagcctttgccagtgattttgcatgtacctgttgcagtatcctcccagcctcagcttctacagagccatccagggactttggtgactaatcaaccatctggcaatgttgaattcatttctgtgcaaagcccacctacagtgagtggtcttaccaaaaatccagtatccttgccatccttgccaaatcccactaaaccaaacaacgttccttctgtgcccagtcctagtattcaaaggaaccctactgccagtgctgcaccattgggaacaacacttgctgtgcaggctgttccaacagcacactctattgtacaagccacaaggacttctttacccacagtgggcccatcaggactctatagtccatcaactaatcgaggtcctatacagatgaaaattccaatttctgcatttagtacttcgtctgctgcagaacagaacagcaataccaccccaagaattgaaaaccagacaaacaaaacaatagatgcttctgtcagtaagaaagcagctgatagcacatcacagtgtggaaaagccactggcagtgattcaagtggtgtcattgatctcacaatggatgatgaagagagtggagcttcacaagaccccaaaaaactaaatcacactcctgtatcaaccatgagttcttctcagcctgtgtcacgaccattgcaacccatacaaccagcaccgcctcttcaaccatctggggtgccaacaagtggaccatctcagaccaccatacacttactacctacagctccaactaccgtgaatgtaacacatcgtccagtaactcaggtgaccacaagactccctgtaccaagagctcctgcaaaccaccaggtggtttatacaactcttcctgcaccaccagctcaggctcccttgcgaggaactgttatgcaggctcctgctgttcggcaggtcaatccccaaaatagtgttacagttcgagtgcctcaaacaaccacatatgttgtaaacaatggactaaccctgggatcaacaggacctcagctcacagtgcatcaccgaccaccacaagtgcatactgagcccccacgccccgtgcacccagcacccttaccagaagctccacaaccacagcgtctgcccccagaagctgccagcacatctctgcctcagaagccacacttgaagttagcacgcgttcagagtcaaaatggcatagtactgtcatggagtgtcctggaggtggatcgaagctgtgccactgttgatagctaccatctctatgcttaccatgaggaacccagtgccactgtgccctcacaatggaaaaagattggggaagtcaaggcacttcccttgcccatggcatgtactctcacccagtttgtatctggtagcaaatactactttgcagtacgagccaaggatatttatggacgttttgggcctttctgtgatcctcagtcaacagatgtgatctcttctacccagagcagttaaaccttggagcctttatattttcctcttttaaaatttccaccttttggtcttgtttttaatcttgtgcatgataccccatgtaaaatccaccttgtgcaagatttcttggacagatgtgtgtatacactacatttgtttataaccagaagcaaaataaactcagcccacaaagctag

SEQ ID NO: 22392 - protein, 1270 aa, Homo sapiens; identical to SEQ ID NO: 2935

SEQ ID NO: 22393 - DNA, 4186 bp, Homo sapiens
tagtatacaacaagcagtaggttttctatgtcttaaacattacatgaaatgtgctgcttgcatctcttctaagatcaatttgtattaagtctacaattaggtggcttctgtttcagttattaaactctctttctcttttttcttaaagattcagaatggacagtttagaagaacctcagaaaaaagtctttaaggctcgaaaaacgatgagagtgagtgatcgtcagcaacttgaagcagtgtacaaggtcaaagaagaactgttgaaaactgatgtcaagctgttaaatggcaaccatgaaaatggagatttggacccaacctcacctttggaaaacatggattacattaaagacaaggaagaggtgaatggcattgaagagatttgttttgatcctgaaggaagtaaagcagaatggaaggaaacaccctgtatcctaagtgttaatgtaaaaaacaagcaggatgatgatttaaattgtgaacctttgtctccccataatataactccagaaccagtctctaaactgcctgctgaaccagtttctggtgatccagcccctggtgatctggatgccggagatccagcctccggagtactggcctctggtgattccacctctggtgatcccacctctagcgagccctcctctagtgatgctgcctctggtgatgcaacctctggtgatgccccttctggtgatgtgtcccctggtgatgccacctctggtgatgccactgctgatgatctctcctctggtgatcccacctctagtgatcccatcccaggtgaaccggtccctgttgaacccatttctggtgattgtgccgctgatgatatagcctctagtgaaataacttctgttgatctggcttctggagcaccagcttccactgatccagcctctgatgatctggcctctggtgatctatcctctagtgaactggcctctgatgatctggccactggtgaactggcctctgatgagctgacttctgaatcaacctttgatcgtacctttgaaccaaagtctgtaccagtttgtgaaccagttcctgaaattgacaatatagaaccaagtagcaataaagatgatgattttcttgaaaaaaatggagctgatgaaaaattagagcaaattcagagtaaagactcattggatgagaaaaataaagctgataataatattgatgctaatgaagaaactctagaaacagatgatacaactatttgttcagatcgacctcctgaaaatgaaaagaaggtagaggaagatattatcacagagcttgctcttggagaagatgctatatctagcagtatggaaattgaccaaggtgaaaagaatgaagatgaaacttctgcagatcttgtagaaacgattaatgaaaatgttattgaagataacaaaagtgagaatatcttagaaaatacagactctatggagacagatgaaatcattcctattttggaaaagcttgcaccttctgaggatgaacttacttgcttttctaaaacatctctccttccaatcgatgagacaaatccagatttggaagagaaaatggaaagttcttttggttcaccatctaaacaagaaagtagtgagagtttgccaaaagaagcctttctggtcctctctgatgaagaggatatttcgggtgaaaaagatgagtctgaagttatatcgcaaaatgaaacgtgctctccagcagaagtagaaagtaatgaaaaggacaacaaacctgaggaagaagagcaagtaatacatgaagatgatgaaagaccttctgagaaaaatgaattttctagacgaaaacgttctaaatcagaagacatggacaatgtacagtctaaacgtcgtcgatatatggaagaagaatatgaggcagaatttcaagtaaagattacagccaaaggagacattaaccagaaacttcaaaaggttatacagtggttgctggaagaaaaattgtgtgcgctgcagtgtgctgtatttgataagactttggcagaattgaaaacacgagtggaaaagattgaatgtaacaagaggcataaaacagttctcactgaactacaggccaagatagccaggttaaccaaacgctttgaagcagccaaagaagatcttaagaaaagacatgaacatccacccaacccaccagtatcaccaggaaaaactgtaaatgatgtcaacagcaataataacatgtcttacagaaatgcaggcacagtgagacagatgctggagtccaaaagaaatgtaagcgagagtgcaccaccatcctttcaaactcctgtgaatacagtatcttcaaccaatcttgtcactcctccagcagttgtcagtagtcaacctaaattgcagactccagtgacttcgggttccctcacagcaacgtcagttcttcctgcacccaatacagctactgtagttgctactactcaggtgcctagtggaaatccccagcctacaatctctttacagcctttgccagtgattttgcatgtacctgttgcagtatcctcccagcctcagcttctacagagccatccagggactttggtgactaatcaaccatctggcaatgttgaattcatttctgtgcaaagcccacctacagtgagtggtcttaccaaaaatccagtatccttgccatccttgccaaatcccactaaaccaaacaacgttccttctgtgcccagtcctagtattcaaaggaaccctactgccagtgctgcaccattgggaacaacacttgctgtgcaggctgttccaacagcacactctattgtacaagccacaaggacttctttacccacagtgggcccatcaggactctatagtccatcaactaatcgaggtcctatacagatgaaaattccaatttctgcatttagtacttcgtctgctgcagaacagaacagcaataccaccccaagaattgaaaaccagacaaacaaaacaatagatgcttctgtcagtaagaaagcagctgatagcacatcacagtgtggaaaagccactggcagtgattcaagtggtgtcattgatctcacaatggatgatgaagagagtggagcttcacaagaccccaaaaaactaaatcacactcctgtatcaaccatgagttcttctcagcctgtgtcacgaccattgcaacccatacaaccagcaccgcctcttcaaccatctggggtgccaacaagtggaccatctcagaccaccatacacttactacctacagctccaactaccgtgaatgtaacacatcgtccagtaactcaggtgaccacaagactccctgtaccaagagctcctgcaaaccaccaggtggtttatacaactcttcctgcaccaccagctcaggctcccttgcgaggaactgttatgcaggctcctgctgttcggcaggtcaatccccaaaatagtgttacagttcgagtgcctcaaacaaccacatatgttgtaaacaatggactaaccctgggatcaacaggacctcagctcacagtgcatcaccgaccaccacaagtgcatactgagcccccacgccccgtgcacccagcacccttaccagaagctccacaaccacagcgtctgcccccagaagctgccagcacatctctgcctcagaagccacacttgaagttagcacgcgttcagagtcaaaatggcatagtactgtcatggagtgtcctggaggtggatcgaagctgtgccactgttgatagctaccatctctatgcttaccatgaggaacccagtgccactgtgccctcacaatggaaaaagattggggaagtcaaggcacttcccttgcccatggcatgtactctcacccagtttgtatctggtagcaaatactactttgcagtacgagccaaggatatttatggacgttttgggcctttctgtgatcctcagtcaacagatgtgatctcttctacccagagcagttaaaccttggagcctttatattttcctcttttaaaatttccaccttttggtcttgtttttaatcttgtgcatgataccccatgtaaaatccaccttgtgcaagatttcttggacagatgtgtgtatacactacatttgtttataaccagaagcaaaataaactcagcccacaaagctagaatcttttcctggacagtttaggctttggggtttggaaatgt

SEQ ID NO: 22394 - protein, 1270 aa, Homo sapiens; identical to SEQ ID NO: 2935

SEQ ID NO: 22395 - DNA, 4861 bp, Homo sapiens
tagtatacaacaagcagtaggttttctatgtcttaaacattacatgaaatgtgctgcttgcatctcttctaagatcaatttgtattaagtctacaattaggtggcttctgtttcagttattaaactctctttctcttttttcttaaagattcagaatggacagtttagaagaacctcagaaaaaagtctttaaggctcgaaaaacgatgagagtgagtgatcgtcagcaacttgaagcagtgtacaaggtcaaagaagaactgttgaaaactgatgtcaagctgttaaatggcaaccatgaaaatggagatttggacccaacctcacctttggaaaacatggattacattaaagacaaggaagaggtgaatggcattgaagagatttgttttgatcctgaaggaagtaaagcagaatggaaggaaacaccctgtatcctaagtgttaatgtaaaaaacaagcaggatgatgatttaaattgtgaacctttgtctccccataatataactccagaaccagtctctaaactgcctgctgaaccagtttctggtgatccagcccctggtgatctggatgccggagatccagcctccggagtactggcctctggtgattccacctctggtgatcccacctctagcgagccctcctctagtgatgctgcctctggtgatgcaacctctggtgatgccccttctggtgatgtgtcccctggtgatgccacctctggtgatgccactgctgatgatctctcctctggtgatcccacctctagtgatcccatcccaggtgaaccggtccctgttgaacccatttctggtgattgtgccgctgatgatatagcctctagtgaaataacttctgttgatctggcttctggagcaccagcttccactgatccagcctctgatgatctggcctctggtgatctatcctctagtgaactggcctctgatgatctggccactggtgaactggcctctgatgagctgacttctgaatcaacctttgatcgtacctttgaaccaaagtctgtaccagtttgtgaaccagttcctgaaattgacaatatagaaccaagtagcaataaagatgatgattttcttgaaaaaaatggagctgatgaaaaattagagcaaattcagagtaaagactcattggatgagaaaaataaagctgataataatattgatgctaatgaagaaactctagaaacagatgatacaactatttgttcagatcgacctcctgaaaatgaaaagaaggtagaggaagatattatcacagagcttgctcttggagaagatgctatatctagcagtatggaaattgaccaaggtgaaaagaatgaagatgaaacttctgcagatcttgtagaaacgattaatgaaaatgttattgaagataacaaaagtgagaatatcttagaaaatacagactctatggagacagatgaaatcattcctattttggaaaagcttgcaccttctgaggatgaacttacttgcttttctaaaacatctctccttccaatcgatgagacaaatccagatttggaagagaaaatggaaagttcttttggttcaccatctaaacaagaaagtagtgagagtttgccaaaagaagcctttctggtcctctctgatgaagaggatatttcgggtgaaaaagatgagtctgaagttatatcgcaaaatgaaacgtgctctccagcagaagtagaaagtaatgaaaaggacaacaaacctgaggaagaagagcaagtaatacatgaagatgatgaaagaccttctgagaaaaatgaattttctagacgaaaacgttctaaatcagaagacatggacaatgtacagtctaaacgtcgtcgatatatggaagaagaatatgaggcagaatttcaagtaaagattacagccaaaggagacattaaccagaaacttcaaaaggttatacagtggttgctggaagaaaaattgtgtgcgctgcagtgtgctgtatttgataagactttggcagaattgaaaacacgagtggaaaagattgaatgtaacaagaggcataaaacagttctcactgaactacaggccaagatagccaggttaaccaaacgctttgaagcagccaaagaagatcttaagaaaagacatgaacatccacccaacccaccagtatcaccaggaaaaactgtaaatgatgtcaacagcaataataacatgtcttacagaaatgcaggcacagtgagacagatgctggagtccaaaagaaatgtaagcgagagtgcaccaccatcctttcaaactcctgtgaatacagtatcttcaaccaatcttgtcactcctccagcagttgtcagtagtcaacctaaattgcagactccagtgacttcgggttccctcacagcaacgtcagttcttcctgcacccaatacagctactgtagttgctactactcaggtgcctagtggaaatccccagcctacaatctctttacagcctttgccagtgattttgcatgtacctgttgcagtatcctcccagcctcagcttctacagagccatccagggactttggtgactaatcaaccatctggcaatgttgaattcatttctgtgcaaagcccacctacagtgagtggtcttaccaaaaatccagtatccttgccatccttgccaaatcccactaaaccaaacaacgttccttctgtgcccagtcctagtattcaaaggaaccctactgccagtgctgcaccattgggaacaacacttgctgtgcaggctgttccaacagcacactctattgtacaagccacaaggacttctttacccacagtgggcccatcaggactctatagtccatcaactaatcgaggtcctatacagatgaaaattccaatttctgcatttagtacttcgtctgctgcagaacagaacagcaataccaccccaagaattgaaaaccagacaaacaaaacaatagatgcttctgtcagtaagaaagcagctgatagcacatcacagtgtggaaaagccactggcagtgattcaagtggtgtcattgatctcacaatggatgatgaagagagtggagcttcacaagaccccaaaaaactaaatcacactcctgtatcaaccatgagttcttctcagcctgtgtcacgaccattgcaacccatacaaccagcaccgcctcttcaaccatctggggtgccaacaagtggaccatctcagaccaccatacacttactacctacagctccaactaccgtgaatgtaacacatcgtccagtaactcaggtgaccacaagactccctgtaccaagagctcctgcaaaccaccaggtggtttatacaactcttcctgcaccaccagctcaggctcccttgcgaggaactgttatgcaggctcctgctgttcggcaggtcaatccccaaaatagtgttacagttcgagtgcctcaaacaaccacatatgttgtaaacaatggactaaccctgggatcaacaggacctcagctcacagtgcatcaccgaccaccacaagtgcatactgagcccccacgccccgtgcacccagcacccttaccagaagctccacaaccacagcgtctgcccccagaagctgccagcacatctctgcctcagaagccacacttgaagttagcacgcgttcagagtcaaaatggcatagtactgtcatggagtgtcctggaggtggatcgaagctgtgccactgttgatagctaccatctctatgcttaccatgaggaacccagtgccactgtgccctcacaatggaaaaagattggggaagtcaaggcacttcccttgcccatggcatgtactctcacccagtttgtatctggtagcaaatactactttgcagtacgagccaaggatatttatggacgttttgggcctttctgtgatcctcagtcaacagatgtgatctcttctacccagagcagttaaaccttggagcctttatattttcctcttttaaaatttccaccttttggtcttgtttttaatcttgtgcatgataccccatgtaaaatccaccttgtgcaagatttcttggacagatgtgtgtatacactacatttgtttataaccagaagcaaaataaactcagcccacaaagctagaatcttttcctggacagtttaggctttggggtttggaaatgtaaatgtgtaccttgctttagttttgaggctggggaatatgtgtgggtgtttatgtgtgtttttccttatgtaggtgttattgcattggagtctcccattttcattctcaaatttacctcttaaagtacgaagtaagtagatcaaaggatttgagatgtgtaactggcatgattctgcttttgaaggatctatagtatcattttagttaagtgggtcaaacagaatcaaaacaaaacccaaagaaataaataaaaaacaaaatggctaaatagtttaaaataggttaattcgaacacaggaaaggatctatttgttgtttcttttgtctggtctcctgagttgttaattaggtgaaaaaagatctgcaatggccccctccctttcctaatctggcttttacatttattttgtgccttaaagattaactacaaagataaacatggccaaaaataaataaataaatatggccatatgtccgttgttgcttagtcttcccttgcagccttttacccttgatttctccttcatctctaccaaatatagcacaactcctcaagtaattttttttttttaagatggagttttgctcttgttgcccaggctagagtgcggtggcacaatcttggctcactgcaacctctgcctcctgggttcaagcaattcttctgtctcagc

SEQ ID NO: 22396 - protein, 1270 aa, Homo sapiens; identical to SEQ ID NO: 2935

SEQ ID NO: 22397 - DNA, 736 bp, Homo sapiens
tttcttggatttactgcaactgtttctactgaatttattgggaacatttttgacatactaaatttttttctccaaaagaacatagtgtggaggaattatattttgtttaactatttcctcatgttagaacatttaagttatgtgtatcttaaattatttccatgagatactgcttagagttaaaattgctgggccagtggaaagttttttttaatctgtattgtgatctgtatagtaatctgtatggtatctgaaagatactatagcagtggtctgtgaatttgagtttttatttatgtatgtgacatgttgacggaaaagtagttggagaaaactacatgaattgtttcatataaagcaacttaactttttacattttgtagatgtttttaaaaatggctttttttacttttcagaaaaccagacaaacaaaacaatagatgcttctgtcagtaagaaagcagctgatagcacatcacagtgtggaaaagccactggcagtgattcaagtggtgtcattgatctcacaatggatgatgaagagagtggagcttcacaaggtacttcaatagtaattgtactaagcaacgttttgataccattttttttgtcttaatacggtacagtattctacaaagacagatgtttatggcattatgcttggtttatttgtgttctttttggaatggaagttttttagattagaattttaaaatttggccaggtgcagtgtctc

SEQ ID NO: 22398 - protein, 43 aa, Homo sapiens
MLLSVRKQLIAHHSVEKPLAVIQVVSLISQWMMKRVELHKVLQ

SEQ ID NO: 22399 - DNA, 3881 bp, Homo sapiens
agcctttatattttcctcttttaaaatttccaccttttggtcttgtttttaatcttgtgcatgataccccatgtaaaatccaccttgtgcaagatttcttggacagatgtgtgtatacactacatttgtttataaccagaagcaaaataaactcagcccacaaagctagaatcttttcctggacagtttaggctttggggtttggaaatgtaaatgtgtaccttgctttagttttgaggctggggaatatgtgtgggtgtttatgtgtgtttttccttatgtaggtgttattgcattggagtctcccattttcattctcaaatttacctcttaaagtacgaagtaagtagatcaaaggatttgagatgtgtaactggcatgattctgcttttgaaggatctatagtatcattttagttaagtgggtcaaacagaatcaaaacaaaacccaaagaaataaataaaaaacaaaatggctaaatagtttaaaataggttaattcgaacacaggaaaggatctatttgttgtttcttttgtctggtctcctgagttgttaattaggtgaaaaaagatctgcaatggccccctccctttcctaatctggcttttacatttattttgtgccttaaagattaactacaaagataaacatggccaaaaataaataaataaatatggccatatgtccgttgttgcttagtcttcccttgcatgagctgagattgcgccattgcactccatcctgggagacaagagcgaaactctgcctcaaaaaaaaaagaatttaaagtatatcctttgaggtcattttatgtaacaattagatataacctcctgtgtatctctctgttcctcttcaaagttattaaaattcagcttaggtcatggatttttaatatgagggccagctgtactggtgtcaggtaggtgttttgggtgtagataatttaggactggagggctgagttaagttttaggaggagaatgtggttgagaatattttgaaaggaatttatggagtttgtgaaataacttcgaagtcctcttcctttacaatatttgaattcatatttgtaccttctcaaaatagtgattcatttttcctagaattacaggagggagctcttttactaatgttgttttgtttgcaactttgatggcttataataggaagtattctagttgtaaagaaaactctttagagacttttgactggtcagtatactgaggtgtgagatttgattcatgatgaagaaagcctatagattgccaaaaaattaattctccaaaccacctttcactctcagaaaatgagaccacaaaggagtatgctataaatcaaatttgccaaccaattatgtagatattactcattctaggactaatgatgatggtaaagaagttgccagtgttatggcaatgaaaatttcagaaaggaggagttgatgatcttctagatgtatatgaacacctgtctatatctgcatgtatatgttttgacctgcagtggttgcaatgttgatatgtgttcaagattattcctgtctacaaaactgaaggcccatgttcaaattgttctttattgggtgtttttatggtcacgtggtaacaattttcttacctaacctacaaaaggttctcttgatgaacatttttatttatatttactaatcttttttaaaaaaagctttcatagcattatataatcagatgaagaaagcccagtagaataaaaaaaaaattcattagcctagcctatattatgttttctgtcaaaggaaaacaaattctcaaataggaattctaaaaatatttactaaagtaaaataactacttaaaatgttttattccagttggaaggaaggtacagggagaaatcgcaattatttaggggagaagtatatttattataagatggtgtcctcaaattagcctaccatggcacgtaggggcagcagctatattagatttactagaggtgctaagttagaacactaggcttttattgaggcaggttttaatattgatagatgctttttgtttggtttgtttcttctgggagagaatggaggacttaagtagaagtagctactgataacagactttctagtagcagtttccactccacggttacctttttagtttcatagtatcttttcacaaagtattacaaataagctagattctcccagtttgggaatgcaagtttgctacatttttagcctggcaatatttgtgtaggtattgccttattggaaattctggaaacctgatactgcaacctgcaatgtaggatgtttgtatggcatttaaaggtaatggtgatgtttattattctatactttgcattctgtgagagtaattttcactctgtcttaagtgtgagtaagcctcttctaaaaatcttgttcttgccaagaaatttataaatcacatacgaagacgtctgttgctaacagttaactttatgaggtaactatatccttctatttctctggactcatttttaaaaaatatgccgaatactgcatactgtttaaggtagtatataagtttatgagagaagtggagagctttcttccttgaaaagtcggtatttgttgagataccatttgcctcacagagaggtgttccccactcccatccccattgccagataataaatattttgagaaaagtgacctaaaacagctgaaatcttaggtgcatctgtctgcagacctccttaagcaggctgtatcttacaattcccttactgcactgggtaagtgttaacttagtttttgttgtttgctcttttgctttaaatattctccaaattaccatttatgcaacatggttagggttaatactgcatggtattcatttatcttgtttcatgaactttccagtactgtacaaggtcaacaaagtaatgcctgtggtatcctcatctctcacttttttactctgtgattttagcacagtaaggtactgcaaagaccttccttccaaatgttctccttgactttatttcttgggccaattcagtatcctcaacatcctaagattttgttgttttatcactgacctgtggttggcctgttttattctaatttccagaaaagtcaagtcccagtatttgcaatatcaaataactctaaaaccgatgtgtgattctaccttccttactatttttactgggcaaatgccctatttttttaattattattatttttaacttttgggacacacaaaaatcagcaattctcatgaagcgtttgttagtgtggcagacttgtctaattcctgaaactcattcatccccttgagccagccaatggggaggaataggataatgcaaacacatgttttgttttctcattttcaaataatttaccatgttaaaataaacttttctttgttttttatttgtagagtcagctaagtacccatatttaaatgccgtctttattatttttttgaggtctttgtttttgtctgtttttgttttgttttgttttgtaaataaggtaactgggcaatcaaacaccttttggggattctggctttagtattttatcagccattttaaaattaaatataaaaatcctttgtaagaaacttgcatcctaatttttctttattgcaattgaaagtgtaaataataagacaatgtaagtaagaccttcctaatgtctaatacaaactgggctccagcaagtggccctatttttattagggttttgaaggtttgtgtgtgtgtgtgcgtgcgtgtgtgtgtttttcttttttaaatgtatagtagagtggtgtctgtataagtgttacctgtagtggggttttgtccagcaagcctgaaatttatactttgaaataaaactactgggtttttaacattc

SEQ ID NO: 22400 - protein, 37 aa, Homo sapiens
MAICPLLLSLPLHELRLRHCTPSWETRAKLCLKKKRI

SEQ ID NO: 22401 - DNA, 2278 bp, Homo sapiens
aaaacgcacctgtggaggcctctccagaaacagcagaggatccgagctgcgtgtaggcagggcgcgcatgtcaccctggcccgggcgcctggtccgctgctggagataaatggtcgaccccggagggagaggctagtaggggtgttgatgtgaactgattcgcccaagccttgggccgcaaaactgcgaaagaaagcggcaggcagcctctgcatttcccagaagtgcagctggggaactttcccagaccggcccaggggttgctagagggtcagacgtaaaggatccgcctttcctaggcggggtgggccccaggccaccacgtgaagcgtcctcgcccctcagagcccggagcaggccgggctcaagaaagaggaaagttgaggacgccccacctcggagaggcggcgcccctgagtaggccaggagcctctcttgcaacttctgccaccgcgggccaccgcggccgcctgatcccgcagaggaaggtcgcggccgtggagcgatgacccgcggcggtccgggcgggcgcccggggctgccacagccgccaccgcttctgctgctgctgctgctgctgccgctgttgttagtcaccgcggagccgccgaaacctgcaggagtctactatgcaactgcatactggatgcctgctgaaaagacagtacaagtcaaaaatgtaatggacaagaatggggacgcctatggcttttacaataactctgtgaaaaccacaggctggggcatcctggagatcagagctggctatggctctcaaaccctgagcaatgagatcatcatgtttgtggctggctttttggagggttacctcactgccccacacatgaatgaccactacacaaacctctacccacagctgatcacgaaaccttccatcatggataaagtgcaggattttatggagaagcaagataagtggacccggaaaaatatcaaagaatacaagactgattcattttggagacatacaggctatgtgatggcacaaatagatggcctctatgtaggagcaaagaagagggctatattagaagggacaaagccaatgaccctgttccagattcagttcctgaatagtgttggagatctattggatctgattccctcactctctcccacaaaaaacggcagcctaaaggtttttaagagatgggacatgggacattgctccgctcttatcaaggttcttcctggatttgagaacatcctttttgctcactcaagctggtacacgtatgcagccatgctcaggatatataaacactgggacttcaacgtcatagataaagataccagcagtagtcgcctctctttcagcagttacccagggtttttggagtctctggatgatttttacattcttagcagtggattgatattgctgcagaccacaaacagtgtgtttaataaaaccctgctaaagcaggtaatacccgagactctcctgtcctggcaaagagtccgtgtggccaatatgatggcagatagtggcaagaggtgggcagacatcttttcaaaatacaactctggcacctataacaatcaatacatggttctggacctgaagaaagtaaagctgaaccacagtcttgacaaaggcactctgtacattgtggagcaaattcctacatatgtagaatattctgaacaaactgatgttctacggaaaggatattggccctcctacaatgttcctttccatgaaaaaatctacaactggagtggctatccactgttagttcagaagctgggcttggactactcttatgatttagctccacgagccaaaattttccggcgtgaccaagggaaagtgactgatacggcatccatgaaatatatcatgcgatacaacaattataagaaggatccttacagtagaggtgacccctgtaataccatctgctgccgtgaggacctgaactcacctaacccaagtcctggaggttgttatgacacaaaggtggcagatatctacctagcatctcagtacacatcctatgccataagtggtcccacagtacaaggtggcctccctgtttttcgctgggaccgtttcaacaaaactctacatcagggcatgccagaggtctacaactttgattttattaccatgaaaccaattttgaaacttgatataaaatgaaggagggagatgacggactagaagactgtaaataagataccaaaggcactattttagctatgtttttcccatcagaattatgcaataaaatatattaatttgtcactttca

SEQ ID NO: 22402 - protein, 553 aa, Homo sapiens
MTRGGPGGRPGLPQPPPLLLLLLLLPLLLVTAEPPKPAGVYYATAYWMPAEKTVQVKNVMDKNGDAYGFYNNSVKTTGWGILEIRAGYGSQTLSNEIIMFVAGFLEGYLTAPHMNDHYTNLYPQLITKPSIMDKVQDFMEKQDKWTRKNIKEYKTDSFWRHTGYVMAQIDGLYVGAKKRAILEGTKPMTLFQIQFLNSVGDLLDLIPSLSPTKNGSLKVFKRWDMGHCSALIKVLPGFENILFAHSSWYTYAAMLRIYKHWDFNVIDKDTSSSRLSFSSYPGFLESLDDFYILSSGLILLQTTNSVFNKTLLKQVIPETLLSWQRVRVANMMADSGKRWADIFSKYNSGTYNNQYMVLDLKKVKLNHSLDKGTLYIVEQIPTYVEYSEQTDVLRKGYWPSYNVPFHEKIYNWSGYPLLVQKLGLDYSYDLAPRAKIFRRDQGKVTDTASMKYIMRYNNYKKDPYSRGDPCNTICCREDLNSPNPSPGGCYDTKVADIYLASQYTSYAISGPTVQGGLPVFRWDRFNKTLHQGMPEVYNFDFITMKPILKLDIK

SEQ ID NO: 22403 - DNA, 439 bp, Homo sapiens
aagctttattttctgtacattattttgtaattaaatgcctgtgcccattttcaaaataaatgaacatggataacatttcttttgctctctctccttttctgtctccttccctgtcaatccctcccttacttcccttccattccaaatcaggatattggccctcctacaatgttcctttccatgaaaaaatctacaactggagtggctatccactgttagttcagaagctgggcttggactactcttatgatttagctccacgagccaaaattttccggcgtgaccaagggaaagtgactgatacggcatccatgaaatatatcatgcgatacaacagtacgtagcatatttctcaagaatcattcttcaaaactccttttcttccctcattttttttgtatgaacagcatcaaagtcaaatttgtatttattttgttgg

SEQ ID NO: 22404 - protein, 94 aa, Homo sapiens [sequence omitted]

SEQ ID NO: 22405 - DNA, 445 bp, Homo sapiens
gggtcttgccatgaaggacattcaagcagttctgaggagaggcccaagtgaagaggaaccagttgccagcaccaccctgtcagctatgttaggcccctgcctatataaacaatttgattaaaaacatatatttaaaaattcatcagtacatgtgagatatgatgatttatcattgaagatttaggatgatgggcagagaaaggcaatctgttttgtctattgtccaatcagtgcacgtgaagatttgttacagtatccagaaaagactaaaaaagaccaagcctgttaaacaactccatcaaagaaaaacaaggaagccatccagctttgttctggactcagcagctaagatggcatgagcttcatcgtaaagcatagttctatgtcatgtctactggatgaatccaatgtggctggtcccttaataaaataagttgtaacataa

SEQ ID NO: 22406 - protein, 57 aa, Homo sapiens
MMGRERQSVLSIVQSVHVKICYSIQKRLKKTKPVKQLHQRKTRKPSSFVLDSAAKMA

SEQ ID NO: 22407 - DNA, 475 bp, Homo sapiens
gctggagttgtgggaatcaagatgcctcgttattgtctatttggagatacggtcaacacagcctctaggatggaatccactggcctccgtaagaagggagactgtttttctcagaggacaaagatgctgttttccagcagagggcaactttttttttttccactgtggatcctttatcccaagagggagcttccaccttccactctggaaccttattccagcagttgttccagggagcttctacctgtggaggcctctccagaaacagcagaggatccgagctgcgtgtaggcagggcgcgcatgtcaccctggcccgggcgcctggtccgctgctggagataaatggtcgaccccggagggagaggctagtaggggtgttgatgtgaactgattcgcccaagccttgggccgcaaaactcggagaggcggcgcccctgagtaggccaggagcctctcttgcaacttctgccacc

SEQ ID NO: 22408 - protein, 89 aa, Homo sapiens
MPRYCLFGDTVNTASRMESTGLRKKGDCFSQRTKMLFSSRGQLFFFPLWILYPKRELPPSTLEPYSSSCSRELLPVEASPETAEDPSCV

SEQ ID NO: 22409 - DNA, 3877 bp, Homo sapiens
ggctgtgttccacggcccatgtgaccagttgggcatgaccagagagaagcgtggggaagagtgggctgagggactccactagaggctgtccatctggattccctgcctccctaggagcccaacagagcaaagcaagtgggcacaaggagtatggttctaacgtgattggggtcatgaagacgttgctgttggacttggctttgtggtcactgctcttccagcccgggtggctgtcctttagttcccaggtgagtcagaactgccacaatggcagctatgaaatcagcgtcctgatgatgggcaactcagcctttgcagagcccctgaaaaacttggaagatgcggtgaatgaggggctggaaatagtgagaggacgtctgcaaaatgctggcctaaatgtgactgtgaacgctactttcatgtattcggatggtctgattcataactcaggcgactgccggagtagcacctgtgaaggcctcgacctactcaggaaaatttcaaatgcacaacggatgggctgtgtcctcatagggccctcatgtacatactccaccttccagatgtaccttgacacagaattgagctaccccatgatctcagctggaagttttggattgtcatgtgactataaagaaaccttaaccaggctgatgtctccagctagaaagttgatgtacttcttggttaacttttggaaaaccaacgatctgcccttcaaaacttattcctggagcacttcgtatgtttacaagaatggtacagaaactgaggactgtttctggtaccttaatgctctggaggctagcgtttcctatttctcccacgaactcggctttaaggtggtgttaagacaagataaggagtttcaggatatcttaatggaccacaacaggaaaagcaatgtgattattatgtgtggtggtccagagttcctctacaagctgaagggtgaccgagcagtggctgaagacattgtcattattctagtggatcttttcaatgaccagtactttgaggacaatgtcacagcccctgactatatgaaaaatgtccttgttctgacgctgtctcctgggaattcccttctaaatagctctttctccaggaatctatcaccaacaaaacgagactttgctcttgcctatttgaatggaatcctgctctttggacatatgctgaagatatttcttgaaaatggagaaaatattaccacccccaaatttgctcatgctttcaggaatctcacttttgaagggtatgacggtccagtgaccttggatgactggggggatgttgacagtaccatggtgcttctgtatacctctgtggacaccaagaaatacaaggttcttttgacctatgatacccacgtaaataagacctatcctgtggatatgagccccacattcacttggaagaactctaaacttcctaatgatattacaggccggggccctcagatcctgatgattgcagtcttcaccctcactggagctgtggtgctgctcctgctcgtcgctctcctgatgctcagaaaatatagaaaagattatgaacttcgtcagaaaaaatggtcccacattcctcctgaaaatatctttcctctggagaccaatgagaccaatcatgttagcctcaagatcgatgatgacaaaagacgagatacaatccagagactacgacagtgcaaatacgacaaaaagcgagtgattctcaaagatctcaagcacaatgatggtaatttcactgaaaaacagaagatagaattgaacaagttgcttcagattgactattacaacctgaccaagttctacggcacagtgaaacttgataccatgatcttcggggtgatagaatactgtgagagaggatccctccgggaagttttaaatgacacaatttcctaccctgatggcacattcatggattgggagtttaagatctctgtcttgtatgacattgctaagggaatgtcatatctgcactccagtaagacagaagtccatggtcgtctgaaatctaccaactgcgtagtggacagtagaatggtggtgaagatcactgattttggctgcaattccattttacctccaaaaaaggacctgtggacagctccagagcacctccgccaagccaacatctctcagaaaggagatgtgtacagctatgggatcatcgcacaggagatcatcctgcggaaagaaaccttctacactttgagctgtcgggaccggaatgagaagattttcagagtggaaaattccaatggaatgaaacccttccgcccagatttattcttggaaacagcagaggaaaaagagctagaagtgtacctacttgtaaaaaactgttgggaggaagatccagaaaagagaccagatttcaaaaaaattgagactacacttgccaagatatttggactttttcatgaccaaaaaaatgaaagctatatggataccttgatccgacgtctacagctatattctcgaaacctggaacatctggtagaggaaaggacacagctgtacaaggcagagagggacagggctgacagacttaactttatgttgcttccaaggctagtggtaaagtctctgaaggagaaaggctttgtggagccggaactatatgaggaagttacaatctacttcagtgacattgtaggtttcactactatctgcaaatacagcacccccatggaagtggtggacatgcttaatgacatctataagagttttgaccacattgttgatcatcatgatgtctacaaggtggaaaccatcggtgatgcgtacatggtggctagtggtttgcctaagagaaatggcaatcggcatgcaatagacattgccaagatggccttggaaatcctcagcttcatggggacctttgagctggagcatcttcctggcctcccaatatggattcgcattggagttcactctggtccctgtgctgctggagttgtgggaatcaagatgcctcgttattgtctatttggagatacggtcaacacagcctctaggatggaatccactggcctccctttgagaattcacgtgagtggctccaccatagccatcctgaagagaactgagtgccagttcctttatgaagtgagaggagaaacatacttaaagggaagaggaaatgagactacctactggctgactgggatgaaggaccagaaattcaacctgccaacccctcctactgtggagaatcaacagcgtttgcaagcagaattttcagacatgattgccaactctttacagaaaagacaggcagcagggataagaagccaaaaacccagacgggtagccagctataaaaaaggcactctggaatacttgcagctgaataccacagacaaggagagcacctatttttaaacctaaatgaggtataaggactcacacaaattaaaatacagctgcactgaggcagcgacctcaagtgtcctgaaagcttacattttcctgagacctcaatgaagcagaaatgtacttaggcttggctgccctgtctggaacatggactttcttgcatgaatcagatgtgtgttctcagtgaaataactaccttccactctggaaccttattccagcagttgttccagggagcttctacctggaaaagaaaagaaatgaatagactatctagaacttgagaagattttattcttatttcatttattttttgtttgtttatttttatcgtttttgtttactggctttccttctgtattcataagattttttaaattgtcataattatattttaaatacccatcttcattaaagtatatttaactcataatttttgcagaaaatatgctatatattaggcaagaataaaagctaaaggtttccca

SEQ ID NO: 22410 - protein, 1073 aa, Homo sapiens
MKTLLLDLALWSLLFQPGWLSFSSQVSQNCHNGSYEISVLMMGNSAFAEPLKNLEDAVNEGLEIVRGRLQNAGLNVTVNATFMYSDGLIHNSGDCRSSTCEGLDLLRKISNAQRMGCVLIGPSCTYSTFQMYLDTELSYPMISAGSFGLSCDYKETLTRLMSPARKLMYFLVNFWKTNDLPFKTYSWSTSYVYKNGTETEDCFWYLNALEASVSYFSHELGFKVVLRQDKEFQDILMDHNRKSNVIIMCGGPEFLYKLKGDRAVAEDIVIILVDLFNDQYFEDNVTAPDYMKNVLVLTLSPGNSLLNSSFSRNLSPTKRDFALAYLNGILLFGHMLKIFLENGENITTPKFAHAFRNLTFEGYDGPVTLDDWGDVDSTMVLLYTSVDTKKYKVLLTYDTHVNKTYPVDMSPTFTWKNSKLPNDITGRGPQILMIAVFTLTGAVVLLLLVALLMLRKYRKDYELRQKKWSHIPPENIFPLETNETNHVSLKIDDDKRRDTIQRLRQCKYDKKRVILKDLKHNDGNFTEKQKIELNKLLQIDYYNLTKFYGTVKLDTMIFGVIEYCERGSLREVLNDTISYPDGTFMDWEFKISVLYDIAKGMSYLHSSKTEVHGRLKSTNCVVDSRMVVKITDFGCNSILPPKKDLWTAPEHLRQANISQKGDVYSYGIIAQEIILRKETFYTLSCRDRNEKIFRVENSNGMKPFRPDLFLETAEEKELEVYLLVKNCWEEDPEKRPDFKKIETTLAKIFGLFHDQKNESYMDTLIRRLQLYSRNLEHLVEERTQLYKAERDRADRLNFMLLPRLVVKSLKEKGFVEPELYEEVTIYFSDIVGFTTICKYSTPMEVVDMLNDIYKSFDHIVDHHDVYKVETIGDAYMVASGLPKRNGNRHAIDIAKMALEILSFMGTFELEHLPGLPIWIRIGVHSGPCAAGVVGIKMPRYCLFGDTVNTASRMESTGLPLRIHVSGSTIAILKRTECQFLYEVRGETYLKGRGNETTYWLTGMKDQKFNLPTPPTVENQQRLQAEFSDMIANSLQKRQAAGIRSQKPRRVASYKKGTLEYLQLNTTDKESTYF

SEQ ID NO: 22411 - DNA, 657 bp, Homo sapiens
gaggacgggcaccaaatctgcattgtccattgctatttcccaggttgagttgctgaagcggcttcattgtctggggacatacccaaggttcgtcatcgcgtgacgagaagattaaggacacagacgcaaacacggagcgggtcaagtagcggaaagtttaataggcaggaaagaagagaacagctcaccggtagagagccgtcaatggtgtgccagataagaagctatgcactgaaaagatggagaggagcggcgagattctgcatcttagcttgcctaggtggggagcaggaaaaaggaggaagactgaagcacaaagcttctctcgtctgtgtcaccctctgcaaggagtttgcagttggactggaaaacccacatttcccactgagtgctttaccactctcagtggaacttaggttctgatactgagaacaaaggagagaatggacaatgaagggatcactagcagttttcattacaaatagtatcttgaaaaaaccttaacaataaggtgaggtgtggtggctcatgcctgtaatatcagcactttgggagaccgaggtgggcagattgcttgagcccaggagttccagaccagcctgggcaacatggcgaaaccctgtctctacaaaaatatacaaaaaattagccagcatg

SEQ ID NO: 22412 - protein, 72 aa, Homo sapiens
MVCQIRSYALKRWRGAARFCILACLGGEQEKGGRLKHKASLVCVTLCKEFAVGLENPHFPLSALPLSVELRF

SEQ ID NO: 22413 - DNA, 2170 bp, Homo sapiens
attggagttgactaatatgaatgtatgttattcaacccaaagagacatgaagaggcccaaaagtgactctctccattgccccactgcatgtgtttgtacactgaatgcttacagatagatggtaaatgattgtggactcttccaagattcacaatgatatggtgaatccaaagactggaaccaaaaagatttactcagtgctttagttttaacaacagtaaattgtctaccaacacccatcatggctaaaagtgcggaggtcaaactggcaatatttgggagagcaggcgtgggcaagtcagctcttgtagtgagatttctgaccaaacggttcatctgggaatatgatcccaccctcgaatcaacctaccgacaccaagcaaccatcgatgatgaagttgtttccatggagatactagacactgctggtcaggaagataccattcagagggaggggcacatgcgatggggggaaggctttgtgctggtctacgacattactgaccgaggaagttttgaggaagtgctgccacttaagaacatcctagatgagatcaaaaagcccaagaatgtgactctcatcttggttggaaacaaagctgacttggaccactccaggcaggttagcacagaagaaggagagaagctggccacagaattggcttgtgctttttacgagtgctctgcctgcactggagaagggaacatcacagagatattctatgaattgtgtcgagaggtgcgtcgccggaggatggtgcagggcaagacgaggcgacgcagctccaccacgcatgtcaagcaagccattaacaagatgctcaccaaaatcagtagttaggcagcccagctgaggtggaccaactaattggaaacactcttccccttctgttcccctttcaaaaataaaacaaaatattgcattctttgtttggattctgagaaatgtctgggcttcccattgtttctggcctctaataggttgggaagttttagcgtgttttatgcaatttcagtgctaacaatttcttcctttcctgcttgaataagatacactctaatggcatttgaacatgtaatcaccagagattctgaaatgactggtttatgttaagctatttttaggcatcttcaccttgctttaagtaggttgaagtttttgcaaaggcatttaaaaattcaatttcttgtcagatactacaaataattttcttaaaagtctaagatagcagaaaatacagtaaaaacacaggagaagaagctgagctattggaacaggaaatagaaggaactctagtttctgtttgaagtgaggattttctgaattatctaatatcatctaggttttctttaaaattttattttgttcttcagttcaagcatcttctcactaatgtttttcactataacagagaattcatttcaatttgagttggttctctcaatgatctattgatcattacaccctaactctccttccttggctcaaacaatattttccctataacaaaggcaataggacacaaaattcacatcctgctgggccttttttcatcaagtcagggtgatataaaaacattggaagtcttttcaccaaaccctgactttattgaatgctagtagaagatgtagaattagagacatctgatttgtttatcaccttagcagaaaaaccacagtccaaaagacaagcaaattaagaatggagcttaaccatgcctccattgggaagtctagactttgagccaggtacagtaagaaaaattagcctctgattcattaagtttgccacatgacttattttgatattttggatacattaactcacttaggagaattcagaaaagaatgggtgattaaagttcattacagctgaataaatgtgtctaaaacagactcttgtattctgaaagtacagtctacaactgataaaaccttatgattcttttctcccccattatgcccctatatatatcaagatttgggtactttattttagtagaaaatatatatcttttacatatgtatgtatttataaatgcatagatatatgtataaaaatttgtaagcgttagcggcattaattcaccaatgcatttggacaacttgatgtaactgactttattttatgtgactataataaaaagcataattttctcattctgtcata

SEQ ID NO: 22414 - protein, 199 aa, Homo sapiens; identical to SEQ ID NO: 2939

SEQ ID NO: 22415 - DNA, 2318 bp, Homo sapiens
atcctggccgctgagcgcagcggccttggccgggctcagctcgcgtcctgccgcagtccctccgccgctagtcggagcgagcgcgagtgaggagacccccgccgggccactggcacttgcttctgcggcgagtcccacccacgaccgcagcccagcaactcgcaaacgcaacctgaagcctgggctgcgcagtgtgggagggcttcgcgatcttgggggacccattccgaacttgcagaggaccgtagctctcctggcctggagagtgtgaacaggattgtggactcttccaagattcacaatgatatggtgaatccaaagactggaaccaaaaagatttactcagtgctttagttttaacaacagtaaattgtctaccaacacccatcatggctaaaagtgcggaggtcaaactggcaatatttgggagagcaggcgtgggcaagtcagctcttgtagtgagatttctgaccaaacggttcatctgggaatatgatcccaccctcgaatcaacctaccgacaccaagcaaccatcgatgatgaagttgtttccatggagatactagacactgctggtcaggaagataccattcagagggaggggcacatgcgatggggggaaggctttgtgctggtctacgacattactgaccgaggaagttttgaggaagtgctgccacttaagaacatcctagatgagatcaaaaagcccaagaatgtgactctcatcttggttggaaacaaagctgacttggaccactccaggcaggttagcacagaagaaggagagaagctggccacagaattggcttgtgctttttacgagtgctctgcctgcactggagaagggaacatcacagagatattctatgaattgtgtcgagaggtgcgtcgccggaggatggtgcagggcaagacgaggcgacgcagctccaccacgcatgtcaagcaagccattaacaagatgctcaccaaaatcagtagttaggcagcccagctgaggtggaccaactaattggaaacactcttccccttctgttcccctttcaaaaataaaacaaaatattgcattctttgtttggattctgagaaatgtctgggcttcccattgtttctggcctctaataggttgggaagttttagcgtgttttatgcaatttcagtgctaacaatttcttcctttcctgcttgaataagatacactctaatggcatttgaacatgtaatcaccagagattctgaaatgactggtttatgttaagctatttttaggcatcttcaccttgctttaagtaggttgaagtttttgcaaaggcatttaaaaattcaatttcttgtcagatactacaaataattttcttaaaagtctaagatagcagaaaatacagtaaaaacacaggagaagaagctgagctattggaacaggaaatagaaggaactctagtttctgtttgaagtgaggattttctgaattatctaatatcatctaggttttctttaaaattttattttgttcttcagttcaagcatcttctcactaatgtttttcactataacagagaattcatttcaatttgagttggttctctcaatgatctattgatcattacaccctaactctccttccttggctcaaacaatattttccctataacaaaggcaataggacacaaaattcacatcctgctgggccttttttcatcaagtcagggtgatataaaaacattggaagtcttttcaccaaaccctgactttattgaatgctagtagaagatgtagaattagagacatctgatttgtttatcaccttagcagaaaaaccacagtccaaaagacaagcaaattaagaatggagcttaaccatgcctccattgggaagtctagactttgagccaggtacagtaagaaaaattagcctctgattcattaagtttgccacatgacttattttgatattttggatacattaactcacttaggagaattcagaaaagaatgggtgattaaagttcattacagctgaataaatgtgtctaaaacagactcttgtattctgaaagtacagtctacaactgataaaaccttatgattcttttctcccccattatgcccctatatatatcaagatttgggtactttattttagtagaaaatatatatcttttacatatgtatgtatttataaatgcatagatatatgtataaaaatttgtaagcgttagcggcattaattcaccaatgcatttggacaacttgatgtaactgactttattttatgtgactataataaaaagcataattttctcattctgtcata

SEQ ID NO: 22416 - protein, 199 aa, Homo sapiens; identical to SEQ ID NO: 2939

SEQ ID NO: 22417 - DNA, 935 bp, Homo sapiens
agtccctccgccgctagtcggagcgagcgcgagtgaggagacccccgccgggccactggcacttgcttctgcggcgagtcccacccacgaccgcagcccagcaactcgcaaacgcaacctgaagcctgggctgcgcagtgtgggagggcttcgcgatcttgggggacccattccgaacttgcagaggaccgtagctctcctggcctggagagtgtgaacaggattgtggactcttccaagattcacaatgatatggtgaatccaaagactggaaccaaaaagatttactcagtgctttagttttaacaacagtaaattgtctaccaacacccatcatggctaaaagtgcggaggtcaaactggcaatatttgggagagcaggcgtgggcaagtcagctcttgtagtgagatttctgaccaaacggttcatctgggaatatgatcccaccctcgaatcaacctaccgacaccaagcaaccatcgatgatgaagttgtttccatggagatactagacactgctggtcaggtgaataaagagttcagctaaaatatttttctggatcaaataaaactgagaaatctatgctatgaacaaaaataaggcacttttcttcaactaacttttgcatgcctaaaacctttttctctaattaactagccattttatatattaacatatttgtaaatatctgtatattcatccttatataaactgcccagtgtttcaagggggttttgaaaatactataatattcacatatcatctaggttagactctctcacctatattttgtggcatagcaagatattaataagttttcatggtcaaatgtgttttgaaatgctcaaatgaagttaaacaggtgtctttactgaaagaattctcagagcctctaacaggcttgtgtgtgagtctttaagaaagagatttagt

SEQ ID NO: 22418 - protein, 70 aa, Homo sapiens
MAKSAEVKLAIFGRAGVGKSALVVRFLTKRFIWEYDPTLESTYRHQATIDDEVVSMEILDTAGQVNKEFS

SEQ ID NO: 22419 - DNA, 836 bp, Homo sapiens
tccaacctagactctgaaaaacacaaaaaaggacgtatgaagaccgattgtttcctggtagcagtgccactttcaggatactagaggttggttgtggagttggaaatagtgtgtttccaattttgaacacttcgcagagctttccagagtcctttctgtattgttgtgattttgcttctggagctgtggagcttgtaaagtcacactcgttctacagagcagcccagtgttttgcctttgttcatgatgtatgtgatgatggcttaccttacccttttccagatgggatcctggatgtcattctccttgtctttgtgctctcttctattcatcctaacaggacattgtttatctgaaaatttttatgttcgaggagatggtaccagagcatatttctttacaaaaggggaagtccacagtatgttctgcaaagccagtttagatgaaaagcaaaatccggttgattgccacttacgagttaataggaaaaaacaagtaaaaatgcaccgagtgtgggttcaaggcaaattccagaaaccattgcaccagactcagaatagttccaatatggtatctacactcctttctcaaggctgaactttgtaacatgttaaggtacaaagccagaggactgtgctattcaaggactactgtaaggttttcgtttctcaaaagacaatgagaaaaaaagaagagaatttgtatttcttgctgttttgtcataggtgagctcctttgtgcattttaagcacatgtaagtgattcagcacagtatgcctttttctgcgctttgaaaacttgatatgcctaagcttgtttgaatttattacatctaa

SEQ ID NO: 22420 - protein, 117 aa, Homo sapiens
MMYVMMAYLTLFQMGSWMSFSLSLCSLLFILTGHCLSENFYVRGDGTRAYFFTKGEVHSMFCKASLDEKQNPVDCHLRVNRKKQVKMHRVWVQGKFQKPLHQTQNSSNMVSTLLSQG

SEQ ID NO: 22421 - DNA, 2264 bp, Homo sapiens
agtgagagtgtccctgctgccagaggactacggcgggctgggcgcggggtccccgcctctcgctcaccacacagaccccgcgcctcctctggcagccgcggtggtggcggcggcagagcctcgcccactccaatccccaccctctccatccttagtcattaaagaacagcagcgcctggcacgttcttggaggaccccgggcgcagaggaggaaagggagcaggcgcagggggactggaaaggcagcatgcgctcgccaggagcaacctcggcgcccagggtctgaggctgcagccccagttcgccattgtgagccgccgccgggggagtccgctagcgcagccgtgcccccgagtccccgtccgcgcagcgatggggcacctgcccacggggatacacggcgcccgccgcctcctgcctctgctctggctctttgtgctgttcaagaatgctacagctttccatgtaactgtccaagatgataataacatcgttgtctcattagaagcttcagacgtcatcagtccagcatctgtgtatgttgtgaagataactggtgaatccaaaaattatttcttcgaatttgaggaattcaacagcactttgcctcctcctgttattttcaaggccagttatcatggcctttattatataatcactctggtagtggtaaatggaaatgtggtgaccaagccatccagatcaatcactgtgttaacaaaacctctacctgtaaccagtgtttccatatatgactataaaccttctcctgaaacaggagtcctgtttgaaatacattatccagaaaaatataacgttttcacaagagtgaacattagctactgggaaggtaaagacttccggacaatgctatataaagatttctttaagggaaaaacagtatttaatcactggctgccaggaatgtgttatagtaatatcacctttcagctggtatctgaggcaacttttaataaaagtacccttgttgagtacagtggtgtcagtcacgaacccaaacagcacagaactgccccttatccacctcaaaatatttccgttcgtatcgtaaacttgaacaaaaacaactgggaagaacagagtggcaatttcccagaagaatccttcatgagatcacaagatacaataggaaaagaaaaactcttccattttacagaagaaacccctgaaattccctcgggcaacatttcttccggttggcctgattttaatagcagtgactatgaaactacgtctcagccatattggtgggacagtgcatctgcagctcctgaaagtgaagatgaatttgtcagcgtacttcccatggaatacgaaaataacagtacactcagtgagacagagaagtcaacatcaggctctttctcctttttccctgtgcaaatgatattgacctggttaccacccaaaccacccactgcttttgatgggttccatatccatattgaacgagaagagaactttactgaatatttgatggtggatgaagaagcacatgaatttgttgcagaactgaaggaacctgggaaatataagttatctgtgacaacctttagttcctcaggatcttgtgaaactcgaaaaagtcagtcagcaaaatcactcagcttttatatcagtccttcaggagagtggattgaagaactgaccgagaagccgcagcacgtgagtgtccacgttttaagctcaaccactgccttgatgtcctggacatcttcccaagagaactacaacagcaccattgtgtctgtggtgtcgctgacctgccagaaacaaaaggagagccagaggcttgaaaagcagtactgcactcaggtgaactcaagcaaacctattattgaaaatctggttcctggtgcccagtaccaggttgtaatatacctaaggaaaggccctttgattggaccaccttcagatcctgtgacatttgctattgttcccacaggaataaaggatttaatgctctatcctttgggtcctacggccgtggttctgagctggaccagaccttatttaggcgtgttcagaaaatacgtggttgaaatgttttatttcaaccctgctacaatgacatcagagtggaccacctactatgaaatagcagcaactgtttccttaactgcatccgtggtaatcttcccttaaccaactgtcagtctttcctatgggaacaggcaaacctttatgtaccaaatgtgtctttaagaaattatctataaatttgattattttgtaaatacaca

SEQ ID NO: 22422 - protein, 597 aa, Homo sapiens
MGHLPTGIHGARRLLPLLWLFVLFKNATAFHVTVQDDNNIVVSLEASDVISPASVYVVKITGESKNYFFEFEEFNSTLPPPVIFKASYHGLYYIITLVVVNGNVVTKPSRSITVLTKPLPVTSVSIYDYKPSPETGVLFEIHYPEKYNVFTRVNISYWEGKDFRTMLYKDFFKGKTVFNHWLPGMCYSNITFQLVSEATFNKSTLVEYSGVSHEPKQHRTAPYPPQNISVRIVNLNKNNWEEQSGNFPEESFMRSQDTIGKEKLFHFTEETPEIPSGNISSGWPDFNSSDYETTSQPYWWDSASAAPESEDEFVSVLPMEYENNSTLSETEKSTSGSFSFFPVQMILTWLPPKPPTAFDGFHIHIEREENFTEYLMVDEEAHEFVAELKEPGKYKLSVTTFSSSGSCETRKSQSAKSLSFYISPSGEWIEELTEKPQHVSVHVLSSTTALMSWTSSQENYNSTIVSVVSLTCQKQKESQRLEKQYCTQVNSSKPIIENLVPGAQYQVVIYLRKGPLIGPPSDPVTFAIVPTGIKDLMLYPLGPTAVVLSWTRPYLGVFRKYVVEMFYFNPATMTSEWTTYYEIAATVSLTASVVIFP

SEQ ID NO: 22423 - DNA, 5267 bp, Homo sapiens
agtgagagtgtccctgctgccagaggactacggcgggctgggcgcggggtccccgcctctcgctcaccacacagaccccgcgcctcctctggcagccgcggtggtggcggcggcagagcctcgcccactccaatccccaccctctccatccttagtcattaaagaacagcagcgcctggcacgttcttggaggaccccgggcgcagaggaggaaagggagcaggcgcagggggactggaaaggcagcatgcgctcgccaggagcaacctcggcgcccagggtctgaggctgcagccccagttcgccattgtgagccgccgccgggggagtccgctagcgcagccgtgcccccgagtccccgtccgcgcagcgatggggcacctgcccacggggatacacggcgcccgccgcctcctgcctctgctctggctctttgtgctgttcaagaatgctacagctttccatgtaactgtccaagatgataataacatcgttgtctcattagaagcttcagacgtcatcagtccagcatctgtgtatgttgtgaagataactggtgaatccaaaaattatttcttcgaatttgaggaattcaacagcactttgcctcctcctgttattttcaaggccagttatcatggcctttattatataatcactctggtagtggtaaatggaaatgtggtgaccaagccatccagatcaatcactgtgttaacaaaacctctacctgtaaccagtgtttccatatatgactataaaccttctcctgaaacaggagtcctgtttgaaatacattatccagaaaaatataacgttttcacaagagtgaacattagctactgggaaggtaaagacttccggacaatgctatataaagatttctttaagggaaaaacagtatttaatcactggctgccaggaatgtgttatagtaatatcacctttcagctggtatctgaggcaacttttaataaaagtacccttgttgagtacagtggtgtcagtcacgaacccaaacagcacagaactgccccttatccacctcaaaatatttccgttcgtatcgtaaacttgaacaaaaacaactgggaagaacagagtggcaatttcccagaagaatccttcatgagatcacaagatacaataggaaaagaaaaactcttccattttacagaagaaacccctgaaattccctcgggcaacatttcttccggttggcctgattttaatagcagtgactatgaaactacgtctcagccatattggtgggacagtgcatctgcagctcctgaaagtgaagatgaatttgtcagcgtacttcccatggaatacgaaaataacagtacactcagtgagacagagaagtcaacatcaggctctttctcctttttccctgtgcaaatgatattgacctggttaccacccaaaccacccactgcttttgatgggttccatatccatattgaacgagaagagaactttactgaatatttgatggtggatgaagaagcacatgaatttgttgcagaactgaaggaacctgggaaatataagttatctgtgacaacctttagttcctcaggatcttgtgaaactcgaaaaagtcagtcagcaaaatcactcagcttttatatcagtccttcaggagagtggattgaagaactgaccgagaagccgcagcacgtgagtgtccacgttttaagctcaaccactgccttgatgtcctggacatcttcccaagagaactacaacagcaccattgtgtctgtggtgtcgctgacctgccagaaacaaaaggagagccagaggcttgaaaagcagtactgcactcaggtgaactcaagcaaacctattattgaaaatctggttcctggtgcccagtaccaggttgtaatatacctaaggaaaggccctttgattggaccaccttcagatcctgtgacatttgctattgttcccacaggaataaaggatttaatgctctatcctttgggtcctacggccgtggttctgagctggaccagaccttatttaggcgtgttcagaaaatacgtggttgaaatgttttatttcaaccctgctacaatgacatcagagtggaccacctactatgaaatagcagcaactgtttccttaactgcatccgtgagaatagctaatctgctgccagcatggtactacaacttccgggttaccatggtgacgtggggagatccagaattgagctgctgtgacagctctaccatcagcttcataacagccccagtggctccggaaatcacttctgtggaatatttcaacagtctgttatatatcagttggacatatggggatgatacaacggacttgtcccattctagaatgcttcactggatggtggttgcagaaggaaaaaagaaaattaaaaagagtgtaacacgcaatgtcatgactgcaattctcagcttgcctccaggcgacatctataacctctcagtaactgcttgtactgaaagaggaagtaatacctccatgctccgccttgtcaagctagaaccagctccacccaaatcactcttcgcagtgaacaaaacccagacttcagtgactttgctgtgggtggaagagggagtagctgatttctttgaagttttctgtcaacaagttggctccagtcagaaaaccaaacttcaggaaccagttgctgtttcttcccatgtcgtgaccatctccagccttcttcctgccactgcctacaattgtagtgtcaccagctttagccatgacagccccagtgtccctacgttcatagccgtctcaacaatggttacagagatgaatcccaatgtggtagtgatctccgtgctggccatccttagcacacttttaattggactgttgcttgttaccctcattattcttaggaaaaagcatctgcagatggctagggagtgtggagctggtacatttgtcaattttgcatccttagagagggatggaaagcttccatacaactggagtaaaaatggtttaaagaagaggaaactgacaaacccggttcaactggatgactttgatgcctatattaaggatatggccaaagactctgactataaattttctcttcagtttgaggagttgaaattgattggactggatatcccacactttgctgcagatcttccactgaatcgatgtaaaaaccgttacacaaacatcctaccatatgacttcagccgtgtgagattagtctccatgaatgaagaggaaggtgcagactacatcaatgccaactatattcctggatacaactcaccccaggagtatattgccacccaggggccactgcctgaaaccagaaatgacttctggaagatggtcctgcaacaaaagtctcagattattgtcatgctcactcagtgtaatgagaaaaggagggtgaaatgtgaccattactggccattcacggaagaacctatagcctatggagacatcactgtggagatgatttcagaggaagagcaggacgactgggcctgtagacacttccggatcaactatgctgacgagatgcaggatgtgatgcattttaactacactgcatggcctgatcatggtgtgcccacagcaaatgctgcagaaagtatcctgcagtttgtacacatggtccgacagcaagctaccaagagcaaaggtcccatgatcattcactgcagtgctggcgtgggacggacaggaacattcattgccctggacaggctcttgcagcacattcgggatcatgagtttgttgacatcttagggctggtgtcagaaatgaggtcataccggatgtctatggtacagacagaggagcagtacatttttatccatcagtgtgtgcaactgatgtggatgaagaagaagcagcagttctgcatcagtgatgtcatatacgagaatgttagcaagtcctagttcagaatccggagcagagaggacatgatgtgcgcccatcctcccttgcttccagattgttttagtgggccctgatggtcatttttctaaacagaggccctgctttgtaatatgtggccaaggagataatttatctcacagaagcaccgggaagacttagccttaaagagcctacagtgtccttttggactctttcacttcgggacatttaataatggaccaaattcaacagaacaccaggaaggtcaagacgctctccaaagggcaggaagtacagcacttccgaagagtttagttggccctttgctggttgggctgagttttttatttttaagtgtttgtttttcagtgcaataatttttgtgtgtgtgtgattcttatcagaaagttgaattgttttctgcctacaccgttcatcagccccataacccaggaaggaacaggcattgttagcatcagattatacctcattattaaaaggaggcatggccacacatgaagaaatggtcattctacttcaaagaaattgagccagcactatctgtactccaacattaccggatctggattggggaggttggtcagggaagagaggggttctacccacagatcaactgtgtaatcttttactattcaagctataattcagcttcaaagtagagtagaaaaaaaattgtcttaactgttctagttcttgatggttttcttccttattaacagttggtgtttcttccttggcccttttggactaatgttactgtccaagttctttctcaagaaaccacatctggttcagaagagtgtcaagttggactctttgaactctgttgctgtctgagcaatcgtggtgcctagactttgcattccttgttctgttgacctgcatacatgtgagagctatttctttaagaactatataggctgtgaaaacgcactttctttcccccaaagagctgggaatttatgaagttatggcaatgaactgcagcatgctgggacaattatttgactacttttttttgtaatattgtcaaatgtctctatggattctgacagagatttctttttgttttgttattcttttggttgtcagtttcattttaacgagtgtaactagtaacattttattctttggattttgtataattacagtacatgattgtgtattgtgacatgaatgctgtcaaaatgacattgatggcattgtgaagcctgttactttgtgtcacttcctgataaataagaggtgatgacatggatatacaacagaaaacactttgagttgaaagtaaacacaagctggctgcttccctgtggcaactgtggct

SEQ ID NO: 22424 - protein, 1188 aa, Homo sapiens; identical to SEQ ID NO: 2941

SEQ ID NO: 22425 - DNA, 5351 bp, Homo sapiens
agtgagagtgtccctgctgccagaggactacggcgggctgggcgcggggtccccgcctctcgctcaccacacagaccccgcgcctcctctggcagccgcggtggtggcggcggcagagcctcgcccactccaatccccaccctctccatccttagtcattaaagaacagcagcgcctggcacgttcttggaggaccccgggcgcagaggaggaaagggagcaggcgcagggggactggaaaggcagcatgcgctcgccaggagcaacctcggcgcccagggtctgaggctgcagccccagttcgccattgtgagccgccgccgggggagtccgctagcgcagccgtgcccccgagtccccgtccgcgcagcgatggggcacctgcccacggggatacacggcgcccgccgcctcctgcctctgctctggctctttgtgctgttcaagaatgctacagctttccatgtaactgtccaagatgataataacatcgttgtctcattagaagcttcagacgtcatcagtccagcatctgtgtatgttgtgaagataactggtgaatccaaaaattatttcttcgaatttgaggaattcaacagcactttgcctcctcctgttattttcaaggccagttatcatggcctttattatataatcactctggtagtggtaaatggaaatgtggtgaccaagccatccagatcaatcactgtgttaacaaaacctctacctgtaaccagtgtttccatatatgactataaaccttctcctgaaacaggagtcctgtttgaaatacattatccagaaaaatataacgttttcacaagagtgaacattagctactgggaaggtaaagacttccggacaatgctatataaagatttctttaagggaaaaacagtatttaatcactggctgccaggaatgtgttatagtaatatcacctttcagctggtatctgaggcaacttttaataaaagtacccttgttgagtacagtggtgtcagtcacgaacccaaacagcacagaactgccccttatccacctcaaaatatttccgttcgtatcgtaaacttgaacaaaaacaactgggaagaacagagtggcaatttcccagaagaatccttcatgagatcacaagatacaataggaaaagaaaaactcttccattttacagaagaaacccctgaaattccctcgggcaacatttcttccggttggcctgattttaatagcagtgactatgaaactacgtctcagccatattggtgggacagtgcatctgcagctcctgaaagtgaagatgaatttgtcagcgtacttcccatggaatacgaaaataacagtacactcagtgagacagagaagtcaacatcaggctctttctcctttttccctgtgcaaatgatattgacctggttaccacccaaaccacccactgcttttgatgggttccatatccatattgaacgagaagagaactttactgaatatttgatggtggatgaagaagcacatgaatttgttgcagaactgaaggaacctgggaaatataagttatctgtgacaacctttagttcctcaggatcttgtgaaactcgaaaaagtcagtcagcaaaatcactcagcttttatatcagtccttcaggagagtggattgaagaactgaccgagaagccgcagcacgtgagtgtccacgttttaagctcaaccactgccttgatgtcctggacatcttcccaagagaactacaacagcaccattgtgtctgtggtgtcgctgacctgccagaaacaaaaggagagccagaggcttgaaaagcagtactgcactcaggtgaactcaagcaaacctattattgaaaatctggttcctggtgcccagtaccaggttgtaatatacctaaggaaaggccctttgattggaccaccttcagatcctgtgacatttgctattgttcccacaggaataaaggatttaatgctctatcctttgggtcctacggccgtggttctgagctggaccagaccttatttaggcgtgttcagaaaatacgtggttgaaatgttttatttcaaccctgctacaatgacatcagagtggaccacctactatgaaatagcagcaactgtttccttaactgcatccgtgagaatagctaatctgctgccagcatggtactacaacttccgggttaccatggtgacgtggggagatccagaattgagctgctgtgacagctctaccatcagcttcataacagccccagtggctccggaaatcacttctgtggaatatttcaacagtctgttatatatcagttggacatatggggatgatacaacggacttgtcccattctagaatgcttcactggatggtggttgcagaaggaaaaaagaaaattaaaaagagtgtaacacgcaatgtcatgactgcaattctcagcttgcctccaggcgacatctataacctctcagtaactgcttgtactgaaagaggaagtaatacctccatgctccgccttgtcaagctagaaccagctccacccaaatcactcttcgcagtgaacaaaacccagacttcagtgactttgctgtgggtggaagagggagtagctgatttctttgaagttttctgtcaacaagttggctccagtcagaaaaccaaacttcaggaaccagttgctgtttcttcccatgtcgtgaccatctccagccttcttcctgccactgcctacaattgtagtgtcaccagctttagccatgacagccccagtgtccctacgttcatagccgtctcaacaatggttacagagatgaatcccaatgtggtagtgatctccgtgctggccatccttagcacacttttaattggactgttgcttgttaccctcattattcttaggaaaaagcatctgcagatggctagggagtgtggagctggtacatttgtcaattttgcatccttagagagggatggaaagcttccatacaactggcgtaggagtatatttgctttcttaaccctgctaccctcatgtctttggactgattatcttttggcattttatattaatccttggagtaaaaatggtttaaagaagaggaaactgacaaacccggttcaactggatgactttgatgcctatattaaggatatggccaaagactctgactataaattttctcttcagtttgaggagttgaaattgattggactggatatcccacactttgctgcagatcttccactgaatcgatgtaaaaaccgttacacaaacatcctaccatatgacttcagccgtgtgagattagtctccatgaatgaagaggaaggtgcagactacatcaatgccaactatattcctggatacaactcaccccaggagtatattgccacccaggggccactgcctgaaaccagaaatgacttctggaagatggtcctgcaacaaaagtctcagattattgtcatgctcactcagtgtaatgagaaaaggagggtgaaatgtgaccattactggccattcacggaagaacctatagcctatggagacatcactgtggagatgatttcagaggaagagcaggacgactgggcctgtagacacttccggatcaactatgctgacgagatgcaggatgtgatgcattttaactacactgcatggcctgatcatggtgtgcccacagcaaatgctgcagaaagtatcctgcagtttgtacacatggtccgacagcaagctaccaagagcaaaggtcccatgatcattcactgcagtgctggcgtgggacggacaggaacattcattgccctggacaggctcttgcagcacattcgggatcatgagtttgttgacatcttagggctggtgtcagaaatgaggtcataccggatgtctatggtacagacagaggagcagtacatttttatccatcagtgtgtgcaactgatgtggatgaagaagaagcagcagttctgcatcagtgatgtcatatacgagaatgttagcaagtcctagttcagaatccggagcagagaggacatgatgtgcgcccatcctcccttgcttccagattgttttagtgggccctgatggtcatttttctaaacagaggccctgctttgtaatatgtggccaaggagataatttatctcacagaagcaccgggaagacttagccttaaagagcctacagtgtccttttggactctttcacttcgggacatttaataatggaccaaattcaacagaacaccaggaaggtcaagacgctctccaaagggcaggaagtacagcacttccgaagagtttagttggccctttgctggttgggctgagttttttatttttaagtgtttgtttttcagtgcaataatttttgtgtgtgtgtgattcttatcagaaagttgaattgttttctgcctacaccgttcatcagccccataacccaggaaggaacaggcattgttagcatcagattatacctcattattaaaaggaggcatggccacacatgaagaaatggtcattctacttcaaagaaattgagccagcactatctgtactccaacattaccggatctggattggggaggttggtcagggaagagaggggttctacccacagatcaactgtgtaatcttttactattcaagctataattcagcttcaaagtagagtagaaaaaaaattgtcttaactgttctagttcttgatggttttcttccttattaacagttggtgtttcttccttggcccttttggactaatgttactgtccaagttctttctcaagaaaccacatctggttcagaagagtgtcaagttggactctttgaactctgttgctgtctgagcaatcgtggtgcctagactttgcattccttgttctgttgacctgcatacatgtgagagctatttctttaagaactatataggctgtgaaaacgcactttctttcccccaaagagctgggaatttatgaagttatggcaatgaactgcagcatgctgggacaattatttgactacttttttttgtaatattgtcaaatgtctctatggattctgacagagatttctttttgttttgttattcttttggttgtcagtttcattttaacgagtgtaactagtaacattttattctttggattttgtataattacagtacatgattgtgtattgtgacatgaatgctgtcaaaatgacattgatggcattgtgaagcctgttactttgtgtcacttcctgataaataagaggtgatgacatggatatacaacagaaaacactttgagttgaaagtaaacacaagctggctgcttccctgtggcaactgtggct

SEQ ID NO: 22426 - protein, 1216 aa, Homo sapiens; identical to SEQ ID NO: 2943

SEQ ID NO: 22427 - DNA, 442 bp, Homo sapiens
ccatcccaatccatctacatgtatgcacacttatttggaaagcaggtttgaggtaaaaacaaagaccttcactatattttgctttgacagaaggaaagaggaagagtttctattaaaatctatcatatgaatagtgtgacttaagtcctgtttcaggagataaaaatagctttctggactggttaaagtcccccagaaacaatacagttaatttaatttatttttttgagacagagtctccctctgtcgcccgggctggagtacaggggtgcgatctcagctcactgcaacctctgcttcccaggttcaagtgattctcatgcctcagctcctggggaggctgaggtgggaggattgcttgacctcaggagtttgagcttgcaatgagctttcatggcttcactgcactccagcctgggcaacagagggagaccttgtctct

SEQ ID NO: 22428 - protein, 35 aa, Homo sapiens
MHTYLESRFEVKTKTFTIFCFDRRKEEEFLLKSII

SEQ ID NO: 22429 - DNA, 733 bp, Homo sapiens
ggcattttccccgctcctctggccgccgaaggagtcctgtggtgccgggcaggaatgggctgcttggggacccaacgagctcccagagcctttcctgctgcttcctctacccctgtgtttcgctaggctctcgagatggactcagttccagattgcccagcctcacatattccttcatagcaacacaaagggactgagacaatatataagttaacatctgccatgtagtggaggttccagagaaaaagtgagagaagctgagtctgcaccctcaacatggaggaaataagctctcttaggaccaagaacagaggacagaggaaggactccagcatgatgggcaccaagggattttggtccttctgagaaagaggagagacagggtcttcctctttgcctaagctggagcgcattggtgtgatcatcgctcactgctgcctcaaactcctgggctcatgcgaccctcccacctcagcctcctgactagttgggactacagaattggttccttccagtgagttcttggtctcgctgacttcaagaatgaagccacagacctgtgcgatgagtgttacagctcttaaagatggtgtgtccagagtttgttccttcagatgttcagatgtgtccggagtttcttccttctggtgggtttgtcctctcgctaacttccaagaatgaagccgtggacgttcacagtgagtattagacctcctcaggttagtgtggaccc

SEQ ID NO: 22430 - protein, 45 aa, Homo sapiens
MKPQTCAMSVTALKDGVSRVCSFRCSDVSGVSSFWWVCPLANFQE

SEQ ID NO: 22431 - DNA, 6173 bp, Homo sapiens
gagaaaatcaattggtttagaaggtttggactcacttgacaggttcagttggagacgatcataggtggctgctgtgacaaagggaaattgtgcttttccagcatgcttactgaccctgatttacctcaggagtttgaaaggatgtcttccaagcgaccagcctctccgtatggggaagcagatggagaggtagccatggtgacaagcagacagaaagtggaagaagaggagagtgacgggctcccagcctttcaccttcccttgcatgtgagttttcccaacaagcctcactctgaggaatttcagccagtttctctgctgacgcaagagacttgtggccataggactcccacttctcagcacaatacaatggaagttgatggcaataaagttatgtcttcatttgccccacacaactcatctacctcacctcagaaggcagaagaaggtgggcgacagagtggcgagtccttgtctagtacagccctgggaactcctgaacggcgcaagggcagtttagctgatgttgttgacaccttgaagcagaggaaaatggaagagctcatcaaaaacgagccggaagaaacccccagtattgaaaaactactctcaaaggactggaaagacaagcttcttgcaatgggatcggggaactttggcgaaataaaagggactcccgagagcttagctgagaaagaaaggcaactcatgggtatgatcaaccagctgaccagcctccgagagcagctgttggctgcccacgatgagcagaagaaactagctgcctctcagattgagaaacagcgtcagcaaatggagctggccaagcagcaacaagaacaaattgcaagacagcagcagcagcttctacagcaacaacacaaaatcaatttgctccagcaacagatccaggttcaaggtcagctgccgccattaatgattcccgtattccctcctgatcaacggacactggctgcagctgcccagcaaggattcctcctccctccaggcttcagctataaggctggatgtagtgacccttaccctgttcagctgatcccaactaccatggcagctgctgccgcagcaacaccaggcttaggcccactccaactgcagcagttatatgctgcccagctagctgcaatgcaggtatctccaggagggaagctgccaggcataccccaaggcaaccttggtgctgctgtatctcctaccagcattcacacagacaagagcacaaacagcccaccacccaaaagcaaggatgaagtggcacagccactgaacctatcagctaaacccaagacctctgatggcaaatcacccacatcacccacctctccccatatgccagctctgagaataaacagtggggcaggccccctcaaagcctctgtcccagcagcgttagctagtccttcagccagagttagcacaataggttacttaaatgaccatgatgctgtcaccaaggcaatccaagaagctcggcaaatgaaggagcaactccgacgggaacaacaggtgcttgatgggaaggtggctgttgtgaatagtctgggtctcaataactgccgaacagaaaaggaaaaaacaacactggagagtctgactcagcaactggcagttaaacagaatgaagaaggaaaatttagccatgcaatgatggatttcaatctgagtggagattctgatggaagtgctggagtctcagagtcaagaatttatagggaatcccgagggcgtggtagcaatgaaccccacataaagcgtccaatgaatgccttcatggtgtgggctaaagatgaacggagaaagatccttcaagcctttcctgacatgcacaactccaacatcagcaagatattgggatctcgctggaaagctatgacaaacctagagaaacagccatattatgaggagcaagcccgtctcagcaagcagcacctggagaagtaccctgactataagtacaagcccaggccaaagcgcacctgcctggtggatggcaaaaagctgcgcattggtgaatacaaggcaatcatgcgcaacaggcggcaggaaatgcggcagtacttcaatgttgggcaacaagcacagatccccattgccactgctggtgttgtgtaccctggagccatcgccatggctgggatgccctcccctcacctgccctcggagcactcaagcgtgtctagcagcccagagcctgggatgcctgttatccagagcacttacggtgtgaaaggagaggagccacatatcaaagaagagatacaggccgaggacatcaatggagaaatttatgatgagtacgacgaggaagaggatgatccagatgtagattatgggagtgacagtgaaaaccatattgcaggacaagccaactgataagggtcaaaagattgttgtgaccttaggacttaaagaagccctaactggttcatccttaccagtggccaagcacattaactttctcatacactgactgttactttaactgttagtcttaaatagttgggacatcagctgactaatagacctcagcctcaaaaggcttggaaagaaaaaacaaatacaacaagcaaacaacaatatcaacaacaagagattgaaataagctatgggtaaaataatgccagtaattcagctgctacatccaagcactgaagtcttacccgtcaacttttttttttttttaaataaactttatggctgtttgttctacaatgttctagaaattctcactcaggtacacagtgccaacaagtggcttgtgaatgtgttttgttgttttgtgctacaatttttaaaaagaaaaaagttttgttttgttttttggggtttctgggttttttccttttctttttctttcctttcattttttttctttgtaatgcacctgacagaaaaaaaagaaaaatgaatttctctttacttctctccaccttctccatctctctactttaaagatggaagtctgtgcatgaggggaaagagggaaaaagagcctgtttttaacttccttgctatccaccacaaaataagcaattattttctttagaggactttatctattgcacaccacactacatctttgagcaagtgccaaatttgtactgaagtgttgaccaagttcattttttctctttactttttccttttccttcttaagttaggacagtgttaaatcttagacaatcccttgaaaaacctgaaataccagcagctggtgagatttgacttttttttttaatggaaactgtaggtgctgttctcaggtgaaaagagagagagagagagagacataagaaatttagagaaaaatattttctgatcttggatttttgtgtgtatgtatgtatgtgattatggtactaataataggaataacgttggaccattgtgagttaaacccacatctggggatgaaatcccacatcctcccaagtgactggtctagaaataatcttgaccttgactttgcacttcaaatgacaacttaaccaagtatagggctcagaaattatatttttaaatgtctgattattattggatggatcaggtggccctgtgtaatagaggtgtgcatgtataacatggaagctactagcaaactgctcccagatgtcctttctccctggtcagttggttccattaacgtttgctacttagtgatttttgtttttcctgttgatattttgagcaaaacaatcattgttttcattgaatatatttggccattttttcagacaaatagaattagcttatttcttcaacattccatcctttcccgatcaggaaatgaaactgatgattttataaggtatttttcacccctccatgaagtgaggtggaggcctttagcatttcagaagtgtgggccatatgtagttcatgccataaaaagtaggatttaattaaaagtcattgcagcccaataaaatggagcctggctgcacccagggatccttgccactgctcttcccttgctgtcagattaatccactgaagtccaactttggttcaagcagagtatttgcaaagagcaacaactgaatgtgatgggactgcttatgtagattttgccagccaaatgccaaggcagttgtagggcctgtacaaataaatgcaaaatcatttcaagtcaattgccattatttgtattgaagtatcagatagatagtaaatactgcaactagtagcttgatgtgctatagttttcactccagtcatcattttcctatctcaccccccgaaacaccaccctaaagttggatttttacatataaataaaaaaagaatcccttttatttttctctctctcagaagacttgctctggggttttgcttggaggagctgatcatatcctgcatgtcagagatttcattttgtttgtttttctgtttgtttgtttttgatgactttatttacatttgaactgcctctttttgctagtgttgtaatgatgatgatgataaaataataataataatagtaataataataataatggtcagctgttcccagattagtaagttatgtataatttattttatttctccctttctattttattctgctctgatttggaagtgcagccaataagctgttagatatttaaaacaaatttccatctccaactcatatatgtatgtatatgtatatatatatatacatatatatacacacatatacacacacacacacacatttacccacaattttacttctctttccgtaagttttctcttttttaagaattttggccccaacaatatcagttctgatgtttaaaacaaaggagtgaattaataggagggtcgtgttcaatcttaattaacttatgctctcatcactcattttagttatttaattgccacagtcatctagagccaatttttttttgtttttgtttgttttgtttttaagcactctggataaggaaaaaatagacacttgtttttatatcatttttatgtacaatgtgaaaacagatttttaaaaaatttgttctctgtctttgttaacaaattccttccgatttatgtgggttcacctctcacgtttgctggatacttactttacaccatgttatgaaagatgctttgttttcatttcatgagtttgggctacaagaatactttgttttagctccaggtagatgccattgaaggcattcatggctgaaatcaattctaacacacttaccgatgaattgacaacactttggtgtttggtcttttttttgttatattttgttttatttgaaggggaaaacaaaattgttaatggtgacttttaactgctgaaattcaaaatttgattttagttaggtttatgtccgagactaaactgtgcatgaaccgaaacaaaaagcaagttcataccgctgcattctgttctcttgttctgacggttaattcactggacatcaaattttctttgccctagttttccccaaaagaaaacaaaagcaaaaatagttatattaatgttgaaagtgctttgaagtcacttgataaaaggtgctatgaatagcaacttactgtgttactacattgcctttttggcattggttgatttataattttggtaaaggatcctaaaaccctgtattctttttctgtgccccataatgaccaaaaaagataaagaaaatgagagtaagatcaaaagatcaaactaaaacataaacagtctccttcctgtctgctttcttacctatctgttcacactttatctctttccctttctctctctctctcacatgcgcgcgcgcgcgcgcgcacacacacacacacacacacttgccccaacactgagaaataatcttgccagaattctggtttttatagttgttgtagtccgtttctctaaaaatagtcctgttttcatatgaatctaagagaacattaccggagaaaataaagttactcatttatagttactaataataagttagtgattaacttaccacaattggataaaatataaaactattcttcagcacatttatacctaaattagtgaagtccatttgtgaagttcatttggcatctgcagttaagagttaaccatgtataaaatccctcccaaagaacataatcatcgttagaaccaaatcctcttataaagaacaaatataaaaaagttttctgtggtgaag

SEQ ID NO: 22432 - protein, 763 aa, Homo sapiens [sequence omitted]

SEQ ID NO: 22433 - DNA, 4968 bp, Homo sapiens
gcttactccctgaccagatgctgcggtgcacggggcagccaccatctctgcatgcatgtctgtgtaagtgtctctctctctgtgtgtatgtgcctctgtcatttcgtgtcaaaggtacattacctgattacctttctcggctgccagatttttatctagataattggaactgctatggaggctgtgccttgccagccagcttagaatctgtaaagccatagtttgtccaccttgttatctgtggctgcctgggcagaggaaattaaagagatccacagccaggggggcgcttcctactcctgacctccccagcgatcccaaacaggacagtttgttagtaccgtctttttgtttttatgttttgatttcgttttgggtttttgttcgctcgtgtatgttattttggcatgtggatacctattcccctccacatcgcacatcgtgttttatggagtttagagctgaggaaactttggtcgggttgccaggacgttcgcaccactttgcggaaagcacgagctaacagtgagaccgacagagatgtcttccaagcgaccagcctctccgtatggggaagcagatggagaggtagccatggtgacaagcagacagaaagtggaagaagaggagagtgacgggctcccagcctttcaccttcccttgcatgaagttgatggcaataaagttatgtcttcatttgccccacacaactcatctacctcacctcagaaggcagaagaaggtgggcgacagagtggcgagtccttgtctagtacagccctgggaactcctgaacggcgcaagggcagtttagctgatgttgttgacaccttgaagcagaggaaaatggaagagctcatcaaaaacgagccggaagaaacccccagtattgaaaaactactctcaaaggactggaaagacaagcttcttgcaatgggatcggggaactttggcgaaataaaagggactcccgagagcttagctgagaaagaaaggcaactcatgggtatgatcaaccagctgaccagcctccgagagcagctgttggctgcccacgatgagcagaagaaactagctgcctctcagattgagaaacagcgtcagcaaatggagctggccaagcagcaacaagaacaaattgcaagacagcagcagcagcttctacagcaacaacacaaaatcaatttgctccagcaacagatccaggttcaaggtcagctgccgccattaatgattcccgtattccctcctgatcaacggacactggctgcagctgcccagcaaggattcctcctccctccaggcttcagctataaggctggatgtagtgacccttaccctgttcagctgatcccaactaccatggcagctgctgccgcagcaacaccaggcttaggcccactccaactgcagcagttatatgctgcccagctagctgcaatgcaggtatctccaggagggaagctgccaggcataccccaaggcaaccttggtgctgctgtatctcctaccagcattcacacagacaagagcacaaacagcccaccacccaaaagcaaggatgaagtggcacagccactgaacctatcagctaaacccaagacctctgatggcaaatcacccacatcacccacctctccccatatgccagctctgagaataaacagtggggcaggccccctcaaagcctctgtcccagcagcgttagctagtccttcagccagagttagcacaataggttacttaaatgaccatgatgctgtcaccaaggcaatccaagaagctcggcaaatgaaggagcaactccgacgggaacaacaggtgcttgatgggaaggtggctgttgtgaatagtctgggtctcaataactgccgaacagaaaaggaaaaaacaacactggagagtctgactcagcaactggcagttaaacagaatgaagaaggaaaatttagccatgcaatgatggatttcaatctgagtggagattctgatggaagtgctggagtctcagagtcaagaatttatagggaatcccgagggcgtggtagcaatgaaccccacataaagcgtccaatgaatgccttcatggtgtgggctaaagatgaacggagaaagatccttcaagcctttcctgaccttggatttttgtgtgtatgtatgtatgtgattatggtactaataataggaataacgttggaccattgtgagttaaacccacatctggggatgaaatcccacatcctcccaagtgactggtctagaaataatcttgaccttgactttgcacttcaaatgacaacttaaccaagtatagggctcagaaattatatttttaaatgtctgattattattggatggatcaggtggccctgtgtaatagaggtgtgcatgtataacatggaagctactagcaaactgctcccagatgtcctttctccctggtcagttggttccattaacgtttgctacttagtgatttttgtttttcctgttgatattttgagcaaaacaatcattgttttcattgaatatatttggccattttttcagacaaatagaattagcttatttcttcaacattccatcctttcccgatcaggaaatgaaactgatgattttataaggtatttttcacccctccatgaagtgaggtggaggcctttagcatttcagaagtgtgggccatatgtagttcatgccataaaaagtaggatttaattaaaagtcattgcagcccaataaaatggagcctggctgcacccagggatccttgccactgctcttcccttgctgtcagattaatccactgaagtccaactttggttcaagcagagtatttgcaaagagcaacaactgaatgtgatgggactgcttatgtagattttgccagccaaatgccaaggcagttgtagggcctgtacaaataaatgcaaaatcatttcaagtcaattgccattatttgtattgaagtatcagatagatagtaaatactgcaactagtagcttgatgtgctatagttttcactccagtcatcattttcctatctcaccccccgaaacaccaccctaaagttggatttttacatataaataaaaaaagaatcccttttatttttctctctctcagaagacttgctctggggttttgcttggaggagctgatcatatcctgcatgtcagagatttcattttgtttgtttttctgtttgtttgtttttgatgactttatttacatttgaactgcctctttttgctagtgttgtaatgatgatgatgataaaataataataataatagtaataataataataatggtcagctgttcccagattagtaagttatgtataatttattttatttctccctttctattttattctgctctgatttggaagtgcagccaataagctgttagatatttaaaacaaatttccatctccaactcatatatgtatgtatatgtatatatatatatacatatatatacacacatatacacacacacacacacatttacccacaattttacttctctttccgtaagttttctcttttttaagaattttggccccaacaatatcagttctgatgtttaaaacaaaggagtgaattaataggagggtcgtgttcaatcttaattaacttatgctctcatcactcattttagttatttaattgccacagtcatctagagccaatttttttttgtttttgtttgttttgtttttaagcactctggataaggaaaaaatagacacttgtttttatatcatttttatgtacaatgtgaaaacagatttttaaaaaatttgttctctgtctttgttaacaaattccttccgatttatgtgggttcacctctcacgtttgctggatacttactttacaccatgttatgaaagatgctttgttttcatttcatgagtttgggctacaagaatactttgttttagctccaggtagatgccattgaaggcattcatggctgaaatcaattctaacacacttaccgatgaattgacaacactttggtgtttggtcttttttttgttatattttgttttatttgaaggggaaaacaaaattgttaatggtgacttttaactgctgaaattcaaaatttgattttagttaggtttatgtccgagactaaactgtgcatgaaccgaaacaaaaagcaagttcataccgctgcattctgttctcttgttctgacggttaattcactggacatcaaattttctttgccctagttttccccaaaagaaaacaaaagcaaaaatagttatattaatgttgaaagtgctttgaagtcacttgataaaaggtgctatgaatagcaacttactgtgttactacattgcctttttggcattggttgatttataattttggtaaaggatcctaaaaccctgtattctttttctgtgccccataatgaccaaaaaagataaagaaaatgagagtaagatcaaaagatcaaactaaaacataaacagtctccttcctgtctgctttcttacctatctgttcacactttatctctttccctttctctctctctctcacatgcgcgcgcgcgcgcgcgcacacacacacacacacacacttgccccaacactgagaaataatcttgccagaattctggtttttatagttgttgtagtccgtttctctaaaaatagtcctgttttcatatgaatctaagagaacattaccggagaaaataaagttactcatttatagttactaataataagttagtgattaacttaccacaattggataaaatataaaactattcttcagcacatttatacctaaattagtgaagtccatttgtgaagttcatttggcatctgcagttaagagttaaccatgtataaaatccctcccaaagaacataatcatcgttagaaccaaatcctcttataaagaacaaatataaaaaagttttctgtggtgaag

SEQ ID NO: 22434 - protein, 587 aa, Homo sapiens
MSSKRPASPYGEADGEVAMVTSRQKVEEEESDGLPAFHLPLHEVDGNKVMSSFAPHNSSTSPQKAEEGGRQSGESLSSTALGTPERRKGSLADVVDTLKQRKMEELIKNEPEETPSIEKLLSKDWKDKLLAMGSGNFGEIKGTPESLAEKERQLMGMINQLTSLREQLLAAHDEQKKLAASQIEKQRQQMELAKQQQEQIARQQQQLLQQQHKINLLQQQIQVQGQLPPLMIPVFPPDQRTLAAAAQQGFLLPPGFSYKAGCSDPYPVQLIPTTMAAAAAATPGLGPLQLQQLYAAQLAAMQVSPGGKLPGIPQGNLGAAVSPTSIHTDKSTNSPPPKSKDEVAQPLNLSAKPKTSDGKSPTSPTSPHMPALRINSGAGPLKASVPAALASPSARVSTIGYLNDHDAVTKAIQEARQMKEQLRREQQVLDGKVAVVNSLGLNNCRTEKEKTTLESLTQQLAVKQNEEGKFSHAMMDFNLSGDSDGSAGVSESRIYRESRGRGSNEPHIKRPMNAFMVWAKDERRKILQAFPDLGFLCVCMYVIMVLIIGITLDHCELNPHLGMKSHILPSDWSRNNLDLDFALQMTT

SEQ ID NO: 22435 - DNA, 6403 bp, Homo sapiens
gtgaaaaaggcgagccaccaaaacccatctccagtctcctcccgggggcccccagcccgcctctgtgccactttgcatcccacgccggaggaggcattaacgagaccgggtaaggctttttaaacggtccaaggtgtagagccatacttcaggaggatcctcagaagttttggacaagcctccccaaatgtggcaggtgctgtgctggccattggtgacccaaagatgatgaaaaatatgttcctgcccacaaggagttagcgacctactgggctttcctcttgctgatgacatgattcctgtttgaatctgttgacaagattctgaaagctgaacagagaattctggcactgcactgggtaggaaaaaggatgtcttccaagcgaccagcctctccgtatggggaagcagatggagaggtagccatggtgacaagcagacagaaagtggaagaagaggagagtgacgggctcccagcctttcaccttcccttgcatgtgagttttcccaacaagcctcactctgaggaatttcagccagtttctctgctgacgcaagagacttgtggccataggactcccacttctcagcacaatacaatggaagttgatggcaataaagttatgtcttcatttgccccacacaactcatctacctcacctcagaaggcagaagaaggtgggcgacagagtggcgagtccttgtctagtacagccctgggaactcctgaacggcgcaagggcagtttagctgatgttgttgacaccttgaagcagaggaaaatggaagagctcatcaaaaacgagccggaagaaacccccagtattgaaaaactactctcaaaggactggaaagacaagcttcttgcaatgggatcggggaactttggcgaaataaaagggactcccgagagcttagctgagaaagaaaggcaactcatgggtatgatcaaccagctgaccagcctccgagagcagctgttggctgcccacgatgagcagaagaaactagctgcctctcagattgagaaacagcgtcagcaaatggagctggccaagcagcaacaagaacaaattgcaagacagcagcagcagcttctacagcaacaacacaaaatcaatttgctccagcaacagatccaggttcaaggtcagctgccgccattaatgattcccgtattccctcctgatcaacggacactggctgcagctgcccagcaaggattcctcctccctccaggcttcagctataaggctggatgtagtgacccttaccctgttcagctgatcccaactaccatggcagctgctgccgcagcaacaccaggcttaggcccactccaactgcagcagttatatgctgcccagctagctgcaatgcaggtatctccaggagggaagctgccaggcataccccaaggcaaccttggtgctgctgtatctcctaccagcattcacacagacaagagcacaaacagcccaccacccaaaagcaaggatgaagtggcacagccactgaacctatcagctaaacccaagacctctgatggcaaatcacccacatcacccacctctccccatatgccagctctgagaataaacagtggggcaggccccctcaaagcctctgtcccagcagcgttagctagtccttcagccagagttagcacaataggttacttaaatgaccatgatgctgtcaccaaggcaatccaagaagctcggcaaatgaaggagcaactccgacgggaacaacaggtgcttgatgggaaggtggctgttgtgaatagtctgggtctcaataactgccgaacagaaaaggaaaaaacaacactggagagtctgactcagcaactggcagttaaacagaatgaagaaggaaaatttagccatgcaatgatggatttcaatctgagtggagattctgatggaagtgctggagtctcagagtcaagaatttatagggaatcccgagggcgtggtagcaatgaaccccacataaagcgtccaatgaatgccttcatggtgtgggctaaagatgaacggagaaagatccttcaagcctttcctgacatgcacaactccaacatcagcaagatattgggatctcgctggaaagctatgacaaacctagagaaacagccatattatgaggagcaagcccgtctcagcaagcagcacctggagaagtaccctgactataagtacaagcccaggccaaagcgcacctgcctggtggatggcaaaaagctgcgcattggtgaatacaaggcaatcatgcgcaacaggcggcaggaaatgcggcagtacttcaatgttgggcaacaagcacagatccccattgccactgctggtgttgtgtaccctggagccatcgccatggctgggatgccctcccctcacctgccctcggagcactcaagcgtgtctagcagcccagagcctgggatgcctgttatccagagcacttacggtgtgaaaggagaggagccacatatcaaagaagagatacaggccgaggacatcaatggagaaatttatgatgagtacgacgaggaagaggatgatccagatgtagattatgggagtgacagtgaaaaccatattgcaggacaagccaactgataagggtcaaaagattgttgtgaccttaggacttaaagaagccctaactggttcatccttaccagtggccaagcacattaactttctcatacactgactgttactttaactgttagtcttaaatagttgggacatcagctgactaatagacctcagcctcaaaaggcttggaaagaaaaaacaaatacaacaagcaaacaacaatatcaacaacaagagattgaaataagctatgggtaaaataatgccagtaattcagctgctacatccaagcactgaagtcttacccgtcaacttttttttttttttaaataaactttatggctgtttgttctacaatgttctagaaattctcactcaggtacacagtgccaacaagtggcttgtgaatgtgttttgttgttttgtgctacaatttttaaaaagaaaaaagttttgttttgttttttggggtttctgggttttttccttttctttttctttcctttcattttttttctttgtaatgcacctgacagaaaaaaaagaaaaatgaatttctctttacttctctccaccttctccatctctctactttaaagatggaagtctgtgcatgaggggaaagagggaaaaagagcctgtttttaacttccttgctatccaccacaaaataagcaattattttctttagaggactttatctattgcacaccacactacatctttgagcaagtgccaaatttgtactgaagtgttgaccaagttcattttttctctttactttttccttttccttcttaagttaggacagtgttaaatcttagacaatcccttgaaaaacctgaaataccagcagctggtgagatttgacttttttttttaatggaaactgtaggtgctgttctcaggtgaaaagagagagagagagagagacataagaaatttagagaaaaatattttctgatcttggatttttgtgtgtatgtatgtatgtgattatggtactaataataggaataacgttggaccattgtgagttaaacccacatctggggatgaaatcccacatcctcccaagtgactggtctagaaataatcttgaccttgactttgcacttcaaatgacaacttaaccaagtatagggctcagaaattatatttttaaatgtctgattattattggatggatcaggtggccctgtgtaatagaggtgtgcatgtataacatggaagctactagcaaactgctcccagatgtcctttctccctggtcagttggttccattaacgtttgctacttagtgatttttgtttttcctgttgatattttgagcaaaacaatcattgttttcattgaatatatttggccattttttcagacaaatagaattagcttatttcttcaacattccatcctttcccgatcaggaaatgaaactgatgattttataaggtatttttcacccctccatgaagtgaggtggaggcctttagcatttcagaagtgtgggccatatgtagttcatgccataaaaagtaggatttaattaaaagtcattgcagcccaataaaatggagcctggctgcacccagggatccttgccactgctcttcccttgctgtcagattaatccactgaagtccaactttggttcaagcagagtatttgcaaagagcaacaactgaatgtgatgggactgcttatgtagattttgccagccaaatgccaaggcagttgtagggcctgtacaaataaatgcaaaatcatttcaagtcaattgccattatttgtattgaagtatcagatagatagtaaatactgcaactagtagcttgatgtgctatagttttcactccagtcatcattttcctatctcaccccccgaaacaccaccctaaagttggatttttacatataaataaaaaaagaatcccttttatttttctctctctcagaagacttgctctggggttttgcttggaggagctgatcatatcctgcatgtcagagatttcattttgtttgtttttctgtttgtttgtttttgatgactttatttacatttgaactgcctctttttgctagtgttgtaatgatgatgatgataaaataataataataatagtaataataataataatggtcagctgttcccagattagtaagttatgtataatttattttatttctccctttctattttattctgctctgatttggaagtgcagccaataagctgttagatatttaaaacaaatttccatctccaactcatatatgtatgtatatgtatatatatatatacatatatatacacacatatacacacacacacacacatttacccacaattttacttctctttccgtaagttttctcttttttaagaattttggccccaacaatatcagttctgatgtttaaaacaaaggagtgaattaataggagggtcgtgttcaatcttaattaacttatgctctcatcactcattttagttatttaattgccacagtcatctagagccaatttttttttgtttttgtttgttttgtttttaagcactctggataaggaaaaaatagacacttgtttttatatcatttttatgtacaatgtgaaaacagatttttaaaaaatttgttctctgtctttgttaacaaattccttccgatttatgtgggttcacctctcacgtttgctggatacttactttacaccatgttatgaaagatgctttgttttcatttcatgagtttgggctacaagaatactttgttttagctccaggtagatgccattgaaggcattcatggctgaaatcaattctaacacacttaccgatgaattgacaacactttggtgtttggtcttttttttgttatattttgttttatttgaaggggaaaacaaaattgttaatggtgacttttaactgctgaaattcaaaatttgattttagttaggtttatgtccgagactaaactgtgcatgaaccgaaacaaaaagcaagttcataccgctgcattctgttctcttgttctgacggttaattcactggacatcaaattttctttgccctagttttccccaaaagaaaacaaaagcaaaaatagttatattaatgttgaaagtgctttgaagtcacttgataaaaggtgctatgaatagcaacttactgtgttactacattgcctttttggcattggttgatttataattttggtaaaggatcctaaaaccctgtattctttttctgtgccccataatgaccaaaaaagataaagaaaatgagagtaagatcaaaagatcaaactaaaacataaacagtctccttcctgtctgctttcttacctatctgttcacactttatctctttccctttctctctctctctcacatgcgcgcgcgcgcgcgcgcacacacacacacacacacacttgccccaacactgagaaataatcttgccagaattctggtttttatagttgttgtagtccgtttctctaaaaatagtcctgttttcatatgaatctaagagaacattaccggagaaaataaagttactcatttatagttactaataataagttagtgattaacttaccacaattggataaaatataaaactattcttcagcacatttatacctaaattagtgaagtccatttgtgaagttcatttggcatctgcagttaagagttaaccatgtataaaatccctcccaaagaacataatcatcgttagaaccaaatcctcttataaagaacaaatataaaaaagttttctgtggtgaag

SEQ ID NO: 22436 - protein, 750 aa, Homo sapiens; identical to SEQ ID NO: 2955

SEQ ID NO: 22437 - DNA, 4315 bp, Homo sapiens
gagaaaatcaattggtttagaaggtttggactcacttgacaggttcagttggagacgatcataggtggctgctgtgacaaagggaaattgtgcttttccagcatgcttactgaccctgatttacctcaggagtttgaaaggatgtcttccaagcgaccagcctctccgtatggggaagcagatggagaggtagccatggtgacaagcagacagaaagtggaagaagaggagagtgacgggctcccagcctttcaccttcccttgcatgtgagttttcccaacaagcctcactctgaggaatttcagccagtttctctgctgacgcaagagacttgtggccataggactcccacttctcagcacaatacaatggaagttgatggcaataaagttatgtcttcatttgccccacacaactcatctacctcacctcagaaggcagaagaaggtgggcgacagagtggcgagtccttgtctagtacagccctgggaactcctgaacggcgcaagggcagtttagctgatgttgttgacaccttgaagcagaggaaaatggaagagctcatcaaaaacgagccggaagaaacccccagtattgaaaaactactctcaaaggactggaaagacaagcttcttgcaatgggatcggggaactttggcgaaataaaagggactcccgagagcttagctgagaaagaaaggcaactcatgggtatgatcaaccagctgaccagcctccgagagcagctgttggctgcccacgatgagcagaagaaactagctgcctctcagattgagaaacagcgtcagcaaatggagctggccaagcagcaacaagaacaaattgcaagacagcagcagcagcttctacagcaacaacacaaaatcaatttgctccagcaacagatccaggttcaaggtcagctgccgccattaatgattcccgtattccctcctgatcaacggacactggctgcagctgcccagcaaggattcctcctccctccaggcttcagctataaggctggatgtagtgacccttaccctgttcagctgatcccaactaccatggcagctgctgccgcagcaacaccaggcttaggcccactccaactgcagcagttatatgctgcccagctagctgcaatgcaggtatctccaggagggaagctgccaggcataccccaaggcaaccttggtgctgctgtatctcctaccagcattcacacagacaagagcacaaacagcccaccacccaaaagcaaggatgaagtggcacagccactgaacctatcagctaaacccaagacctctgatggcaaatcacccacatcacccacctctccccatatgccagctctgagaataaacagtggggcaggccccctcaaagcctctgtcccagcagcgttagctagtccttcagccagagttagcacaataggttacttaaatgaccatgatgctgtcaccaaggcaatccaagaagctcggcaaatgaaggagcaactccgacgggaacaacaggtgcttgatgggaaggtggctgttgtgaatagtctgggtctcaataactgccgaacagaaaaggaaaaaacaacactggagagtctgactcagcaactggcagttaaacagaatgaagaaggaaaatttagccatgcaatgatggatttcaatctgagtggagattctgatggaagtgctggagtctcagagtcaagaatttatagggaatcccgagggcgtggtagcaatgaaccccacataaagcgtccaatgaatgccttcatggtgtgggctaaagatgaacggagaaagatccttcaagcctttcctgacatgcacaactccaacatcagcaagatattgggatctcgctggaaagctatgacaaacctagagaaacagccatattatgaggagcaagcccgtctcagcaagcagcacctggagaagtaccctgactataagtacaagcccaggccaaagcgcacctgcctggtggatggcaaaaagctgcgcattggtgaatacaaggcaatcatgcgcaacaggcggcaggaaatgcggcagtacttcaatgttgggcaacaagcacagatccccattgccactgctggtgttgtgtaccctggagccatcgccatggctgggatgccctcccctcacctgccctcggagcactcaagcgtgtctagcagcccagagcctgggatgcctgttatccagagcacttacggtgtgaaaggagaggagccacatatcaaagaagagatacaggccgaggacatcaatggagaaatttatgatgagtacgacgaggaagaggatgatccagatgtagattatgggagtgacagtgaaaaccatattgcaggacaagccaactgataagggtcaaaagattgttgtgaccttaggacttaaagaagccctaactggttcatccttaccagtggccaagcacattaactttctcatacactgactgttactttaactgttagtcttaaatagttgggacatcagctgactaatagacctcagcctcaaaaggcttggaaagaaaaaacaaatacaacaagcaaacaacaatatcaacaacaagagattgaaataagctatgggtaaaataatgccagtaattcagctgctacatccaagcactgaagtcttacccgtcaacttttttttttttttaaataaactttatggctgtttgttctacaatgttctagaaattctcactcaggtacacagtgccaacaagtggcttgtgaatgtgttttgttgttttgtgctacaatttttaaaaagaaaaaagttttgttttgttttttggggtttctgggttttttccttttctttttctttcctttcattttttttctttgtaatgcacctgacagaaaaaaaagaaaaatgaatttctctttacttctctccaccttctccatctctctactttaaagatggaagtctgtgcatgaggggaaagagggaaaaagagcctgtttttaacttccttgctatccaccacaaaataagcaattattttctttagaggactttatctattgcacaccacactacatctttgagcaagtgccaaatttgtactgaagtgttgaccaagttcattttttctctttactttttccttttccttcttaagttaggacagtgttaaatcttagacaatcccttgaaaaacctgaaataccagcagctggtgagatttgacttttttttttaatggaaactgtaggtgctgttctcaggtgaaaagagagagagagagagagacataagaaatttagagaaaaatattttctgatcttggatttttgtgtgtatgtatgtatgtgattatggtactaataataggaataacgttggaccattgtgagttaaacccacatctggggatgaaatcccacatcctcccaagtgactggtctagaaataatcttgaccttgactttgcacttcaaatgacaacttaaccaagtatagggctcagaaattatatttttaaatgtctgattattattggatggatcaggtggccctgtgtaatagaggtgtgcatgtataacatggaagctactagcaaactgctcccagatgtcctttctccctggtcagttggttccattaacgtttgctacttagtgatttttgtttttcctgttgatattttgagcaaaacaatcattgttttcattgaatatatttggccattttttcagacaaatagaattagcttatttcttcaacattccatcctttcccgatcaggaaatgaaactgatgattttataaggtatttttcacccctccatgaagtgaggtggaggcctttagcatttcagaagtgtgggccatatgtagttcatgccataaaaagtaggatttaattaaaagtcattgcagcccaataaaatggagcctggctgcacccagggatccttgccactgctcttcccttgctgtcagattaatccactgaagtccaactttggttcaagcagagtatttgcaaagagcaacaactgaatgtgatgggactgcttatgtagattttgccagccaaatgccaaggcagttgtagggcctgtacaaataaatgcaaaatcatttcaagtcaattgccattatttgtattgaagtatcagatagatagtaaatactgcaactagtagcttgatgtgctatagttttcactccagtcatcattttcctatctcaccccccgaaacaccaccctaaagttggatttttacatataaataaaaaaagaatccctttt

SEQ ID NO: 22438 - protein, 763 aa, Homo sapiens [sequence omitted]

SEQ ID NO: 22439 - DNA, 3110 bp, Homo sapiens
gcttactccctgaccagatgctgcggtgcacggggcagccaccatctctgcatgcatgtctgtgtaagtgtctctctctctgtgtgtatgtgcctctgtcatttcgtgtcaaaggtacattacctgattacctttctcggctgccagatttttatctagataattggaactgctatggaggctgtgccttgccagccagcttagaatctgtaaagccatagtttgtccaccttgttatctgtggctgcctgggcagaggaaattaaagagatccacagccaggggggcgcttcctactcctgacctccccagcgatcccaaacaggacagtttgttagtaccgtctttttgtttttatgttttgatttcgttttgggtttttgttcgctcgtgtatgttattttggcatgtggatacctattcccctccacatcgcacatcgtgttttatggagtttagagctgaggaaactttggtcgggttgccaggacgttcgcaccactttgcggaaagcacgagctaacagtgagaccgacagagatgtcttccaagcgaccagcctctccgtatggggaagcagatggagaggtagccatggtgacaagcagacagaaagtggaagaagaggagagtgacgggctcccagcctttcaccttcccttgcatgaagttgatggcaataaagttatgtcttcatttgccccacacaactcatctacctcacctcagaaggcagaagaaggtgggcgacagagtggcgagtccttgtctagtacagccctgggaactcctgaacggcgcaagggcagtttagctgatgttgttgacaccttgaagcagaggaaaatggaagagctcatcaaaaacgagccggaagaaacccccagtattgaaaaactactctcaaaggactggaaagacaagcttcttgcaatgggatcggggaactttggcgaaataaaagggactcccgagagcttagctgagaaagaaaggcaactcatgggtatgatcaaccagctgaccagcctccgagagcagctgttggctgcccacgatgagcagaagaaactagctgcctctcagattgagaaacagcgtcagcaaatggagctggccaagcagcaacaagaacaaattgcaagacagcagcagcagcttctacagcaacaacacaaaatcaatttgctccagcaacagatccaggttcaaggtcagctgccgccattaatgattcccgtattccctcctgatcaacggacactggctgcagctgcccagcaaggattcctcctccctccaggcttcagctataaggctggatgtagtgacccttaccctgttcagctgatcccaactaccatggcagctgctgccgcagcaacaccaggcttaggcccactccaactgcagcagttatatgctgcccagctagctgcaatgcaggtatctccaggagggaagctgccaggcataccccaaggcaaccttggtgctgctgtatctcctaccagcattcacacagacaagagcacaaacagcccaccacccaaaagcaaggatgaagtggcacagccactgaacctatcagctaaacccaagacctctgatggcaaatcacccacatcacccacctctccccatatgccagctctgagaataaacagtggggcaggccccctcaaagcctctgtcccagcagcgttagctagtccttcagccagagttagcacaataggttacttaaatgaccatgatgctgtcaccaaggcaatccaagaagctcggcaaatgaaggagcaactccgacgggaacaacaggtgcttgatgggaaggtggctgttgtgaatagtctgggtctcaataactgccgaacagaaaaggaaaaaacaacactggagagtctgactcagcaactggcagttaaacagaatgaagaaggaaaatttagccatgcaatgatggatttcaatctgagtggagattctgatggaagtgctggagtctcagagtcaagaatttatagggaatcccgagggcgtggtagcaatgaaccccacataaagcgtccaatgaatgccttcatggtgtgggctaaagatgaacggagaaagatccttcaagcctttcctgaccttggatttttgtgtgtatgtatgtatgtgattatggtactaataataggaataacgttggaccattgtgagttaaacccacatctggggatgaaatcccacatcctcccaagtgactggtctagaaataatcttgaccttgactttgcacttcaaatgacaacttaaccaagtatagggctcagaaattatatttttaaatgtctgattattattggatggatcaggtggccctgtgtaatagaggtgtgcatgtataacatggaagctactagcaaactgctcccagatgtcctttctccctggtcagttggttccattaacgtttgctacttagtgatttttgtttttcctgttgatattttgagcaaaacaatcattgttttcattgaatatatttggccattttttcagacaaatagaattagcttatttcttcaacattccatcctttcccgatcaggaaatgaaactgatgattttataaggtatttttcacccctccatgaagtgaggtggaggcctttagcatttcagaagtgtgggccatatgtagttcatgccataaaaagtaggatttaattaaaagtcattgcagcccaataaaatggagcctggctgcacccagggatccttgccactgctcttcccttgctgtcagattaatccactgaagtccaactttggttcaagcagagtatttgcaaagagcaacaactgaatgtgatgggactgcttatgtagattttgccagccaaatgccaaggcagttgtagggcctgtacaaataaatgcaaaatcatttcaagtcaattgccattatttgtattgaagtatcagatagatagtaaatactgcaactagtagcttgatgtgctatagttttcactccagtcatcattttcctatctcaccccccgaaacaccaccctaaagttggatttttacatataaataaaaaaagaatccctttt

SEQ ID NO: 22440 - protein, 587 aa, Homo sapiens; identical to SEQ ID NO: 22434

SEQ ID NO: 22441 - DNA, 4545 bp, Homo sapiens
gtgaaaaaggcgagccaccaaaacccatctccagtctcctcccgggggcccccagcccgcctctgtgccactttgcatcccacgccggaggaggcattaacgagaccgggtaaggctttttaaacggtccaaggtgtagagccatacttcaggaggatcctcagaagttttggacaagcctccccaaatgtggcaggtgctgtgctggccattggtgacccaaagatgatgaaaaatatgttcctgcccacaaggagttagcgacctactgggctttcctcttgctgatgacatgattcctgtttgaatctgttgacaagattctgaaagctgaacagagaattctggcactgcactgggtaggaaaaaggatgtcttccaagcgaccagcctctccgtatggggaagcagatggagaggtagccatggtgacaagcagacagaaagtggaagaagaggagagtgacgggctcccagcctttcaccttcccttgcatgtgagttttcccaacaagcctcactctgaggaatttcagccagtttctctgctgacgcaagagacttgtggccataggactcccacttctcagcacaatacaatggaagttgatggcaataaagttatgtcttcatttgccccacacaactcatctacctcacctcagaaggcagaagaaggtgggcgacagagtggcgagtccttgtctagtacagccctgggaactcctgaacggcgcaagggcagtttagctgatgttgttgacaccttgaagcagaggaaaatggaagagctcatcaaaaacgagccggaagaaacccccagtattgaaaaactactctcaaaggactggaaagacaagcttcttgcaatgggatcggggaactttggcgaaataaaagggactcccgagagcttagctgagaaagaaaggcaactcatgggtatgatcaaccagctgaccagcctccgagagcagctgttggctgcccacgatgagcagaagaaactagctgcctctcagattgagaaacagcgtcagcaaatggagctggccaagcagcaacaagaacaaattgcaagacagcagcagcagcttctacagcaacaacacaaaatcaatttgctccagcaacagatccaggttcaaggtcagctgccgccattaatgattcccgtattccctcctgatcaacggacactggctgcagctgcccagcaaggattcctcctccctccaggcttcagctataaggctggatgtagtgacccttaccctgttcagctgatcccaactaccatggcagctgctgccgcagcaacaccaggcttaggcccactccaactgcagcagttatatgctgcccagctagctgcaatgcaggtatctccaggagggaagctgccaggcataccccaaggcaaccttggtgctgctgtatctcctaccagcattcacacagacaagagcacaaacagcccaccacccaaaagcaaggatgaagtggcacagccactgaacctatcagctaaacccaagacctctgatggcaaatcacccacatcacccacctctccccatatgccagctctgagaataaacagtggggcaggccccctcaaagcctctgtcccagcagcgttagctagtccttcagccagagttagcacaataggttacttaaatgaccatgatgctgtcaccaaggcaatccaagaagctcggcaaatgaaggagcaactccgacgggaacaacaggtgcttgatgggaaggtggctgttgtgaatagtctgggtctcaataactgccgaacagaaaaggaaaaaacaacactggagagtctgactcagcaactggcagttaaacagaatgaagaaggaaaatttagccatgcaatgatggatttcaatctgagtggagattctgatggaagtgctggagtctcagagtcaagaatttatagggaatcccgagggcgtggtagcaatgaaccccacataaagcgtccaatgaatgccttcatggtgtgggctaaagatgaacggagaaagatccttcaagcctttcctgacatgcacaactccaacatcagcaagatattgggatctcgctggaaagctatgacaaacctagagaaacagccatattatgaggagcaagcccgtctcagcaagcagcacctggagaagtaccctgactataagtacaagcccaggccaaagcgcacctgcctggtggatggcaaaaagctgcgcattggtgaatacaaggcaatcatgcgcaacaggcggcaggaaatgcggcagtacttcaatgttgggcaacaagcacagatccccattgccactgctggtgttgtgtaccctggagccatcgccatggctgggatgccctcccctcacctgccctcggagcactcaagcgtgtctagcagcccagagcctgggatgcctgttatccagagcacttacggtgtgaaaggagaggagccacatatcaaagaagagatacaggccgaggacatcaatggagaaatttatgatgagtacgacgaggaagaggatgatccagatgtagattatgggagtgacagtgaaaaccatattgcaggacaagccaactgataagggtcaaaagattgttgtgaccttaggacttaaagaagccctaactggttcatccttaccagtggccaagcacattaactttctcatacactgactgttactttaactgttagtcttaaatagttgggacatcagctgactaatagacctcagcctcaaaaggcttggaaagaaaaaacaaatacaacaagcaaacaacaatatcaacaacaagagattgaaataagctatgggtaaaataatgccagtaattcagctgctacatccaagcactgaagtcttacccgtcaacttttttttttttttaaataaactttatggctgtttgttctacaatgttctagaaattctcactcaggtacacagtgccaacaagtggcttgtgaatgtgttttgttgttttgtgctacaatttttaaaaagaaaaaagttttgttttgttttttggggtttctgggttttttccttttctttttctttcctttcattttttttctttgtaatgcacctgacagaaaaaaaagaaaaatgaatttctctttacttctctccaccttctccatctctctactttaaagatggaagtctgtgcatgaggggaaagagggaaaaagagcctgtttttaacttccttgctatccaccacaaaataagcaattattttctttagaggactttatctattgcacaccacactacatctttgagcaagtgccaaatttgtactgaagtgttgaccaagttcattttttctctttactttttccttttccttcttaagttaggacagtgttaaatcttagacaatcccttgaaaaacctgaaataccagcagctggtgagatttgacttttttttttaatggaaactgtaggtgctgttctcaggtgaaaagagagagagagagagagacataagaaatttagagaaaaatattttctgatcttggatttttgtgtgtatgtatgtatgtgattatggtactaataataggaataacgttggaccattgtgagttaaacccacatctggggatgaaatcccacatcctcccaagtgactggtctagaaataatcttgaccttgactttgcacttcaaatgacaacttaaccaagtatagggctcagaaattatatttttaaatgtctgattattattggatggatcaggtggccctgtgtaatagaggtgtgcatgtataacatggaagctactagcaaactgctcccagatgtcctttctccctggtcagttggttccattaacgtttgctacttagtgatttttgtttttcctgttgatattttgagcaaaacaatcattgttttcattgaatatatttggccattttttcagacaaatagaattagcttatttcttcaacattccatcctttcccgatcaggaaatgaaactgatgattttataaggtatttttcacccctccatgaagtgaggtggaggcctttagcatttcagaagtgtgggccatatgtagttcatgccataaaaagtaggatttaattaaaagtcattgcagcccaataaaatggagcctggctgcacccagggatccttgccactgctcttcccttgctgtcagattaatccactgaagtccaactttggttcaagcagagtatttgcaaagagcaacaactgaatgtgatgggactgcttatgtagattttgccagccaaatgccaaggcagttgtagggcctgtacaaataaatgcaaaatcatttcaagtcaattgccattatttgtattgaagtatcagatagatagtaaatactgcaactagtagcttgatgtgctatagttttcactccagtcatcattttcctatctcaccccccgaaacaccaccctaaagttggatttttacatataaataaaaaaagaatccctttt

SEQ ID NO: 22442 - protein, 750 aa, Homo sapiens; identical to SEQ ID NO: 2955

SEQ ID NO: 22443 - DNA, 2816 bp, Homo sapiens
gtttggactcacttgacaggttcagttggagacgatcataggtggctgctgtgacaaagggaaattgtgcttttccagcatgcttactgaccctgatttacctcaggagtttgaaaggatgtcttccaagcgaccagcctctccgtatggggaagcagatggagaggtagccatggtgacaagcagacagaaagtggaagaagaggagagtgacgggctcccagcctttcaccttcccttgcatgtgagttttcccaacaagcctcactctgaggaatttcagccagtttctctgctgacgcaagagacttgtggccataggactcccacttctcagcacaatacaatggaagttgatggcaataaagttatgtcttcatttgccccacacaactcatctacctcacctcagaaggcagaagaaggtgggcgacagagtggcgagtccttgtctagtacagccctgggaactcctgaacggcgcaagggcagtttagctgatgttgttgacaccttgaagcagaggaaaatggaagagctcatcaaaaacgagccggaagaaacccccagtattgaaaaactactctcaaaggactggaaagacaagcttcttgcaatgggatcggggaactttggcgaaataaaagggactcccgagagcttagctgagaaagaaaggcaactcatgggtatgatcaaccagctgaccagcctccgagagcagctgttggctgcccacgatgagcagaagaaactagctgcctctcagattgagaaacagcgtcagcaaatggagctggccaagcagcaacaagaacaaattgcaagacagcagcagcagcttctacagcaacaacacaaaatcaatttgctccagcaacagatccaggttcaaggtcagctgccgccattaatgattcccgtattccctcctgatcaacggacactggctgcagctgcccagcaaggattcctcctccctccaggcttcagctataaggctggatgtagtgacccttaccctgttcagctgatcccaactaccatggcagctgctgccgcagcaacaccaggcttaggcccactccaactgcagcagttatatgctgcccagctagctgcaatgcaggtatctccaggagggaagctgccaggcataccccaaggcaaccttggtgctgctgtatctcctaccagcattcacacagacaagagcacaaacagcccaccacccaaaagcaaggatgaagtggcacagccactgaacctatcagctaaacccaagacctctgatggcaaatcacccacatcacccacctctccccatatgccagctctgagaataaacagtggggcaggccccctcaaagcctctgtcccagcagcgttagctagtccttcagccagagttagcacaataggttacttaaatgaccatgatgctgtcaccaaggcaatccaagaagctcggcaaatgaaggagcaactccgacgggaacaacaggtgcttgatgggaaggtggctgttgtgaatagtctgggtctcaataactgccgaacagaaaaggaaaaaacaacactggagagtctgactcagcaactggcagttaaacagaatgaagaaggaaaatttagccatgcaatgatggatttcaatctgagtggagattctgatggaagtgctggagtctcagagtcaagaatttatagggaatcccgagggcgtggtagcaatgaaccccacataaagcgtccaatgaatgccttcatggtgtgggctaaagatgaacggagaaagatccttcaagcctttcctgacatgcacaactccaacatcagcaagatattgggatctcgctggaaagctatgacaaacctagagaaacagccatattatgaggagcaagcccgtctcagcaagcagcacctggagaagtaccctgactataagtacaagcccaggccaaagcgcacctgcctggtggatggcaaaaagctgcgcattggtgaatacaaggcaatcatgcgcaacaggcggcaggaaatgcggcagtacttcaatgttgggcaacaagcacagatccccattgccactgctggtgttgtgtaccctggagccatcgccatggctgggatgccctcccctcacctgccctcggagcactcaagcgtgtctagcagcccagagcctgggatgcctgttatccagagcacttacggtgtgaaaggagaggagccacatatcaaagaagagatacaggccgaggacatcaatggagaaatttatgatgagtacgacgaggaagaggatgatccagatgtagattatgggagtgacagtgaaaaccatattgcaggacaagccaactgataagggtcaaaagattgttgtgaccttaggacttaaagaagccctaactggttcatccttaccagtggccaagcacattaactttctcatacactgactgttactttaactgttagtcttaaatagttgggacatcagctgactaatagacctcagcctcaaaaggcttggaaagaaaaaacaaatacaacaagcaaacaacaatatcaacaacaagagattgaaataagctatgggtaaaataatgccagtaattcagctgctacatccaagcactgaagtcttacccgtcaacttttttttttttttaaataaactttatggctgtttgttctacaatgttctagaaattctcactcaggtacacagtgccaacaagtggcttgtgaatgtgttttgttgttttgtgctacaatttttaaaaagaaaaaagttttgttttgtt

SEQ ID NO: 22444 - protein, 763 aa, Homo sapiens [sequence omitted]

SEQ ID NO: 22445 - DNA, 2798 bp, Homo sapiens
agagtgaaaaaggcgagccaccaaaacccatctccagtctcctcccgggggcccccagcccgcctctgtgccactttgcatcccacgccggaggaggcattaacgagaccgggtaaggctttttaaacggtccaaggtgtagagccatacttcaggaggatcctcagaagttttggacaagcctccccaaatgtggcaggtgctgtgctggccattggtgacccaaagatgatgaaaaatatgttcctgcccacaaggagttagcgacctactgggctttcctcttgctgatgacatgattcctgtttgaatctgttgacaagattctgaaagctgaacagagaattctggcactgcactgggtaggaaaaagcatttcaagaaatagataatatcaaggacatcaggacaccgggagtgggagagattggactgggagactcagcaggatgtcttccaagcgaccagcctctccgtatggggaagcagatggagaggtagccatggtgacaagcagacagaaagtggaagaagaggagagtgacgggctcccagcctttcaccttcccttgcatgtgagttttcccaacaagcctcactctgaggaatttcagccagtttctctgctgacgcaagagacttgtggccataggactcccacttctcagcacaatacaatggaagttgatggcaataaagttatgtcttcatttgccccacacaactcatctacctcacctcagaaggcagaagaaggtgggcgacagagtggcgagtccttgtctagtacagccctgggaactcctgaacggcgcaagggcagtttagctgatgttgttgacaccttgaagcagaggaaaatggaagagctcatcaaaaacgagccggaagaaacccccagtattgaaaaactactctcaaaggactggaaagacaagcttcttgcaatgggatcggggaactttggcgaaataaaagggactcccgagagcttagctgagaaagaaaggcaactcatgggtatgatcaaccagctgaccagcctccgagagcagctgttggctgcccacgatgagcagaagaaactagctgcctctcagattgagaaacagcgtcagcaaatggagctggccaagcagcaacaagaacaaattgcaagacagcagcagcagcttctacagcaacaacacaaaatcaatttgctccagcaacagatccaggttcaaggtcagctgccgccattaatgattcccgtattccctcctgatcaacggacactggctgcagctgcccagcaaggattcctcctccctccaggcttcagctataaggctggatgtagtgacccttaccctgttcagctgatcccaactaccatggcagctgctgccgcagcaacaccaggcttaggcccactccaactgcagcagttatatgctgcccagctagctgcaatgcaggtatctccaggagggaagctgccaggcataccccaaggcaaccttggtgctgctgtatctcctaccagcattcacacagacaagagcacaaacagcccaccacccaaaagcaaggaaaaaacaacactggagagtctgactcagcaactggcagttaaacagaatgaagaaggaaaatttagccatgcaatgatggatttcaatctgagtggagattctgatggaagtgctggagtctcagagtcaagaatttatagggaatcccgagggcgtggtagcaatgaaccccacataaagcgtccaatgaatgccttcatggtgtgggctaaagatgaacggagaaagatccttcaagcctttcctgacatgcacaactccaacatcagcaagatattgggatctcgctggaaagctatgacaaacctagagaaacagccatattatgaggagcaagcccgtctcagcaagcagcacctggagaagtaccctgactataagtacaagcccaggccaaagcgcacctgcctggtggatggcaaaaagctgcgcattggtgaatacaaggcaatcatgcgcaacaggcggcaggaaatgcggcagtacttcaatgttgggcaacaagcacagatccccattgccactgctggtgttgtgtaccctggagccatcgccatggctgggatgccctcccctcacctgccctcggagcactcaagcgtgtctagcagcccagagcctgggatgcctgttatccagagcacttacggtgtgaaaggagaggagccacatatcaaagaagagatacaggccgaggacatcaatggagaaatttatgatgagtacgacgaggaagaggatgatccagatgtagattatgggagtgacagtgaaaaccatattgcaggacaagccaactgataagggtcaaaagattgttgtgaccttaggacttaaagaagccctaactggttcatccttaccagtggccaagcacattaactttctcatacactgactgttactttaactgttagtcttaaatagttgggacatcagctgactaatagacctcagcctcaaaaggcttggaaagaaaaaacaaatacaacaagcaaacaacaatatcaacaacaagagattgaaataagctatgggtaaaataatgccagtaattcagctgctacatccaagcactgaagtcttacccgtcaacttttttttttttttaaataaactttatggctgtttgttctacaatgttctagaaattctcactcaggtacacagtgccaacaagtggcttgtgaatgtgttttgttgttttgtgctacaattttt

SEQ ID NO: 22446 - protein, 642 aa, Homo sapiens
MSSKRPASPYGEADGEVAMVTSRQKVEEEESDGLPAFHLPLHVSFPNKPHSEEFQPVSLLTQETCGHRTPTSQHNTMEVDGNKVMSSFAPHNSSTSPQKAEEGGRQSGESLSSTALGTPERRKGSLADVVDTLKQRKMEELIKNEPEETPSIEKLLSKDWKDKLLAMGSGNFGEIKGTPESLAEKERQLMGMINQLTSLREQLLAAHDEQKKLAASQIEKQRQQMELAKQQQEQIARQQQQLLQQQHKINLLQQQIQVQGQLPPLMIPVFPPDQRTLAAAAQQGFLLPPGFSYKAGCSDPYPVQLIPTTMAAAAAATPGLGPLQLQQLYAAQLAAMQVSPGGKLPGIPQGNLGAAVSPTSIHTDKSTNSPPPKSKEKTTLESLTQQLAVKQNEEGKFSHAMMDFNLSGDSDGSAGVSESRIYRESRGRGSNEPHIKRPMNAFMVWAKDERRKILQAFPDMHNSNISKILGSRWKAMTNLEKQPYYEEQARLSKQHLEKYPDYKYKPRPKRTCLVDGKKLRIGEYKAIMRNRRQEMRQYFNVGQQAQIPIATAGVVYPGAIAMAGMPSPHLPSEHSSVSSSPEPGMPVIQSTYGVKGEEPHIKEEIQAEDINGEIYDEYDEEEDDPDVDYGSDSENHIAGQAN

SEQ ID NO: 22447 - DNA, 2706 bp, Homo sapiens
ttggactcacttgacaggttcagttggagacgatcataggtggctgctgtgacaaagggaaattgtgcttttccagcatgcttactgaccctgatttacctcaggagtttgaaaggatgtcttccaagcgaccagcctctccgtatggggaagcagatggagaggtagccatggtgacaagcagacagaaagtggaagaagaggagagtgacgggctcccagcctttcaccttcccttgcatgtgagttttcccaacaagcctcactctgaggaatttcagccagtttctctgctgacgcaagagacttgtggccataggactcccacttctcagcacaatacaatggaagttgatggcaataaagttatgtcttcatttgccccacacaactcatctacctcacctcagaaggcagaagaaggtgggcgacagagtggcgagtccttgtctagtacagccctgggaactcctgaacggcgcaagggcagtttagctgatgttgttgacaccttgaagcagaggaaaatggaagagctcatcaaaaacgagccggaagaaacccccagtattgaaaaactactctcaaaggactggaaagacaagcttcttgcaatgggatcggggaactttggcgaaataaaagggactcccgagagcttagctgagaaagaaaggcaactcatgggtatgatcaaccagctgaccagcctccgagagcagctgttggctgcccacgatgagcagaagaaactagctgcctctcagattgagaaacagcgtcagcaaatggagctggccaagcagcaacaagaacaaattgcaagacagcagcagcagcttctacagcaacaacacaaaatcaatttgctccagcaacagatccaggttcaaggtcagctgccgccattaatgattcccgtattccctcctgatcaacggacactggctgcagctgcccagcaaggattcctcctccctccaggcttcagctataaggctggatgtagtgacccttaccctgttcagctgatcccaactaccatggcagctgctgccgcagcaacaccaggcttaggcccactccaactgcagcagttatatgctgcccagctagctgcaatgcaggtatctccaggagggaagctgccaggcataccccaaggcaaccttggtgctgctgtatctcctaccagcattcacacagacaagagcacaaacagcccaccacccaaaagcaaggatgaagtggcacagccactgaacctatcagctaaacccaagacctctgatggcaaatcacccacatcacccacctctccccatatgccagctctgagaataaacagtggggcaggccccctcaaagcctctgtcccagcagcgttagctagtccttcagccagagttagcacaataggttacttaaatgaccatgatgctgtcaccaaggcaatccaagaagctcggcaaatgaaggagcaactccgacgggaacaacaggtgcttgatgggaaggtggctgttgtgaatagtctgggtctcaataactgccgaacagaaaaggaaaaaacaacactggagagtctgactcagcaactggcagttaaacagaatgaagaaggaaaatttagccatgcaatgatggatttcaatctgagtggagattctgatggaagtgctggagtctcagagtcaagaatttatagggaatcccgagggcgtggtagcaatgaaccccacataaagcgtccaatgaatgccttcatggtgtgggctaaagatgaacggagaaagatccttcaagcctttcctgacatgcacaactccaacatcagcaagatattgggatctcgctggaaagctatgacaaacctagagaaacagccatattatgaggagcaagcccgtctcagcaagcagcacctggagaagtaccctgactataagtacaagcccaggccaaagcgcacctgcctggtggatggcaaaaagctgcgcattggtgaatacaaggcaatcatgcgcaacaggcggcaggaaatgcggcagtacttcaatgttgggcaacaagcacagatccccattgccactgctggtgttgtgtaccctggagccatcgccatggctgggatgccctcccctcacctgccctcggagcactcaagcgtgtctagcagcccagagcctgggatgcctgttatccagagcacttacggtgtgaaaggagaggagccacatatcaaagaagagatacaggccgaggacatcaatggagaaatttatgatgagtacgacgaggaagaggatgatccagatgtagattatgggagtgacagtgaaaaccatattgcaggacaagccaactgataagggtcaaaagattgttgtgaccttaggacttaaagaagccctaactggttcatccttaccagtggccaagcacattaactttctcatacactgactgttactttaactgttagtcttaaatagttgggacatcagctgactaatagacctcagcctcaaaaggcttggaaagaaaaaacaaatacaacaagcaaacaacaatatcaacaacaagagattgaaataagctatgggtaaaataatgccagtaattcagctgctacatccaagcactgaagtcttacccgtcaacttttttttttttttaaataaactttatggctgtttgttctac

SEQ ID NO: 22448 - protein, 763 aa, Homo sapiens [sequence omitted]

SEQ ID NO: 22449 - DNA, 712 bp, Homo sapiens
cagatgaggaaactaaggctcagaaagatgctttgcccaacatcagctcatcagtactgttaacttgatgttctactcttggaagctttcatctggtagcaccatgaaactgaagaataaatacaacctttaccttccggctcgtttttgatgagctcttccattttcctctgcttcaaggtgtcaacaacatcagctaaactgcccttgcgccgttcaggagttcccagggctgtactagacaaggactcgccactctgtcgcccaccttcttctgccttctgaggtgaggtagatgagttgtgtggggcaaatgaagacataactttattgccatcaacttcctgaaagagaaagcaaaatgacaaataattgtttacctgaaagagagagcaaaaggacaaataattgtttacctgaaagagaaagcaaaaggacaaataattgtttaaaattcagtaactttaaaaaattggttatatggcttattcagctgaaagattaaaaagtgaaatgtcactctgcaagaggcaaagaaaccaagaaatttcaaaaaagaataaattcagttttcatggtagtactagagtaagtcaaagatctattcaaaggagaaaccaaatatggagattctctcctttaaactgagtataaatgacaatatagtcctatacgaagcctatattattagatttgtttattttcctgcttt

SEQ ID NO: 22450 - protein, 55 aa, Homo sapiens [sequence omitted]

SEQ ID NO: 22451 - DNA, 636 bp, Homo sapiens
gagcgtgcgtgagtgagtgtgtgtgtgtgtgtgtgtgtgtgtgcatgcgtgtgtgaagaatgcacactatctcctgttggttcagttggagacgatcataggtggctgctgtgacaaagggaaattgtgcttttccagcatgcttactgaccctgatttacctcaggagtttgaaaggatgtcttccaagcgaccagcctctccgtatggggaagcagatggagaggtagccatggtgacaagcagacagaaagtggaagaagaggagagtgacgggctcccagcctttcaccttcccttgcatgaagttgatggcaataaagttatgtcttcatttgccccacacaactcatctacctcacctcagaaggcagaagaaggtgggcgacagagtggcgagtccttgtctagtacagccctgggaactcctgaacggcgcaagggcagtttagctgatgttgttgacaccttgaagcagaggaaaatggaagagctcatcaaaaacgagccggaaggctctcattaactttcaagtggaaacaaacaagtattttggcaatactaaacgtaaagtatttccagtgtttaattcacttcaggacaatcacatataaaaataaagcttatctaaatctt

SEQ ID NO: 22452 - protein, 128 aa, Homo sapiens
MLTDPDLPQEFERMSSKRPASPYGEADGEVAMVTSRQKVEEEESDGLPAFHLPLHEVDGNKVMSSFAPHNSSTSPQKAEEGGRQSGESLSSTALGTPERRKGSLADVVDTLKQRKMEELIKNEPEGSH

SEQ ID NO: 22453 - DNA, 401 bp, Homo sapiens
cagcattctgaacagcaatgctcatcacataaacatgaagtttcctccaaaaggaatgatgactaatgctttgaggaaacagcagacgtcagacagcaagcccagaaaaacctgccagcaccaagagggtgtcctcaacaggcgcctgggggacatattattctaactaaagagaccagagcttccccaggaagggaagaggagagaaatgaagaacgtctgtgttcatgtttgccaaaaacaaaagtctgagaaatctctgagagactctacatgggaggtgaaatttaccttttctaagaccattgttgattttccttttacccttgaagtggactgaaatatcactaatggtgagaggaaagctcagaggttctattaaagaatgtgaaataggttaa

SEQ ID NO: 22454 - protein, 43 aa, Homo sapiens
MKFPPKGMMTNALRKQQTSDSKPRKTCQHQEGVLNRRLGDILF

SEQ ID NO: 22455 - DNA, 678 bp, Homo sapiens
gccaagactgcaccactgtattccagcctgggcgacagagtgagactccatctcaaaaaaaaaaaaaaaaaagaaagacagaaagaaagaaactacagagatcctgaacaaccctatgaggtggacgaagaaaatagcctcatgctcattttaaatctacagtaacagagactccaagacgttaaggggtgaattcacgtggatgactagcaaaacaagagcaaaccaaaatgaaacaaaataaaaattatcaagtcatatcaagcacacatgtggcagatacattttgtgatagatgaccatttttatataaaaacatacagacattttgcaagataaacagcagcatgcaatgggctggagaaagaaacagcagaaagcacagtcgaaagagcccagggaaccatccatcacaaagccatcctgccttaaagtgaaaagtgcaattccctaagactctggtaacacccatgactgaacatcctgctaattttagcaaaataataaatatgaataagtcttgtttatgaaactgtctgcagccagatgagagtgggaaacgttagcttgcaagaaataaaaaccggaagctcttccctttcgatcgaaaccatgattaacaaacatttgtgaaatccaagttgttctcaaaagatcagaactggtatgattcagtga

SEQ ID NO: 22456 - protein, 33 aa, Homo sapiens
MGWRKKQQKAQSKEPREPSITKPSCLKVKSAIP

SEQ ID NO: 22457 - DNA, 341 bp, Homo sapiens
atgaaacaaaataaaaattatcaagtcatatcaagcacacatgtggcagatacattttgtgatagatgaccatttttatataaaaacatacagctccatctagctctaagtgcttttgtctctgctctcaattgtcagacattttgcaagataaacagcagcatgcaatgggctggagaaagaaacagcagaaagcacagtcgaaagagcccagggaaccatccatcacaaagccatcctgccttaaagtgaaaagtgcaattccctaagactctggtaacacccatgactgaacatcctgctaattttagcaaaataataaatatgaataagtcttgttt

SEQ ID NO: 22458 - protein, 33 aa, Homo sapiens; identical to SEQ ID NO: 22456

SEQ ID NO: 22459 - DNA, 3484 bp, Homo sapiens
accctcaacccccatccccgcctgacgggagctagccctcagtccgcccgagctgtggttgtgggcgccggacaagtccaaggcgcctcctcccaatatggacagccgctacaacagcactgcgggcatcggggacttgaaccagctgagcgctgccatcccggccacgcgggtggaggtgtccgtgtcctgcagaaatcttcttgacagagacacattttctaaatctgatccaatttgtgtcttatatgtacaaggagttggaaataaagaatggagagagtttggaagaactgaagtaattgataatactttaaatcctgattttgtaagaaagtttattctggactacttttttgaagaaagagagaatcttcgttttgacttgtatgatgttgattcaaagagccccaacttatccaaacatgactttctgggacaagtgttttgtacattgggagagatcgttggttcacagggaagtcgcctggaaaaaccaatagtaggaattccagggaagaaatgtggtacaatcatacttacagcagaggaattaaactgttgcagggatgccgttttgatgcaattttgtgcgaacaaattggacaagaaggacttctttggaaaatcagatcctttccttgtattttatcgaagtaatgaagatggcagttttacaatttgtcacaagacagaagttgtcaaaaacactctaaatccagtatggcaagcattcaagatctcagtcagagcattatgtaatggagactatgacagaacaatcaaagtagaggtgtatgactgggaccgagatggaagtcatgatttcattggagaatttacaacaagctatagggaactttctagagggcagtcacaattcaacgtatatgaggtggtgaatcccaaaaagaaaggaaaaaagaaaaaatatactaattctggaacagtaactttactctctttcttggtagaaacagaagtttcattccttgactacattaagggagggacgcaaatcaatttcacagtggctattgattttacagcatcaaacggcaaccctgctcagcccacttccctccactacatgaatccttaccaactgaatgcctatggtatggcactaaaagcagtgggagaaattgttcaagattatgacagtgataaaatgtttccagctctaggatttggtgcaaaactgcctccagatggaaggatatctcacgaatttgctttgaatgggaatcctcaaaacccctactgtgatggcattgagggggtcatggaggcttattacaggagtctgaaatctgtacaactatatgggcccaccaactttgctcctgtaattaatcatgtagcaagatatgcttcttctgtaaaggatggctcccagtattttgtgcttctgattgttacagatggtgttatctcagatatggcccagactaaggagtccatagttaatgcctcaaaacttccaatgtcaataattatagtaggtgttggaccagcagaatttgatgcaatggtcgaattggatggagatgatgtaagagtctcctctagaggaaaatatgctgaaagagacattgtgcagtttgtgccattcagggattatattgacagaagtggaaaccacatactgagcatggctagattggctaaagatgtcctagctgagatccctgagcagtttctctcctatatgagagcccgaggaatcaagccatcacctgcgcctcccccatacaccccacctacacatgtgttacagactcaaatatgactgtgctctgaaatgctaatgtcaactacaaatcaaaagtgctgagttaatgctttgtgcctggtgctctgtaatgaaccaggcaatgagatagttttctcagtttggtttcagcagttaatgtgctttcttggatccaaatttaaatatcttcctaaaccaaaactgtaaatatggttgttgcatgagcaacagaaaaaattgtttaaatgcttgaagcaaagtatggatgtcttctctaaatctttctttctttttttttttaacagaaacagctaatttccaatgtattgttgggaaaaagcacaaactgtgtttttaactcaaatattgtcttcgactgctatgtgtataggaaagcagtctctgtatcaatgtttacatgttactactttttaaatttcaatacttttataactgttcttaaaaataagagttttaaatactgaatcctttgtcttctaaattgcaatagctataatcacaagagcaatatctctttgaatgactgtctggacaaacacaattgcaaataagggaagggaaaaatgcttttctatttttcagtaactggattgtcttaagaaactacatctgcttaataaacaatttctcagcaatgtttgctgggtatgggagtttaagcccggcagatgtgtctcctggttgaacatgcatttttcatggagtttgggttctaaatttagactgcagttggtttgtattttgtaacactaagtagaaattataaaaagtcaaacattgtgatctataaatgcacagaaaatactttgtaaaaagtagcatccttatataataatgctatttagaaagactgaaaccaagactatttaactgtgaactatgtagcagatgttttaaactttttattccattatatcttgtctagatattttaattcaaagggatactggctctcttgatcggaatttcttgttatcaccattccacgttgccacacaaggtgcacaggctggaagtcttttgtgaaattcccagttaaatatatacaactatgtgacttagtgcacaacacatttgtgaaataacctactcctatatactgacctgcctgtccacgaataattgtaaagggtttttgcatgtacagtttttacaagaattacagttttgtgaagttgtgtctaaattaaagcatttctttagaacaaatggccttaaattctcacggaattcctggaaatgattgtgaattgccttcaaataatagaaaagtgtatttatttgtgtgtgtgtgtgtgtcaaaaatgtaactgctttataatattttttccttacctatatattctatttaatacttggtttatttctactgtacattgttttctttgtcccaagttgacctagggtgacttttataagcatgaaactattttactggaaagaaaaatatatacatccacatatctaacagtatcaatgttatataactatgtaataattgttgatttttaattatgtattaaaatctttaaatcataactatttgctttgtacgtttcatgtatgaatgacaatagtttgatgatttcctttactgatcttaaatatttatgccactacagtgtattacctacagatttttaaatttagctttatttatcaacccaaaaaacaaataaataagatcaatattcttttcttcttgtc

SEQ ID NO: 22460 - protein, 564 aa, Homo sapiens; identical to SEQ ID NO: 2959

SEQ ID NO: 22461 - DNA, 2203 bp, Homo sapiens
aagtgccaaagaagcaacaactggttttaaaagattaatttgtggtgccgaaggtgataaagactaaaatggattggacagaacttaaaagtaaaatatatgcttcttctgtaaaggatggctcccagtattttgtgcttctgattgttacagatggtgttatctcagatatggcccagactaaggagtccatagttaatgcctcaaaacttccaatgtcaataattatagtaggtgttggaccagcagaatttgatgcaatggtcgaattggatggagatgatgtaagagtctcctctagaggaaaatatgctgaaagagacattgtgcagtttgtgccattcagggattatattgacagaagtggaaaccacatactgagcatggctagattggctaaagatgtcctagctgagatccctgagcagtttctctcctatatgagagcccgaggaatcaagccatcacctgcgcctcccccatacaccccacctacacatgtgttacagactcaaatatgactgtgctctgaaatgctaatgtcaactacaaatcaaaagtgctgagttaatgctttgtgcctggtgctctgtaatgaaccaggcaatgagatagttttctcagtttggtttcagcagttaatgtgctttcttggatccaaatttaaatatcttcctaaaccaaaactgtaaatatggttgttgcatgagcaacagaaaaaattgtttaaatgcttgaagcaaagtatggatgtcttctctaaatctttctttctttttttttttaacagaaacagctaatttccaatgtattgttgggaaaaagcacaaactgtgtttttaactcaaatattgtcttcgactgctatgtgtataggaaagcagtctctgtatcaatgtttacatgttactactttttaaatttcaatacttttataactgttcttaaaaataagagttttaaatactgaatcctttgtcttctaaattgcaatagctataatcacaagagcaatatctctttgaatgactgtctggacaaacacaattgcaaataagggaagggaaaaatgcttttctatttttcagtaactggattgtcttaagaaactacatctgcttaataaacaatttctcagcaatgtttgctgggtatgggagtttaagcccggcagatgtgtctcctggttgaacatgcatttttcatggagtttgggttctaaatttagactgcagttggtttgtattttgtaacactaagtagaaattataaaaagtcaaacattgtgatctataaatgcacagaaaatactttgtaaaaagtagcatccttatataataatgctatttagaaagactgaaaccaagactatttaactgtgaactatgtagcagatgttttaaactttttattccattatatcttgtctagatattttaattcaaagggatactggctctcttgatcggaatttcttgttatcaccattccacgttgccacacaaggtgcacaggctggaagtcttttgtgaaattcccagttaaatatatacaactatgtgacttagtgcacaacacatttgtgaaataacctactcctatatactgacctgcctgtccacgaataattgtaaagggtttttgcatgtacagtttttacaagaattacagttttgtgaagttgtgtctaaattaaagcatttctttagaacaaatggccttaaattctcacggaattcctggaaatgattgtgaattgccttcaaataatagaaaagtgtatttatttgtgtgtgtgtgtgtgtcaaaaatgtaactgctttataatattttttccttacctatatattctatttaatacttggtttatttctactgtacattgttttctttgtcccaagttgacctagggtgacttttataagcatgaaactattttactggaaagaaaaatatatacatccacatatctaacagtatcaatgttatataactatgtaataattgttgatttttaattatgtattaaaatctttaaatcataactatttgctttgtacgtttcatgtatgaatgacaatagtttgatgatttcctttactgatcttaaatatttatgccactacagtgtattacctacagatttttaaatttagctttatttatcaacccaaaaaacaaataaataagatcaatattcttt

SEQ ID NO: 22462 - protein, 150 aa, Homo sapiens
MDWTELKSKIYASSVKDGSQYFVLLIVTDGVISDMAQTKESIVNASKLPMSIIIVGVGPAEFDAMVELDGDDVRVSSRGKYAERDIVQFVPFRDYIDRSGNHILSMARLAKDVLAEIPEQFLSYMRARGIKPSPAPPPYTPPTHVLQTQI

SEQ ID NO: 22463 - DNA, 2043 bp, Homo sapiens
aagtgccaaagaagcaacaactggttttaaaagattaatttgtggtgccgaaggtgataaagactaaaatggattggacagaacttaaaagtaaaatatatgcttcttctgtaaaggatggctcccagtattttgtgcttctgattgttacagatggtgttatctcagatatggcccagactaaggagtccatagttaatgcctcaaaacttccaatgtcaataattatagtaggtgttggaccagcagaatttgatgcaatggtcgaattggatggagatgatgtaagagtctcctctagaggaaaatatgctgaaagagacattgtgcagtttgtgccattcagggattatattgacagaagtggaaaccacatactgagcatggctagattggctaaagatgtcctagctgagatccctgagcagtttctctcctatatgagagcccgaggaatcaagccatcacctgcgcctcccccatacaccccacctacacatgtgttacagactcaaatatgactgtgctctgaaatgctaatgtcaactacaaatcaaaagtgctgagttaatgctttgtgcctggtgctctgtaatgaaccaggcaatgagatagttttctcagtttggtttcagcagttaatgtgctttcttggatccaaatttaaatatcttcctaaaccaaaactgtaaatatggttgttgcatgagcaacagaaaaaattgtttaaatgcttgaagcaaagtatggatgtcttctctaaatctttctttctttttttttttaacagaaacagctaatttccaatgtattgttgggaaaaagcacaaactgtgtttttaactcaaatattgtcttcgactgctatgtgtataggaaagcagtctctgtatcaatgtttacatgttactactttttaaatttcaatacttttataactgttcttaaaaataagagttttaaatactgaatcctttgtcttctaaattgcaatagctataatcacaagagcaatatctctttgaatgactgtctggacaaacacaattgcaaataagggaagggaaaaatgcttttctatttttcagtaactggattgtcttaagaaactacatctgcttaataaacaatttctcagcaatgtttgctgggtatgggagtttaagcccggcagatgtgtctcctggttgaacatgcatttttcatggagtttgggttctaaatttagactgcagttggtttgtattttgtaacactaagtagaaattataaaaagtcaaacattgtgatctataaatgcacagaaaatactttgtaaaaagtagcatccttatataataatgctatttagaaagactgaaaccaagactatttaactgtgaactatgtagcagatgttttaaactttttattccattatatcttgtctagatattttaattcaaagggatactggctctcttgatcggaatttcttgttatcaccattccacgttgccacacaaggtgcacaggctggaagtcttttgtgaaattcccagttaaatatatacaactatgtgacttagtgcacaacacatttgtgaaataacctactcctatatactgacctgcctgtccacgaataattgtaaagggtttttgcatgtacagtttttacaagaattacagttttgtgaagttgtgtctaaattaaagcatttctttagaacaaatggccttaaattctcacggaattcctggaaatgattgtgaattgccttcaaataatagaaaagtgtatttatttgtgtgtgtgtgtgtgtcaaaaatgtaactgctttataatattttttccttacctatatattctatttaatacttggtttatttctactgtacattgttttctttgtcccaagttgacctagggtgacttttataagcatgaaactattttactggaaagaaaaatatatacatccacatatctaacagtatcaatgttatataactatgtaataattgttgatttttaattatgtattaaaatctttaaatcat

SEQ ID NO: 22464 - protein, 150 aa, Homo sapiens; identical to SEQ ID NO: 22462

SEQ ID NO: 22465 - DNA, 2873 bp, Homo sapiens
aaagtgctcagcagaaaggaggccctagagtgggtagctcctttctgctgctggtcaaccccatccttaccaggcatccatcccatcggcccaggaatctgtctgcctcctgctgctcttcttggcacctgggctcagcactgactttgctccaagattagagcggaagccaacagcagggagaagccaggcagtgggagtaggcacttctgagcctgtgagggcaggagctcttcctgggcccccaagggtacagggatgcctgagcttgcagctgtggtttgggcaactgcagctgtgtggggaaatgcgagggggcagctcctgcctgctccatggagcaggagtggcctgggaggtctgagtctgtagccgtggcttggatgactgcagtgcacctggggagctcctaccccaactcggaaaaggcagagctcccacttgtccctggctcccacacgctccccggagcatgcagccccggctgtgcctccttgctgcagccagcgtgatggcagcgtaaggctgtctggagcagctgctgccatcaatagttgataaagaaataaggacgcaaatcaatttcacagtggctattgattttacagcatcaaacggcaaccctgctcagcccacttccctccactacatgaatccttaccaactgaatgcctatggtatggcactaaaagcagtgggagaaattgttcaagattatgacagtgataaaatgtttccagctctaggatttggtgcaaaactgcctccagatggaaggatatctcacgaatttgctttgaatgggaatcctcaaaacccctactgtgatggcattgagggggtcatggaggcttattacaggagtctgaaatctgtacaactatatgggcccaccaactttgctcctgtaattaatcatgtagcaagatatgcttcttctgtaaaggatggctcccagtattttgtgcttctgattgttacagatggtgttatctcagatatggcccagactaaggagtccatagttaatgcctcaaaacttccaatgtcaataattatagtaggtgttggaccagcagaatttgatgcaatggtcgaattggatggagatgatgtaagagtctcctctagaggaaaatatgctgaaagagacattgtgcagtttgtgccattcagggattatattgacagaagtggaaaccacatactgagcatggctagattggctaaagatgtcctagctgagatccctgagcagtttctctcctatatgagagcccgaggaatcaagccatcacctgcgcctcccccatacaccccacctacacatgtgttacagactcaaatatgactgtgctctgaaatgctaatgtcaactacaaatcaaaagtgctgagttaatgctttgtgcctggtgctctgtaatgaaccaggcaatgagatagttttctcagtttggtttcagcagttaatgtgctttcttggatccaaatttaaatatcttcctaaaccaaaactgtaaatatggttgttgcatgagcaacagaaaaaattgtttaaatgcttgaagcaaagtatggatgtcttctctaaatctttctttctttttttttttaacagaaacagctaatttccaatgtattgttgggaaaaagcacaaactgtgtttttaactcaaatattgtcttcgactgctatgtgtataggaaagcagtctctgtatcaatgtttacatgttactactttttaaatttcaatacttttataactgttcttaaaaataagagttttaaatactgaatcctttgtcttctaaattgcaatagctataatcacaagagcaatatctctttgaatgactgtctggacaaacacaattgcaaataagggaagggaaaaatgcttttctatttttcagtaactggattgtcttaagaaactacatctgcttaataaacaatttctcagcaatgtttgctgggtatgggagtttaagcccggcagatgtgtctcctggttgaacatgcatttttcatggagtttgggttctaaatttagactgcagttggtttgtattttgtaacactaagtagaaattataaaaagtcaaacattgtgatctataaatgcacagaaaatactttgtaaaaagtagcatccttatataataatgctatttagaaagactgaaaccaagactatttaactgtgaactatgtagcagatgttttaaactttttattccattatatcttgtctagatattttaattcaaagggatactggctctcttgatcggaatttcttgttatcaccattccacgttgccacacaaggtgcacaggctggaagtcttttgtgaaattcccagttaaatatatacaactatgtgacttagtgcacaacacatttgtgaaataacctactcctatatactgacctgcctgtccacgaataattgtaaagggtttttgcatgtacagtttttacaagaattacagttttgtgaagttgtgtctaaattaaagcatttctttagaacaaatggccttaaattctcacggaattcctggaaatgattgtgaattgccttcaaataatagaaaagtgtatttatttgtgtgtgtgtgtgtgtcaaaaatgtaactgctttataatattttttccttacctatatattctatttaatacttggtttatttctactgtacattgttttctttgtcccaagttgacctagggtgacttttataagcatgaaactattttactggaaagaaaaatatatacatccacatatctaacagtatcaatgttatataactatgtaataattgttgatttttaattatgtattaaaatctttaaatcat

SEQ ID NO: 22466 - protein, 233 aa, Homo sapiens
MNPYQLNAYGMALKAVGEIVQDYDSDKMFPALGFGAKLPPDGRISHEFALNGNPQNPYCDGIEGVMEAYYRSLKSVQLYGPTNFAPVINHVARYASSVKDGSQYFVLLIVTDGVISDMAQTKESIVNASKLPMSIIIVGVGPAEFDAMVELDGDDVRVSSRGKYAERDIVQFVPFRDYIDRSGNHILSMARLAKDVLAEIPEQFLSYMRARGIKPSPAPPPYTPPTHVLQTQI

SEQ ID NO: 22467 - DNA, 3301 bp, Homo sapiens
atccccgcctgacgggagctagccctcagtccgcccgagctgtggttgtgggcgccggacaagtccaaggcgcctcctcccaatatggacagccgctacaacagcactgcgggcatcggggacttgaaccagctgagcgctgccatcccggccacgcgggtggaggtgtccgtgtcctgcagaaatcttcttgacagagacacattttctaaatctgatccaatttgtgtcttatatgtacaaggagttggaaataaagaatggagagagtttggaagaactgaagtaattgataatactttaaatcctgattttgtaagaaagtttattctggactacttttttgaagaaagagagaatcttcgttttgacttgtatgatgttgattcaaagagccccaacttatccaaacatgactttctgggacaagtgttttgtacattgggagagatcgttggttcacagggaagtcgcctggaaaaaccaatagtaggaattccagggaagaaatgtggtacaatcatacttacagcagaggaattaaactgttgcagggatgccgttttgatgcaattttgtgcgaacaaattggacaagaaggacttctttggaaaatcagatcctttccttgtattttatcgaagtaatgaagatggcagttttacaatttgtcacaagacagaagttgtcaaaaacactctaaatccagtatggcaagcattcaagatctcagtcagagcattatgtaatggagactatgacagaacaatcaaagtagaggtgtatgactgggaccgagatggaagtcatgatttcattggagaatttacaacaagctatagggaactttctagagggcagtcacaattcaacgtatatgaggtggtgaatcccaaaaagaaaggaaaaaagaaaaaatatactaattctggaacagtaactttactctctttcttggtagaaacagaagtttcattccttgactacattaagggagggacgcaaatcaatttcacagtggctattgattttacagcatcaaacggcaaccctgctcagcccacttccctccactacatgaatccttaccaactgaatgcctatggtatggcactaaaagcagtgggagaaattgttcaagattatgacagtgataaaatgtttccagctctaggatttggtgcaaaactgcctccagatggaaggatatctcacgaatttgctttgaatgggaatcctcaaaacccctactgtgatggcattgagggggtcatggaggcttattacaggagtctgaaatctgtacaactatatgggcccaccaactttgctcctgtaattaatcatgtagcaagatatgcttcttctgtaaaggatggctcccagtattttgtgcttctgattgttacagatggtgttatctcagatatggcccagactaaggagtccatagttaatgcctcaaaacttccaatgtcaataattatagtaggtgttggaccagcagaatttgatgcaatggtcgaattggatggagatgatgtaagagtctcctctagaggaaaatatgctgaaagagacattgtgcagtttgtgccattcagggattatattgacagaagtggaaaccacatactgagcatggctagattggctaaagatgtcctagctgagatccctgagcagtttctctcctatatgagagcccgaggaatcaagccatcacctgcgcctcccccatacaccccacctacacatgtgttacagactcaaatatgactgtgctctgaaatgctaatgtcaactacaaatcaaaagtgctgagttaatgctttgtgcctggtgctctgtaatgaaccaggcaatgagatagttttctcagtttggtttcagcagttaatgtgctttcttggatccaaatttaaatatcttcctaaaccaaaactgtaaatatggttgttgcatgagcaacagaaaaaattgtttaaatgcttgaagcaaagtatggatgtcttctctaaatctttctttctttttttttttaacagaaacagctaatttccaatgtattgttgggaaaaagcacaaactgtgtttttaactcaaatattgtcttcgactgctatgtgtataggaaagcagtctctgtatcaatgtttacatgttactactttttaaatttcaatacttttataactgttcttaaaaataagagttttaaatactgaatcctttgtcttctaaattgcaatagctataatcacaagagcaatatctctttgaatgactgtctggacaaacacaattgcaaataagggaagggaaaaatgcttttctatttttcagtaactggattgtcttaagaaactacatctgcttaataaacaatttctcagcaatgtttgctgggtatgggagtttaagcccggcagatgtgtctcctggttgaacatgcatttttcatggagtttgggttctaaatttagactgcagttggtttgtattttgtaacactaagtagaaattataaaaagtcaaacattgtgatctataaatgcacagaaaatactttgtaaaaagtagcatccttatataataatgctatttagaaagactgaaaccaagactatttaactgtgaactatgtagcagatgttttaaactttttattccattatatcttgtctagatattttaattcaaagggatactggctctcttgatcggaatttcttgttatcaccattccacgttgccacacaaggtgcacaggctggaagtcttttgtgaaattcccagttaaatatatacaactatgtgacttagtgcacaacacatttgtgaaataacctactcctatatactgacctgcctgtccacgaataattgtaaagggtttttgcatgtacagtttttacaagaattacagttttgtgaagttgtgtctaaattaaagcatttctttagaacaaatggccttaaattctcacggaattcctggaaatgattgtgaattgccttcaaataatagaaaagtgtatttatttgtgtgtgtgtgtgtgtcaaaaatgtaactgctttataatattttttccttacctatatattctatttaatacttggtttatttctactgtacattgttttctttgtcccaagttgacctagggtgacttttataagcatgaaactattttactggaaagaaaaatatatacatccacatatctaacagtatcaatgttatataactatgtaataattgttgatttttaattatgtattaaaatctttaaatcat

SEQ ID NO: 22468 - protein, 564 aa, Homo sapiens; identical to SEQ ID NO: 2959

SEQ ID NO: 22469 - DNA, 3231 bp, Homo sapiens
ggtgatggcttcacagggagatacatgagtcaacatttatcgaatgatggatgcactttaagtgcagttcattatatatgttatacctcactgaagtggaaacaaattggataaatcttcttgacagagacacattttctaaatctgatccaatttgtgtcttatatgtacaaggagttggaaataaagaatggagagagtttggaagaactgaagtaattgataatactttaaatcctgattttgtaagaaagtttattctggactacttttttgaagaaagagagaatcttcgttttgacttgtatgatgttgattcaaagagccccaacttatccaaacatgactttctgggacaagtgttttgtacattgggagagatcgttggttcacagggaagtcgcctggaaaaaccaatagtaggaattccagggaagaaatgtggtacaatcatacttacagcagaggaattaaactgttgcagggatgccgttttgatgcaattttgtgcgaacaaattggacaagaaggacttctttggaaaatcagatcctttccttgtattttatcgaagtaatgaagatggcagttttacaatttgtcacaagacagaagttgtcaaaaacactctaaatccagtatggcaagcattcaagatctcagtcagagcattatgtaatggagactatgacagaacaatcaaagtagaggtgtatgactgggaccgagatggaagtcatgatttcattggagaatttacaacaagctatagggaactttctagagggcagtcacaattcaacgtatatgaggtggtgaatcccaaaaagaaaggaaaaaagaaaaaatatactaattctggaacagtaactttactctctttcttggtagaaacagaagtttcattccttgactacattaagggagggacgcaaatcaatttcacagtggctattgattttacagcatcaaacggcaaccctgctcagcccacttccctccactacatgaatccttaccaactgaatgcctatggtatggcactaaaagcagtgggagaaattgttcaagattatgacagtgataaaatgtttccagctctaggatttggtgcaaaactgcctccagatggaaggatatctcacgaatttgctttgaatgggaatcctcaaaacccctactgtgatggcattgagggggtcatggaggcttattacaggagtctgaaatctgtacaactatatgggcccaccaactttgctcctgtaattaatcatgtagcaagatatgcttcttctgtaaaggatggctcccagtattttgtgcttctgattgttacagatggtgttatctcagatatggcccagactaaggagtccatagttaatgcctcaaaacttccaatgtcaataattatagtaggtgttggaccagcagaatttgatgcaatggtcgaattggatggagatgatgtaagagtctcctctagaggaaaatatgctgaaagagacattgtgcagtttgtgccattcagggattatattgacagaagtggaaaccacatactgagcatggctagattggctaaagatgtcctagctgagatccctgagcagtttctctcctatatgagagcccgaggaatcaagccatcacctgcgcctcccccatacaccccacctacacatgtgttacagactcaaatatgactgtgctctgaaatgctaatgtcaactacaaatcaaaagtgctgagttaatgctttgtgcctggtgctctgtaatgaaccaggcaatgagatagttttctcagtttggtttcagcagttaatgtgctttcttggatccaaatttaaatatcttcctaaaccaaaactgtaaatatggttgttgcatgagcaacagaaaaaattgtttaaatgcttgaagcaaagtatggatgtcttctctaaatctttctttctttttttttttaacagaaacagctaatttccaatgtattgttgggaaaaagcacaaactgtgtttttaactcaaatattgtcttcgactgctatgtgtataggaaagcagtctctgtatcaatgtttacatgttactactttttaaatttcaatacttttataactgttcttaaaaataagagttttaaatactgaatcctttgtcttctaaattgcaatagctataatcacaagagcaatatctctttgaatgactgtctggacaaacacaattgcaaataagggaagggaaaaatgcttttctatttttcagtaactggattgtcttaagaaactacatctgcttaataaacaatttctcagcaatgtttgctgggtatgggagtttaagcccggcagatgtgtctcctggttgaacatgcatttttcatggagtttgggttctaaatttagactgcagttggtttgtattttgtaacactaagtagaaattataaaaagtcaaacattgtgatctataaatgcacagaaaatactttgtaaaaagtagcatccttatataataatgctatttagaaagactgaaaccaagactatttaactgtgaactatgtagcagatgttttaaactttttattccattatatcttgtctagatattttaattcaaagggatactggctctcttgatcggaatttcttgttatcaccattccacgttgccacacaaggtgcacaggctggaagtcttttgtgaaattcccagttaaatatatacaactatgtgacttagtgcacaacacatttgtgaaataacctactcctatatactgacctgcctgtccacgaataattgtaaagggtttttgcatgtacagtttttacaagaattacagttttgtgaagttgtgtctaaattaaagcatttctttagaacaaatggccttaaattctcacggaattcctggaaatgattgtgaattgccttcaaataatagaaaagtgtatttatttgtgtgtgtgtgtgtgtcaaaaatgtaactgctttataatattttttccttacctatatattctatttaatacttggtttatttctactgtacattgttttctttgtcccaagttgacctagggtgacttttataagcatgaaactattttactggaaagaaaaatatatacatccacatatctaacagtatcaatgttatataactatgtaataattgttgatttttaattatgtattaaaatctttaaatcat

SEQ ID NO: 22470 - protein, 552 aa, Homo sapiens
MHFKCSSLYMLYLTEVETNWINLLDRDTFSKSDPICVLYVQGVGNKEWREFGRTEVIDNTLNPDFVRKFILDYFFEERENLRFDLYDVDSKSPNLSKHDFLGQVFCTLGEIVGSQGSRLEKPIVGIPGKKCGTIILTAEELNCCRDAVLMQFCANKLDKKDFFGKSDPFLVFYRSNEDGSFTICHKTEVVKNTLNPVWQAFKISVRALCNGDYDRTIKVEVYDWDRDGSHDFIGEFTTSYRELSRGQSQFNVYEVVNPKKKGKKKKYTNSGTVTLLSFLVETEVSFLDYIKGGTQINFTVAIDFTASNGNPAQPTSLHYMNPYQLNAYGMALKAVGEIVQDYDSDKMFPALGFGAKLPPDGRISHEFALNGNPQNPYCDGIEGVMEAYYRSLKSVQLYGPTNFAPVINHVARYASSVKDGSQYFVLLIVTDGVISDMAQTKESIVNASKLPMSIIIVGVGPAEFDAMVELDGDDVRVSSRGKYAERDIVQFVPFRDYIDRSGNHILSMARLAKDVLAEIPEQFLSYMRARGIKPSPAPPPYTPPTHVLQTQI

SEQ ID NO: 22471 - DNA, 376 bp, Homo sapiens
tttctttgtctgtaaaatgcacacttaatcaagttttgtatgagaaatgaatgaagacatgaagggatcaacatgctttctgtcttttcatagcacattttgctacttcatacatcttgatttccttgttgtccacattgttttagtatttggctaaaatgtactgaataaatgatcatattttctcttaaagcaatggtcgaattggatggagatgatgtaagagtctcctctagaggaaaatatgctgaaagagacattgtgcagtttgtgccattcagggattatattgacagaagtggaaaccacatactgagcatggctagattggctaaagatgtcctagctgagatccctgagcagtttctctcctata

SEQ ID NO: 22472 - protein, 67 aa, Homo sapiens
MIIFSLKAMVELDGDDVRVSSRGKYAERDIVQFVPFRDYIDRSGNHILSMARLAKDVLAEIPEQFLS

SEQ ID NO: 22473 - DNA, 1277 bp, Homo sapiens
gcagagccacgagggaaccgctagccagtcctgggtgaaactgacgctgccaggcaagtggcgcgcggggatcccggtttcccagcccccttccggcaggcagcagcccgggcgggggacacactccgtgatcccctcctggctggaggggtcaggcttggtggacccagcaagcagcctgatggagaaggtggcaccagacgcagacccctaccgtccaggaccgcaagccctcgccggctctgcgtgcttttaggttttgtctccacctctgcacacccacactcgcctcctgggccgcgacagcttccttctgtcaatcaggtgtggacgggaaggtctcgaagtttcctcgcctgagttgaaagctggaggtgggggcacctctgcccgttcctaactgccccgttataaggtccccctccccacaattggttctcacctcgccctcggagctcttgggagatccctccgtccctcctactgtgccctcgggcagatgagtctggtcccagcttctggactgcccactgtcggccacttgagagttggggacggtggggcattgtgacgctctccaaccttggaacacggtggcaaagtggccgatcaatatatgggacaagtgggggcgggggggcggactctaaggtggaaaaaacaatactacttgggatttaaggaagcaatctggattctgtctccccttggttcttcggagcttagaggtctaacggcgacattcctcctacagtaagggctcttctgggtccctcgtttccaaaggcatgaaagttctgacctgaaaatgggggccggggagggtgatgtcacaaccatataacgcagctccttcagccgactcccacccgcaagaactgagacctgacggataaaagcagagaggagtcagagtgagcgctgcgtttgggaaactgcattccagggcagcaagactggtgccaagacggagtcgtggcaaaagcatccggaggtcttccttaatatatgtcagcagtggagtggtgtgcttaaggagagagagacttggaaaaatacagaccgagaacaaggccatgtggagatagaggcagagactgaagttgtaccaccaaaggcaaagaatatcaagtattatcagtaaccacaggaagctggaagaggccaggaaaggtttttcttagagaccttggaaggagcctgaccctggaacaccttgattttagacttctgaccctcaaaattgtgaaagaataaatttctgttgttttaagcaa

SEQ ID NO: 22474 - protein, 46 aa, Homo sapiens
MGQVGAGGRTLRWKKQYYLGFKEAIWILSPLGSSELRGLTATFLLQ

SEQ ID NO: 22475 - DNA, 1254 bp, Homo sapiens
atgcggtttcccattcagaaacgcattgattgccaccctcaaccaggaacctctcaagaaagctgtgaagctagaggctgcttccagtgttccacaaccactaccgacattccttggtggttttacccagcagatggttcatatggctacaccataaatgatcaacctgaaaagacagatccaggatggaggtgggaaacatttcttggaggcctgattttttctaaccagtttatacaaatgacaactgcggtcccatccactccaatctgtggatttggtgaacatgaacatctatcctttaagcatgacatgaattttgttaaatatggaatgttttccagagctcactcaccaacggtaatatgtgagtatagattgttaatactagaagtttgtttatggaaagaagcagaaaccactcttagcccatatccttctttaacattccggactattggaggaattcttgacttcaacatgtttctggaccccactcctgaaaatgtccagcaatacacagagatgagtacagtactgggttctataatgggtgtattgtctcacctccccaaagtctacagaagcttctacacaggatttagaaaagatagaactgagagcggggacatgaggaggttgcagagagggctagaaaaaggagtgaccgccgtcctcctgaatcttgttgctttctgggtcaatccttcctgttccttgtctactgctgacatctactgcaggggaataggggactgggtgtccccacccttccagcacctctgcctaggacaggcttgtttgattctaaaatcctttagaatagccagcaagagtggtgacagaggtcaagcaaaagttactcccatttaccttgtccttcaggccattgggcatccctatttgcctccatactggtctctgggatttcagctgtgtcgatggggttacaatagcctagatatgctgaaaaccacagttggacatttaagacaatatgatattccccatataaatgtactcaaacaagacatgcatttgtcaatcattggaatgctagaatgtaatctctttggaattccatatgtaggagctgatatatgtgggtttaatgaagagacaacttatgaactttgcctgcattggatgcaatttggggccttctatcccttttccagaaacaataaggccattggaaataaggcaagtgacagtcaatttaaaataactgccatgctcagtattaatctgtaa

SEQ ID NO: 22476 - protein, 417 aa, Homo sapiens
MRFPIQKRIDCHPQPGTSQESCEARGCFQCSTTTTDIPWWFYPADGSYGYTINDQPEKTDPGWRWETFLGGLIFSNQFIQMTTAVPSTPICGFGEHEHLSFKHDMNFVKYGMFSRAHSPTVICEYRLLILEVCLWKEAETTLSPYPSLTFRTIGGILDFNMFLDPTPENVQQYTEMSTVLGSIMGVLSHLPKVYRSFYTGFRKDRTESGDMRRLQRGLEKGVTAVLLNLVAFWVNPSCSLSTADIYCRGIGDWVSPPFQHLCLGQACLILKSFRIASKSGDRGQAKVTPIYLVLQAIGHPYLPPYWSLGFQLCRWGYNSLDMLKTTVGHLRQYDIPHINVLKQDMHLSIIGMLECNLFGIPYVGADICGFNEETTYELCLHWMQFGAFYPFSRNNKAIGNKASDSQFKITAMLSINL

SEQ ID NO: 22477 - DNA, 1211 bp, Homo sapiens
agtaatatcaggcaattcacctagaattcagaaagcaacaaatagaacaattcctctctcttgggacttcattttcttggatctgaatttttaagtcctgaagattctgaaatattccaaaggattaggagtttaaaattctctcttcctcatggaggaaaaccaggagatatacaaagaggtatcctgctagaggatcccaggctaacgatggattagggaagaacagatgatgtgtccaagcgaggaggacataagagaagcaaggtgccaaataaagaatgagaggtcaaatgtaatacaatttgctgactgtaagggggagagtttttttccccaaaatgccaaagtacataaagataaaggtgaaagtttcctctcaccagttccagtgttaacagtgagagttcttgggcaagccctccccaaatgaccgaaatggccctcctgctactccaggactacattttaccagcatagtgacaaagtaaaaagcaaatgattagttcaagccagtgatgtgaagaataactacaaccgagagggggaaaaaggaaggctaaaatcagatttcctcacttggtgcctcaaagcagcttcaatttgacctattttggaaggattcatcaaaaaacaaatttttgtttccctctcagacaagtaccgttgtctcaatgcacctttcatgtgcattctaactttgacagatcattgaacgggagttgggaaactccacttaccaaagagaaaaggacacaattggagatactggttactttacaaagcatttaactggaatggcatattttccataatgaccagactgctttgaggaattaaggttgacttataaagctcaaaaaaagcttcttggaaaggctggtctggtatgttgtctgcaaggttcctttacaagttccctgacctttggtaactaaggaatgtcactttctgacagtcccaggaacctcaaattatttgagcactttgaggaaagaggaactcacccaattcatacagatattgcaatagtctgatggcaaatccttggcatggcttctagccttgaggcttttaaaagtctaatctgagattccttatgaaaaagttccagcaaagtcagtcttaaaagagtttatatgcagcctgaatgacatagtaagaatcccatctctaaaagaagaagaaaaataaataaaaataaaaaagcc

SEQ ID NO: 22478 - protein, 67 aa, Homo sapiens
MMCPSEEDIREARCQIKNERSNVIQFADCKGESFFPQNAKVHKDKGESFLSPVPVLTVRVLGQALPK

SEQ ID NO: 22479 - DNA, 1003 bp, Homo sapiens
tagacgttcaactttgtaacttcaccttagtctctgagggccacagcttcatttacatgagaacttgaagatttttagtgttatgcctactctgccaattcttggaacatttgcggaactgagaatttacttcttcgtttattacttcctaactacattttaaagactcatttgttctagattcagatcattcaacaaaacatggcatgatttccacagtctctgacattctgattgcattgcttgagaaaattctcagtctgggaatctccttaaaatgcagcacagatgatggctgaataggaacagctccggtctgcagctcccagcgagatcaacgcagaaggcgggtgatttctgcatttccaactgagggtgtaacactgtgaccaacgaagagagtgttttctatcagtgactcgcagacttccctttcactggaatccagcttattagctgcatggttaactttggagccaggaaaacatcctgcacatgacactgccatcaagcagaggagacatgtttctcggcttcccctctctgggacttaatagcctctgaaggctagcctttactgactcatgaagctgtgtctgcctggggtcagtggtggagacattgcgttaaccccagcaagcgagccatcaccagagctttgcacagggagacaccacatagaaaggcagatgaggcaacacacacaccatccccagacagccatgggtccccagagacaggaaaaatatgtgttttcttaaagaattagaaaagaaaaccttgctttttcctgtgtggctcattggtaggagatctcaaattctaacccttgttttctcttttacctctctgtctgctaaaaagcactccttagatccagtatctagcatggtgagcctcctggatgcagtgctgcagtggccactgctgggtcaaaaacaaacactgggaaaggaggaaaatgatgtttttctctctttcaataaagcatttgaaatctcta

SEQ ID NO: 22480 - protein, 84 aa, Homo sapiens
MCFLKELEKKTLLFPVWLIGRRSQILTLVFSFTSLSAKKHSLDPVSSMVSLLDAVLQWPLLGQKQTLGKEENDVFLSFNKAFEI

SEQ ID NO: 22481 - DNA, 282 bp, Homo sapiens
aggaacaggagggcaaaacatgttcttctggaagtgctgcccaaagacatggccaccggggaggaaaggaagaaagcagcacagagccaagtttgaagtcctggaagagaatctcctgagacattggctgaggaacacagaaagttacttgtggcagaatctttctggaatttttccattctgggatactctgagcccattttgtcacaggtcatcatgacttgatgaatgaatatcatattggttaattcctgcggcttaataaaatcctttgttcaagaa

SEQ ID NO: 22482 - protein, 66 aa, Homo sapiens [sequence omitted]

SEQ ID NO: 22483 - DNA, 692 bp, Homo sapiens
gaccacttggggcccacccaatgaaagagagtttgaaacaagtccaaagaagagcaatgaaaataattaaatggttggaaaattgtctgtctaaataaaggtcacagacactgggcctatttaatgcagaaatatgaaggggcaaacctatccacattcctcaaggatgtgaaaagaaataggcagagagatcattttcttcagtttttcaatggaaaaaaaatacattcaaaagacgtcttcaccatacaaggaattctttgttcagactggctactgacattccaaacaaacctacactcaagataaagttatcctctcggaacactcagacatttttttttttcttccctatcatcaacttgccaacattaaaggcagttctcacttttagacacaacgtgtttgatgcaaatgcaacttaaagaagattactgtaaggtctcgcctggctggtcttgtattacatcctgattatgcatgtgctgtcacatgagagtggaagccaccaaataagtagctatggtcggtgaaaagtgaaatacgagtctttattattaagtgtccagtaagaggtgtggtgaaaagcaggactcccaaattgaactggtgaaaaatatgaactatctgcaccttacaagaaaataagcaaaaacctttcttctggacatcttaagtagtctttttttttt

SEQ ID NO: 22484 - protein, 61 aa, Homo sapiens
MQKYEGANLSTFLKDVKRNRQRDHFLQFFNGKKIHSKDVFTIQGILCSDWLLTFQTNLHSR

SEQ ID NO: 22485 - DNA, 645 bp, Homo sapiens
gttgcccaggctggagtgcagcagcacaatcgtagctaactgtagcctcagacccctgggcccaaccaatcctccttgtgagccacaattttaacacagatctgattgatatcaaaatacttagacactgtctctctgggctacacgctcctcaagagatcattttcttcagtttttcaatggaaaaaaaatacattcaaaagacgtcttcaccatacaaggaattctttgttcagactggctactgacattccaaacaaacctacactcaagataaagttatcctctcggaacactcagacatttttttttttcttccctatcatcaacttgccaacattaaaggcagttctcacttttagacacaacgtgtttgatgcaaatgcaacttaaagaagattactgtaaggtctcgcctggctggtcttgtattacatcctgattatgcatgtgctgtcacatgagagtggaagccaccaaataagtagctatggtcggtgaaaagtgaaatacgagtctttattattaagtgtccagtaagaggtgtggtgaaaagcaggactcccaaattgaactggtgaaaaatatgaactatctgcaccttacaagaaaataagcaaaaacctttcttctggacatcttaag

SEQ ID NO: 22486 - protein, 95 aa, Homo sapiens
LISKYLDTVSLGYTLLKRSFSSVFQWKKNTFKRRLHHTRNSLFRLATDIPNKPTLKIKLSSRNTQTFFFFFPIINLPTLKAVLTFRHNVFDANAT

SEQ ID NO: 22487 - DNA, 832 bp, Homo sapiens
cttggaatgttctacaaggtttatatcaactgagggttgaaaaatcctacttatccactctccttactttagagatgaggaatttgaatcttagagagtttatgacttatccaattggtggtattaccgaaaaccaaaagccagtttgcttcctagttgaatgttctttccatcatgccatgtggagttattttgagtcaaccagaaaatctgcaaggacatcaaaataatgttctttctccctctgacctcagtaataaccggttaaagatttagaatgctttagagtaaatcctcaaagcagctgcaggtcctcaatgttccagaatagatattttaagttctccaaataaaaaatcccaataaagaccttctttttgcagtaactaaaaaagtttccagctctcctgtcacaaagtggctattgagacttcaaatgtcagatgatctcctttgaagcagcaaaatagagtggatagaactccaggatggatgtcaaaaaactctgtgatcctagttctaactcaaatttacctttcatatggtatgaggttggcaacaaatgattcatggaccaccactcatctatagaccagacattagtaagatgtgcttgcttctccttcgcctttcaccatgactgtaagtttccagaggcctcccagtcatggttcctgttaagcttgcagaacgtgcacacaacctggagcaaagagatgtcaacgtagacttgaaagcctcaacaaacatctatacattcaaaattcagaggataattgcagacttacatgttaaatgatgccacaggcttgtggtgaatgtacaaatctaa

SEQ ID NO: 22488 - protein, 52 aa, Homo sapiens
MDHHSSIDQTLVRCACFSFAFHHDCKFPEASQSWFLLSLQNVHTTWSKEMST

SEQ ID NO: 22489 - DNA, 2320 bp, Homo sapiens
aggaggcggggctttgcgtgagtcactgccgggctcggcgtgagtcgctgcggggctgacggggtggcagtgcggcgggttacggcctggtcagaccataatgacttcagcaaataaagcaatcgaattacaactacaagtgaaacaaaatgcagaagaattacaagactttatgcgggatttagaaaactgggaaaaagacattaaacaaaaggatatggaactaagaagacagaatggtgttcctgaagagaatttacctcctattcgaaatgggaattttaggaaaaagaagaaaggcaaagctaaagagtcttccaaaaaaaccagagaggaaaacacaaaaaacaggataaaatcttatgattatgaggcatgggcaaaacttgatgtggaccgtatccttgatgagcttgacaaagacgatagtacccatgagtctctgtctcaagaatcagagtcggaagaagatgggattcatgtagattcacaaaaggctcttgttttaaaagaaaagggcaataaatacttcaaacaaggaaaatatgatgaagcaattgactgctacacaaaaggcatggatgccgatccatataatcccgtgttgccaacgaacagagcgtcagcatattttagactgaaaaaatttgctgttgctgagtctgattgtaatttagcagttgccttgaatagaagttatacaaaggcttattccagacgaggtgctgctcgatttgctttgcaaaaattagaagaggccaaaaaagattatgaaagagtattagaactagaaccaaataactttgaagcaacaaatgaactcaggaaaatcagtcaggctttagcatccaaagaaaactcatatccaaaggaagctgacatagtgattaagtcaacagaaggagagcgaaagcaaattgaagcacaacagaataagcagcaggccatttcagagaaagatcgggggaatggatttttcaaagaggggaaatatgaaagagcaattgaatgctatactcgagggatagcagcagatggtgctaatgcccttcttccagctaacagagctatggcctatctgaagattcagaaatatgaagaagctgaaaaagactgcacacaagccattttattagatggctcatattctaaagcttttgccagaagaggaactgcaagaacatttttgggaaagctaaatgaggcaaaacaagattttgaaactgttttacttctggaacctggaaataagcaagcagtaactgaactctccaaaattaaaaaggaattaattgagaaaggacactgggatgatgtctttcttgattccacacaaagacaaaatgtggtaaaacccattgataatccaccgcatcctggatcaactaaaccactcaagaaggttattattgaagaaactggtaatttgatacagactattgatgtgccagatagcactactgctgctgctccagagaataatcctattaatctagcaaatgtaatagcagccacaggcaccacaagtaagaagaattcaagccaagatgacctttttcccacaagtgatactccaagagcaaaagtattgaaaatagaagaagtcagtgatacttcatccctgcaacctcaagccagtttgaagcaggatgtatgtcagtcttacagcgagaaaatgcccatagagatagaacaaaaacctgctcagtttgccacaactgttcttcctccaattcctgcaaactcgttccagctcgaatctgatttcagacaattgaaaagttctccagatatgttgtatcagtatttaaagcaaattgaaccatctttgtatcctaagttgtttcagaaaaatctggatccagatgtattcaaccagatcgttaaaattctgcatgacttttacattgagaaagaaaagccattactcatctttgaaatcttacaaagactttctgaactaaaaaggtttgatatggcagtgatgtttatgtcagaaacagagaaaaagattgcacgtgcattatttaatcacatagacaagtcaggattgaaggatagttctgtcgaagaactcaagaaaagatacggtggttgatttccatttttgctgaaataattgtttttgactttcatatgtaaattttttctactgaaagtgttttgctttttaagaaaatgaaattatatagcaggaaaggactatctttgaacataagttaattaactataaggtgaattgtgatttaactagtgagaattgtattcaagtgaactctgtttttctgaaaataaaaatataaacaatgagatacatttg

SEQ ID NO: 22490 - protein, 665 aa, Homo sapiens
MTSANKAIELQLQVKQNAEELQDFMRDLENWEKDIKQKDMELRRQNGVPEENLPPIRNGNFRKKKKGKAKESSKKTREENTKNRIKSYDYEAWAKLDVDRILDELDKDDSTHESLSQESESEEDGIHVDSQKALVLKEKGNKYFKQGKYDEAIDCYTKGMDADPYNPVLPTNRASAYFRLKKFAVAESDCNLAVALNRSYTKAYSRRGAARFALQKLEEAKKDYERVLELEPNNFEATNELRKISQALASKENSYPKEADIVIKSTEGERKQIEAQQNKQQAISEKDRGNGFFKEGKYERAIECYTRGIAADGANALLPANRAMAYLKIQKYEEAEKDCTQAILLDGSYSKAFARRGTARTFLGKLNEAKQDFETVLLLEPGNKQAVTELSKIKKELIEKGHWDDVFLDSTQRQNVVKPIDNPPHPGSTKPLKKVIIEETGNLIQTIDVPDSTTAAAPENNPINLANVIAATGTTSKKNSSQDDLFPTSDTPRAKVLKIEEVSDTSSLQPQASLKQDVCQSYSEKMPIEIEQKPAQFATTVLPPIPANSFQLESDFRQLKSSPDMLYQYLKQIEPSLYPKLFQKNLDPDVFNQIVKILHDFYIEKEKPLLIFEILQRLSELKRFDMAVMFMSETEKKIARALFNHIDKSGLKDSSVEELKKRYGG

SEQ ID NO: 22491 - DNA, 2218 bp, Homo sapiens
aggaggcggggctttgcgtgagtcactgccgggctcggcgtgagtcgctgcggggctgacggggtggcagtgcggcgggttacggcctggtcagaccataatgacttcagcaaataaagcaatcgaattacaactacaagtgaaacaaaatgcagaagaattacaagactttatgcgggatttagaaaactgggaaaaagacattaaacaaaaggatatggaactaagaagacagaatggtgttcctgaagagaatttacctcctattcgaaatgggaattttaggaaaaagaagaaaggcaaagctaaagagtcttccaaaaaaaccagagaggaaaacacaaaaaacaggataaaatcttatgattatgaggcatgggcaaaacttgatgtggaccgtatccttgatgagcttgacaaagacgatagtacccatgagtctctgtctcaagaatcagagtcggaagaagatgggattcatgtagattcacaaaaggctcttgttttaaaagaaaagggcaataaatacttcaaacaaggaaaatatgatgaagcaattgactgctacacaaaaggcatggatgccgatccatataatcccgtgttgccaacgaacagagcgtcagcatattttagactgaaaaaatttgctgttgctgagtctgattgtaatttagcagttgccttgaatagaagttatacaaaggcttattccagacgaggtgctgctcgatttgctttgcaaaaattagaagaggccaaaaaagattatgaaagagtattagaactagaaccaaataactttgaagcaacaaatgaactcaggaaaatcagtcaggctttagcatccaaagaaaactcatatccaaaggaagctgacatagtgattaagtcaacagaaggagagcgaaagcaaattgaagcacaacagaataagcagcaggccatttcagagaaagatcgggggaatggatttttcaaagaggggaaatatgaaagagcaattgaatgctatactcgagggatagcagcagatggtgctaatgcccttcttccagctaacagagctatggcctatctgaagattcagaaatatgaagaagctgaaaaagactgcacacaagccattttattagatggctcatattctaaagcttttgccagaagaggaactgcaagaacatttttgggaaagctaaatgaggcaaaacaagattttgaaactgttttacttctggaacctggaaataagcaagcagtaactgaactctccaaaattaaaaagaaaccactcaagaaggttattattgaagaaactggtaatttgatacagactattgatgtgccagatagcactactgctgctgctccagagaataatcctattaatctagcaaatgtaatagcagccacaggcaccacaagtaagaagaattcaagccaagatgacctttttcccacaagtgatactccaagagcaaaagtattgaaaatagaagaagtcagtgatacttcatccctgcaacctcaagccagtttgaagcaggatgtatgtcagtcttacagcgagaaaatgcccatagagatagaacaaaaacctgctcagtttgccacaactgttcttcctccaattcctgcaaactcgttccagctcgaatctgatttcagacaattgaaaagttctccagatatgttgtatcagtatttaaagcaaattgaaccatctttgtatcctaagttgtttcagaaaaatctggatccagatgtattcaaccagatcgttaaaattctgcatgacttttacattgagaaagaaaagccattactcatctttgaaatcttacaaagactttctgaactaaaaaggtttgatatggcagtgatgtttatgtcagaaacagagaaaaagattgcacgtgcattatttaatcacatagacaagtcaggattgaaggatagttctgtcgaagaactcaagaaaagatacggtggttgatttccatttttgctgaaataattgtttttgactttcatatgtaaattttttctactgaaagtgttttgctttttaagaaaatgaaattatatagcaggaaaggactatctttgaacataagttaattaactataaggtgaattgtgatttaactagtgagaattgtattcaagtgaactctgtttttctgaaaataaaaatataaacaatgagatacatttg

SEQ ID NO: 22492 - protein, 631 aa, Homo sapiens
MTSANKAIELQLQVKQNAEELQDFMRDLENWEKDIKQKDMELRRQNGVPEENLPPIRNGNFRKKKKGKAKESSKKTREENTKNRIKSYDYEAWAKLDVDRILDELDKDDSTHESLSQESESEEDGIHVDSQKALVLKEKGNKYFKQGKYDEAIDCYTKGMDADPYNPVLPTNRASAYFRLKKFAVAESDCNLAVALNRSYTKAYSRRGAARFALQKLEEAKKDYERVLELEPNNFEATNELRKISQALASKENSYPKEADIVIKSTEGERKQIEAQQNKQQAISEKDRGNGFFKEGKYERAIECYTRGIAADGANALLPANRAMAYLKIQKYEEAEKDCTQAILLDGSYSKAFARRGTARTFLGKLNEAKQDFETVLLLEPGNKQAVTELSKIKKKPLKKVIIEETGNLIQTIDVPDSTTAAAPENNPINLANVIAATGTTSKKNSSQDDLFPTSDTPRAKVLKIEEVSDTSSLQPQASLKQDVCQSYSEKMPIEIEQKPAQFATTVLPPIPANSFQLESDFRQLKSSPDMLYQYLKQIEPSLYPKLFQKNLDPDVFNQIVKILHDFYIEKEKPLLIFEILQRLSELKRFDMAVMFMSETEKKIARALFNHIDKSGLKDSSVEELKKRYGG

SEQ ID NO: 22493 - DNA, 557 bp, Homo sapiens
aatgaaagctccatgacagcaggaactttgtctacctcgttcactgggcctcagtgctagcgcataataacccctcagtgtcagtgtgttgaatgaatgaatttactgttactctaatgtgataagttcaaggtatccgagaatgcaggtgggctcttcagactggctgaccaatagtactgtcttgatggggtttccactgtctgctaagttaaacatggaaagcgcttagaatggttctggcatgcaaccagttgcacgtgcattatttaatcacatagacaagtcaggattgaaggatagttctgtcgaagaactcaagaaaagatacggtggttgatttccatttttgctgaaataattgtttttgactttcatatgtaaattttttctactgaaagtgttttgctttttaagaaaatgaaattatatagcaggaaaggactatctttgaacataagttaattaactataaggtgaattgtgatttaactagtgagaattgtattcaagtgaactctgtttttctgaaaataaaaatataaacaatgagatac

SEQ ID NO: 22494 - protein, 31 aa, Homo sapiens
MQPVARALFNHIDKSGLKDSSVEELKKRYGG

SEQ ID NO: 22495 - DNA, 1067 bp, Homo sapiens
cagaccataatgacttcagcaaataaagcaatcgaattacaactacaagtgaaacaaaatgcagaagaattacaagactttatgcgggatttagaaaactgggaaaaagacattaaacaaaaggatatggaactaagaagacagaatggtgttcctgaagagaatttacctcctattcgaaatgggaattttaggaaaaagaagaaaggcaaagctaaagagtcttccaaaaaaaccagagaggaaaacacaaaaaacaggataaaatcttatgattatgaggcatgggcaaaacttgatgtgtgtacacctgtgaaaccactgtttggatcaagatacagaacattctgggaggctgaggcacgagaatggcttgaacccgggaggcggaggttgcagtgagccaagatcacaccactgcactgcagcctgggccacagagggagactctgtctcaaaaaaaaaaaaaaaaaaaagaacatttccagcctcgcagaggccttcctttcagtagatgacctctgaaaagtagccactgttctgacctcttacactgtagatagttttggaatttcatataaatgattataccgtatgcattatttaagtttggcttcttttgctgtcattatatgagatccatattgtgagtagcagcagttctttttcattgctgaccagaattccattgtgtggatgtctcaatttttgtgtccattctcttattgataatacttttgtattgttggcggtttggggctatgatgaataaacctgctgtgaacattcttgtatttgtcttttggtggatataagcaccctagaggggatttgctgggtcatagtttataaatacatgtagttttagaaaatactgtcaaacagttttccaaattatttgtgtggtatttttcttaataaaactaaggctaattaaaagagcgctgggacttttatttagtttgccatctgcttcaggattgtcccaatataagagaggtaaaattttgagtcttgaatttatcactgttggaactactttctgaaaatagaatttattctcaagt

SEQ ID NO: 22496 - protein, 130 aa, Homo sapiens
MTSANKAIELQLQVKQNAEELQDFMRDLENWEKDIKQKDMELRRQNGVPEENLPPIRNGNFRKKKKGKAKESSKKTREENTKNRIKSYDYEAWAKLDVCTPVKPLFGSRYRTFWEAEAREWLEPGRRRLQ

SEQ ID NO: 22497 - DNA, 621 bp, Homo sapiens
gctgcggggctgacggggtggcagtgcggcgggttacggcctggtcagaccataatgacttcagcaaataaagcaatcgaattacaactacaagtgaaacaaaatgcagaagaattacaagactttatgcgggatttagaaaactgggaaaaagacattaaacaaaaggatatggaactaagaagacagaatggtgttcctgaagagaatttacctcctattcgaaatgggaattttaggaaaaagaagaaaggcaaagctaaagagtcttccaaaaaaaccagagaggaaaacacaaaaaacaggataaaatcttatgattatgaggcatgggcaaaacttgatgtggtaagttaatctagtcatttgcttcttaatatttgagtaaaattttctgggagttagctgataatcatgggttaagtgaaaaataatgtagagttatggcctgtgtttttctcttattcatgattttatgtggaataaacatttaatgacatagctctttagttaatgagataatttttttttctgcaatcctctttcagcaaatggtggctaaaacagccaggattttattcttttttctttctttttacaaaaattactgtttacttatta

SEQ ID NO: 22498 - protein, 100 aa, Homo sapiens
MTSANKAIELQLQVKQNAEELQDFMRDLENWEKDIKQKDMELRRQNGVPEENLPPIRNGNFRKKKKGKAKESSKKTREENTKNRIKSYDYEAWAKLDVVS

SEQ ID NO: 22499 - DNA, 2437 bp, Homo sapiens
tggagacaccagctccacaagtcctggtgtctttaaaaggatcagcttgaggaataaggctcgtctgagagctgtgacattcatctgactctagtgaaagtccaacagccactccctttttggcctccaactgggcaccatgagggcctgcatctccctggtattggccgtgctgtgtggcctggcctgggctggaaaaatagaatcctgtgcatctcgatgtaatgagaaatttaaccgggacgctgcctgccagtgtgaccgccggtgtctctggcatgggaactgctgtgaagactatgaacatctgtgtactgaggaccacaaagagtcagagccattgccacagctggaggaagagacagaagaggccctcgccagcaacttgtactcggcacccacctcctgccagggccgctgctacgaagcctttgacaagcaccaccaatgtcactgcaatgcccgctgccaagagtttgggaactgctgcaaggattttgagagcctgtgtagtgaccacgaggtctcccacagcagtgatgccataacaaaagaggagattcagagcatctctgagaagatctacagggcagacaccaacaaagcccagaaggaagacatcgttctcaatagccaaaactgcatctccccgtcagagaccagaaaccaagtggatcgctgcccaaagccactcttcacttatgtcaatgagaagctgttctccaagcccacctatgcagccttcatcaacctcctcaacaactaccagcgggcaacaggccatggggagcacttcagtgcccaggagctggccgagcaggacgccttcctcagagagatcatgaagacagcagtcatgaaggagctctacagcttcctccatcaccagaatcgctatggctcagagcaagagtttgtcgatgacttgaagaacatgtggtttgggctctattcaagaggcaatgaagagggggactcgagtggctttgaacatgtcttctcaggtgaggtaaaaaaaggcaaggttactggcttccataactggatccgcttctacctggaggagaaggagggtctggttgactattacagtcacatctacgatgggccttgggattcttaccccgatgtgctggcaatgcagttcaactgggacggctactataaggaagtgggctctgctttcatcggcagcagccctgagtttgagtttgcactctactccctgtgcttcatcgccaggccaggcaaagtgtgccagttaagcctgggaggatatcccttagctgtccggacatatacctgggacaagtccacctatgggaatggcaagaagtacatcgccacagcctacatagtgtcttccacctaatagaacttcgagccagaaaggggcatgagggctcttgcgagactgaagtgctatcttctctggactagagagaagagggagaggactggaagggatcaccaaatctcaaagcaatgagaagcattcctaaatcccaaagtgcccacatgggaaagagataaaatgtacaaattagaaaaatgtggataaacagtcaaacctttatcctctagaattttggcaatgttgactaagaaacagagtccaagcagagaaggtaggaaccctccatagctctctgccctgatgtgtgggggaactaggaagaagtcctttgacctcaccaggcctcatgcttccctttaatgtaaagggaaggggtttgcccactttcctctttttggggttggtgagagggcaaaccctgatatttttactgtgaaggtgttttcagttgttcttaggaagaacagctgatagaaattcaagattactataatggctgttattatacacagctctgtaaactaccactcagccctgtgttggggtcctcaaagaagtaaggccacagtaatcaagcaagggcctttggttttttccagagttagatcctctcagaacagagtctgggagaactccaatgctgaatggagaagggtaataggttggtgcagtgaatgggctgggggtggggtggccttctccaggcctgagtgtttttgtgtccagctcagtatctgcaacaagaagtttcccacttgtggatgtttagtgcagccacagacttgtattttgatccccaatttttttttgaaagagttctcctcataggaggatgattcagcatcagaagaagaaggaacccatagcttggtgtcattaacataattattttaagccttatccagcagccataatttgaataactctacgagaccagagagactgtagttccctattttaacctcaattatgcatttgtcccccaaccccactgagaactaaatgctgtaccacagagccgggtgtgaactatggtttagaaggttcaagtttccaattaaagtcattgaagaaaacttg

SEQ ID NO: 22500 - protein, 410 aa, Homo sapiens
MRACISLVLAVLCGLAWAGKIESCASRCNEKFNRDAACQCDRRCLWHGNCCEDYEHLCTEDHKESEPLPQLEEETEEALASNLYSAPTSCQGRCYEAFDKHHQCHCNARCQEFGNCCKDFESLCSDHEVSHSSDAITKEEIQSISEKIYRADTNKAQKEDIVLNSQNCISPSETRNQVDRCPKPLFTYVNEKLFSKPTYAAFINLLNNYQRATGHGEHFSAQELAEQDAFLREIMKTAVMKELYSFLHHQNRYGSEQEFVDDLKNMWFGLYSRGNEEGDSSGFEHVFSGEVKKGKVTGFHNWIRFYLEEKEGLVDYYSHIYDGPWDSYPDVLAMQFNWDGYYKEVGSAFIGSSPEFEFALYSLCFIARPGKVCQLSLGGYPLAVRTYTWDKSTYGNGKKYIATAYIVSST

SEQ ID NO: 22501 - DNA, 2329 bp, Homo sapiens
cttcctgaaaggatctggagacaccagctccacaagtcctggtgtctttaaaaggatcagcttgaggaataaggctcgtctgagagctgtgacattcatctgactctagtgaaagtccaacagccactccctttttggcctccaactgggcaccatgagggcctgcatctccctggtattggccgtgctgtgtggcctggcctgggctgaggaccacaaagagtcagagccattgccacagctggaggaagagacagaagaggccctcgccagcaacttgtactcggcacccacctcctgccagggccgctgctacgaagcctttgacaagcaccaccaatgtcactgcaatgcccgctgccaagagtttgggaactgctgcaaggattttgagagcctgtgtagtgaccacgaggtctcccacagcagtgatgccataacaaaagaggagattcagagcatctctgagaagatctacagggcagacaccaacaaagcccagaaggaagacatcgttctcaatagccaaaactgcatctccccgtcagagaccagaaaccaagtggatcgctgcccaaagccactcttcacttatgtcaatgagaagctgttctccaagcccacctatgcagccttcatcaacctcctcaacaactaccagcgggcaacaggccatggggagcacttcagtgcccaggagctggccgagcaggacgccttcctcagagagatcatgaagacagcagtcatgaaggagctctacagcttcctccatcaccagaatcgctatggctcagagcaagagtttgtcgatgacttgaagaacatgtggtttgggctctattcaagaggcaatgaagagggggactcgagtggctttgaacatgtcttctcaggtgaggtaaaaaaaggcaaggttactggcttccataactggatccgcttctacctggaggagaaggagggtctggttgactattacagtcacatctacgatgggccttgggattcttaccccgatgtgctggcaatgcagttcaactgggacggctactataaggaagtgggctctgctttcatcggcagcagccctgagtttgagtttgcactctactccctgtgcttcatcgccaggccaggcaaagtgtgccagttaagcctgggaggatatcccttagctgtccggacatatacctgggacaagtccacctatgggaatggcaagaagtacatcgccacagcctacatagtgtcttccacctaatagaacttcgagccagaaaggggcatgagggctcttgcgagactgaagtgctatcttctctggactagagagaagagggagaggactggaagggatcaccaaatctcaaagcaatgagaagcattcctaaatcccaaagtgcccacatgggaaagagataaaatgtacaaattagaaaaatgtggataaacagtcaaacctttatcctctagaattttggcaatgttgactaagaaacagagtccaagcagagaaggtaggaaccctccatagctctctgccctgatgtgtgggggaactaggaagaagtcctttgacctcaccaggcctcatgcttccctttaatgtaaagggaaggggtttgcccactttcctctttttggggttggtgagagggcaaaccctgatatttttactgtgaaggtgttttcagttgttcttaggaagaacagctgatagaaattcaagattactataatggctgttattatacacagctctgtaaactaccactcagccctgtgttggggtcctcaaagaagtaaggccacagtaatcaagcaagggcctttggttttttccagagttagatcctctcagaacagagtctgggagaactccaatgctgaatggagaagggtaataggttggtgcagtgaatgggctgggggtggggtggccttctccaggcctgagtgtttttgtgtccagctcagtatctgcaacaagaagtttcccacttgtggatgtttagtgcagccacagacttgtattttgatccccaatttttttttgaaagagttctcctcataggaggatgattcagcatcagaagaagaaggaacccatagcttggtgtcattaacataattattttaagccttatccagcagccataatttgaataactctacgagaccagagagactgtagttccctattttaacctcaattatgcatttgtcccccaaccccactgagaactaaatgctgtaccacagagccgggtgtgaactatggtttagaaggttcaagtttccaattaaagtcattgaagaaaacttg

SEQ ID NO: 22502 - protein, 369 aa, Homo sapiens; identical to SEQ ID NO: 2963

SEQ ID NO: 22503 - DNA, 416 bp, Homo sapiens
aggaaaggggttctgagttgcaaatcagaaacttgaagatgaaatggctactacgctgggtattgcctttatcttgaatgccagcctgatggtccaaggtgaacaagccttcctgtgttttctgaatgttcccccgcactttgcctgccaccatgtaagatgtgtctttgcgcctcctttgccttccaccatgattgtgcggcctccccagccatgtggaacggctggaaatgatggtatggagatgttgcaccacgtggtcccttcactagaggaagagtggtatgaatcgtgtccgtcactgtgacaccatgcagtcttcctggcagtacacaagttgtgagagtttgctaccatttttacatttttgtgatttaaagtgttgaataacaattaataatgtcatacatactaaa

SEQ ID NO: 22504 - protein, 87 aa, Homo sapiens
MATTLGIAFILNASLMVQGEQAFLCFLNVPPHFACHHVRCVFAPPLPSTMIVRPPQPCGTAGNDGMEMLHHVVPSLEEEWYESCPSL

SEQ ID NO: 22505 - DNA, 527 bp, Homo sapiens
tgagttgcaaatcagaaacttgaagatgaaatggctactacgctgggtattgcctttatcttgaatgccagcctgatggtccaaggtgaacaagccttcctgtgttttctgaatgttcccccgcactttgcctgccaccatgtaagatgtgtctttgcgcctcctttgccttccaccatgattgtgcggcctccccagccatgtggaacggtgtctggggtctgtcaggatcaacaggccttgagagagactgacccagaggactactaaaagggacacctgcccaggccagcctattctaccatcctcgttctcctgcaaaaccaaggccacgtcatttcagcagaggacctgcgtgtggaaggaccctgcagctggcccatcacaggagaggcccagactcacctcccaaggggaccctggcacatgaagatgctggttctcctgggagtgctgccctggcccacaggatagaagcgcaggatggtcacccatgtctgctcttattgaatgtgtcttagaagcgg

SEQ ID NO: 22506 - protein, 79 aa, Homo sapiens
MATTLGIAFILNASLMVQGEQAFLCFLNVPPHFACHHVRCVFAPPLPSTMIVRPPQPCGTVSGVCQDQQALRETDPEDY

SEQ ID NO: 22507 - DNA, 2965 bp, Homo sapiens
gccttcctgtgttttctgaatgttcccccgcactttgcctgccaccatgtaagatgtgtctttgcgcctcctttgccttccaccatgattgtgcggcctccccagccatgtggaacggccctgaaggcagcccgtatttgtctggatgtcttcattcttccagtctaagaactcctaattcatctctgcactccctgaggcatcagcacttgagagtaaactcctttgaatcccttgagccccacgaggtggattttctctcaagagctcccaggctatgctgatgaagtacctcttctctgcttctctccagaatagtcaaaaccctcaaaatcctcaaaagttcctggaggtgggaggttccacccccaactctatcctcgcctcttctactggtctagcccgcaagcccctcggagttcctgaggggcagacaggccctggtgcacacaggcgctccatgccaggcccttgggctctggagcccctgacactgccctggcacctcagaccccaggactggacacccacatgctccagcccagtcttcacacaggatctcctgcccccatgcacacactgagggccaggatgcaccgtgcaacccctatcctagtgctgaacaccccttcctcagccagctccccaaactcacaggctggagctaggccctgggccgaggttgggaaccctgaaagtgacaaaggacgagtagaggggctgcagggaagccaagagtgagggtgtctggagggcagggccgagcccagctgatcctagcagagccaggccgggcagggtggagcactcaccagcagcctctcgagggcggagtacagcttccggactttgtgaggcagccgctgtgaaaaggaggcagatgagcggctgctctgggggaggcccagccccatccagcactcccaggagggcctgaggcctgacctcaggagggggccctccagaccacacttacctcccaggtgtgggctaggcggctgatggccgagttgctgaggccaaacatgacggcaaagaaggaattgagattcttctgctccttgaggctgtgagcagaagacccagagaccctcagggtaagggaagcagccacccctacagtgcccccagacaacagccaggccagcctctgcagagatccaagctggatggggtgggaaggcagaggctccaggggacccagggaacaaatagggtggcagatttggcaacatactaagcaaagaggggggcttaggaaaaggtagccggggggactctggccacgccctacccactggacagggactcactgggccgccagcttaatgaacttcctgagcagctgggcccgggggccgggcacggggcagagacacagctcggtggccacccagtactgcagctcattgaagcggcgcatgaagcgctccaggttggcggtggtgacatcccgcagatgctgggggcccagcacatagtggatcagctccacctgggtggggtcagcaggagaggtcagcgagtgctgagccgagccgggcgccccgccgcctgctctcctcccccagctctgcctcccatacctggtggatactgttgaagaggctccagtcgtggtccgtcagctggcctgccaggtccttggcactcaccaggtccagcccctcagcagagcccacagtgggccccagctggtcagggtgtgggatctgcgggtgggagagtgctcagggggctgcctgaggaatccagggaaaggcacagggtagggggagagggttggggcaaggactctatgctcgtgttaggaggagggttaggagggcaggagtggggagtagagggtctctaggggctatagcagctggaggatagggctccccagtgctgagacccctccttttgggctcctgtctcctggggaacccctaactagggcaggtcctcctctttctccttgggagctcccaaccagtgctaccagcccctgccctgcactatcttgggaattcccccatcagctgaggcccactcctttgtgtgctgaggacccagcagcagccagagccaggcccctcctccctcttctccctgggaccctccccagaatccaccactgccacactcaaaatagatctcctccctgggccctggcaccctgcctggtccctaccagctcatgcacttcctgtgggttgacaacaaagagacgctcattgagccccagagatgtggccacaccacgggcatctggctgcaggccaatggcatctgcaaagacagcagaggcggactgggtgggggaagggagggaggccggggaccagctggatgccagggtggaggtgctgtttgggaggctgagaggttgtttctcctagtagcggggttgaagtcctgggtggtgctcagaatacacaggtgcatgtgcccacgcagccacgcagcccagggaagcacatccaagaggatgaggaaagattctcagtgagtcaggaagaacctgggcagggtctgagcctccctcagcctcactttcttccctggtaaaatggagacaataagacttgccccaactatttcataagtcaaataaaataatgtatataaatagtagctataagtacatgctatgtataaaagccctttgaaaattgggaagtgtcttatataagccttggtgttgattttcatcagctcctcatggactgggactgtgcttgagtccccagtccctagagcagtggcctccaaagtaaggtacatcagatcatccatgtgcctggggaaaatatgagctcttctacttacgtttactttttctacctgctttgcatttctactccatcaatttctattttatctatctttattatgatattaatgtagtaatatatgtgtattacttacaaacaaatattcacacagtggggtgtgggttttaattaaatgttggttattg

SEQ ID NO: 22508 - protein, 76 aa, Homo sapiens
MCLCASFAFHHDCAASPAMWNGPEGSPYLSGCLHSSSLRTPNSSLHSLRHQHLRVNSFESLEPHEVDFLSRAPRLC

SEQ ID NO: 22509 - DNA, 314 bp, Homo sapiens
gcagttcccccgcactttgcctgccaccatgtaagatgtgtctttgcgcctcctttgccttccaccatgattgtgcggcctccccagccatgtggaacgacacaactcttcaccagtgcacaaaacctgatgagaaggatacagactggattttggtccagcttgctgcttaactaggttcccttgcacaacgcacaacctgtgcaatgattatgcagtgaaattgatggccattacctaacgtggcttcagtgaccatgttttcaaaactgggagtcagagtgcatggcttgacatcaaggctttgtgtcaca

SEQ ID NO: 22510 - protein, 45 aa, Homo sapiens
MCLCASFAFHHDCAASPAMWNDTTLHQCTKPDEKDTDWILVQLAA

SEQ ID NO: 22511 - DNA, 267 bp, Homo sapiens
tagcagggtagacaggtgaagtaactggatgtgtatcagccatgccctttccccatgcccccggcactccccatgacagattcttttattttcacgtacttactataggccttgtaggggctctgtgaacaagacaaaggccaggtgctgtggctgatgcctgtaatcccaatgctttgggaggctaggcatttgagaccaacctgggtaacaaagcaagacccggtctctataaaaaataaaaattacccgggtatggtggtgtgc

SEQ ID NO: 22512 - protein, 36 aa, Homo sapiens
MPVIPMLWEARHLRPTWVTKQDPVSIKNKNYPGMVV

SEQ ID NO: 22513 - DNA, 3803 bp, Homo sapiens
atactctgggctcaggcggatgtccactctggtacccccgggtgcggactccaaagcctgccagtgccggcccccttcccctacgcattcctctaccgtaaggcagggcgcctccaccccgccccctccgccagtcctggggaggggaagggggcgggcagcgcagggggtgtgacagctcccgcccggaccggtgccagcgcagccttgcttcagcgcccggtgccagctggctccttcgtctgagacgaaggcgcaggctcggggctccctgtcgccggtggctgggtggcgtccccccaccacgcccccacccctctactcacccaagaggagcctctccaccgagccctgcatcctgctgccctggcagccagtccagctaggcactggcccagttcactgtacctggacttacccactggcaccctccggatccccttatcaaagctgatgggggtcgctggggaccccccagccttttgctagagcctgcacggctgtgcgagcttgaaaagaaacatgaaggtgggctggccaggtgagagctgctggcaggtgggcctggctgtggaggatagcccagctctgggagcaccgcgggtgggagccctccctgacgtggtgccggaggggacactactcaacatggtgttgagaaggatgcaccggccccgaagctgctcctaccagctgctgctggagcaccagcgtccgagctgcatccaggggctgcgctggacaccactcaccaacagcgaggagtccctggatttcagcgagagcctggagcaggcctccacagagcgggtgctcagggctgggaggcagctgcatcggcatctgctggccacctgcccaaacctcatccgagaccggaagtaccaccttaggctctatcggcagtgctgctctggccgggagctggtggatgggatcttggccctgggacttggggtccattcccggagccaagttgtgggaatctgccaggtgctgctggatgaaggtgccctctgccatgtgaaacacgactgggccttccaggaccgagatgcccaattctaccggttccccgggcccgagcccgagcccgtgagaactcatgagatggaggaggagttggccgaagctgtggccctgctctcccagcgggggcctgacgccctgctcactgtggcacttcgaaagcccccaggtcagcgcacggatgaagagctggacctcatctttgaggagctgctgcacatcaaggctgtggcccacctctccaactcggtgaagcgagaattagcggctgttctgctctttgaaccacacagcaaggcagggaccgtgttgttcagccagggggacaagggcacttcgtggtacattatctggaagggatctgtcaacgtggtgacccatggcaaggggctggtgaccaccctgcatgagggagatgattttggacagctggctctggtgaatgatgcaccccgggcagccaccatcatcctgcgagaagacaactgtcatttcctgcgtgtggacaagcaggacttcaaccgtatcatcaaggatgtggaggcaaagaccatgcggctggaagaacatggcaaagtggtgctggtgctggagagagcctctcagggcgccggcccttcccgacccccaaccccaggcaggaaccggtatacagtgatgtctggcaccccagagaagatcctagagcttctgttggaggccatgggaccagattccagtgctcatgacccaacagagacattcctcagcgacttcctcctgacccacagggtcttcatgcccagcgcccaactctgcgctgcccttctgcaccacttccatgtggagcctgcgggtggcagcgagcaggagcgcagcacctacgtctgcaacaagaggcagcagatcttgcggctggtcagccagtgggtggccctgtatggctccatgctccacactgaccctgtggccaccagcttcctccagaaactctcagacctggtgggcagggacacccgactcagcaacctgctgagggagcagtggccagagaggcggcgatgccacaggttggagaatggctgtgggaatgcatctcctcagatgaaggcccggaacttgcctgtttggctccccaaccaggacgagccccttcctggcagcagctgtgccatccaagttggggataaagtcccctatgacatctgccggccagaccactcagtgttgaccctgcagctgcctgtgacagcctccgtgagagaggtgatggcagcgttggcccaggaggatggctggaccaaggggcaggtgctggtgaaggtcaattctgcaggtgatgccattggcctgcagccagatgcccgtggtgtggccacatctctggggctcaatgagcgtctctttgttgtcaacccacaggaagtgcatgagctgatcccacaccctgaccagctggggcccactgtgggctctgctgaggggctggacctggtgagtgccaaggacctggcaggccagctgacggaccacgactggagcctcttcaacagtatccaccaggtggagctgatccactatgtgctgggcccccagcatctgcgggatgtcaccaccgccaacctggagcgcttcatgcgccgcttcaatgagctgcagtactgggtggccaccgagctgtgtctctgccccgtgcccggcccccgggcccagctgctcaggaagttcattaagctggcggcccacctcaaggagcagaagaatctcaattccttctttgccgtcatgtttggcctcagcaactcggccatcagccgcctagcccacacctgggagcggctgcctcacaaagtccggaagctgtactccgccctcgagaggctgctggatccctcatggaaccaccgggtataccgactggccctcgccaagctctcccctcctgtcatccccttcatgccccttcttctcaaagacatgaccttcattcatgagggaaaccacacactagtggagaatctcatcaactttgagaagatgagaatgatggccagagccgcgcggatgctgcaccactgccgaagccacaaccctgtgcctctctcaccactcagaagccgagtttcccacctccacgaggacagccaggtggcgaggatttccacatgctcggagcagtccctgagcacccggagtccagccagcacctgggcttatgtccagcagctgaaggtcattgacaaccagcgggaactctcccgcctctcccgagagctggagccatgaggaggggctgggactggagctggagcaggcacttgcagccgggaaagccagggtgtgccgggccaagatactcacaggctggccacagctgggcaaggctctccgtggagtggactcgagtccctggagcaggcagtgtggaggcagccatcccctgtgatgactggcagctaaggaggacctcggagtggacccgagccaggaataacgaatgacccaaggccaaggaagggaggacagagaggccccaggagtgggtggagagtggagtgcgctgggacgttgtgtgcaatagagaggtctccacaccagatgtcttccagattctgtgcctctggctttgttgtccagccaggcctgcagtttattttcacagtggacagagagagagagagaggctgcatgtgtgtaccgtgtgtggcaagggcagggccttggcctggggcaggggccccctgctttctttccacagctttcttccaacagcaggcagtggggctgcgggcctg

SEQ ID NO: 22514 - protein, 923 aa, Homo sapiens
MKVGWPGESCWQVGLAVEDSPALGAPRVGALPDVVPEGTLLNMVLRRMHRPRSCSYQLLLEHQRPSCIQGLRWTPLTNSEESLDFSESLEQASTERVLRAGRQLHRHLLATCPNLIRDRKYHLRLYRQCCSGRELVDGILALGLGVHSRSQVVGICQVLLDEGALCHVKHDWAFQDRDAQFYRFPGPEPEPVRTHEMEEELAEAVALLSQRGPDALLTVALRKPPGQRTDEELDLIFEELLHIKAVAHLSNSVKRELAAVLLFEPHSKAGTVLFSQGDKGTSWYIIWKGSVNVVTHGKGLVTTLHEGDDFGQLALVNDAPRAATIILREDNCHFLRVDKQDFNRIIKDVEAKTMRLEEHGKVVLVLERASQGAGPSRPPTPGRNRYTVMSGTPEKILELLLEAMGPDSSAHDPTETFLSDFLLTHRVFMPSAQLCAALLHHFHVEPAGGSEQERSTYVCNKRQQILRLVSQWVALYGSMLHTDPVATSFLQKLSDLVGRDTRLSNLLREQWPERRRCHRLENGCGNASPQMKARNLPVWLPNQDEPLPGSSCAIQVGDKVPYDICRPDHSVLTLQLPVTASVREVMAALAQEDGWTKGQVLVKVNSAGDAIGLQPDARGVATSLGLNERLFVVNPQEVHELIPHPDQLGPTVGSAEGLDLVSAKDLAGQLTDHDWSLFNSIHQVELIHYVLGPQHLRDVTTANLERFMRRFNELQYWVATELCLCPVPGPRAQLLRKFIKLAAHLKEQKNLNSFFAVMFGLSNSAISRLAHTWERLPHKVRKLYSALERLLDPSWNHRVYRLALAKLSPPVIPFMPLLLKDMTFIHEGNHTLVENLINFEKMRMMARAARMLHHCRSHNPVPLSPLRSRVSHLHEDSQVARISTCSEQSLSTRSPASTWAYVQQLKVIDNQRELSRLSRELEP

SEQ ID NO: 22515 - DNA, 1960 bp, Homo sapiens
aataaccaacatttaattaaaacccacaccccactgtgtgaatatttgtttgtaagtaatacacatatattactacattaatatcataataaagatagataaaatagaaattgatggagtagaaatgcaaagcaggtagaaaaagtaaacgtaagtagaagagctcatattttccccaggcacatggatgatctgatgtaccttactttggaggccactgctctagggactggggactcaagcacagtcccagtccatgaggagctgatgaaaatcaacaccaaggcttatataagacacttcccaattttcaaagggcttttatacatagcatgtacttatagctactatttatatacattattttatttgacttatgaaatagttggggcaagtcttattgtctccattttaccagggaagaaagtgaggctgagggaggctcagaccctgcccaggttcttcctgactcactgagaatctttcctcatcctcttggatgtgcttccctgggctgcgtggctgcgtgggcacatgcacctgtgtattctgagcaccacccaggacttcaaccccgctactaggagaaacaacctctcagcctcccaaacagcacctccaccctggcatccagctggtccccggcctccctcccttcccccacccagtccgcctctgctgtctttgcagatgccattggcctgcagccagatgcccgtggtgtggccacatctctggggctcaatgagcgtctctttgttgtcaacccacaggaagtgcatgagctgatcccacaccctgaccagctggggcccactgtgggctctgctgaggggctggacctggtgagtgccaaggacctggcaggccagctgacggaccacgactggagcctcttcaacagtatccaccaggtggagctgatccactatgtgctgggcccccagcatctgcgggatgtcaccaccgccaacctggagcgcttcatgcgccgcttcaatgagctgcagtactgggtggccaccgagctgtgtctctgccccgtgcccggcccccgggcccagctgctcaggaagttcattaagctggcggcccacctcaaggagcagaagaatctcaattccttctttgccgtcatgtttggcctcagcaactcggccatcagccgcctagcccacacctgggagcggctgcctcacaaagtccggaagctgtactccgccctcgagaggctgctggatccctcatggaaccaccgggtataccgactggccctcgccaagctctcccctcctgtcatccccttcatgccccttcttctcaaagacatgaccttcattcatgagggaaaccacacactagtggagaatctcatcaactttgagaagatgagaatgatggccagagccgcgcggatgctgcaccactgccgaagccacaaccctgtgcctctctcaccactcagaagccgagtttcccacctccacgaggacagccaggtggcgaggatttccacatgctcggagcagtccctgagcacccggagtccagccagcacctgggcttatgtccagcagctgaaggtcattgacaaccagcgggaactctcccgcctctcccgagagctggagccatgaggaggggctgggactggagctggagcaggcacttgcagccgggaaagccagggtgtgccgggccaagatactcacaggctggccacagctgggcaaggctctccgtggagtggactcgagtccctggagcaggcagtgtggaggcagccatcccctgtgatgactggcagctaaggaggacctcggagtggacccgagccaggaataacgaatgacccaaggccaaggaagggaggacagagaggccccaggagtgggtggagagtggagtgcgctgggacgttgtgtgcaatagagaggtctccacaccagatgtcttccag

SEQ ID NO: 22516 - protein, 216 aa, Homo sapiens
MRRFNELQYWVATELCLCPVPGPRAQLLRKFIKLAAHLKEQKNLNSFFAVMFGLSNSAISRLAHTWERLPHKVRKLYSALERLLDPSWNHRVYRLALAKLSPPVIPFMPLLLKDMTFIHEGNHTLVENLINFEKMRMMARAARMLHHCRSHNPVPLSPLRSRVSHLHEDSQVARISTCSEQSLSTRSPASTWAYVQQLKVIDNQRELSRLSRELEP

SEQ ID NO: 22517 - DNA, 2451 bp, Homo sapiens
ggtctgggaggcaggatgcaaggatccgatgggtatatggagtgtgaggtaatggatcattcatgtggaaggatgcagggggtttttgagaccagggtttggaagagagttcagcactgctggtagttttgggaatcacccatgtgcaggcgacacatgaggcagtaaggaactctgcaggggtccctgagatttggaaatgtagggaagagcaatggattgaggtccgaacctggaggatctgctatacgcagagctgggaggagggacagagtcagtaccagagtcggaaaaaagcagggtgggaaggggaacctgagtcaggagacttgcctggcaggcgctgccctgccagcagaggcctgacagtggtttccatgaactgcatccctgctgtgggctgggacagggccactgacacagtatcggagcacagagggggaaaggagcaggagggattccaactctgccagttagcagctgtgtggctttgggcatgttacttaacctctctgagcctcatttatttcatccataaaatggaaataaaaataatacttttgtcaaaggcgcattgtgaatatttagatcctcagaataatgcctggcttgtagcaaatggtagctggaggaaaaggaagagaaaaccaaagtcagcagctgaaggattttcatattagaactgctctggacctatctggcagatgcagaagcacacacacacggaggggcatggatttgccccgcccttagacatgttgtgtcttctcctggatccttggtcccaggtgccttacctgagctcaggtgaatgtggcaagcagagccctctggtggtgtgaatgctgtgtggcgcccgtgctcctggtgacacagggacctcacaatccctccctccacggtctcctctcatgtcctcccagccttattttctcgttcctcttcctcccaggcccggaacttgcctgtttggctccccaaccaggacgagccccttcctggcagcagctgtgccatccaagttggggataaagtcccctatgacatctgccggccagaccactcagtgttgaccctgcagctgcctgtgacagcctccgtgagagaggtgatggcagcgttggcccaggaggatggctggaccaaggggcaggtgctggtgaaggtcaattctgcaggtgatgccattggcctgcagccagatgcccgtggtgtggccacatctctggggctcaatgagcgtctctttgttgtcaacccacaggaagtgcatgagctgatcccacaccctgaccagctggggcccactgtgggctctgctgaggggctggacctggtgagtgccaaggacctggcaggccagctgacggaccacgactggagcctcttcaacagtatccaccaggtggagctgatccactatgtgctgggcccccagcatctgcgggatgtcaccaccgccaacctggagcgcttcatgcgccgcttcaatgagctgcagtactgggtggccaccgagctgtgtctctgccccgtgcccggcccccgggcccagctgctcaggaagttcattaagctggcggcccacctcaaggagcagaagaatctcaattccttctttgccgtcatgtttggcctcagcaactcggccatcagccgcctagcccacacctgggagcggctgcctcacaaagtccggaagctgtactccgccctcgagaggctgctggatccctcatggaaccaccgggtataccgactggccctcgccaagctctcccctcctgtcatccccttcatgccccttcttctcaaagacatgaccttcattcatgagggaaaccacacactagtggagaatctcatcaactttgagaagatgagaatgatggccagagccgcgcggatgctgcaccactgccgaagccacaaccctgtgcctctctcaccactcagaagccgagtttcccacctccacgaggacagccaggtggcgaggatttccacatgctcggagcagtccctgagcacccggagtccagccagcacctgggcttatgtccagcagctgaaggtcattgacaaccagcgggaactctcccgcctctcccgagagctggagccatgaggaggggctgggactggagctggagcaggcacttgcagccgggaaagccagggtgtgccgggccaagatactcacaggctggccacagctgggcaaggctctccgtggagtggactcgagtccctggagcaggcagtgtggaggcagccatcccctgtgatgactggcagctaaggaggacctcggagtggacccgagccaggaataacgaatgacccaaggccaaggaagggaggacagagaggccccaggagtgggtggagagtggagtgcgctgggacgttgtgtgcaatagagaggtctccacaccagatgtcttccag

SEQ ID NO: 22518 - protein, 338 aa, Homo sapiens [sequence omitted]

SEQ ID NO: 22519 - DNA, 2659 bp, Homo sapiens
gagcttgaaaagaaacatgaaggtgggctggccaggtgagagctgctggcaggtgggcctggctgtggaggatagcccagctctgggagcaccgcgggtgggagccctccctgacgtggtgccggaggggacactactcaacatggtgttgagaaggatgcaccggccccgaagctgctcctaccagctgctgctggagcaccagcgtccgagctgcatccaggggctgcgctggcccaggtcagcgcacggatgaagagctggacctcatctttgaggagctgctgcacatcaaggctgtggcccacctctccaactcggtgaagcgagaattagcggctgttctgctctttgaaccacacagcaaggcagggaccgtgttgttcagccagggggacaagggcacttcgtggtacattatctggaagggatctgtcaacgtggtgacccatggcaaggggctggtgaccaccctgcatgagggagatgattttggacagctggctctggtgaatgatgcaccccgggcagccaccatcatcctgcgagaagacaactgtcatttcctgcgtgtggacaagcaggacttcaaccgtatcatcaaggatgtggaggcaaagaccatgcggctggaagaacatggcaaagtggtgctggtgctggagagagcctctcagggcgccggcccttcccgacccccaaccccaggcaggaaccggtatacagtgatgtctggcaccccagagaagatcctagagcttctgttggaggccatgggaccagattccagtgctcatgacccaacagagacattcctcagcgacttcctcctgacccacagggtcttcatgcccagcgcccaactctgcgctgcccttctgcaccacttccatgtggagcctgcgggtggcagcgagcaggagcgcagcacctacgtctgcaacaagaggcagcagatcttgcggctggtcagccagtgggtggccctgtatggctccatgctccacactgaccctgtggccaccagcttcctccagaaactctcagacctggtgggcagggacacccgactcagcaacctgctgagggagcagtggccagagaggcggcgatgccacaggttggagaatggctgtgggaatgcatctcctcagatgaaggcccggaacttgcctgtttggctccccaaccaggacgagccccttcctggcagcagctgtgccatccaagttggggataaagtcccctatgacatctgccggccagaccactcagtgttgaccctgcagctgcctgtgacagcctccgtgagagaggtgatggcagcgttggcccaggaggatggctggaccaaggggcaggtgctggtgaaggtcaattctgcaggtgatgccattggcctgcagccagatgcccgtggtgtggccacatctctggggctcaatgagcgtctctttgttgtcaacccacaggaagtgcatgagctgatcccacaccctgaccagctggggcccactgtgggctctgctgaggggctggacctggtgagtgccaaggacctggcaggccagctgacggaccacgactggagcctcttcaacagtatccaccaggtggagctgatccactatgtgctgggcccccagcatctgcgggatgtcaccaccgccaacctggagcgcttcatgcgccgcttcaatgagctgcagtactgggtggccaccgagctgtgtctctgccccgtgcccggcccccgggcccagctgctcaggaagttcattaagctggcggcccacctcaaggagcagaagaatctcaattccttctttgccgtcatgtttggcctcagcaactcggccatcagccgcctagcccacacctgggagcggctgcctcacaaagtccggaagctgtactccgccctcgagaggctgctggatccctcatggaaccaccgggtataccgactggccctcgccaagctctcccctcctgtcatccccttcatgccccttcttctcaaagacatgaccttcattcatgagggaaaccacacactagtggagaatctcatcaactttgagaagatgagaatgatggccagagccgcgcggatgctgcaccactgccgaagccacaaccctgtgcctctctcaccactcagaagccgagtttcccacctccacgaggacagccaggtggcgaggatttccacatgctcggagcagtccctgagcacccggagtccagccagcacctgggcttatgtccagcagctgaaggtcattgacaaccagcgggaactctcccgcctctcccgagagctggagccatgaggaggggctgggactggagctggagcaggcacttgcagccgggaaagccagggtgtgccgggccaagatactcacaggctggccacagctgggcaaggctctccgtggagtggactcgagtccctggagcaggcagtgtggaggcagccatcccctgtgatgactggcagctaaggaggacctcggagtggacccgagccaggaataacgaatgacccaaggccaaggaagggaggacagagaggccccaggagtgggtggagagtggagtgcgctgggacgttgtgtgcaatagagaggtctccacaccagatgtcttccag

SEQ ID NO: 22520 - protein, 570 aa, Homo sapiens
MRLEEHGKVVLVLERASQGAGPSRPPTPGRNRYTVMSGTPEKILELLLEAMGPDSSAHDPTETFLSDFLLTHRVFMPSAQLCAALLHHFHVEPAGGSEQERSTYVCNKRQQILRLVSQWVALYGSMLHTDPVATSFLQKLSDLVGRDTRLSNLLREQWPERRRCHRLENGCGNASPQMKARNLPVWLPNQDEPLPGSSCAIQVGDKVPYDICRPDHSVLTLQLPVTASVREVMAALAQEDGWTKGQVLVKVNSAGDAIGLQPDARGVATSLGLNERLFVVNPQEVHELIPHPDQLGPTVGSAEGLDLVSAKDLAGQLTDHDWSLFNSIHQVELIHYVLGPQHLRDVTTANLERFMRRFNELQYWVATELCLCPVPGPRAQLLRKFIKLAAHLKEQKNLNSFFAVMFGLSNSAISRLAHTWERLPHKVRKLYSALERLLDPSWNHRVYRLALAKLSPPVIPFMPLLLKDMTFIHEGNHTLVENLINFEKMRMMARAARMLHHCRSHNPVPLSPLRSRVSHLHEDSQVARISTCSEQSLSTRSPASTWAYVQQLKVIDNQRELSRLSRELEP

SEQ ID NO: 22521 - DNA, 3471 bp, Homo sapiens
gtctgagacgaaggcgcaggctcggggctccctgtcgccggtggctgggtggcgtccccccaccacgcccccacccctctactcacccaagaggagcctctccaccgagccctgcatcctgctgccctggcagccagtccagctaggcactggcccagttcactgtacctggacttacccactggcaccctccggatccccttatcaaagctgatgggggtcgctggggaccccccagccttttgctagagcctgcacggctgtgcgagcttgaaaagaaacatgaaggtgggctggccaggtgagagctgctggcaggtgggcctggctgtggaggatagcccagctctgggagcaccgcgggtgggagccctccctgacgtggtgccggaggggacactactcaacatggtgttgagaaggatgcaccggccccgaagctgctcctaccagctgctgctggagcaccagcgtccgagctgcatccaggggctgcgctggacaccactcaccaacagcgaggagtccctggatttcagcgagagcctggagcaggcctccacagagcgggtgctcagggctgggaggcagctgcatcggcatctgctggccacctgcccaaacctcatccgagaccggaagtaccaccttaggctctatcggcagtgctgctctggccgggagctggtggatgggatcttggccctgggacttggggtccattcccggagccaagttgtgggaatctgccaggtgctgctggatgaaggtgccctctgccatgtgaaacacgactgggccttccaggaccgagatgcccaattctaccggttccccgggcccgagcccgagcccgtgagaactcatgagatggaggaggagttggccgaagctgtggccctgctctcccagcgggggcctgacgccctgctcactgtggcacttcgaaagcccccaggtcagcgcacggatgaagagctggacctcatctttgaggagctgctgcacatcaaggctgtggcccacctctccaactcggtgaagcgagaattagcggctgttctgctctttgaaccacacagcaaggcagggaccgtgttgttcagccagggggacaagggcacttcgtggtacattatctggaagggatctgtcaacgtggtgacccatggcaaggggctggtgaccaccctgcatgagggagatgattttggacagctggctctggtgaatgatgcaccccgggcagccaccatcatcctgcgagaagacaactgtcatttcctgcgtgtggacaagcaggacttcaaccgtatcatcaaggatgtggaggcaaagaccatgcggctggaagaacatggcaaagtggtgctggtgctggagagagcctctcagggcgccggcccttcccgacccccaaccccaggcaggaaccggtaatacacctgccatgctccctctccacactgtccctcctttcatttcccaatctttgctcccttcccctgtgtcatatccctgccctctggccacttgtggatggagaggtattgagggaccaggatgtgcctgctgagccagtctcctccctgccctaaggtgggacagggctggctaatggagaaaaatgatgtaattgattattgatgtctgcccaggtgtgggagtggggagtagtggcaccagtgccaaagattggccatttctgctaggtatacagtgatgtctggcaccccagagaagatcctagagcttctgttggaggccatgggaccagattccagtgctcatgacccaacagagacattcctcagcgacttcctcctgacccacagggtcttcatgcccagcgcccaactctgcgctgcccttctgcaccacttccatgtggagcctgcgggtggcagcgagcaggagcgcagcacctacgtctgcaacaagaggcagcagatcttgcggctggtcagccagtgggtggccctgtatggctccatgctccacactgaccctgtggccaccagcttcctccagaaactctcagacctggtgggcagggacacccgactcagcaacctgctgagggagcagtggccagagaggcggcgatgccacaggttggagaatggctgtgggaatgcatctcctcagatgaaggcccggaacttgcctgtttggctccccaaccaggacgagccccttcctggcagcagctgtgccatccaagttggggataaagtcccctatgacatctgccggccagaccactcagtgttgaccctgcagctgcctgtgacagcctccgtgagagaggtgatggcagcgttggcccaggaggatggctggaccaaggggcaggtgctggtgaaggtcaattctgcaggtgatgccattggcctgcagccagatgcccgtggtgtggccacatctctggggctcaatgagcgtctctttgttgtcaacccacaggaagtgcatgagctgatcccacaccctgaccagctggggcccactgtgggctctgctgaggggctggacctggtgagtgccaaggacctggcaggccagctgacggaccacgactggagcctcttcaacagtatccaccagcctcaaggagcagaagaatctcaattccttctttgccgtcatgtttggcctcagcaactcggccatcagccgcctagcccacacctgggagcggctgcctcacaaagtccggaagctgtactccgccctcgagaggctgctggatccctcatggaaccaccgggtataccgactggccctcgccaagctctcccctcctgtcatccccttcatgccccttcttctcaaagacatgaccttcattcatgagggaaaccacacactagtggagaatctcatcaactttgagaagatgagaatgatggccagagccgcgcggatgctgcaccactgccgaagccacaaccctgtgcctctctcaccactcagaagccgagtttcccacctccacgaggacagccaggtggcgaggatttccacatgctcggagcagtccctgagcacccggagtccagccagcacctgggcttatgtccagcagctgaaggtcattgacaaccagcgggaactctcccgcctctcccgagagctggagccatgaggaggggctgggactggagctggagcaggcacttgcagccgggaaagccagggtgtgccgggccaagatactcacaggctggccacagctgggcaaggctctccgtggagtggactcgagtccctggagcaggcagtgtggaggcagccatcccctgtgatgactggcagctaaggaggacctcggagtggacccgagccaggaataacgaatgacccaaggccaaggaagggaggacagagaggccccaggagtgggtggagagtggagtgcgctgggacgttgtgtgcaatagagaggtctccacaccagatgtcttccag

SEQ ID NO: 22522 - protein, 385 aa, Homo sapiens
MKVGWPGESCWQVGLAVEDSPALGAPRVGALPDVVPEGTLLNMVLRRMHRPRSCSYQLLLEHQRPSCIQGLRWTPLTNSEESLDFSESLEQASTERVLRAGRQLHRHLLATCPNLIRDRKYHLRLYRQCCSGRELVDGILALGLGVHSRSQVVGICQVLLDEGALCHVKHDWAFQDRDAQFYRFPGPEPEPVRTHEMEEELAEAVALLSQRGPDALLTVALRKPPGQRTDEELDLIFEELLHIKAVAHLSNSVKRELAAVLLFEPHSKAGTVLFSQGDKGTSWYIIWKGSVNVVTHGKGLVTTLHEGDDFGQLALVNDAPRAATIILREDNCHFLRVDKQDFNRIIKDVEAKTMRLEEHGKVVLVLERASQGAGPSRPPTPGRNR

SEQ ID NO: 22523 - DNA, 3929 bp, Homo sapiens
gtctgagacgaaggcgcaggctcggggctccctgtcgccggtggctgggtggcgtccccccaccacgcccccacccctctactcacccaagaggagcctctccaccgagccctgcatcctgctgccctggcagccagtccagctaggcactggcccagttcactgtacctggacttacccactggcaccctccggatccccttatcaaagctgatgggggtcgctggggaccccccagccttttgctagagcctgcacggctgtgcgagcttgaaaagaaacatgaaggtgggctggccaggtgagagctgctggcaggtgggcctggctgtggaggatagcccagctctgggagcaccgcgggtgggagccctccctgacgtggtgccggaggggacactactcaacatggtgttgagaaggatgcaccggccccgaagctgctcctaccagctgctgctggagcaccagcgtccgagctgcatccaggggctgcgctggacaccactcaccaacagcgaggagtccctggatttcagcgagagcctggagcaggcctccacagagcgggtgctcagggctgggaggcagctgcatcggcatctgctggccacctgcccaaacctcatccgagaccggaagtaccaccttaggctctatcggcagtgctgctctggccgggagctggtggatgggatcttggccctgggacttggggtccattcccggagccaagttgtgggaatctgccaggtgctgctggatgaaggtgccctctgccatgtgaaacacgactgggccttccaggaccgagatgcccaattctaccggttccccgggcccgagcccgagcccgtgagaactcatgagatggaggaggagttggccgaagctgtggccctgctctcccagcgggggcctgacgccctgctcactgtggcacttcgaaagcccccaggtcagcgcacggatgaagagctggacctcatctttgaggagctgctgcacatcaaggctgtggcccacctctccaactcggtgaagcgagaattagcggctgttctgctctttgaaccacacagcaaggcagggaccgtgttgttcagccagggggacaagggcacttcgtggtacattatctggaagggatctgtcaacgtggtgacccatggcaaggggctggtgaccaccctgcatgagggagatgattttggacagctggctctggtgaatgatgcaccccgggcagccaccatcatcctgcgagaagacaactgtcatttcctgcgtgtggacaagcaggacttcaaccgtatcatcaaggtgctgctgctggggttggggagggcaggggccattcgtccagagaagtgatgtggagagaggagtagggaccagagcagagggcctgtaagaagcagggcaggtaagagatgctgggctatgacagctggcagtgggaccatagccctgggtgtgtgtgagaaggtgaagcccataaggcacagaaggagttcagtgagaccagtgacttcaggctcagtgtgggagaccaggggaaggatgggcatgcagggggcgggggactaggctgtgggggaggcaggatgcatggaaggtagggaaggctgaggaggtggagccaaagtcggaggtgggagaagggctgtgggtccctgtgggaccctcatggggctcaggggctggaatgaaggaggtagatgagagggtctaaagctggaacatcatgagttgagcatgggatgtggcctgttctccaggatgtggaggcaaagaccatgcggctggaagaacatggcaaagtggtgctggtgctggagagagcctctcagggcgccggcccttcccgacccccaaccccaggcaggaaccggtaatacacctgccatgctccctctccacactgtccctcctttcatttcccaatctttgctcccttcccctgtgtcatatccctgccctctggccacttgtggatggagaggtattgagggaccaggatgtgcctgctgagccagtctcctccctgccctaaggtgggacagggctggctaatggagaaaaatgatgtaattgattattgatgtctgcccaggtgtgggagtggggagtagtggcaccagtgccaaagattggccatttctgctaggtatacagtgatgtctggcaccccagagaagatcctagagcttctgttggaggccatgggaccagattccagtgctcatgacccaacagagacattcctcagcgacttcctcctgacccacagggtcttcatgcccagcgcccaactctgcgctgcccttctgcaccacttccatgtggagcctgcgggtggcagcgagcaggagcgcagcacctacgtctgcaacaagaggcagcagatcttgcggctggtcagccagtgggtggccctgtatggctccatgctccacactgaccctgtggccaccagcttcctccagaaactctcagacctggtgggcagggacacccgactcagcaacctgctgagggagcagtggccagagaggcggcgatgccacaggttggagaatggctgtgggaatgcatctcctcagatgaaggcccggaacttgcctgtttggctccccaaccaggacgagccccttcctggcagcagctgtgccatccaagttggggataaagtcccctatgacatctgccggccagaccactcagtgttgaccctgcagctgcctgtgacagcctccgtgagagaggtgatggcagcgttggcccaggaggatggctggaccaaggggcaggtgctggtgaaggtcaattctgcaggtgatgccattggcctgcagccagatgcccgtggtgtggccacatctctggggctcaatgagcgtctctttgttgtcaacccacaggaagtgcatgagctgatcccacaccctgaccagctggggcccactgtgggctctgctgaggggctggacctggtgagtgccaaggacctggcaggccagctgacggaccacgactggagcctcttcaacagtatccaccagcctcaaggagcagaagaatctcaattccttctttgccgtcatgtttggcctcagcaactcggccatcagccgcctagcccacacctgggagcggctgcctcacaaagtccggaagctgtactccgccctcgagaggctgctggatccctcatggaaccaccgggtataccgactggccctcgccaagctctcccctcctgtcatccccttcatgccccttcttctcaaagacatgaccttcattcatgagggaaaccacacactagtggagaatctcatcaactttgagaagatgagaatgatggccagagccgcgcggatgctgcaccactgccgaagccacaaccctgtgcctctctcaccactcagaagccgagtttcccacctccacgaggacagccaggtggcgaggatttccacatgctcggagcagtccctgagcacccggagtccagccagcacctgggcttatgtccagcagctgaaggtcattgacaaccagcgggaactctcccgcctctcccgagagctggagccatgaggaggggctgggactggagctggagcaggcacttgcagccgggaaagccagggtgtgccgggccaagatactcacaggctggccacagctgggcaaggctctccgtggagtggactcgagtccctggagcaggcagtgtggaggcagccatcccctgtgatgactggcagctaaggaggacctcggagtggacccgagccaggaataacgaatgacccaaggccaaggaagggaggacagagaggccccaggagtgggtggagagtggagtgcgctgggacgttgtgtgcaatagagaggtctccacaccagatgtcttccag

SEQ ID NO: 22524 - protein, 377 aa, Homo sapiens
MSGTPEKILELLLEAMGPDSSAHDPTETFLSDFLLTHRVFMPSAQLCAALLHHFHVEPAGGSEQERSTYVCNKRQQILRLVSQWVALYGSMLHTDPVATSFLQKLSDLVGRDTRLSNLLREQWPERRRCHRLENGCGNASPQMKARNLPVWLPNQDEPLPGSSCAIQVGDKVPYDICRPDHSVLTLQLPVTASVREVMAALAQEDGWTKGQVLVKVNSAGDAIGLQPDARGVATSLGLNERLFVVNPQEVHELIPHPDQLGPTVGSAEGLDLVSAKDLAGQLTDHDWSLFNSIHQPQGAEESQFLLCRHVWPQQLGHQPPSPHLGAAASQSPEAVLRPREAAGSLMEPPGIPTGPRQALPSCHPLHAPSSQRHDLHS

SEQ ID NO: 22525 - DNA, 3617 bp, Homo sapiens
atactctgggctcaggcggatgtccactctggtacccccgggtgcggactccaaagcctgccagtgccggcccccttcccctacgcattcctctaccgtaaggcagggcgcctccaccccgccccctccgccagtcctggggaggggaagggggcgggcagcgcagggggtgtgacagctcccgcccggaccggtgccagcgcagccttgcttcagcgcccggtgccagctggctccttcgtctgagacgaaggcgcaggctcggggctccctgtcgccggtggctgggtggcgtccccccaccacgcccccacccctctactcacccaagaggagcctctccaccgagccctgcatcctgctgccctggcagccagtccagctaggcactggcccagttcactgtacctggacttacccactggcaccctccggatccccttatcaaagctgatgggggtcgctggggaccccccagccttttgctagagcctgcacggctgtgcgagcttgaaaagaaacatgaaggtgggctggccaggtgagagctgctggcaggtgggcctggctgtggaggatagcccagctctgggagcaccgcgggtgggagccctccctgacgtggtgccggaggggacactactcaacatggtgttgagaaggatgcaccggccccgaagctgctcctaccagctgctgctggagcaccagcgtccgagctgcatccaggggctgcgctggacaccactcaccaacagcgaggagtccctggatttcagcgagagcctggagcaggcctccacagagcgggtgctcagggctgggaggcagctgcatcggcatctgctggccacctgcccaaacctcatccgagaccggaagtaccaccttaggctctatcggcagtgctgctctggccgggagctggtggatgggatcttggccctgggacttggggtccattcccggagccaagttgtgggaatctgccaggtgctgctggatgaaggtgccctctgccatgtgaaacacgactgggccttccaggaccgagatgcccaattctaccggttccccgggcccgagcccgagcccgtgagaactcatgagatggaggaggagttggccgaagctgtggccctgctctcccagcgggggcctgacgccctgctcactgtggcacttcgaaagcccccaggtcagcgcacggatgaagagctggacctcatctttgaggagctgctgcacatcaaggctgtggcccacctctccaactcggtgaagcgagaattagcggctgttctgctctttgaaccacacagcaaggcagggaccgtgttgttcagccagggggacaagggcacttcgtggtacattatctggaagggatctgtcaacgtggtgacccatggcaaggggctggtgaccaccctgcatgagggagatgattttggacagctggctctggtgaatgatgcaccccgggcagccaccatcatcctgcgagaagacaactgtcatttcctgcgtgtggacaagcaggacttcaaccgtatcatcaaggatgtggaggcaaagaccatgcggctggaagaacatggcaaagtggtgctggtgctggagagagcctctcagggcgccggcccttcccgacccccaaccccaggcaggaaccggtatacagtgatgtctggcaccccagagaagatcctagagcttctgttggaggccatgggaccagattccagtgctcatgacccaacagagacattcctcagcgacttcctcctgacccacagggtcttcatgcccagcgcccaactctgcgctgcccttctgcaccacttccatgtggagcctgcgggtggcagcgagcaggagcgcagcacctacgtctgcaacaagaggcagcagatcttgcggctggtcagccagtgggtggccctgtatggctccatgctccacactgaccctgtggccaccagcttcctccagaaactctcagacctggtgggcagggacacccgactcagcaacctgctgagggagcagtggccagagaggcggcgatgccacaggttggagaatggctgtgggaatgcatctcctcagatgaaggcccggaacttgcctgtttggctccccaaccaggacgagccccttcctggcagcagctgtgccatccaagttggggataaagtcccctatgacatctgccggccagaccactcagtgttgaccctgcagctgcctgtgacagcctccgtgagagaggtgatggcagcgttggcccaggaggatggctggaccaaggggcaggtgctggtgaaggtcaattctgcaggtgatgccattggcctgcagccagatgcccgtggtgtggccacatctctggggctcaatgagcgtctctttgttgtcaacccacaggaagtgcatgagctgatcccacaccctgaccagctggggcccactgtgggctctgctgaggggctggacctggtgagtgccaaggacctggcaggccagctgacggaccacgactggagcctcttcaacagtatccaccaggtggagctgatccactatgtgctgggcccccagcatctgcgggatgtcaccaccgccaacctggagcgcttcatgcgccgcttcaatgagctgcagtactgggtggccaccgagctgtgtctctgccccgtgcccggcccccgggcccagctgctcaggaagttcattaagctggcggcccacctcaaggagcagaagaatctcaattccttctttgccgtcatgtttggcctcagcaactcggccatcagccgcctagcccacacctgggagcggctgcctcacaaagtccggaagctgtactccgccctcgagaggctgctggatccctcatggaaccaccgggtataccgactggccctcgccaagctctcccctcctgtcatccccttcatgccccttcttctcaaagacatgaccttcattcatgagggaaaccacacactagtggagaatctcatcaactttgagaagatgagaatgatggccagagccgcgcggatgctgcaccactgccgaagccacaaccctgtgcctctctcaccactcagaagccgagtttcccacctccacgaggacagccaggtggcgaggatttccacatgctcggagcagtccctgagcacccggagtccagccagcacctgggcttatgtccagcagctgaaggtcattgacaaccagcgggaactctcccgcctctcccgagagctggagccatgaggaggggctgggactggagctggagcaggcacttgcagccgggaaagccagggtgtgccgggccaagatactcacaggctggccacagctgggcaaggctctccgtggagtggactcgagtccctggagcaggcagtgtggaggcagccatcccctgtgatgactggcagctaaggaggacctcggagtggacccgagccaggaataacgaatgacccaaggccaaggaagggaggacagagaggccccaggagtgggtggagagtggagtgcgctgggacgttgtgtgcaatagagaggtctccacaccagatgtcttccag

SEQ ID NO: 22526 - protein, 923 aa, Homo sapiens; identical to SEQ ID NO: 22514

SEQ ID NO: 22527 - DNA, 4282 bp, Homo sapiens
gtctgagacgaaggcgcaggctcggggctccctgtcgccggtggctgggtggcgtccccccaccacgcccccacccctctactcacccaagaggagcctctccaccgagccctgcatcctgctgccctggcagccagtccagctaggcactggcccagttcactgtacctggacttacccactggcaccctccggatccccttatcaaagctgatgggggtcgctggggaccccccagccttttgctagagcctgcacggctgtgcgagcttgaaaagaaacatgaaggtgggctggccaggtgagagctgctggcaggtgggcctggctgtggaggatagcccagctctgggagcaccgcgggtgggagccctccctgacgtggtgccggaggggacactactcaacatggtgttgagaaggatgcaccggccccgaagctgctcctaccagctgctgctggagcaccagcgtccgagctgcatccaggggctgcgctggacaccactcaccaacagcgaggagtccctggatttcagcgagagcctggagcaggcctccacagagcgggtgctcagggctgggaggcagctgcatcggcatctgctggccacctgcccaaacctcatccgagaccggaagtaccaccttaggctctatcggcagtgctgctctggccgggagctggtggatgggatcttggccctgggacttggggtccattcccggagccaagttgtgggaatctgccaggtgctgctggatgaaggtgccctctgccatgtgaaacacgactgggccttccaggaccgagatgcccaattctaccggttccccgggcccgagcccgagcccgtgagaactcatgagatggaggaggagttggccgaagctgtggccctgctctcccagcgggggcctgacgccctgctcactgtggcacttcgaaagcccccaggtcagcgcacggatgaagagctggacctcatctttgaggagctgctgcacatcaaggctgtggcccacctctccaactcggtgaagcgagaattagcggctgttctgctctttgaaccacacagcaaggcagggaccgtgttgttcagccagggggacaagggcacttcgtggtacattatctggaagggatctgtcaacgtggtgacccatggcaaggggctggtgaccaccctgcatgagggagatgattttggacagctggctctggtgaatgatgcaccccgggcagccaccatcatcctgcgagaagacaactgtcatttcctgcgtgtggacaagcaggacttcaaccgtatcatcaaggatgtggaggcaaagaccatgcggctggaagaacatggcaaagtggtgctggtgctggagagagcctctcagggcgccggcccttcccgacccccaaccccaggcaggaaccggtatacagtgatgtctggcaccccagagaagatcctagagcttctgttggaggccatgggaccagattccagtgctcatgacccaacagagacattcctcagcgacttcctcctgacccacagggtcttcatgcccagcgcccaactctgcgctgcccttctgcaccacttccatgtggagcctgcgggtggcagcgagcaggagcgcagcacctacgtctgcaacaagaggcagcagatcttgcggctggtcagccagtgggtggccctgtatggctccatgctccacactgaccctgtggccaccagcttcctccagaaactctcagacctggtgggcagggacacccgactcagcaacctgctgagggagcagtggccagagaggcggcgatgccacaggttggagaatggctgtgggaatgcatctcctcagatgaaggtgtctgcctggccccagtttctttcctctgctcctcctggactgcaggcccctccttcgccccctgaccctgaggggctctgtgggcgtgggaagctctcctcccacagacacacccttgggtctctgataggtgttcacggggcccttgctgcatgtggtgccctgggccaggccgtgccaggaggcgcagaggcctaaggtggcctccctcctcgcccactccctgactcaatgggccttttattccttttgggaggtaattcatgcccacaggtagagcctgggagatgaggaatggtggctggagttggcccctgaggcccacggggctcctggtggccagtgctgtgggagctcagaggaaggcgaggcccctccctggaaagtcagagggggccccaggccattctcagctggggcttaaagggaagcaaagaggggatgagaagatgtgactgcagccaggatttggttgaggaatggtgggagaaagaactggaaaggtagattaggttggtggtggggagggctgcactgggaataaaatccaggggcctcaccatccagcaggctccccatggtcccaccctactgtgtgtcccagcccctgcctgctggagactcttactggcttcttctcctccgcaggcgaagcccgttctcccctcagggcctttgcacttatcccttagcctggaagggtctttctctggctctgcctggcaggatccttctcgttctcatctcagccaaatgctgggttcccagacaggccccctcccgtctccctatccggagcaccctcccctttctcccaccacgctctgccttggtgtcctctgtgattttcttcaaagcactctcgccatgtggagttgttttctttgcctacttgctttctgtcctttggtatctctcccatcccactggagagttgacttccctcctgcgggcccccacctccgcttctccttgctcacatgctgcctggctcttggctgacgctcagaaactgatgtgggctcaccctcgcaggccgggcactgcgctaggtgctgatgctgcacctcattcaaccctggcctgtggggctgcagtcaggcaaggggcagagcagttcaacaacccgtgatgtgcagtgacacgggacactttccctgaatgtgcactggagtcggctcttccaactgtagtccgctcctgaaaacgggaggggaagagccaactccagtgcagattcagggaaagtgtcccgtgtaagcgactactggagttgagagctgcagggggcaagggtggaggaagaagaggattcctggtgggcaaacccaggaggaaagggaacccaggaggaggatccctggaggagcgagagtaagagtaggaccccagagcaggcaggaggtgggcagggccccctgggccaaggacaggggtctgatctttgtcctaagagcagtgcaaaccattaaaggggtttgagccaaggttggcaaagtctgatttgtgttttgaataggtcagctaaagagcctgggctttctccagcagacaatggacgccactgaagtcgagtgcgggagcttcacagggctctggtcaggcagattggaggaggagggctggaggcacctgggagggaggaggaggagcatagttgggccattggagtagataaggagtgaggcctcgtgggcaggtggaactggagttagcctgggcaggggaggagggggcacagaagacccacttcaaagaagaatcttcaaagcaagatgacaagctacggaagtgtggaggagcctggagctggggagaatggctggggaacagagtggtctgggaggcaggatgcaaggatccgatgggtatatggagtgtgaggtaatggatcattcatgtggaaggatgcagggggtttttgagaccagggtttggaagagagttcagcactgctggtagttttgggaatcacccatgtgcaggcgacacatgaggcagtaaggaactctgcaggggtccctgagatttggaaatgtagggaagagcaatggattgaggtccgaacctggaggatctgctatacgcagagctgggaggagggacagagtcagtaccagagtcggaaaaaagcagggtgggaaggggaacctgagtcaggagacttgcctggcaggcgctgccctgccagcagaggcctgacagtggtttccatgaactgcatccctgctgtgggctgggacagggccactgacacagtatcggagcacagagggggaaaggagcaggagggattccaactctgccagttagcagctgtgtggctttgggcatgttacttaacctctctgagcctcatttatttcatccataaaatggaaataaaaataatacttttgtc

SEQ ID NO: 22528 - protein, 598 aa, Homo sapiens
MKVGWPGESCWQVGLAVEDSPALGAPRVGALPDVVPEGTLLNMVLRRMHRPRSCSYQLLLEHQRPSCIQGLRWTPLTNSEESLDFSESLEQASTERVLRAGRQLHRHLLATCPNLIRDRKYHLRLYRQCCSGRELVDGILALGLGVHSRSQVVGICQVLLDEGALCHVKHDWAFQDRDAQFYRFPGPEPEPVRTHEMEEELAEAVALLSQRGPDALLTVALRKPPGQRTDEELDLIFEELLHIKAVAHLSNSVKRELAAVLLFEPHSKAGTVLFSQGDKGTSWYIIWKGSVNVVTHGKGLVTTLHEGDDFGQLALVNDAPRAATIILREDNCHFLRVDKQDFNRIIKDVEAKTMRLEEHGKVVLVLERASQGAGPSRPPTPGRNRYTVMSGTPEKILELLLEAMGPDSSAHDPTETFLSDFLLTHRVFMPSAQLCAALLHHFHVEPAGGSEQERSTYVCNKRQQILRLVSQWVALYGSMLHTDPVATSFLQKLSDLVGRDTRLSNLLREQWPERRRCHRLENGCGNASPQMKVSAWPQFLSSAPPGLQAPPSPPDPEGLCGRGKLSSHRHTLGSLIGVHGALAACGALGQAVPGGAEA

SEQ ID NO: 22529 - DNA, 657 bp, Homo sapiens
catgagttgagcatgggatgtggcctgttctccaggatgtggaggcaaagaccatgcggctggaagaacatggcaaagtggtgctggtgctggagagagcctctcagggcgccggcccttcccgacccccaaccccaggcaggaaccggtaatacacctgccatgctccctctccacactgtccctcctttcatttcccaatctttgctcccttcccctgtgtcatatccctgccctctggccacttgtggatggagaggtattgagggaccaggatgtgcctgctgagccagtctcctccctgccctaaggtgggacagggctggctaatggagaaaaatgatgtaattgattattgatgtctgcccaggtgtgggagtggggagtagtggcaccagtgccaaagattggccatttctgctaggtatacagtgatgtctggcaccccagagaagatcctagagcttctgttggaggccatgggaccagattccagtgctcatgacccaacaggtgggtggccctgcttggatgttgtggttcccttgactggtgcccaccttccatgtggagcctgcgggtggcagcgagcaggagcgcagcacctacgtctgcaacaagaggcagcagatcttgcggctggtcagccagtgggtg

SEQ ID NO: 22530 - protein, 73 aa, Homo sapiens
MSGTPEKILELLLEAMGPDSSAHDPTGGWPCLDVVVPLTGAHLPCGACGWQRAGAQHLRLQQEAADLAAGQPV

SEQ ID NO: 22531 - DNA, 882 bp, Homo sapiens
ccctagtccatgagcactgaggaagggactttaaggaatccctctcattttgacaaggaaagcaaaagcccagagagatcacacaactatttagaaaggtaggaacagaaagagctgtcttcagacttcttctctgggaggttgatgggttttccccttggctttcgaagagggaggtctggcctcaataactggcagtgctgtcttcctgggactcgggctccaccccttcaccatgggcgtgcatgctcacagctggcactcattccctcacggaagccttccctgggctaaaggcatcatcaagaggtaagaagtacagcttcacaggtacccagagcctctcaaatataggcatgatggaatgaaacctccccaccccagtccccaaagttggtcatcagaagagggagtggccgcctgcctctaaacactaaaaatctaagttccctctagtcaccaacgcccacctggcacggaaaggccttgttttggtgcctttgaccccatttacactccagcaacctttacccccacctttctggccttcccctgcacaccagcccttcatttctgggggctgtggagagtcaggagacagcttggtggcctcctccactccctcccagacttcaggtcccaggagatcctccagtgacctattgtcctggcacctgaccttctccctaccccctaccttgcttccacaagctgggaaggggacaggaaatgcacaaataattatagcccaagagggaaggagggagggagggttccagcccactggctccaggcaatagctacagccagtgacccggagagcggagagccggagagccagaggggtagcggaggaggacccaggctcatgataaggaagac

SEQ ID NO: 22532 - protein, 30 aa, Homo sapiens
MSTEEGTLRNPSHFDKESKSPERSHNYLER

SEQ ID NO: 22533 - DNA, 1957 bp, Homo sapiens
gccgggggcggagcgcggggcgccggctgctctggcggctcccgcggctccggctggcggcttcgggccctgcacctgtgactctcggccgcgctcgccctcggcccgcccggcgccgcagccccatggccccgtccaggctgcagctcggcctccgcgccgcctactccggcatcagctccgtggccggcttctccatcttcctcgtctggacggtggtctaccgacagccggggaccgcggccatgggagggctcgcaggggtgctggcactgtgggtcctggtgacgcacgtgatgtacatgcaagattattggaggacctggctcaaggggctgcgcggcttcttcttcgtgggcgtcctcttctcggccgtctccatcgctgccttctgcaccttcctcgtgctggccatcacccggcatcagagcctcacagaccccaccagctactacctctccagcgtctggagcttcatttccttcaagtgggccttcctgctcagcctctatgcccaccgctaccgggctgactttgctgacatcagcatcctcagcgatttctgacccagggggtgaggtctctgcaccctgggggggccttaggacctggactcagcctctgagatgttgggagaggctactcccaccccctggtgaccccagaactgtggcagaaaatacacagcaggacgagtgtggtctcccaggaagctgtcctgcccgtcccctttcgaggaaacctgagtgtggtagagaggggatcctgccatgttgctcctcatcagcctggccagagggcagctttagaccttttcaaatgaatctgttttcttttctttcttttttttttcttttttttttttttttgagatggagtcttactctgtcacccaggctggagtgcagtagtgcgatctcagctcactgcaacctccgcctcccaggttcaagcaattctcctgccttggcctctcaagtagctgggattacaggcatctgccaccatgcccggcaaatttttgtgtttttagtagagacagggttttgccatgttggccaggctggtctcgaactcctgatctcaggtgattcacccgcctcagccttccaaagtgctgggattataggtgtgagccaccgtgcccggcctggatctgttttcttagcacgcagtgaggaatctttgtacttaaggccagggcaacaaagtcaagaggtcaaggtgtagggccatgaggcctggacctatgctgcaggcaagggtttccatccccgctgccctaggcactctcttcccaaggccaggttgggcacctggggaggtcagttcagaaatatctagcagagacctcttaaacccccatcccagcaccccatcctgttgttcccagagctggtctcccatgagtgtgctagagccagatagccgtggccccccacccatctcactcacacacacaggcatccatacaccccagaagacttcccaaatgaggccagactcagggtcacggggaatgtgcttctgcccctgtaagggctttggggaagggggcaacatagtagaggctggaaagagcccccaaacctgtacccatgcccctccagccctgcgtttccattctgccttctcagagtgcccttgctgcacccagaccaccggccaggagagaccttctctcccactccagcccctctcactgcccttcaactagagctttcacctttttacatttcccttctgaaggacacaaatctgcttttctgcccatacactggcccaagggctcacctaacttgggagggaaggggctgttggtacaaggatgattttctgttagactgccattttgcacggtctcccccttcccatctgatgtgtcctgcccctcagctctttgccttatctgtgtcactgtcactttagcaaaaatacagcggccatttgtatcagc

SEQ ID NO: 22534 - protein, 146 aa, Homo sapiens
MAPSRLQLGLRAAYSGISSVAGFSIFLVWTVVYRQPGTAAMGGLAGVLALWVLVTHVMYMQDYWRTWLKGLRGFFFVGVLFSAVSIAAFCTFLVLAITRHQSLTDPTSYYLSSVWSFISFKWAFLLSLYAHRYRADFADISILSDF

SEQ ID NO: 22535 - DNA, 3037 bp, Homo sapiens
gccgggggcggagcgcggggcgccggctgctctggcggctcccgcggctccggctggcggcttcgggccctgcacctgtgactctcggccgcgctcgccctcggcccgcccggcgccgcagccccatggccccgtccaggctgcagctcggcctccgcgccgcctactccggcatcagctccgtggccggcttctccatcttcctcgtctggacggtggtctaccgacagccggggaccgcggccatgggagggctcgcaggggtgctggcactgtgggtcctggtgacgcacgtgatgtacatgcaagattattggaggacctggctcaaggggctgcgcggcttcttcttcgtgggcgtcctcttctcggccgtctccatcgctgccttctgcaccttcctcgtgctggccatcacccggcatcagagcctcacagaccccaccagctactacctctccagcgtctggagcttcatttccttcaagtgggccttcctgctcagcctctatgcccaccgctaccgggctgactttgctgacatcagcatcctcagcgatttctgacccagggggtgaggtctctgcaccctgggggggccttaggacctggactcagcctctgagatgttgggagaggctactcccaccccctggtgaccccagaactgtggcagaaaatacacagcaggacgagtgtggtctcccaggaagctgtcctgcccgtcccctttcgaggaaacctgagtgtggtagagaggggatcctgccatgttgctcctcatcagcctggccagagggcagctttagaccttttcaaatgaatctgttttcttttctttcttttttttttcttttttttttttttttgagatggagtcttactctgtcacccaggctggagtgcagtagtgcgatctcagctcactgcaacctccgcctcccaggttcaagcaattctcctgccttggcctctcaagtagctgggattacaggcatctgccaccatgcccggcaaatttttgtgtttttagtagagacagggttttgccatgttggccaggctggtctcgaactcctgatctcaggtgattcacccgcctcagccttccaaagtgctgggattataggtgtgagccaccgtgcccggcctggatctgttttcttagcacgcagtgaggaatctttgtacttaaggccagggcaacaaagtcaagaggtcaaggtgtagggccatgaggcctggacctatgctgcaggcaagggtttccatccccgctgccctaggcactctcttcccaaggccaggttgggcacctggggaggtcagttcagaaatatctagcagagacctcttaaacccccatcccagcaccccatcctgttgttcccagagctggtctcccatgagtgtgctagagccagatagccgtggccccccacccatctcactcacacacacaggcatccatacaccccagaagacttcccaaatgaggccagactcagggtcacggggaatgtgcttctgcccctgtaagggctttggggaagggggcaacatagtagaggctggaaagagcccccaaacctgtacccatgcccctccagccctgcgtttccattctgccttctcagagtgcccttgctgcacccagaccaccggccaggagagaccttctctcccactccagcccctctcactgcccttcaactagagctttcacctttttacatttcccttctgaaggacacaaatctgcttttctgcccatacactggcccaagggctcacctaacttgggagggaaggggctgttggtacaaggatgattttctgttagactgccattttgcacggtctcccccttcccatctgatgtgtcctgcccctcagctctttgccttatctgtgtcactgtcactttagcaaaaatacagcggccatttgtatcagcctctggtggttgcttgtgaggtgggactcttgcgggaacaggtggactttgggaggagtgggcagggagggagtggtagtggcagttctcgagctatctgattaagccattccgctagttcagttgtgccctggagggcaggggacagagtcagtatctctggggctgcaggccctcttgccttggccctcctggcatggggtaaccaccagctcagctctcctcctccagctttcctctctctagcacaccccagccagggcaaggatgcccacgggcatagctacagcaacccctgcgggatttggtgtccacacccgagaggccaggccagatgggaaagggattagcgcctcttccctcacactctgccaggctgccaggagcttgggccaggtctaaggtaatgaggtgctcctcttcctgctggaaaaaccggacagactcagaaccacaaaggcaggtgctgccagcctggcgccttcctctctgcttaggctgggtgagcttgtccaggcctgtgcctcaccccttctctcttctaggctcagtgtatgcttaatcaggcatggtgcatcagagcgggaaggagccatcaacagtgtatacttctggagccttctactgataaacagaggccccagaagacgatttgacttacctgagctcccagctgggacttaaacccaggtgtgtctgagtcacaactcttcggggatgccgtggtgagctggggctgagctcctgtattcccactcccccaccccacccccactcctgccatatcagggctggtctctgtggactcagcccagggctgcctcctctttgtcaccccaaagtggggcagccagggacagccagggtgtgttcagaatgggttcttcctgcagggcaggaagggcagattgttaaaggggctgcggcccagaccaccctggtccctcctccggcagtgactcagacccacactgtgccgtgcagctgtgtgccctgcacacccgcttgacggcgcactgctcacttctggggggccctttcagaggcacttttaaagcaaataaaacatttattgttcag

SEQ ID NO: 22536 - protein, 146 aa, Homo sapiens; identical to SEQ ID NO: 22534

SEQ ID NO: 22537 - DNA, 4102 bp, Homo sapiens
gccgggggcggagcgcggggcgccggctgctctggcggctcccgcggctccggctggcggcttcgggccctgcacctgtgactctcggccgcgctcgccctcggcccgcccggcgccgcagccccatggccccgtccaggctgcagctcggcctccgcgccgcctactccggcatcagctccgtggccggcttctccatcttcctcgtctggacggtggtctaccgacagccggggaccgcggccatgggagggctcgcaggggtgctggcactgtgggtcctggtgacgcacgtgatgtacatgcaagattattggaggacctggctcaaggggctgcgcggcttcttcttcgtgggcgtcctcttctcggccgtctccatcgctgccttctgcaccttcctcgtgctggccatcacccggcatcagagcctcacagaccccaccagctactacctctccagcgtctggagcttcatttccttcaagtgggccttcctgctcagcctctatgcccaccgctaccgggctgactttgctgacatcagcatcctcagcgatttctgacccagggggtgaggtctctgcaccctgggggggccttaggacctggactcagcctctgagatgttgggagaggctactcccaccccctggtgaccccagaactgtggcagaaaatacacagcaggacgagtgtggtctcccaggaagctgtcctgcccgtcccctttcgaggaaacctgagtgtggtagagaggggatcctgccatgttgctcctcatcagcctggccagagggcagctttagaccttttcaaatgaatctgttttcttttctttcttttttttttcttttttttttttttttgagatggagtcttactctgtcacccaggctggagtgcagtagtgcgatctcagctcactgcaacctccgcctcccaggttcaagcaattctcctgccttggcctctcaagtagctgggattacaggcatctgccaccatgcccggcaaatttttgtgtttttagtagagacagggttttgccatgttggccaggctggtctcgaactcctgatctcaggtgattcacccgcctcagccttccaaagtgctgggattataggtgtgagccaccgtgcccggcctggatctgttttcttagcacgcagtgaggaatctttgtacttaaggccagggcaacaaagtcaagaggtcaaggtgtagggccatgaggcctggacctatgctgcaggcaagggtttccatccccgctgccctaggcactctcttcccaaggccaggttgggcacctggggaggtcagttcagaaatatctagcagagacctcttaaacccccatcccagcaccccatcctgttgttcccagagctggtctcccatgagtgtgctagagccagatagccgtggccccccacccatctcactcacacacacaggcatccatacaccccagaagacttcccaaatgaggccagactcagggtcacggggaatgtgcttctgcccctgtaagggctttggggaagggggcaacatagtagaggctggaaagagcccccaaacctgtacccatgcccctccagccctgcgtttccattctgccttctcagagtgcccttgctgcacccagaccaccggccaggagagaccttctctcccactccagcccctctcactgcccttcaactagagctttcacctttttacatttcccttctgaaggacacaaatctgcttttctgcccatacactggcccaagggctcacctaacttgggagggaaggggctgttggtacaaggatgattttctgttagactgccattttgcacggtctcccccttcccatctgatgtgtcctgcccctcagctctttgccttatctgtgtcactgtcactttagcaaaaatacagcggccatttgtatcagcctctggtggttgcttgtgaggtgggactcttgcgggaacaggtggactttgggaggagtgggcagggagggagtggtagtggcagttctcgagctatctgattaagccattccgctagttcagttgtgccctggagggcaggggacagagtcagtatctctggggctgcaggccctcttgccttggccctcctggcatggggtaaccaccagctcagctctcctcctccagctttcctctctctagcacaccccagccagggcaaggatgcccacgggcatagctacagcaacccctgcgggatttggtgtccacacccgagaggccaggccagatgggaaagggattagcgcctcttccctcacactctgccaggctgccaggagcttgggccaggtctaaggtaatgaggtgctcctcttcctgctggaaaaaccggacagactcagaaccacaaaggcaggtgctgccagcctggcgccttcctctctgcttaggctgggtgagcttgtccaggcctgtgcctcaccccttctctcttctaggctcagtgtatgcttaatcaggcatggtgcatcagagcgggaaggagccatcaacagtgtatacttctggagccttctactgataaacagaggccccagaagacgatttgacttacctgagctcccagctgggacttaaacccaggtgtgtctgagtcacaactcttcggggatgccgtggtgagctggggctgagctcctgtattcccactcccccaccccacccccactcctgccatatcagggctggtctctgtggactcagcccagggctgcctcctctttgtcaccccaaagtggggcagccagggacagccagggtgtgttcagaatgggttcttcctgcagggcaggaagggcagattgttaaaggggctgcggcccagaccaccctggtccctcctccggcagtgactcagacccacactgtgccgtgcagctgtgtgccctgcacacccgcttgacggcgcactgctcacttctggggggccctttcagaggcacttttaaagcaaataaaacatttattgttcagatttttttccattttcttcctttttacaaaaacatgcatacatacacagggtatggtgggtcctaggaaagacacacacacacgcctcactcacacacacgctcacacacacgcctcactcacacacatgctcacacacattttccttcttgaccccaggcctggacccccaaaagccttgaagactttgccagagcagcctcccctcctccatgtctgtatcttctctcccaccccttccccctcagtcaggctactcctatgtggggtgggaatcagagctatggtgggggaggccccagaaacagagaaggctccccgagtgggcagtggccgaggggtcccaggggtatgctgcgcttcttggggagatgaagggtttggcaccattggatcaggaagcacaggactcccagagcacccatctgctccaccagggcatcgccaggaggttgatgtaggggggcctctggcgagggtacggaccagatggagggctgccagtctcggctgtcagggagcttcgtctcagtgcccagtggtagagggaagcttccagagtcgtctgaggaagcaggtgagagggactacccctgcactcaggaatatgggacctcttggctccccactcccccctagcccctagagcctaggaagggccagcctgtctgaggccaagttcacatttctgtgtggagcctgaggctgtgtgcaaagtctggggtttgcagagccaggaatagtggttaagggtgagcccgacggagccggagccagtcctcctctgtgcagtcctgaggaatgggggccacagccagggcccatactggaggggagaatctgttctcgagagccctgtgggggtcgccgcccagcccgtctcctctcagggtcctctccagttcccattctagacccagggattttctcacgctccctgggataactgtcaaagcaggcaggctgttctctggttccaactacttgcccacaggatctctaaagacccaggaatgggggctattgccaggggttagaagagaaccaggtcccaagggcatggtg

SEQ ID NO: 22538 - protein, 146 aa, Homo sapiens; identical to SEQ ID NO: 22534

SEQ ID NO: 22539 - DNA, 1019 bp, Homo sapiens
tttttttttcttttttttttttttttgagatggagtcttactctgtcacccaggctggagtgcagtagtgcgatctcagctcactgcaacctccgcctcccaggttcaagcaattctcctgccttggcctctcaagtagctgggattacaggcatctgccaccatgcccggcaaatttttgtgtttttagtagagacagggttttgccatgttggccaggctggtctcgaactcctgatctcaggtgattcacccgcctcagccttccaaagtgctgggattataggtgtgagccaccgtgcccggcctggatctgttttcttagcacgcagtgaggaatctttgtacttaaggccagggcaacaaagtcaagaggtcaaggtgtagggccatgaggcctggacctatgctgcaggcaagggtttccatccccgctgccctaggcactctcttcccaaggccaggttgggcacctggggaggtcagttcagaaatatctagcagagacctcttaaacccccatcccagcaccccatcctgttaagacttcccaaatgaggccagactcagggtcacggggaatgtgcttctgcccctgtaagggctttggggaagggggcaacatagtagaggctggaaagagcccccaaacctgtacccatgcccctccagccctgcgtttccattctgccttctcagagtgcccttgctgcacccagaccaccggccaggagagaccttctctcccactccagcccctctcactgcccttcaactagagctttcacctttttacatttcccttctgaaggacacaaatctgcttttctgcccatacactggcccaagggctcacctaacttgggagggaaggggctgttggtacaaggatgattttctgttagactgccattttgcacggtctcccccttcccatctgatgtgtcctgcccctcagctctttgccttatctgtgtcactgtcactttagcaaaaatacagcggccatttgtatcagc

SEQ ID NO: 22540 - protein, 77 aa, Homo sapiens
MPLQPCVSILPSQSALAAPRPPARRDLLSHSSPSHCPSTRAFTFLHFPSEGHKSAFLPIHWPKGSPNLGGKGLLVQG

SEQ ID NO: 22541 - DNA, 2099 bp, Homo sapiens
tttttttttcttttttttttttttttgagatggagtcttactctgtcacccaggctggagtgcagtagtgcgatctcagctcactgcaacctccgcctcccaggttcaagcaattctcctgccttggcctctcaagtagctgggattacaggcatctgccaccatgcccggcaaatttttgtgtttttagtagagacagggttttgccatgttggccaggctggtctcgaactcctgatctcaggtgattcacccgcctcagccttccaaagtgctgggattataggtgtgagccaccgtgcccggcctggatctgttttcttagcacgcagtgaggaatctttgtacttaaggccagggcaacaaagtcaagaggtcaaggtgtagggccatgaggcctggacctatgctgcaggcaagggtttccatccccgctgccctaggcactctcttcccaaggccaggttgggcacctggggaggtcagttcagaaatatctagcagagacctcttaaacccccatcccagcaccccatcctgttaagacttcccaaatgaggccagactcagggtcacggggaatgtgcttctgcccctgtaagggctttggggaagggggcaacatagtagaggctggaaagagcccccaaacctgtacccatgcccctccagccctgcgtttccattctgccttctcagagtgcccttgctgcacccagaccaccggccaggagagaccttctctcccactccagcccctctcactgcccttcaactagagctttcacctttttacatttcccttctgaaggacacaaatctgcttttctgcccatacactggcccaagggctcacctaacttgggagggaaggggctgttggtacaaggatgattttctgttagactgccattttgcacggtctcccccttcccatctgatgtgtcctgcccctcagctctttgccttatctgtgtcactgtcactttagcaaaaatacagcggccatttgtatcagcctctggtggttgcttgtgaggtgggactcttgcgggaacaggtggactttgggaggagtgggcagggagggagtggtagtggcagttctcgagctatctgattaagccattccgctagttcagttgtgccctggagggcaggggacagagtcagtatctctggggctgcaggccctcttgccttggccctcctggcatggggtaaccaccagctcagctctcctcctccagctttcctctctctagcacaccccagccagggcaaggatgcccacgggcatagctacagcaacccctgcgggatttggtgtccacacccgagaggccaggccagatgggaaagggattagcgcctcttccctcacactctgccaggctgccaggagcttgggccaggtctaaggtaatgaggtgctcctcttcctgctggaaaaaccggacagactcagaaccacaaaggcaggtgctgccagcctggcgccttcctctctgcttaggctgggtgagcttgtccaggcctgtgcctcaccccttctctcttctaggctcagtgtatgcttaatcaggcatggtgcatcagagcgggaaggagccatcaacagtgtatacttctggagccttctactgataaacagaggccccagaagacgatttgacttacctgagctcccagctgggacttaaacccaggtgtgtctgagtcacaactcttcggggatgccgtggtgagctggggctgagctcctgtattcccactcccccaccccacccccactcctgccatatcagggctggtctctgtggactcagcccagggctgcctcctctttgtcaccccaaagtggggcagccagggacagccagggtgtgttcagaatgggttcttcctgcagggcaggaagggcagattgttaaaggggctgcggcccagaccaccctggtccctcctccggcagtgactcagacccacactgtgccgtgcagctgtgtgccctgcacacccgcttgacggcgcactgctcacttctggggggccctttcagaggcacttttaaagcaaataaaacatttattgttcag

SEQ ID NO: 22542 - protein, 77 aa, Homo sapiens; identical to SEQ ID NO: 22540

SEQ ID NO: 22543 - DNA, 3164 bp, Homo sapiens
tttttttttcttttttttttttttttgagatggagtcttactctgtcacccaggctggagtgcagtagtgcgatctcagctcactgcaacctccgcctcccaggttcaagcaattctcctgccttggcctctcaagtagctgggattacaggcatctgccaccatgcccggcaaatttttgtgtttttagtagagacagggttttgccatgttggccaggctggtctcgaactcctgatctcaggtgattcacccgcctcagccttccaaagtgctgggattataggtgtgagccaccgtgcccggcctggatctgttttcttagcacgcagtgaggaatctttgtacttaaggccagggcaacaaagtcaagaggtcaaggtgtagggccatgaggcctggacctatgctgcaggcaagggtttccatccccgctgccctaggcactctcttcccaaggccaggttgggcacctggggaggtcagttcagaaatatctagcagagacctcttaaacccccatcccagcaccccatcctgttaagacttcccaaatgaggccagactcagggtcacggggaatgtgcttctgcccctgtaagggctttggggaagggggcaacatagtagaggctggaaagagcccccaaacctgtacccatgcccctccagccctgcgtttccattctgccttctcagagtgcccttgctgcacccagaccaccggccaggagagaccttctctcccactccagcccctctcactgcccttcaactagagctttcacctttttacatttcccttctgaaggacacaaatctgcttttctgcccatacactggcccaagggctcacctaacttgggagggaaggggctgttggtacaaggatgattttctgttagactgccattttgcacggtctcccccttcccatctgatgtgtcctgcccctcagctctttgccttatctgtgtcactgtcactttagcaaaaatacagcggccatttgtatcagcctctggtggttgcttgtgaggtgggactcttgcgggaacaggtggactttgggaggagtgggcagggagggagtggtagtggcagttctcgagctatctgattaagccattccgctagttcagttgtgccctggagggcaggggacagagtcagtatctctggggctgcaggccctcttgccttggccctcctggcatggggtaaccaccagctcagctctcctcctccagctttcctctctctagcacaccccagccagggcaaggatgcccacgggcatagctacagcaacccctgcgggatttggtgtccacacccgagaggccaggccagatgggaaagggattagcgcctcttccctcacactctgccaggctgccaggagcttgggccaggtctaaggtaatgaggtgctcctcttcctgctggaaaaaccggacagactcagaaccacaaaggcaggtgctgccagcctggcgccttcctctctgcttaggctgggtgagcttgtccaggcctgtgcctcaccccttctctcttctaggctcagtgtatgcttaatcaggcatggtgcatcagagcgggaaggagccatcaacagtgtatacttctggagccttctactgataaacagaggccccagaagacgatttgacttacctgagctcccagctgggacttaaacccaggtgtgtctgagtcacaactcttcggggatgccgtggtgagctggggctgagctcctgtattcccactcccccaccccacccccactcctgccatatcagggctggtctctgtggactcagcccagggctgcctcctctttgtcaccccaaagtggggcagccagggacagccagggtgtgttcagaatgggttcttcctgcagggcaggaagggcagattgttaaaggggctgcggcccagaccaccctggtccctcctccggcagtgactcagacccacactgtgccgtgcagctgtgtgccctgcacacccgcttgacggcgcactgctcacttctggggggccctttcagaggcacttttaaagcaaataaaacatttattgttcagatttttttccattttcttcctttttacaaaaacatgcatacatacacagggtatggtgggtcctaggaaagacacacacacacgcctcactcacacacacgctcacacacacgcctcactcacacacatgctcacacacattttccttcttgaccccaggcctggacccccaaaagccttgaagactttgccagagcagcctcccctcctccatgtctgtatcttctctcccaccccttccccctcagtcaggctactcctatgtggggtgggaatcagagctatggtgggggaggccccagaaacagagaaggctccccgagtgggcagtggccgaggggtcccaggggtatgctgcgcttcttggggagatgaagggtttggcaccattggatcaggaagcacaggactcccagagcacccatctgctccaccagggcatcgccaggaggttgatgtaggggggcctctggcgagggtacggaccagatggagggctgccagtctcggctgtcagggagcttcgtctcagtgcccagtggtagagggaagcttccagagtcgtctgaggaagcaggtgagagggactacccctgcactcaggaatatgggacctcttggctccccactcccccctagcccctagagcctaggaagggccagcctgtctgaggccaagttcacatttctgtgtggagcctgaggctgtgtgcaaagtctggggtttgcagagccaggaatagtggttaagggtgagcccgacggagccggagccagtcctcctctgtgcagtcctgaggaatgggggccacagccagggcccatactggaggggagaatctgttctcgagagccctgtgggggtcgccgcccagcccgtctcctctcagggtcctctccagttcccattctagacccagggattttctcacgctccctgggataactgtcaaagcaggcaggctgttctctggttccaactacttgcccacaggatctctaaagacccaggaatgggggctattgccaggggttagaagagaaccaggtcccaagggcatggtg

SEQ ID NO: 22544 - protein, 197 aa, Homo sapiens [sequence omitted]

SEQ ID NO: 22545 - DNA, 1838 bp, Homo sapiens
tgtggagatgggacactcgctgagctcagactgaaggatcttggtggtaccctgccccaccgtggccagatcctagggcttccggtgccagccaggtgacctgctgttggtctggagtaagattcctgtgagtgacccaggcagcaatggtaaatactggggctgcatgcagcgcctggcctcctgtccagactcctgggtgcctagagtgccaggggctgacaaagaagaagtggaggcagtgaccgcactggcgtccctctctgtgggcatcctggctgaagataggccctcggagcagctggtggaggaggaagaacctatgaatctctaaggctctggaaccatctgcccgcccaccatgcccttgggacctggttctcttctaacccctggcaatagcccccattcctgggtctttagagatcctgtgggcaagtagttggaaccagagaacagcctgcctgctttgacagttatcccagggagcgtgagaaaatccctgggtctagaatgggaactggagaggaccctgagaggagacgggctgggcggcgacccccacagggctctcgagaacagattctcccctccagtatgggccctggctgtggcccccattcctcaggactgcacagaggaggactggctccggctccgtcgggctcacccttaaccactattcctggctctgcaaaccccagactttgcacacagcctcaggctccacacagaaatgtgaacttggcctcagacaggctggcccttcctaggctctaggggctaggggggagtggggagccaagaggtcccatattcctgagtgcaggggtagtccctctcacctgcttcctcagacgactctggaagcttccctctaccactgggcactgagacgaagctccctgacagccgagactggcagccctccatctggtccgtaccctcgccagaggcccccctacatcaacctcctggcgatgccctggtggagcagatgggtgctctgggagtcctgtgcttcctgatccaatggtgccaaacccttcatctccccaagaagcgcagcatacccctgggacccctcggccactgcccactcggggagccttctctgtttctggggcctcccccaccatagctctgattcccaccccacataggagtagcctgactgagggggaaggggtgggagagaagatacagacatggaggaggggaggctgctctggcaaagtcttcaaggcttttgggggtccaggcctggggtcaagaaggaaaatgtgtgtgagcatgtgtgtgagtgaggcgtgtgtgtgagcgtgtgtgtgagtgaggcgtgtgtgtgtgtctttcctaggacccaccataccctgtgtatgtatgcatgtttttgtaaaaaggaagaaaatggaaaaaaatctgaacaataaatgttttatttgctttaaaagtgcctctgaaagggccccccagaagtgagcagtgcgccgtcaagcgggtgtgcagggcacacagctgcacggcacagtgtgggtctgagtcactgccggaggagggaccagggtggtctgggccgcagcccctttaacaatctgcccttcctgccctgcaggaagaacccattctgaacacaccctggctgtccctggctgccccactttggggtgacaaagaggaggcagccctgggctgagtccacagagaccagccctgatatggcaggagtgggggtggggtgggggagtgggaatacaggagctcagccccagctcaccacggcatccccgaagagttgtgactcagacacacctgggtttaagtcccagctgggagct

SEQ ID NO: 22546 - protein, 55 aa, Homo sapiens [sequence omitted]

SEQ ID NO: 22547 - DNA, 6803 bp, Homo sapiens
caccggcctctgtcccgggctcagtcttccccagccgcacctgcctcactgtcagccccagagcctgccagccaggcccgagtcctctccagctcagagacccctgccaggaccctgcccttcaccacaggtgagaccgggaggagggtggcgggtggagggaggggctcggctgcacgagtccatgtgggtgtcttggtgtcacttgggacatttttagaggccacagagtgcttagccttgttaggcccacgtagtacccatggagcacatggaacagctggttattgcatttggccgatgaggaccaaggctcacgaaatctaaggtgacaagcctgtggtcaaatagcaagtggtagtcaagccaggataagaattccagtctcctgccaatgcactcagcccttttaaaaaatgatatttattactgttgctctgcttgtaaaaagagctcagaagtattttagacattttgaagagtacagaaaaacctaagaagaaaagaaaaatcaccaaccagtatcccaccacccagaagtaaaccctctgaaattctgctgtatttcagtccaggctttgttctggccatatgtacatgtacagatgccatgaacacatgaactacgttttgtatcctgctttacttagttaacatattatgaatccttcttggcataattagtctttaaaactgagagtctcatagtatttcattaatgtatttcatttttactgagggatcccttatcagttagacatttagattatagcttatttgaatttccttatgcataaatctttcctcatgcttgggattatttcccaaggttcactctaaagaagtagcattcctgggtcacatggtgtgagcattttgagagtcgttggtgtcctagacgcacagaaattgaccctcccacccgcaatgagcaggaccctcctctgaagacttcccacgggtcagactgaaatagtcacttctccaaagctggatttgtctatcacatggtccagtgtcatcgtgggcttcttagctcccggtttgggggtttcctaggaattcttttccctcctgctgccccttggtagcctctctgggttcatgacacgtgtgtgagatgctgtacgttaggcctcatgctttgctctgagcacttgagggcctggtgctgggccctcgagtcctgggccacccagcagtcgtgtccgcatgtgggaaggccgtggctctgtggcagccatgttggctggagctgtgttgatgtgttggctgctgccacctggggaagtgtctgggcgtgtgtggacaggtgtgaggggctggggctggggtaggggcaggatgaaatgcaggcctgtgtgggtgtgaggggtgtgtacccgcccggctccatgtgggtgcctgctgtggcggtgctggcgtgttctctgcagccaaggccatggggcgtgaggactccctgggtccccgctctgacccttgctcctgcagggctgatctatgactcggtcatgctgaagcaccagtgctcctgcggtgacaacagcaggcacccggagcacgccggccgcatccagagcatctggtcccggctgcaggagcgggggctccggagccagtgtgagtgtctccgaggccggaaggcctccctggaagagctgcagtcggtccactctgagcggcacgtgctcctctacggcaccaacccgctcagccgcctcaaactggacaacgggaagctggcagggctcctggcacagcggatgtttgtgatgctgccctgtggtggggttggggtaagtgtgcccaggggtctcaggggggcgttgccagggctctcagctctcctccctgtggttctcccaggcccagcccctgcagaacctctgcttgttgtggttctgccagacagggtgagccagggacttcctgaggtgccccctgcagcaggaagctccttttggacaggcgtgtctcggacccacagtctcccccgaatgcggagtccagcctaagccttcccctagaaggtgtctggtagatgttgagtgaggtttcaggagcagggccaaggctggggcttaggatcatctctcccttcaaagacccccatgactgggcattggccgccaggctgctctgtctgctcttaagtggcaagttggggtacctcagcctggtccccagaccttgggctgcctggtgtgacatcacggtggtgcttccggtgtccttggcgatcccagcactccccactccgggacatagccccaaactccgctcgcgagctttgcttcctaagtcctcacccctttgtgaagggagcttcccgctccctccggctcagctctcctcgcctaacactatccctgcagtagtttctcaagcaaggtgtgtagaggcaggggatggaggcctcattccggagggaaagtgggagctgtagctggtgggggactttgggagccagtcagtgccctattcacaacttcccatttcttgccactttctggtttttccaactgttgttgcttctgttttctcctccctcctctccctctctgtctttctctctctctctctttctccagcctcttgcgactctctctgccttcctcgcctctcttggtctgcctcgccctccccatctccccatcatgccccccggcccctccctagccttgaggcccagggactgggtttggggggcctcccagcctgggctaggggccctgagtggaagacagtggtgcagacggcccctccagctccgaccgtcccgcagggcctgagcagagtcagctggggcttaaaaccccctcccggcccaaaccccaagtcccgcccaggtaacgccatgccccctcccctgaccggggaggcaggcgtgatgctgccagcagagtgctggccagataatgggctggtgctgggacttaagctgggaaaaagtcatgctgggattgggggacacaggaggccttgcctttgggcggtggggcactggggaggcagcactgtctgcccagctccctgcccctggggtcctggccgtggggtggggaccacccccttgggccctggctcctgtgtgaagccttggatgatgcgggccctgactctggctcccgcaggtggacactgacaccatctggaatgagcttcattcctccaatgcagcccgctgggccgctggcagtgtcactgacctcgccttcaaagtggcttctcgtgagctaaagaatggtttcgctgtggtgcggcccccaggacaccatgcagatcattcaacagccatgggcttctgcttcttcaactcagtggccatcgcctgccggcagctgcaacagcagagcaaggccagcaagatcctcattgtagactgggacgtgcaccatggcaacggcacccagcaaaccttctaccaagaccccagtgtgctctacatctccctgcatcgccatgacgacggcaacttcttcccggggagtggggctgtggatgaggtaggggctggcagcggtgagggcttcaatgtcaatgtggcctgggctggaggtctggacccccccatgggggatcctgagtacctggctgctttcaggatagtcgtgatgcccatcgcccgagagttctctccagacctagtcctggtgtctgctggatttgatgctgctgagggtcacccggccccactgggtggctaccatgtttctgccaaatgttttggatacatgacgcagcaactgatgaacctggcaggaggcgcagtggtgctggccttggagggtggccatgacctcacagccatctgtgacgcctctgaggcctgtgtggctgctcttctgggtaacagggtggatcccctttcagaagaaggctggaaacagaaacccaacctcaatgccatccgctctctggaggccgtgatccgggtgcacagtaagtgtggagatgggacactcgctgagctcagactgaaggatcttggtggtaccctgccccaccgtggccagatcctagggcttccggtgccagccaggtgacctgctgttggtctggagtaagattcctgtgagtgacccaggcagcaatggtgagcaccccccagtgaggggttatcctctgagcccccccgatggagccagcagggcctaccagacagtggcccctcaaggtagggactggcctccatctctagcgacagccctagaccagggccaggtcaagagcaacactcaggccttgtttgccaaaaggcctggttcccatccctcccctcagtcctggccacaggcgtctcaggagctctgctggcttgggggctgcgtcttgggataacccccacatttgtaaagtactttaaattttcaacttcaactcaacatctattgagcatcttatgtcaagacccataatctatactagggataaaaatgagtaaaatagattcccatatcaagggctgggtaggggagccgtgatgtctttacataatggtaaagacatggctgattcctcttacggtgggtgccctcacactgagccagattccaggacatggttcctcacagcagcaggcaggaggagcattctcctggcctgggcacccatgcagagcggccgtggtgatggtcagttctcccatgttgtgttcgtcccacctcccaggccctcctttcctgagtgctgggctgagcactggtgggggctgtgtttaagtgggaggcccgagcttggggctctgggaggtcactgtgacacagaccctgtctgcaggcaagcaggctctcctgatgctctcaggagccccgcacctgtggggaatgagtcaaaggtggccttgcagccacaggggatgagagaaaggctgggcacctgctaggactccctcacagccatgttgaacccactctgtgtaccctgtcaggctgtgcgggagtgggagcgaagtgaggagaggggcaggtgggagagccgaccctaagtggaggacaggcccgctcctccggggccctgggcctgagacaccaacctcaatatccggtctaggacgcagtgtggaggggcttgctttctccaaccctttctgacctggcatcttaccccaggtaaatactggggctgcatgcagcgcctggcctcctgtccagactcctgggtgcctagagtgccaggggctgacaaagaagaagtggaggcagtgaccgcactggcgtccctctctgtgggcatcctggctgaagataggccctcggagcagctggtggaggaggaagaacctatgaatctctaaggctctggaaccatctgcccgcccaccatgcccttgggacctggttctcttctaacccctggcaatagcccccattcctgggtctttagagatcctgtgggcaagtagttggaaccagagaacagcctgcctgctttgacagttatcccagggagcgtgagaaaatccctgggtctagaatgggaactggagaggaccctgagaggagacgggctgggcggcgacccccacagggctctcgagaacagattctcccctccagtatgggccctggctgtggcccccattcctcaggactgcacagaggaggactggctccggctccgtcgggctcacccttaaccactattcctggctctgcaaaccccagactttgcacacagcctcaggctccacacagaaatgtgaacttggcctcagacaggctggcccttcctaggctctaggggctaggggggagtggggagccaagaggtcccatattcctgagtgcaggggtagtccctctcacctgcttcctcagacgactctggaagcttccctctaccactgggcactgagacgaagctccctgacagccgagactggcagccctccatctggtccgtaccctcgccagaggcccccctacatcaacctcctggcgatgccctggtggagcagatgggtgctctgggagtcctgtgcttcctgatccaatggtgccaaacccttcatctccccaagaagcgcagcatacccctgggacccctcggccactgcccactcggggagccttctctgtttctggggcctcccccaccatagctctgattcccaccccacataggagtagcctgactgagggggaaggggtgggagagaagatacagacatggaggaggggaggctgctctggcaaagtcttcaaggcttttgggggtccaggcctggggtcaagaaggaaaatgtgtgtgagcatgtgtgtgagtgaggcgtgtgtgtgagcgtgtgtgtgagtgaggcgtgtgtgtgtgtctttcctaggacccaccataccctgtgtatgtatgcatgtttttgtaaaaaggaagaaaatggaaaaaaatctgaacaataaatgttttatttgctttaaaagtgcctctgaaagggccccccagaagtgagcagtgcgccgtcaagcgggtgtgcagggcacacagctgcacggcacagtgtgggtctgagtcactgccggaggagggaccagggtggtctgggccgcagcccctttaacaatctgcccttcctgccctgcaggaagaacccattctgaacacaccctggctgtccctggctgccccactttggggtgacaaagaggaggcagccctgggctgagtccacagagaccagccctgatatggcaggagtgggggtggggtgggggagtgggaatacaggagctcagccccagctcaccacggcatccccgaagagttgtgactcagacacacctgggtttaagtcccagctgggagct

SEQ ID NO: 22548 - protein, 249 aa, Homo sapiens
MGFCFFNSVAIACRQLQQQSKASKILIVDWDVHHGNGTQQTFYQDPSVLYISLHRHDDGNFFPGSGAVDEVGAGSGEGFNVNVAWAGGLDPPMGDPEYLAAFRIVVMPIAREFSPDLVLVSAGFDAAEGHPAPLGGYHVSAKCFGYMTQQLMNLAGGAVVLALEGGHDLTAICDASEACVAALLGNRVDPLSEEGWKQKPNLNAIRSLEAVIRVHSKCGDGTLAELRLKDLGGTLPHRGQILGLPVPAR

SEQ ID NO: 22549 - DNA, 4467 bp, Homo sapiens
ataatacctaccttgcaggaccacgacaggattaagtgaggaaaaacccccatgagagtgttttgccattgtcaagtgagcctgagggaggctgaggggggatcaggctgtatcatgcccccgaggacaaactttccagtttaccctgctccctctctctgtccctaggctgccccaggccctgtgcagacacaccaggccctcagccgcagcccatggacctgcgggtgggccagcggcccccagtggagcccccaccagagcccacattgctggccctgcagcgtccccagcgcctgcaccaccacctcttcctagcaggcctgcagcagcagcgctcggtggagcccatgaggctctccatggacacgccgatgcccgagttgcaggtgggaccccaggaacaagagctgcggcagcttctccacaaggacaagagcaagcgaagtgctgtagccagcagcgtggtcaagcagaagctagcggaggtgattctgaaaaaacagcaggcggccctagaaagaacagtccatcccaacagccccggcattccctacagaaccctggagcccctggagacggaaggagccacccgctccatgctcagcagctttttgcctcctgttcccagcctgcccagtgaccccccagagcacttccctctgcgcaagacagtctctgagcccaacctgaagctgcgctataagcccaagaagtccctggagcggaggaagaatccactgctccgaaaggagagtgcgccccccagcctccggcggcggcccgcagagaccctcggagactcctccccaagtagtagcagcacgcccgcatcagggtgcagctcccccaatgacagcgagcacggccccaatcccatcctgggctcggaggctgacagtgaccgcaggacccatccgactctgggccctcgggggccaatcctggggagcccccacactcccctcttcctgccccatggcttggagcccgaggctgggggcaccttgccctctcgcctgcagcccattctcctcctggacccctcaggctctcatgccccgctgctgactgtgcccgggcttgggcccttgcccttccactttgcccagtccttaatgaccaccgagcggctctctgggtcaggcctccactggccactgagccggactcgctcagagcccctgccccccagtgccaccgctcccccaccgccgggccccatgcagccccgcctggagcagctcaaaactcacgtccaggtgatcaagaggtcagccaagccgagtgagaagccccggctgcggcagataccctcggctgaagacctggagacagatggcgggggaccgggccaggtggtggacgatggcctggagcacagggagctgggccatgggcagcctgaggccagaggccccgctcctctccagcagcaccctcaggtgttgctctgggaacagcagcgactggctgggcggctcccccggggcagcaccggggacactgtgctgcttcctctggcccagggtgggcaccggcctctgtcccgggctcagtcttccccagccgcacctgcctcactgtcagccccagagcctgccagccaggcccgagtcctctccagctcagagacccctgccaggaccctgcccttcaccacagggctgatctatgactcggtcatgctgaagcaccagtgctcctgcggtgacaacagcaggcacccggagcacgccggccgcatccagagcatctggtcccggctgcaggagcgggggctccggagccagtgtgagtgtctccgaggccggaaggcctccctggaagagctgcagtcggtccactctgagcggcacgtgctcctctacggcaccaacccgctcagccgcctcaaactggacaacgggaagctggcagggctcctggcacagcggatgtttgtgatgctgccctgtggtggggttggggtggacactgacaccatctggaatgagcttcattcctccaatgcagcccgctgggccgctggcagtgtcactgacctcgccttcaaagtggcttctcgtgagctaaagaatggtttcgctgtggtgcggcccccaggacaccatgcagatcattcaacagccatgggcttctgcttcttcaactcagtggccatcgcctgccggcagctgcaacagcagagcaaggccagcaagatcctcattgtagactgggacgtgcaccatggcaacggcacccagcaaaccttctaccaagaccccagtgtgctctacatctccctgcatcgccatgacgacggcaacttcttcccggggagtggggctgtggatgaggtaggggctggcagcggtgagggcttcaatgtcaatgtggcctgggctggaggtctggacccccccatgggggatcctgagtacctggctgctttcaggatagtcgtgatgcccatcgcccgagagttctctccagacctagtcctggtgtctgctggatttgatgctgctgagggtcacccggccccactgggtggctaccatgtttctgccaaatgttttggatacatgacgcagcaactgatgaacctggcaggaggcgcagtggtgctggccttggagggtggccatgacctcacagccatctgtgacgcctctgaggcctgtgtggctgctcttctgggtaacagggtggatcccctttcagaagaaggctggaaacagaaacccaacctcaatgccatccgctctctggaggccgtgatccgggtgcacagtaaatactggggctgcatgcagcgcctggcctcctgtccagactcctgggtgcctagagtgccaggggctgacaaagaagaagtggaggcagtgaccgcactggcgtccctctctgtgggcatcctggctgaagataggccctcggagcagctggtggaggaggaagaacctatgaatctctaaggctctggaaccatctgcccgcccaccatgcccttgggacctggttctcttctaacccctggcaatagcccccattcctgggtctttagagatcctgtgggcaagtagttggaaccagagaacagcctgcctgctttgacagttatcccagggagcgtgagaaaatccctgggtctagaatgggaactggagaggaccctgagaggagacgggctgggcggcgacccccacagggctctcgagaacagattctcccctccagtatgggccctggctgtggcccccattcctcaggactgcacagaggaggactggctccggctccgtcgggctcacccttaaccactattcctggctctgcaaaccccagactttgcacacagcctcaggctccacacagaaatgtgaacttggcctcagacaggctggcccttcctaggctctaggggctaggggggagtggggagccaagaggtcccatattcctgagtgcaggggtagtccctctcacctgcttcctcagacgactctggaagcttccctctaccactgggcactgagacgaagctccctgacagccgagactggcagccctccatctggtccgtaccctcgccagaggcccccctacatcaacctcctggcgatgccctggtggagcagatgggtgctctgggagtcctgtgcttcctgatccaatggtgccaaacccttcatctccccaagaagcgcagcatacccctgggacccctcggccactgcccactcggggagccttctctgtttctggggcctcccccaccatagctctgattcccaccccacataggagtagcctgactgagggggaaggggtgggagagaagatacagacatggaggaggggaggctgctctggcaaagtcttcaaggcttttgggggtccaggcctggggtcaagaaggaaaatgtgtgtgagcatgtgtgtgagtgaggcgtgtgtgtgagcgtgtgtgtgagtgaggcgtgtgtgtgtgtctttcctaggacccaccataccctgtgtatgtatgcatgtttttgtaaaaaggaagaaaatggaaaaaaatctgaacaataaatgttttatttgctttaaaagtgcctctgaaagggccccccagaagtgagcagtgcgccgtcaagcgggtgtgcagggcacacagctgcacggcacagtgtgggtctgagtcactgccggaggagggaccagggtggtctgggccgcagcccctttaacaatctgcccttcctgccctgcaggaagaacccattctgaacacaccctggctgtccctggctgccccactttggggtgacaaagaggaggcagccctgggctgagtccacagagaccagccctgatatggcaggagtgggggtggggtgggggagtgggaatacaggagctcagccccagctcaccacggcatccccgaagagttgtgactcagacacacctgggtttaagtcccagctgggagct

SEQ ID NO: 22550 - protein, 915 aa, Homo sapiens
MDLRVGQRPPVEPPPEPTLLALQRPQRLHHHLFLAGLQQQRSVEPMRLSMDTPMPELQVGPQEQELRQLLHKDKSKRSAVASSVVKQKLAEVILKKQQAALERTVHPNSPGIPYRTLEPLETEGATRSMLSSFLPPVPSLPSDPPEHFPLRKTVSEPNLKLRYKPKKSLERRKNPLLRKESAPPSLRRRPAETLGDSSPSSSSTPASGCSSPNDSEHGPNPILGSEADSDRRTHPTLGPRGPILGSPHTPLFLPHGLEPEAGGTLPSRLQPILLLDPSGSHAPLLTVPGLGPLPFHFAQSLMTTERLSGSGLHWPLSRTRSEPLPPSATAPPPPGPMQPRLEQLKTHVQVIKRSAKPSEKPRLRQIPSAEDLETDGGGPGQVVDDGLEHRELGHGQPEARGPAPLQQHPQVLLWEQQRLAGRLPRGSTGDTVLLPLAQGGHRPLSRAQSSPAAPASLSAPEPASQARVLSSSETPARTLPFTTGLIYDSVMLKHQCSCGDNSRHPEHAGRIQSIWSRLQERGLRSQCECLRGRKASLEELQSVHSERHVLLYGTNPLSRLKLDNGKLAGLLAQRMFVMLPCGGVGVDTDTIWNELHSSNAARWAAGSVTDLAFKVASRELKNGFAVVRPPGHHADHSTAMGFCFFNSVAIACRQLQQQSKASKILIVDWDVHHGNGTQQTFYQDPSVLYISLHRHDDGNFFPGSGAVDEVGAGSGEGFNVNVAWAGGLDPPMGDPEYLAAFRIVVMPIAREFSPDLVLVSAGFDAAEGHPAPLGGYHVSAKCFGYMTQQLMNLAGGAVVLALEGGHDLTAICDASEACVAALLGNRVDPLSEEGWKQKPNLNAIRSLEAVIRVHSKYWGCMQRLASCPDSWVPRVPGADKEEVEAVTALASLSVGILAEDRPSEQLVEEEEPMNL

SEQ ID NO: 22551 - DNA, 4478 bp, Homo sapiens
gccgtctcacagtcgctctgcagcctccggcgactggggggatgtgaggccggcgccccagccccccgccccgccatgagccccccgctctgagggccccggcccctggatgcacagccccggcgctgatgggacccaggtgagcccgggtgcccactactgcagccccactggcgcaggctgccccaggccctgtgcagacacaccaggccctcagccgcagcccatggacctgcgggtgggccagcggcccccagtggagcccccaccagagcccacattgctggccctgcagcgtccccagcgcctgcaccaccacctcttcctagcaggcctgcagcagcagcgctcggtggagcccatgaggctctccatggacacgccgatgcccgagttgcaggtgggaccccaggaacaagagctgcggcagcttctccacaaggacaagagcaagcgaagtgctgtagccagcagcgtggtcaagcagaagctagcggaggtgattctgaaaaaacagcaggcggccctagaaagaacagtccatcccaacagccccggcattccctacagaaccctggagcccctggagacggaaggagccacccgctccatgctcagcagctttttgcctcctgttcccagcctgcccagtgaccccccagagcacttccctctgcgcaagacagtctctgagcccaacctgaagctgcgctataagcccaagaagtccctggagcggaggaagaatccactgctccgaaaggagagtgcgccccccagcctccggcggcggcccgcagagaccctcggagactcctccccaagtagtagcagcacgcccgcatcagggtgcagctcccccaatgacagcgagcacggccccaatcccatcctgggctcggaggctgacagtgaccgcaggacccatccgactctgggccctcgggggccaatcctggggagcccccacactcccctcttcctgccccatggcttggagcccgaggctgggggcaccttgccctctcgcctgcagcccattctcctcctggacccctcaggctctcatgccccgctgctgactgtgcccgggcttgggcccttgcccttccactttgcccagtccttaatgaccaccgagcggctctctgggtcaggcctccactggccactgagccggactcgctcagagcccctgccccccagtgccaccgctcccccaccgccgggccccatgcagccccgcctggagcagctcaaaactcacgtccaggtgatcaagaggtcagccaagccgagtgagaagccccggctgcggcagataccctcggctgaagacctggagacagatggcgggggaccgggccaggtggtggacgatggcctggagcacagggagctgggccatgggcagcctgaggccagaggccccgctcctctccagcagcaccctcaggtgttgctctgggaacagcagcgactggctgggcggctcccccggggcagcaccggggacactgtgctgcttcctctggcccagggtgggcaccggcctctgtcccgggctcagtcttccccagccgcacctgcctcactgtcagccccagagcctgccagccaggcccgagtcctctccagctcagagacccctgccaggaccctgcccttcaccacagggctgatctatgactcggtcatgctgaagcaccagtgctcctgcggtgacaacagcaggcacccggagcacgccggccgcatccagagcatctggtcccggctgcaggagcgggggctccggagccagtgtgagtgtctccgaggccggaaggcctccctggaagagctgcagtcggtccactctgagcggcacgtgctcctctacggcaccaacccgctcagccgcctcaaactggacaacgggaagctggcagggctcctggcacagcggatgtttgtgatgctgccctgtggtggggttggggtggacactgacaccatctggaatgagcttcattcctccaatgcagcccgctgggccgctggcagtgtcactgacctcgccttcaaagtggcttctcgtgagctaaagaatggtttcgctgtggtgcggcccccaggacaccatgcagatcattcaacagccatgggcttctgcttcttcaactcagtggccatcgcctgccggcagctgcaacagcagagcaaggccagcaagatcctcattgtagactgggacgtgcaccatggcaacggcacccagcaaaccttctaccaagaccccagtgtgctctacatctccctgcatcgccatgacgacggcaacttcttcccggggagtggggctgtggatgaggtaggggctggcagcggtgagggcttcaatgtcaatgtggcctgggctggaggtctggacccccccatgggggatcctgagtacctggctgctttcaggatagtcgtgatgcccatcgcccgagagttctctccagacctagtcctggtgtctgctggatttgatgctgctgagggtcacccggccccactgggtggctaccatgtttctgccaaatgttttggatacatgacgcagcaactgatgaacctggcaggaggcgcagtggtgctggccttggagggtggccatgacctcacagccatctgtgacgcctctgaggcctgtgtggctgctcttctgggtaacagggtggatcccctttcagaagaaggctggaaacagaaacccaacctcaatgccatccgctctctggaggccgtgatccgggtgcacagtaaatactggggctgcatgcagcgcctggcctcctgtccagactcctgggtgcctagagtgccaggggctgacaaagaagaagtggaggcagtgaccgcactggcgtccctctctgtgggcatcctggctgaagataggccctcggagcagctggtggaggaggaagaacctatgaatctctaaggctctggaaccatctgcccgcccaccatgcccttgggacctggttctcttctaacccctggcaatagcccccattcctgggtctttagagatcctgtgggcaagtagttggaaccagagaacagcctgcctgctttgacagttatcccagggagcgtgagaaaatccctgggtctagaatgggaactggagaggaccctgagaggagacgggctgggcggcgacccccacagggctctcgagaacagattctcccctccagtatgggccctggctgtggcccccattcctcaggactgcacagaggaggactggctccggctccgtcgggctcacccttaaccactattcctggctctgcaaaccccagactttgcacacagcctcaggctccacacagaaatgtgaacttggcctcagacaggctggcccttcctaggctctaggggctaggggggagtggggagccaagaggtcccatattcctgagtgcaggggtagtccctctcacctgcttcctcagacgactctggaagcttccctctaccactgggcactgagacgaagctccctgacagccgagactggcagccctccatctggtccgtaccctcgccagaggcccccctacatcaacctcctggcgatgccctggtggagcagatgggtgctctgggagtcctgtgcttcctgatccaatggtgccaaacccttcatctccccaagaagcgcagcatacccctgggacccctcggccactgcccactcggggagccttctctgtttctggggcctcccccaccatagctctgattcccaccccacataggagtagcctgactgagggggaaggggtgggagagaagatacagacatggaggaggggaggctgctctggcaaagtcttcaaggcttttgggggtccaggcctggggtcaagaaggaaaatgtgtgtgagcatgtgtgtgagtgaggcgtgtgtgtgagcgtgtgtgtgagtgaggcgtgtgtgtgtgtctttcctaggacccaccataccctgtgtatgtatgcatgtttttgtaaaaaggaagaaaatggaaaaaaatctgaacaataaatgttttatttgctttaaaagtgcctctgaaagggccccccagaagtgagcagtgcgccgtcaagcgggtgtgcagggcacacagctgcacggcacagtgtgggtctgagtcactgccggaggagggaccagggtggtctgggccgcagcccctttaacaatctgcccttcctgccctgcaggaagaacccattctgaacacaccctggctgtccctggctgccccactttggggtgacaaagaggaggcagccctgggctgagtccacagagaccagccctgatatggcaggagtgggggtggggtgggggagtgggaatacaggagctcagccccagctcaccacggcatccccgaagagttgtgactcagacacacctgggtttaagtcccagctgggagct

SEQ ID NO: 22552 - protein, 954 aa, Homo sapiens
MHSPGADGTQVSPGAHYCSPTGAGCPRPCADTPGPQPQPMDLRVGQRPPVEPPPEPTLLALQRPQRLHHHLFLAGLQQQRSVEPMRLSMDTPMPELQVGPQEQELRQLLHKDKSKRSAVASSVVKQKLAEVILKKQQAALERTVHPNSPGIPYRTLEPLETEGATRSMLSSFLPPVPSLPSDPPEHFPLRKTVSEPNLKLRYKPKKSLERRKNPLLRKESAPPSLRRRPAETLGDSSPSSSSTPASGCSSPNDSEHGPNPILGSEADSDRRTHPTLGPRGPILGSPHTPLFLPHGLEPEAGGTLPSRLQPILLLDPSGSHAPLLTVPGLGPLPFHFAQSLMTTERLSGSGLHWPLSRTRSEPLPPSATAPPPPGPMQPRLEQLKTHVQVIKRSAKPSEKPRLRQIPSAEDLETDGGGPGQVVDDGLEHRELGHGQPEARGPAPLQQHPQVLLWEQQRLAGRLPRGSTGDTVLLPLAQGGHRPLSRAQSSPAAPASLSAPEPASQARVLSSSETPARTLPFTTGLIYDSVMLKHQCSCGDNSRHPEHAGRIQSIWSRLQERGLRSQCECLRGRKASLEELQSVHSERHVLLYGTNPLSRLKLDNGKLAGLLAQRMFVMLPCGGVGVDTDTIWNELHSSNAARWAAGSVTDLAFKVASRELKNGFAVVRPPGHHADHSTAMGFCFFNSVAIACRQLQQQSKASKILIVDWDVHHGNGTQQTFYQDPSVLYISLHRHDDGNFFPGSGAVDEVGAGSGEGFNVNVAWAGGLDPPMGDPEYLAAFRIVVMPIAREFSPDLVLVSAGFDAAEGHPAPLGGYHVSAKCFGYMTQQLMNLAGGAVVLALEGGHDLTAICDASEACVAALLGNRVDPLSEEGWKQKPNLNAIRSLEAVIRVHSKYWGCMQRLASCPDSWVPRVPGADKEEVEAVTALASLSVGILAEDRPSEQLVEEEEPMNL

SEQ ID NO: 22553 - DNA, 1462 bp, Homo sapiens
tgtggagatgggacactcgctgagctcagactgaaggatcttggtggtaccctgccccaccgtggccagatcctagggcttccggtgccagccaggtgacctgctgttggtctggagtaagattcctgtgagtgacccaggcagcaatggtaaatactggggctgcatgcagcgcctggcctcctgtccagactcctgggtgcctagagtgccaggggctgacaaagaagaagtggaggcagtgaccgcactggcgtccctctctgtgggcatcctggctgaagataggccctcggagcagctggtggaggaggaagaacctatgaatctctaaggctctggaaccatctgcccgcccaccatgcccttgggacctggttctcttctaacccctggcaatagcccccattcctgggtctttagagatcctgtgggcaagtagttggaaccagagaacagcctgcctgctttgacagttatcccagggagcgtgagaaaatccctgggtctagaatgggaactggagaggaccctgagaggagacgggctgggcggcgacccccacagggctctcgagaacagattctcccctccagtatgggccctggctgtggcccccattcctcaggactgcacagaggaggactggctccggctccgtcgggctcacccttaaccactattcctggctctgcaaaccccagactttgcacacagcctcaggctccacacagaaatgtgaacttggcctcagacaggctggcccttcctaggctctaggggctaggggggagtggggagccaagaggtcccatattcctgagtgcaggggtagtccctctcacctgcttcctcagacgactctggaagcttccctctaccactgggcactgagacgaagctccctgacagccgagactggcagccctccatctggtccgtaccctcgccagaggcccccctacatcaacctcctggcgatgccctggtggagcagatgggtgctctgggagtcctgtgcttcctgatccaatggtgccaaacccttcatctccccaagaagcgcagcatacccctgggacccctcggccactgcccactcggggagccttctctgtttctggggcctcccccaccatagctctgattcccaccccacataggagtagcctgactgagggggaaggggtgggagagaagatacagacatggaggaggggaggctgctctggcaaagtcttcaaggcttttgggggtccaggcctggggtcaagaaggaaaatgtgtgtgagcatgtgtgtgagtgaggcgtgtgtgtgagcgtgtgtgtgagtgaggcgtgtgtgtgtgtctttcctaggacccaccataccctgtgtatgtatgcatgtttttgtaaaaaggaagaaaatggaaaaaaatctgaacaataaatgttttatttgctttaaaagtgcctctg

SEQ ID NO: 22554 - protein, 55 aa, Homo sapiens [sequence omitted]

SEQ ID NO: 22555 - DNA, 6427 bp, Homo sapiens
caccggcctctgtcccgggctcagtcttccccagccgcacctgcctcactgtcagccccagagcctgccagccaggcccgagtcctctccagctcagagacccctgccaggaccctgcccttcaccacaggtgagaccgggaggagggtggcgggtggagggaggggctcggctgcacgagtccatgtgggtgtcttggtgtcacttgggacatttttagaggccacagagtgcttagccttgttaggcccacgtagtacccatggagcacatggaacagctggttattgcatttggccgatgaggaccaaggctcacgaaatctaaggtgacaagcctgtggtcaaatagcaagtggtagtcaagccaggataagaattccagtctcctgccaatgcactcagcccttttaaaaaatgatatttattactgttgctctgcttgtaaaaagagctcagaagtattttagacattttgaagagtacagaaaaacctaagaagaaaagaaaaatcaccaaccagtatcccaccacccagaagtaaaccctctgaaattctgctgtatttcagtccaggctttgttctggccatatgtacatgtacagatgccatgaacacatgaactacgttttgtatcctgctttacttagttaacatattatgaatccttcttggcataattagtctttaaaactgagagtctcatagtatttcattaatgtatttcatttttactgagggatcccttatcagttagacatttagattatagcttatttgaatttccttatgcataaatctttcctcatgcttgggattatttcccaaggttcactctaaagaagtagcattcctgggtcacatggtgtgagcattttgagagtcgttggtgtcctagacgcacagaaattgaccctcccacccgcaatgagcaggaccctcctctgaagacttcccacgggtcagactgaaatagtcacttctccaaagctggatttgtctatcacatggtccagtgtcatcgtgggcttcttagctcccggtttgggggtttcctaggaattcttttccctcctgctgccccttggtagcctctctgggttcatgacacgtgtgtgagatgctgtacgttaggcctcatgctttgctctgagcacttgagggcctggtgctgggccctcgagtcctgggccacccagcagtcgtgtccgcatgtgggaaggccgtggctctgtggcagccatgttggctggagctgtgttgatgtgttggctgctgccacctggggaagtgtctgggcgtgtgtggacaggtgtgaggggctggggctggggtaggggcaggatgaaatgcaggcctgtgtgggtgtgaggggtgtgtacccgcccggctccatgtgggtgcctgctgtggcggtgctggcgtgttctctgcagccaaggccatggggcgtgaggactccctgggtccccgctctgacccttgctcctgcagggctgatctatgactcggtcatgctgaagcaccagtgctcctgcggtgacaacagcaggcacccggagcacgccggccgcatccagagcatctggtcccggctgcaggagcgggggctccggagccagtgtgagtgtctccgaggccggaaggcctccctggaagagctgcagtcggtccactctgagcggcacgtgctcctctacggcaccaacccgctcagccgcctcaaactggacaacgggaagctggcagggctcctggcacagcggatgtttgtgatgctgccctgtggtggggttggggtaagtgtgcccaggggtctcaggggggcgttgccagggctctcagctctcctccctgtggttctcccaggcccagcccctgcagaacctctgcttgttgtggttctgccagacagggtgagccagggacttcctgaggtgccccctgcagcaggaagctccttttggacaggcgtgtctcggacccacagtctcccccgaatgcggagtccagcctaagccttcccctagaaggtgtctggtagatgttgagtgaggtttcaggagcagggccaaggctggggcttaggatcatctctcccttcaaagacccccatgactgggcattggccgccaggctgctctgtctgctcttaagtggcaagttggggtacctcagcctggtccccagaccttgggctgcctggtgtgacatcacggtggtgcttccggtgtccttggcgatcccagcactccccactccgggacatagccccaaactccgctcgcgagctttgcttcctaagtcctcacccctttgtgaagggagcttcccgctccctccggctcagctctcctcgcctaacactatccctgcagtagtttctcaagcaaggtgtgtagaggcaggggatggaggcctcattccggagggaaagtgggagctgtagctggtgggggactttgggagccagtcagtgccctattcacaacttcccatttcttgccactttctggtttttccaactgttgttgcttctgttttctcctccctcctctccctctctgtctttctctctctctctctttctccagcctcttgcgactctctctgccttcctcgcctctcttggtctgcctcgccctccccatctccccatcatgccccccggcccctccctagccttgaggcccagggactgggtttggggggcctcccagcctgggctaggggccctgagtggaagacagtggtgcagacggcccctccagctccgaccgtcccgcagggcctgagcagagtcagctggggcttaaaaccccctcccggcccaaaccccaagtcccgcccaggtaacgccatgccccctcccctgaccggggaggcaggcgtgatgctgccagcagagtgctggccagataatgggctggtgctgggacttaagctgggaaaaagtcatgctgggattgggggacacaggaggccttgcctttgggcggtggggcactggggaggcagcactgtctgcccagctccctgcccctggggtcctggccgtggggtggggaccacccccttgggccctggctcctgtgtgaagccttggatgatgcgggccctgactctggctcccgcaggtggacactgacaccatctggaatgagcttcattcctccaatgcagcccgctgggccgctggcagtgtcactgacctcgccttcaaagtggcttctcgtgagctaaagaatggtttcgctgtggtgcggcccccaggacaccatgcagatcattcaacagccatgggcttctgcttcttcaactcagtggccatcgcctgccggcagctgcaacagcagagcaaggccagcaagatcctcattgtagactgggacgtgcaccatggcaacggcacccagcaaaccttctaccaagaccccagtgtgctctacatctccctgcatcgccatgacgacggcaacttcttcccggggagtggggctgtggatgaggtaggggctggcagcggtgagggcttcaatgtcaatgtggcctgggctggaggtctggacccccccatgggggatcctgagtacctggctgctttcaggatagtcgtgatgcccatcgcccgagagttctctccagacctagtcctggtgtctgctggatttgatgctgctgagggtcacccggccccactgggtggctaccatgtttctgccaaatgttttggatacatgacgcagcaactgatgaacctggcaggaggcgcagtggtgctggccttggagggtggccatgacctcacagccatctgtgacgcctctgaggcctgtgtggctgctcttctgggtaacagggtggatcccctttcagaagaaggctggaaacagaaacccaacctcaatgccatccgctctctggaggccgtgatccgggtgcacagtaagtgtggagatgggacactcgctgagctcagactgaaggatcttggtggtaccctgccccaccgtggccagatcctagggcttccggtgccagccaggtgacctgctgttggtctggagtaagattcctgtgagtgacccaggcagcaatggtgagcaccccccagtgaggggttatcctctgagcccccccgatggagccagcagggcctaccagacagtggcccctcaaggtagggactggcctccatctctagcgacagccctagaccagggccaggtcaagagcaacactcaggccttgtttgccaaaaggcctggttcccatccctcccctcagtcctggccacaggcgtctcaggagctctgctggcttgggggctgcgtcttgggataacccccacatttgtaaagtactttaaattttcaacttcaactcaacatctattgagcatcttatgtcaagacccataatctatactagggataaaaatgagtaaaatagattcccatatcaagggctgggtaggggagccgtgatgtctttacataatggtaaagacatggctgattcctcttacggtgggtgccctcacactgagccagattccaggacatggttcctcacagcagcaggcaggaggagcattctcctggcctgggcacccatgcagagcggccgtggtgatggtcagttctcccatgttgtgttcgtcccacctcccaggccctcctttcctgagtgctgggctgagcactggtgggggctgtgtttaagtgggaggcccgagcttggggctctgggaggtcactgtgacacagaccctgtctgcaggcaagcaggctctcctgatgctctcaggagccccgcacctgtggggaatgagtcaaaggtggccttgcagccacaggggatgagagaaaggctgggcacctgctaggactccctcacagccatgttgaacccactctgtgtaccctgtcaggctgtgcgggagtgggagcgaagtgaggagaggggcaggtgggagagccgaccctaagtggaggacaggcccgctcctccggggccctgggcctgagacaccaacctcaatatccggtctaggacgcagtgtggaggggcttgctttctccaaccctttctgacctggcatcttaccccaggtaaatactggggctgcatgcagcgcctggcctcctgtccagactcctgggtgcctagagtgccaggggctgacaaagaagaagtggaggcagtgaccgcactggcgtccctctctgtgggcatcctggctgaagataggccctcggagcagctggtggaggaggaagaacctatgaatctctaaggctctggaaccatctgcccgcccaccatgcccttgggacctggttctcttctaacccctggcaatagcccccattcctgggtctttagagatcctgtgggcaagtagttggaaccagagaacagcctgcctgctttgacagttatcccagggagcgtgagaaaatccctgggtctagaatgggaactggagaggaccctgagaggagacgggctgggcggcgacccccacagggctctcgagaacagattctcccctccagtatgggccctggctgtggcccccattcctcaggactgcacagaggaggactggctccggctccgtcgggctcacccttaaccactattcctggctctgcaaaccccagactttgcacacagcctcaggctccacacagaaatgtgaacttggcctcagacaggctggcccttcctaggctctaggggctaggggggagtggggagccaagaggtcccatattcctgagtgcaggggtagtccctctcacctgcttcctcagacgactctggaagcttccctctaccactgggcactgagacgaagctccctgacagccgagactggcagccctccatctggtccgtaccctcgccagaggcccccctacatcaacctcctggcgatgccctggtggagcagatgggtgctctgggagtcctgtgcttcctgatccaatggtgccaaacccttcatctccccaagaagcgcagcatacccctgggacccctcggccactgcccactcggggagccttctctgtttctggggcctcccccaccatagctctgattcccaccccacataggagtagcctgactgagggggaaggggtgggagagaagatacagacatggaggaggggaggctgctctggcaaagtcttcaaggcttttgggggtccaggcctggggtcaagaaggaaaatgtgtgtgagcatgtgtgtgagtgaggcgtgtgtgtgagcgtgtgtgtgagtgaggcgtgtgtgtgtgtctttcctaggacccaccataccctgtgtatgtatgcatgtttttgtaaaaaggaagaaaatggaaaaaaatctgaacaataaatgttttatttgctttaaaagtgcctctg

SEQ ID NO: 22556 - protein, 249 aa, Homo sapiens; identical to SEQ ID NO: 22548

SEQ ID NO: 22557 - DNA, 4091 bp, Homo sapiens
ataatacctaccttgcaggaccacgacaggattaagtgaggaaaaacccccatgagagtgttttgccattgtcaagtgagcctgagggaggctgaggggggatcaggctgtatcatgcccccgaggacaaactttccagtttaccctgctccctctctctgtccctaggctgccccaggccctgtgcagacacaccaggccctcagccgcagcccatggacctgcgggtgggccagcggcccccagtggagcccccaccagagcccacattgctggccctgcagcgtccccagcgcctgcaccaccacctcttcctagcaggcctgcagcagcagcgctcggtggagcccatgaggctctccatggacacgccgatgcccgagttgcaggtgggaccccaggaacaagagctgcggcagcttctccacaaggacaagagcaagcgaagtgctgtagccagcagcgtggtcaagcagaagctagcggaggtgattctgaaaaaacagcaggcggccctagaaagaacagtccatcccaacagccccggcattccctacagaaccctggagcccctggagacggaaggagccacccgctccatgctcagcagctttttgcctcctgttcccagcctgcccagtgaccccccagagcacttccctctgcgcaagacagtctctgagcccaacctgaagctgcgctataagcccaagaagtccctggagcggaggaagaatccactgctccgaaaggagagtgcgccccccagcctccggcggcggcccgcagagaccctcggagactcctccccaagtagtagcagcacgcccgcatcagggtgcagctcccccaatgacagcgagcacggccccaatcccatcctgggctcggaggctgacagtgaccgcaggacccatccgactctgggccctcgggggccaatcctggggagcccccacactcccctcttcctgccccatggcttggagcccgaggctgggggcaccttgccctctcgcctgcagcccattctcctcctggacccctcaggctctcatgccccgctgctgactgtgcccgggcttgggcccttgcccttccactttgcccagtccttaatgaccaccgagcggctctctgggtcaggcctccactggccactgagccggactcgctcagagcccctgccccccagtgccaccgctcccccaccgccgggccccatgcagccccgcctggagcagctcaaaactcacgtccaggtgatcaagaggtcagccaagccgagtgagaagccccggctgcggcagataccctcggctgaagacctggagacagatggcgggggaccgggccaggtggtggacgatggcctggagcacagggagctgggccatgggcagcctgaggccagaggccccgctcctctccagcagcaccctcaggtgttgctctgggaacagcagcgactggctgggcggctcccccggggcagcaccggggacactgtgctgcttcctctggcccagggtgggcaccggcctctgtcccgggctcagtcttccccagccgcacctgcctcactgtcagccccagagcctgccagccaggcccgagtcctctccagctcagagacccctgccaggaccctgcccttcaccacagggctgatctatgactcggtcatgctgaagcaccagtgctcctgcggtgacaacagcaggcacccggagcacgccggccgcatccagagcatctggtcccggctgcaggagcgggggctccggagccagtgtgagtgtctccgaggccggaaggcctccctggaagagctgcagtcggtccactctgagcggcacgtgctcctctacggcaccaacccgctcagccgcctcaaactggacaacgggaagctggcagggctcctggcacagcggatgtttgtgatgctgccctgtggtggggttggggtggacactgacaccatctggaatgagcttcattcctccaatgcagcccgctgggccgctggcagtgtcactgacctcgccttcaaagtggcttctcgtgagctaaagaatggtttcgctgtggtgcggcccccaggacaccatgcagatcattcaacagccatgggcttctgcttcttcaactcagtggccatcgcctgccggcagctgcaacagcagagcaaggccagcaagatcctcattgtagactgggacgtgcaccatggcaacggcacccagcaaaccttctaccaagaccccagtgtgctctacatctccctgcatcgccatgacgacggcaacttcttcccggggagtggggctgtggatgaggtaggggctggcagcggtgagggcttcaatgtcaatgtggcctgggctggaggtctggacccccccatgggggatcctgagtacctggctgctttcaggatagtcgtgatgcccatcgcccgagagttctctccagacctagtcctggtgtctgctggatttgatgctgctgagggtcacccggccccactgggtggctaccatgtttctgccaaatgttttggatacatgacgcagcaactgatgaacctggcaggaggcgcagtggtgctggccttggagggtggccatgacctcacagccatctgtgacgcctctgaggcctgtgtggctgctcttctgggtaacagggtggatcccctttcagaagaaggctggaaacagaaacccaacctcaatgccatccgctctctggaggccgtgatccgggtgcacagtaaatactggggctgcatgcagcgcctggcctcctgtccagactcctgggtgcctagagtgccaggggctgacaaagaagaagtggaggcagtgaccgcactggcgtccctctctgtgggcatcctggctgaagataggccctcggagcagctggtggaggaggaagaacctatgaatctctaaggctctggaaccatctgcccgcccaccatgcccttgggacctggttctcttctaacccctggcaatagcccccattcctgggtctttagagatcctgtgggcaagtagttggaaccagagaacagcctgcctgctttgacagttatcccagggagcgtgagaaaatccctgggtctagaatgggaactggagaggaccctgagaggagacgggctgggcggcgacccccacagggctctcgagaacagattctcccctccagtatgggccctggctgtggcccccattcctcaggactgcacagaggaggactggctccggctccgtcgggctcacccttaaccactattcctggctctgcaaaccccagactttgcacacagcctcaggctccacacagaaatgtgaacttggcctcagacaggctggcccttcctaggctctaggggctaggggggagtggggagccaagaggtcccatattcctgagtgcaggggtagtccctctcacctgcttcctcagacgactctggaagcttccctctaccactgggcactgagacgaagctccctgacagccgagactggcagccctccatctggtccgtaccctcgccagaggcccccctacatcaacctcctggcgatgccctggtggagcagatgggtgctctgggagtcctgtgcttcctgatccaatggtgccaaacccttcatctccccaagaagcgcagcatacccctgggacccctcggccactgcccactcggggagccttctctgtttctggggcctcccccaccatagctctgattcccaccccacataggagtagcctgactgagggggaaggggtgggagagaagatacagacatggaggaggggaggctgctctggcaaagtcttcaaggcttttgggggtccaggcctggggtcaagaaggaaaatgtgtgtgagcatgtgtgtgagtgaggcgtgtgtgtgagcgtgtgtgtgagtgaggcgtgtgtgtgtgtctttcctaggacccaccataccctgtgtatgtatgcatgtttttgtaaaaaggaagaaaatggaaaaaaatctgaacaataaatgttttatttgctttaaaagtgcctctg

SEQ ID NO: 22558 - protein, 915 aa, Homo sapiens; identical to SEQ ID NO: 22550

SEQ ID NO: 22559 - DNA, 4202 bp, Homo sapiens
ataatacctaccttgcaggaccacgacaggattaagtgaggaaaaacccccatgagagtgttttgccattgtcaagtgagcctgagggaggctgaggggggatcaggctgtatcatgcccccgaggacaaactttccagtttaccctgctccctctctctgtccctaggctgccccaggccctgtgcagacacaccaggccctcagccgcagcccatggacctgcgggtgggccagcggcccccagtggagcccccaccagagcccacattgctggccctgcagcgtccccagcgcctgcaccaccacctcttcctagcaggcctgcagcagcagcgctcggtggagcccatgaggctctccatggacacgccgatgcccgagttgcaggtgggaccccaggaacaagagctgcggcagcttctccacaaggacaagagcaagcgaagtgctgtagccagcagcgtggtcaagcagaagctagcggaggtgattctgaaaaaacagcaggcggccctagaaagaacagtccatcccaacagccccggcattccctacagaaccctggagcccctggagacggaaggagccacccgctccatgctcagcagctttttgcctcctgttcccagcctgcccagtgaccccccagagcacttccctctgcgcaagacagtctctgagcccaacctgaagctgcgctataagcccaagaagtccctggagcggaggaagaatccactgctccgaaaggagagtgcgccccccagcctccggcggcggcccgcagagaccctcggagactcctccccaagtagtagcagcacgcccgcatcagggtgcagctcccccaatgacagcgagcacggccccaatcccatcctgggctcggaggcgctcttgggccagcggctgcggctgcaggagacttctgtggccccgttcgccttgccgacagtgtccttgctgcccgcaatcactctggggctgcccgcccctgccagggctgacagtgaccgcaggacccatccgactctgggccctcgggggccaatcctggggagcccccacactcccctcttcctgccccatggcttggagcccgaggctgggggcaccttgccctctcgcctgcagcccattctcctcctggacccctcaggctctcatgccccgctgctgactgtgcccgggcttgggcccttgcccttccactttgcccagtccttaatgaccaccgagcggctctctgggtcaggcctccactggccactgagccggactcgctcagagcccctgccccccagtgccaccgctcccccaccgccgggccccatgcagccccgcctggagcagctcaaaactcacgtccaggtgatcaagaggtcagccaagccgagtgagaagccccggctgcggcagataccctcggctgaagacctggagacagatggcgggggaccgggccaggtggtggacgatggcctggagcacagggagctgggccatgggcagcctgaggccagaggccccgctcctctccagcagcaccctcaggtgttgctctgggaacagcagcgactggctgggcggctcccccggggcagcaccggggacactgtgctgcttcctctggcccagggtgggcaccggcctctgtcccgggctcagtcttccccagccgcacctgcctcactgtcagccccagagcctgccagccaggcccgagtcctctccagctcagagacccctgccaggaccctgcccttcaccacagggctgatctatgactcggtcatgctgaagcaccagtgctcctgcggtgacaacagcaggcacccggagcacgccggccgcatccagagcatctggtcccggctgcaggagcgggggctccggagccagtgtgagtgtctccgaggccggaaggcctccctggaagagctgcagtcggtccactctgagcggcacgtgctcctctacggcaccaacccgctcagccgcctcaaactggacaacgggaagctggcagggctcctggcacagcggatgtttgtgatgctgccctgtggtggggttggggtggacactgacaccatctggaatgagcttcattcctccaatgcagcccgctgggccgctggcagtgtcactgacctcgccttcaaagtggcttctcgtgagctaaagaatggtttcgctgtggtgcggcccccaggacaccatgcagatcattcaacagccatgggcttctgcttcttcaactcagtggccatcgcctgccggcagctgcaacagcagagcaaggccagcaagatcctcattgtagactgggacgtgcaccatggcaacggcacccagcaaaccttctaccaagaccccagtgtgctctacatctccctgcatcgccatgacgacggcaacttcttcccggggagtggggctgtggatgaggtaggggctggcagcggtgagggcttcaatgtcaatgtggcctgggctggaggtctggacccccccatgggggatcctgagtacctggctgctttcaggatagtcgtgatgcccatcgcccgagagttctctccagacctagtcctggtgtctgctggatttgatgctgctgagggtcacccggccccactgggtggctaccatgtttctgccaaatgttttggatacatgacgcagcaactgatgaacctggcaggaggcgcagtggtgctggccttggagggtggccatgacctcacagccatctgtgacgcctctgaggcctgtgtggctgctcttctgggtaacagggtggatcccctttcagaagaaggctggaaacagaaacccaacctcaatgccatccgctctctggaggccgtgatccgggtgcacagtaaatactggggctgcatgcagcgcctggcctcctgtccagactcctgggtgcctagagtgccaggggctgacaaagaagaagtggaggcagtgaccgcactggcgtccctctctgtgggcatcctggctgaagataggccctcggagcagctggtggaggaggaagaacctatgaatctctaaggctctggaaccatctgcccgcccaccatgcccttgggacctggttctcttctaacccctggcaatagcccccattcctgggtctttagagatcctgtgggcaagtagttggaaccagagaacagcctgcctgctttgacagttatcccagggagcgtgagaaaatccctgggtctagaatgggaactggagaggaccctgagaggagacgggctgggcggcgacccccacagggctctcgagaacagattctcccctccagtatgggccctggctgtggcccccattcctcaggactgcacagaggaggactggctccggctccgtcgggctcacccttaaccactattcctggctctgcaaaccccagactttgcacacagcctcaggctccacacagaaatgtgaacttggcctcagacaggctggcccttcctaggctctaggggctaggggggagtggggagccaagaggtcccatattcctgagtgcaggggtagtccctctcacctgcttcctcagacgactctggaagcttccctctaccactgggcactgagacgaagctccctgacagccgagactggcagccctccatctggtccgtaccctcgccagaggcccccctacatcaacctcctggcgatgccctggtggagcagatgggtgctctgggagtcctgtgcttcctgatccaatggtgccaaacccttcatctccccaagaagcgcagcatacccctgggacccctcggccactgcccactcggggagccttctctgtttctggggcctcccccaccatagctctgattcccaccccacataggagtagcctgactgagggggaaggggtgggagagaagatacagacatggaggaggggaggctgctctggcaaagtcttcaaggcttttgggggtccaggcctggggtcaagaaggaaaatgtgtgtgagcatgtgtgtgagtgaggcgtgtgtgtgagcgtgtgtgtgagtgaggcgtgtgtgtgtgtctttcctaggacccaccataccctgtgtatgtatgcatgtttttgtaaaaaggaagaaaatggaaaaaaatctgaacaataaatgttttatttgctttaaaagtgcctctg

SEQ ID NO: 22560 - protein, 952 aa, Homo sapiens; identical to SEQ ID NO: 2969

SEQ ID NO: 22561 - DNA, 4102 bp, Homo sapiens
gccgtctcacagtcgctctgcagcctccggcgactggggggatgtgaggccggcgccccagccccccgccccgccatgagccccccgctctgagggccccggcccctggatgcacagccccggcgctgatgggacccaggtgagcccgggtgcccactactgcagccccactggcgcaggctgccccaggccctgtgcagacacaccaggccctcagccgcagcccatggacctgcgggtgggccagcggcccccagtggagcccccaccagagcccacattgctggccctgcagcgtccccagcgcctgcaccaccacctcttcctagcaggcctgcagcagcagcgctcggtggagcccatgaggctctccatggacacgccgatgcccgagttgcaggtgggaccccaggaacaagagctgcggcagcttctccacaaggacaagagcaagcgaagtgctgtagccagcagcgtggtcaagcagaagctagcggaggtgattctgaaaaaacagcaggcggccctagaaagaacagtccatcccaacagccccggcattccctacagaaccctggagcccctggagacggaaggagccacccgctccatgctcagcagctttttgcctcctgttcccagcctgcccagtgaccccccagagcacttccctctgcgcaagacagtctctgagcccaacctgaagctgcgctataagcccaagaagtccctggagcggaggaagaatccactgctccgaaaggagagtgcgccccccagcctccggcggcggcccgcagagaccctcggagactcctccccaagtagtagcagcacgcccgcatcagggtgcagctcccccaatgacagcgagcacggccccaatcccatcctgggctcggaggctgacagtgaccgcaggacccatccgactctgggccctcgggggccaatcctggggagcccccacactcccctcttcctgccccatggcttggagcccgaggctgggggcaccttgccctctcgcctgcagcccattctcctcctggacccctcaggctctcatgccccgctgctgactgtgcccgggcttgggcccttgcccttccactttgcccagtccttaatgaccaccgagcggctctctgggtcaggcctccactggccactgagccggactcgctcagagcccctgccccccagtgccaccgctcccccaccgccgggccccatgcagccccgcctggagcagctcaaaactcacgtccaggtgatcaagaggtcagccaagccgagtgagaagccccggctgcggcagataccctcggctgaagacctggagacagatggcgggggaccgggccaggtggtggacgatggcctggagcacagggagctgggccatgggcagcctgaggccagaggccccgctcctctccagcagcaccctcaggtgttgctctgggaacagcagcgactggctgggcggctcccccggggcagcaccggggacactgtgctgcttcctctggcccagggtgggcaccggcctctgtcccgggctcagtcttccccagccgcacctgcctcactgtcagccccagagcctgccagccaggcccgagtcctctccagctcagagacccctgccaggaccctgcccttcaccacagggctgatctatgactcggtcatgctgaagcaccagtgctcctgcggtgacaacagcaggcacccggagcacgccggccgcatccagagcatctggtcccggctgcaggagcgggggctccggagccagtgtgagtgtctccgaggccggaaggcctccctggaagagctgcagtcggtccactctgagcggcacgtgctcctctacggcaccaacccgctcagccgcctcaaactggacaacgggaagctggcagggctcctggcacagcggatgtttgtgatgctgccctgtggtggggttggggtggacactgacaccatctggaatgagcttcattcctccaatgcagcccgctgggccgctggcagtgtcactgacctcgccttcaaagtggcttctcgtgagctaaagaatggtttcgctgtggtgcggcccccaggacaccatgcagatcattcaacagccatgggcttctgcttcttcaactcagtggccatcgcctgccggcagctgcaacagcagagcaaggccagcaagatcctcattgtagactgggacgtgcaccatggcaacggcacccagcaaaccttctaccaagaccccagtgtgctctacatctccctgcatcgccatgacgacggcaacttcttcccggggagtggggctgtggatgaggtaggggctggcagcggtgagggcttcaatgtcaatgtggcctgggctggaggtctggacccccccatgggggatcctgagtacctggctgctttcaggatagtcgtgatgcccatcgcccgagagttctctccagacctagtcctggtgtctgctggatttgatgctgctgagggtcacccggccccactgggtggctaccatgtttctgccaaatgttttggatacatgacgcagcaactgatgaacctggcaggaggcgcagtggtgctggccttggagggtggccatgacctcacagccatctgtgacgcctctgaggcctgtgtggctgctcttctgggtaacagggtggatcccctttcagaagaaggctggaaacagaaacccaacctcaatgccatccgctctctggaggccgtgatccgggtgcacagtaaatactggggctgcatgcagcgcctggcctcctgtccagactcctgggtgcctagagtgccaggggctgacaaagaagaagtggaggcagtgaccgcactggcgtccctctctgtgggcatcctggctgaagataggccctcggagcagctggtggaggaggaagaacctatgaatctctaaggctctggaaccatctgcccgcccaccatgcccttgggacctggttctcttctaacccctggcaatagcccccattcctgggtctttagagatcctgtgggcaagtagttggaaccagagaacagcctgcctgctttgacagttatcccagggagcgtgagaaaatccctgggtctagaatgggaactggagaggaccctgagaggagacgggctgggcggcgacccccacagggctctcgagaacagattctcccctccagtatgggccctggctgtggcccccattcctcaggactgcacagaggaggactggctccggctccgtcgggctcacccttaaccactattcctggctctgcaaaccccagactttgcacacagcctcaggctccacacagaaatgtgaacttggcctcagacaggctggcccttcctaggctctaggggctaggggggagtggggagccaagaggtcccatattcctgagtgcaggggtagtccctctcacctgcttcctcagacgactctggaagcttccctctaccactgggcactgagacgaagctccctgacagccgagactggcagccctccatctggtccgtaccctcgccagaggcccccctacatcaacctcctggcgatgccctggtggagcagatgggtgctctgggagtcctgtgcttcctgatccaatggtgccaaacccttcatctccccaagaagcgcagcatacccctgggacccctcggccactgcccactcggggagccttctctgtttctggggcctcccccaccatagctctgattcccaccccacataggagtagcctgactgagggggaaggggtgggagagaagatacagacatggaggaggggaggctgctctggcaaagtcttcaaggcttttgggggtccaggcctggggtcaagaaggaaaatgtgtgtgagcatgtgtgtgagtgaggcgtgtgtgtgagcgtgtgtgtgagtgaggcgtgtgtgtgtgtctttcctaggacccaccataccctgtgtatgtatgcatgtttttgtaaaaaggaagaaaatggaaaaaaatctgaacaataaatgttttatttgctttaaaagtgcctctg

SEQ ID NO: 22562 - protein, 954 aa, Homo sapiens; identical to SEQ ID NO: 22552

SEQ ID NO: 22563 - DNA, 675 bp, Homo sapiens
gggctgatctatgactcggtcatgctgaagcaccagtgctcctgcggtgacaacagcaggcacccggagcacgccggccgcatccagagcatctggtcccggctgcaggagcgggggctccggagccagtgtgagtgtctccgaggccggaaggcctccctggaagagctgcagtcggtccactctgagcggcacgtgctcctctacggcaccaacccgctcagccgcctcaaactggacaacgggaagctggcagggctcctggcacagcggatgtttgtgatgctgccctgtggtggggttggggtggacactgacaccatctggaatgagcttcattcctccaatgcagcccgctgggccgctggcagtgtcactgacctcgccttcaaagtggcttctcgtgagctaaagaatggtttcgctgtggtgcggcccccaggacaccatgcagatcattcaacagccatgggcttctgcttcttcaactcagtggccatcgcctgccggcagctgcaacagcagagcaaggccagcaagatcctcattgtagactgggtagtgatgataagaataatagcagataacatcagtacaccactaatcacatccagacactgatggttttacacatgatggatttaatcctgactataacccactttacagatgaaa

SEQ ID NO: 22564 - protein, 199 aa, Homo sapiens
MLKHQCSCGDNSRHPEHAGRIQSIWSRLQERGLRSQCECLRGRKASLEELQSVHSERHVLLYGTNPLSRLKLDNGKLAGLLAQRMFVMLPCGGVGVDTDTIWNELHSSNAARWAAGSVTDLAFKVASRELKNGFAVVRPPGHHADHSTAMGFCFFNSVAIACRQLQQQSKASKILIVDWVVMIRIIADNISTPLITSRH

SEQ ID NO: 22565 - DNA, 398 bp, Homo sapiens
cccagccgcacctgcctcactgtcagccccagagcctgccagccaggcccgagtcctctccagctcagagacccctgccaggaccctgcccttcaccacaggttcactctaaagaagtagcattcctgggtcacatggtgtgagcattttgagagtcgttggtgtcctagacgcacagaaattgaccctcccacccgcaatgagcaggaccctcctctgaagacttcccacgggtcagactgaaatagtcacttctccaaagctggatttgtctatcacatggtccagtgtcatcgtgggcttcttagctcccggtttgggggtttcctaggaattcttttccctcctgctgccccttggtagcctctctgggttcatgacacgtgtgtgagatgctg

SEQ ID NO: 22566 - protein, 39 aa, Homo sapiens
PSRTCLTVSPRACQPGPSPLQLRDPCQDPALHHRFTLKK

SEQ ID NO: 22567 - DNA, 343 bp, Homo sapiens
ccctgagaaggtcttggcctgaagacactcacctctctttccccaggagtgtcttttaggaagacagacaaatagccagcagttccacagcgactcaggggactgccagggttcaaatcctgctcctgctagatgccacttctgctgctcttcattgctgccctagacaaggccaggccctgcggcgtgctgcgagccttccttccgttatctttaccagctctacatggtcattcacagatgagaaagctgaagatcagagagctcacacatttcccacaaggttacacagtcagtaagagacactatcaggattccaatgacctgctgttaaagttcatct

SEQ ID NO: 22568 - protein, 69 aa, Homo sapiens
MPLLLLFIAALDKARPCGVLRAFLPLSLPALHGHSQMRKLKIRELTHFPQGYTVSKRHYQDSNDLLLKF

SEQ ID NO: 22569 - DNA, 353 bp, Homo sapiens
gtggagtgatagaaaaatcttccaatgaactatcaagaagacagacaaatagccagcagttccacagcgactcaggggactgccagggttcaaatcctgctcctgctagatgccacttctgctgctcttcattgctgccctagacaaggccaggccctgcggcgtgctgcgagccttccttccgttatctttaccagctctacatggtcattcacagatgagaaagctgaagatcagagagctcacacatttcccacaaggttacacagtcagtaagagacactatcaggattccaatgacctgctgttaaagttcatctcttattcactcattgcctccctcaaggctgaag

SEQ ID NO: 22570 - protein, 83 aa, Homo sapiens
MNYQEDRQIASSSTATQGTARVQILLLLDATSAALHCCPRQGQALRRAASLPSVIFTSSTWSFTDEKAEDQRAHTFPTRLHSQ

SEQ ID NO: 22571 - DNA, 1503 bp, Homo sapiens
ttcctgcgggcttttccccggtcccttgagacctcagccatgaggagttgctgtttgtttgacaaagaaacccaagtgggggcagagggcagaggctggaggcagggccttgcccagagatgcctccaccgctgcctaagtggctgctgactgatgttgagggaacagacaggagaaatgcatccattcctcagggacagagacacctgcacctccccccactgcaggccccgcttgtccagcgcctagtggggtctccctctcctgcctactcacgataaataatcggcccacagctcccaccccacccccttcagtgcccaccaacatcccattgccctggttatattctcacgggcagtagctgtggtgaggtgggttttcttcccatcactggagcaccaggcacgaacccacctgctgagagacccaaggaggaaaaacagacaaaaacagcctcacagaagaatatgacagctgtccctgtcaccaagctcacagttcctcgccctgggtctaaggggttggttgaggtggaagccctccttccacggatccatgtagcaggactgaattgtccccagtttgcagaaaagcacctgccgacctcgtcctccccctgccagtgccttacctcctgcccaggagagccagccctccctgtcctcctcggatcaccgagagtagccgagagcctgctcccccaccccctccccaggggagagggtctggagaagcagtgagccgcatcttctccatctggcagggtgggatggaggagaagaattttcagaccccagcggctgagtcatgatctccctgccgcctcaatgtggttgcaaggccgctgttcacccacagggctaagagctagcgctgccgcaccccagagtgtgggaagggagagcggggcagtctcgggtggctagtcagagagagtgtttgggggttccgtgatgtagggtaaggtgccttcttattctcactccaccacctaggccactcctccaaaggaagtctaggagctgggaggaaaagaaaagaggggaaaatgagtttttatggggctgaacggggagaaaaggtcatcatcgattctactttagaatgagagtgtgaaatagacatttgtaaatgtaaaacttttaaggtatatcattataactgaaggagaaggtgccccaaaatgcaagattttccacaagattcccagagacaggaaaatcctctggctggctaactggaagcatgtaggagaatccaagcgaggtcaacagagaaggcaggaatgtgtggcagatttagtgaaagctagagatatggcagcgaaaggatgtaaacagtgcctgctgaatgatttccaaagagaaaaaaagtttgccagaagtttgtcaagtcaaccaatgtagaaagctttgcttatggtaataaaaatggctcatacttatatagcacttactttgttgcaagtactgctgtaaataaatgctttatgcaaaccaa

SEQ ID NO: 22572 - protein, 90 aa, Homo sapiens [sequence omitted]

SEQ ID NO: 22573 - DNA, 4711 bp, Homo sapiens
gctatcccttaagggctcctgaacctagcccagctggacggagaaatggactctagcctcctctgatagcctcatgccaggccccgtgcacattgctttgcttgcctccctcaatcctcatagcttctctttgggaagcctttgggtctgaagtgtctgtgagacctcacagaagagcacccctgggctccacttacctgccccctgctccttcagggatggaggcaatggcggccagcacttccctgcctgaccctggagactttgaccggaacgtgccccggatctgtggggtgtgtggagaccgagccactggctttcacttcaatgctatgacctgtgaaggctgcaaaggcttcttcaggcgaagcatgaagcggaaggcactattcacctgccccttcaacggggactgccgcatcaccaaggacaaccgacgccactgccaggcctgccggctcaaacgctgtgtggacatcggcatgatgaaggagttcattctgacagatgaggaagtgcagaggaagcgggagatgatcctgaagcggaaggaggaggaggccttgaaggacagtctgcggcccaagctgtctgaggagcagcagcgcatcattgccatactgctggacgcccaccataagacctacgaccccacctactccgacttctgccagttccggcctccagttcgtgtgaatgatggtggagggagccatccttccaggcccaactccagacacactcccagcttctctggggactcctcctcctcctgctcagatcactgtatcacctcttcagacatgatggactcgtccagcttctccaatctggatctgagtgaagaagattcagatgacccttctgtgaccctagagctgtcccagctctccatgctgccccacctggctgacctggtcagttacagcatccaaaaggtcattggctttgctaagatgataccaggattcagagacctcacctctgaggaccagatcgtactgctgaagtcaagtgccattgaggtcatcatgttgcgctccaatgagtccttcaccatggacgacatgtcctggacctgtggcaaccaagactacaagtaccgcgtcagtgacgtgaccaaagccggacacagcctggagctgattgagcccctcatcaagttccaggtgggactgaagaagctgaacttgcatgaggaggagcatgtcctgctcatggccatctgcatcgtctccccagatcgtcctggggtgcaggacgccgcgctgattgaggccatccaggaccgcctgtccaacacactgcagacgtacatccgctgccgccacccgcccccgggcagccacctgctctatgccaagatgatccagaagctagccgacctgcgcagcctcaatgaggagcactccaagcagtaccgctgcctctccttccagcctgagtgcagcatgaagctaacgccccttgtgctcgaagtgtttggcaatgagatctcctgactaggacagcctgtggcggtgcctgggtggggctgctcctccagggccacgtgccaggcccggggctggcggctactcagcagccctcctcaccccgtctggggttcagcccctcctctgccacctcccctatccacccagcccattctctctcctgtccaacctaacccctttcctgcgggcttttccccggtcccttgagacctcagccatgaggagttgctgtttgtttgacaaagaaacccaagtgggggcagagggcagaggctggaggcagggccttgcccagagatgcctccaccgctgcctaagtggctgctgactgatgttgagggaacagacaggagaaatgcatccattcctcagggacagagacacctgcacctccccccactgcaggccccgcttgtccagcgcctagtggggtctccctctcctgcctactcacgataaataatcggcccacagctcccaccccacccccttcagtgcccaccaacatcccattgccctggttatattctcacgggcagtagctgtggtgaggtgggttttcttcccatcactggagcaccaggcacgaacccacctgctgagagacccaaggaggaaaaacagacaaaaacagcctcacagaagaatatgacagctgtccctgtcaccaagctcacagttcctcgccctgggtctaaggggttggttgaggtggaagccctccttccacggatccatgtagcaggactgaattgtccccagtttgcagaaaagcacctgccgacctcgtcctccccctgccagtgccttacctcctgcccaggagagccagccctccctgtcctcctcggatcaccgagagtagccgagagcctgctcccccaccccctccccaggggagagggtctggagaagcagtgagccgcatcttctccatctggcagggtgggatggaggagaagaattttcagaccccagcggctgagtcatgatctccctgccgcctcaatgtggttgcaaggccgctgttcacccacagggctaagagctagcgctgccgcaccccagagtgtgggaagggagagcggggcagtctcgggtggctagtcagagagagtgtttgggggttccgtgatgtagggtaaggtgccttcttattctcactccaccacccaaaagtcaaaaggtgcctgtgaggcaggggcggagtgatacaacttcaagtgcatgctctctgcagccagcccagcccagctggtgggaagcgtctgtccgtttactccaaggtggggtctttgtgagagtgagctgtaggtgtgcgggaccggtacagaaaggcgttcttcgaggtggatcacagaggcttcttcagatcagtgcttgagtttggggaatgcggccgcattccctgagtcaccaggaatgttaaagtcagtgggaacgtgactgccccaactcctggaagctgtgtccttgcacctgcatccgtagttccctgaaaacccagagaggaatcagacttcacactgcaagagccttggtgtccacctggccccatgtctctcagaattcttcaggtggaaaaacatctgaaagccacgttccttactgcagaatagcatatatatcgcttaatcttaaatttattagatatgagttgttttcagactcagactccatttgtattatagtctaatatacagggtagcaggtaccactgatttggagatatttatggggggagaacttacattgtgaaacttctgtacattaattattattgctgttgttattttacaagggtctagggagagacccttgtttgattttagctgcagaacgtattggtccagcttgctcttcagtgggagaaaacacttgtaagttgctaaacgagtcaatcccctcattcaggaaaactgacagaggagggcgtgactcacccaagcatatataactagctagaagtgggccaggacaggcccggcgcggtggctcacgcctgtaatcccagcagtttgggaggtcgaggtaggtggatcacctgaggtcgggagttcgagaccaacctgaccaacatggagaaaccctgtctctattaaaaatacaaaaaaaaaaaaaaaaaaaatagccgggcatggtggcgcaagcctgtaatcccagctactcaggaggctgaggcagaagaattgaacccaggaggtggaggttgcagtgagctgagatcgtgccgttactctccaacctggacaacaagagcgaaactccgtcttagaagtggaccaggacaggaccagattttggagtcatggtccggtgtccttttcactacaccatgtttgagctcagacccccactctcattccccaggtggctgacccagtccctgggggaagccctggatttcagaaagagcaagtctggatctgggaccctttccttccttccctggcttgtaactccaccaacccatcagaaggagaaggaaggagactcacctctgcctcaatgtgaatcagaccctaccccaccacgatgtggccctggcctgctgggctctccacctcagccttggataatgctgttgcctcatctataacatgcatttgtctttgtaatgtcaccaccttcccagctctccctctggccctgccttcttcggggaactcctggaaatatcagttactcagccctgggccccaccacctaggccactcctccaaaggaagtctaggagctgggaggaaaagaaaagaggggaaaatgagtttttatggggctgaacggggagaaaaggtcatcatcgattctactttagaatgagagtgtgaaatagacatttgtaaatgtaaaacttttaaggtatatcattataactgaaggagaaggtgccccaaaatgcaagattttccacaagattcccagagacaggaaaatcctctggctggctaactggaagcatgtaggagaatccaagcgaggtcaacagagaaggcaggaatgtgtggcagatttagtgaaagctagagatatggcagcgaaaggatgtaaacagtgcctgctgaatgatttccaaagagaaaaaaagtttgccagaagtttgtcaagtcaaccaatgtagaaagctttgcttatggtaataaaaatggctcatacttatatagcacttactttgttgcaagtactgctgtaaataaatgctttatgcaaaccaa

SEQ ID NO: 22574 - protein, 427 aa, Homo sapiens; identical to SEQ ID NO: 2973

SEQ ID NO: 22575 - DNA, 5016 bp, Homo sapiens
gtgtgcgccgggagcgcggaacagcttgtccacccgccggccggaccaggtgcgaacccgggagcagcgggaaagggggtctcaggatagggactcggggtcggggcgtctgggataccggggcctgagcgcccggctgcgagcattagagtctaagtctcagcggtaaacttggctactgaggtccgggctgtcgtgccatgaggctgggacactaaggggcactgaggtttgagaaagctgaagttcgtgccaggctggcgaggggagcagcgacatcctcggcgcttaggagaaatgctccgctaacacagtgcttagcacttgggcaacaagaagtatttgtttccttcttctgtcggggcgccttggcatggagtggaggaataagaaaaggagcgattggctgtcgatggtgctcagaactgctggagtggaggaagcctttgggtctgaagtgtctgtgagacctcacagaagagcacccctgggctccacttacctgccccctgctccttcagggatggaggcaatggcggccagcacttccctgcctgaccctggagactttgaccggaacgtgccccggatctgtggggtgtgtggagaccgagccactggctttcacttcaatgctatgacctgtgaaggctgcaaaggcttcttcaggcgaagcatgaagcggaaggcactattcacctgccccttcaacggggactgccgcatcaccaaggacaaccgacgccactgccaggcctgccggctcaaacgctgtgtggacatcggcatgatgaaggagttcattctgacagatgaggaagtgcagaggaagcgggagatgatcctgaagcggaaggaggaggaggccttgaaggacagtctgcggcccaagctgtctgaggagcagcagcgcatcattgccatactgctggacgcccaccataagacctacgaccccacctactccgacttctgccagttccggcctccagttcgtgtgaatgatggtggagggagccatccttccaggcccaactccagacacactcccagcttctctggggactcctcctcctcctgctcagatcactgtatcacctcttcagacatgatggactcgtccagcttctccaatctggatctgagtgaagaagattcagatgacccttctgtgaccctagagctgtcccagctctccatgctgccccacctggctgacctggtcagttacagcatccaaaaggtcattggctttgctaagatgataccaggattcagagacctcacctctgaggaccagatcgtactgctgaagtcaagtgccattgaggtcatcatgttgcgctccaatgagtccttcaccatggacgacatgtcctggacctgtggcaaccaagactacaagtaccgcgtcagtgacgtgaccaaagccggacacagcctggagctgattgagcccctcatcaagttccaggtgggactgaagaagctgaacttgcatgaggaggagcatgtcctgctcatggccatctgcatcgtctccccagatcgtcctggggtgcaggacgccgcgctgattgaggccatccaggaccgcctgtccaacacactgcagacgtacatccgctgccgccacccgcccccgggcagccacctgctctatgccaagatgatccagaagctagccgacctgcgcagcctcaatgaggagcactccaagcagtaccgctgcctctccttccagcctgagtgcagcatgaagctaacgccccttgtgctcgaagtgtttggcaatgagatctcctgactaggacagcctgtggcggtgcctgggtggggctgctcctccagggccacgtgccaggcccggggctggcggctactcagcagccctcctcaccccgtctggggttcagcccctcctctgccacctcccctatccacccagcccattctctctcctgtccaacctaacccctttcctgcgggcttttccccggtcccttgagacctcagccatgaggagttgctgtttgtttgacaaagaaacccaagtgggggcagagggcagaggctggaggcagggccttgcccagagatgcctccaccgctgcctaagtggctgctgactgatgttgagggaacagacaggagaaatgcatccattcctcagggacagagacacctgcacctccccccactgcaggccccgcttgtccagcgcctagtggggtctccctctcctgcctactcacgataaataatcggcccacagctcccaccccacccccttcagtgcccaccaacatcccattgccctggttatattctcacgggcagtagctgtggtgaggtgggttttcttcccatcactggagcaccaggcacgaacccacctgctgagagacccaaggaggaaaaacagacaaaaacagcctcacagaagaatatgacagctgtccctgtcaccaagctcacagttcctcgccctgggtctaaggggttggttgaggtggaagccctccttccacggatccatgtagcaggactgaattgtccccagtttgcagaaaagcacctgccgacctcgtcctccccctgccagtgccttacctcctgcccaggagagccagccctccctgtcctcctcggatcaccgagagtagccgagagcctgctcccccaccccctccccaggggagagggtctggagaagcagtgagccgcatcttctccatctggcagggtgggatggaggagaagaattttcagaccccagcggctgagtcatgatctccctgccgcctcaatgtggttgcaaggccgctgttcacccacagggctaagagctagcgctgccgcaccccagagtgtgggaagggagagcggggcagtctcgggtggctagtcagagagagtgtttgggggttccgtgatgtagggtaaggtgccttcttattctcactccaccacccaaaagtcaaaaggtgcctgtgaggcaggggcggagtgatacaacttcaagtgcatgctctctgcagccagcccagcccagctggtgggaagcgtctgtccgtttactccaaggtggggtctttgtgagagtgagctgtaggtgtgcgggaccggtacagaaaggcgttcttcgaggtggatcacagaggcttcttcagatcagtgcttgagtttggggaatgcggccgcattccctgagtcaccaggaatgttaaagtcagtgggaacgtgactgccccaactcctggaagctgtgtccttgcacctgcatccgtagttccctgaaaacccagagaggaatcagacttcacactgcaagagccttggtgtccacctggccccatgtctctcagaattcttcaggtggaaaaacatctgaaagccacgttccttactgcagaatagcatatatatcgcttaatcttaaatttattagatatgagttgttttcagactcagactccatttgtattatagtctaatatacagggtagcaggtaccactgatttggagatatttatggggggagaacttacattgtgaaacttctgtacattaattattattgctgttgttattttacaagggtctagggagagacccttgtttgattttagctgcagaacgtattggtccagcttgctcttcagtgggagaaaacacttgtaagttgctaaacgagtcaatcccctcattcaggaaaactgacagaggagggcgtgactcacccaagcatatataactagctagaagtgggccaggacaggcccggcgcggtggctcacgcctgtaatcccagcagtttgggaggtcgaggtaggtggatcacctgaggtcgggagttcgagaccaacctgaccaacatggagaaaccctgtctctattaaaaatacaaaaaaaaaaaaaaaaaaaatagccgggcatggtggcgcaagcctgtaatcccagctactcaggaggctgaggcagaagaattgaacccaggaggtggaggttgcagtgagctgagatcgtgccgttactctccaacctggacaacaagagcgaaactccgtcttagaagtggaccaggacaggaccagattttggagtcatggtccggtgtccttttcactacaccatgtttgagctcagacccccactctcattccccaggtggctgacccagtccctgggggaagccctggatttcagaaagagcaagtctggatctgggaccctttccttccttccctggcttgtaactccaccaacccatcagaaggagaaggaaggagactcacctctgcctcaatgtgaatcagaccctaccccaccacgatgtggccctggcctgctgggctctccacctcagccttggataatgctgttgcctcatctataacatgcatttgtctttgtaatgtcaccaccttcccagctctccctctggccctgccttcttcggggaactcctggaaatatcagttactcagccctgggccccaccacctaggccactcctccaaaggaagtctaggagctgggaggaaaagaaaagaggggaaaatgagtttttatggggctgaacggggagaaaaggtcatcatcgattctactttagaatgagagtgtgaaatagacatttgtaaatgtaaaacttttaaggtatatcattataactgaaggagaaggtgccccaaaatgcaagattttccacaagattcccagagacaggaaaatcctctggctggctaactggaagcatgtaggagaatccaagcgaggtcaacagagaaggcaggaatgtgtggcagatttagtgaaagctagagatatggcagcgaaaggatgtaaacagtgcctgctgaatgatttccaaagagaaaaaaagtttgccagaagtttgtcaagtcaaccaatgtagaaagctttgcttatggtaataaaaatggctcatacttatatagcacttactttgttgcaagtactgctgtaaataaatgctttatgcaaaccaa

SEQ ID NO: 22576 - protein, 477 aa, Homo sapiens
MEWRNKKRSDWLSMVLRTAGVEEAFGSEVSVRPHRRAPLGSTYLPPAPSGMEAMAASTSLPDPGDFDRNVPRICGVCGDRATGFHFNAMTCEGCKGFFRRSMKRKALFTCPFNGDCRITKDNRRHCQACRLKRCVDIGMMKEFILTDEEVQRKREMILKRKEEEALKDSLRPKLSEEQQRIIAILLDAHHKTYDPTYSDFCQFRPPVRVNDGGGSHPSRPNSRHTPSFSGDSSSSCSDHCITSSDMMDSSSFSNLDLSEEDSDDPSVTLELSQLSMLPHLADLVSYSIQKVIGFAKMIPGFRDLTSEDQIVLLKSSAIEVIMLRSNESFTMDDMSWTCGNQDYKYRVSDVTKAGHSLELIEPLIKFQVGLKKLNLHEEEHVLLMAICIVSPDRPGVQDAALIEAIQDRLSNTLQTYIRCRHPPPGSHLLYAKMIQKLADLRSLNEEHSKQYRCLSFQPECSMKLTPLVLEVFGNEIS

SEQ ID NO: 22577 - DNA, 4641 bp, Homo sapiens
aggcggcagcggagccgtgtgcgccgggagcgcggaacagcttgtccacccgccggccggaccagaagcctttgggtctgaagtgtctgtgagacctcacagaagagcacccctgggctccacttacctgccccctgctccttcagggatggaggcaatggcggccagcacttccctgcctgaccctggagactttgaccggaacgtgccccggatctgtggggtgtgtggagaccgagccactggctttcacttcaatgctatgacctgtgaaggctgcaaaggcttcttcaggcgaagcatgaagcggaaggcactattcacctgccccttcaacggggactgccgcatcaccaaggacaaccgacgccactgccaggcctgccggctcaaacgctgtgtggacatcggcatgatgaaggagttcattctgacagatgaggaagtgcagaggaagcgggagatgatcctgaagcggaaggaggaggaggccttgaaggacagtctgcggcccaagctgtctgaggagcagcagcgcatcattgccatactgctggacgcccaccataagacctacgaccccacctactccgacttctgccagttccggcctccagttcgtgtgaatgatggtggagggagccatccttccaggcccaactccagacacactcccagcttctctggggactcctcctcctcctgctcagatcactgtatcacctcttcagacatgatggactcgtccagcttctccaatctggatctgagtgaagaagattcagatgacccttctgtgaccctagagctgtcccagctctccatgctgccccacctggctgacctggtcagttacagcatccaaaaggtcattggctttgctaagatgataccaggattcagagacctcacctctgaggaccagatcgtactgctgaagtcaagtgccattgaggtcatcatgttgcgctccaatgagtccttcaccatggacgacatgtcctggacctgtggcaaccaagactacaagtaccgcgtcagtgacgtgaccaaagccggacacagcctggagctgattgagcccctcatcaagttccaggtgggactgaagaagctgaacttgcatgaggaggagcatgtcctgctcatggccatctgcatcgtctccccagatcgtcctggggtgcaggacgccgcgctgattgaggccatccaggaccgcctgtccaacacactgcagacgtacatccgctgccgccacccgcccccgggcagccacctgctctatgccaagatgatccagaagctagccgacctgcgcagcctcaatgaggagcactccaagcagtaccgctgcctctccttccagcctgagtgcagcatgaagctaacgccccttgtgctcgaagtgtttggcaatgagatctcctgactaggacagcctgtggcggtgcctgggtggggctgctcctccagggccacgtgccaggcccggggctggcggctactcagcagccctcctcaccccgtctggggttcagcccctcctctgccacctcccctatccacccagcccattctctctcctgtccaacctaacccctttcctgcgggcttttccccggtcccttgagacctcagccatgaggagttgctgtttgtttgacaaagaaacccaagtgggggcagagggcagaggctggaggcagggccttgcccagagatgcctccaccgctgcctaagtggctgctgactgatgttgagggaacagacaggagaaatgcatccattcctcagggacagagacacctgcacctccccccactgcaggccccgcttgtccagcgcctagtggggtctccctctcctgcctactcacgataaataatcggcccacagctcccaccccacccccttcagtgcccaccaacatcccattgccctggttatattctcacgggcagtagctgtggtgaggtgggttttcttcccatcactggagcaccaggcacgaacccacctgctgagagacccaaggaggaaaaacagacaaaaacagcctcacagaagaatatgacagctgtccctgtcaccaagctcacagttcctcgccctgggtctaaggggttggttgaggtggaagccctccttccacggatccatgtagcaggactgaattgtccccagtttgcagaaaagcacctgccgacctcgtcctccccctgccagtgccttacctcctgcccaggagagccagccctccctgtcctcctcggatcaccgagagtagccgagagcctgctcccccaccccctccccaggggagagggtctggagaagcagtgagccgcatcttctccatctggcagggtgggatggaggagaagaattttcagaccccagcggctgagtcatgatctccctgccgcctcaatgtggttgcaaggccgctgttcacccacagggctaagagctagcgctgccgcaccccagagtgtgggaagggagagcggggcagtctcgggtggctagtcagagagagtgtttgggggttccgtgatgtagggtaaggtgccttcttattctcactccaccacccaaaagtcaaaaggtgcctgtgaggcaggggcggagtgatacaacttcaagtgcatgctctctgcagccagcccagcccagctggtgggaagcgtctgtccgtttactccaaggtggggtctttgtgagagtgagctgtaggtgtgcgggaccggtacagaaaggcgttcttcgaggtggatcacagaggcttcttcagatcagtgcttgagtttggggaatgcggccgcattccctgagtcaccaggaatgttaaagtcagtgggaacgtgactgccccaactcctggaagctgtgtccttgcacctgcatccgtagttccctgaaaacccagagaggaatcagacttcacactgcaagagccttggtgtccacctggccccatgtctctcagaattcttcaggtggaaaaacatctgaaagccacgttccttactgcagaatagcatatatatcgcttaatcttaaatttattagatatgagttgttttcagactcagactccatttgtattatagtctaatatacagggtagcaggtaccactgatttggagatatttatggggggagaacttacattgtgaaacttctgtacattaattattattgctgttgttattttacaagggtctagggagagacccttgtttgattttagctgcagaacgtattggtccagcttgctcttcagtgggagaaaacacttgtaagttgctaaacgagtcaatcccctcattcaggaaaactgacagaggagggcgtgactcacccaagcatatataactagctagaagtgggccaggacaggcccggcgcggtggctcacgcctgtaatcccagcagtttgggaggtcgaggtaggtggatcacctgaggtcgggagttcgagaccaacctgaccaacatggagaaaccctgtctctattaaaaatacaaaaaaaaaaaaaaaaaaaatagccgggcatggtggcgcaagcctgtaatcccagctactcaggaggctgaggcagaagaattgaacccaggaggtggaggttgcagtgagctgagatcgtgccgttactctccaacctggacaacaagagcgaaactccgtcttagaagtggaccaggacaggaccagattttggagtcatggtccggtgtccttttcactacaccatgtttgagctcagacccccactctcattccccaggtggctgacccagtccctgggggaagccctggatttcagaaagagcaagtctggatctgggaccctttccttccttccctggcttgtaactccaccaacccatcagaaggagaaggaaggagactcacctctgcctcaatgtgaatcagaccctaccccaccacgatgtggccctggcctgctgggctctccacctcagccttggataatgctgttgcctcatctataacatgcatttgtctttgtaatgtcaccaccttcccagctctccctctggccctgccttcttcggggaactcctggaaatatcagttactcagccctgggccccaccacctaggccactcctccaaaggaagtctaggagctgggaggaaaagaaaagaggggaaaatgagtttttatggggctgaacggggagaaaaggtcatcatcgattctactttagaatgagagtgtgaaatagacatttgtaaatgtaaaacttttaaggtatatcattataactgaaggagaaggtgccccaaaatgcaagattttccacaagattcccagagacaggaaaatcctctggctggctaactggaagcatgtaggagaatccaagcgaggtcaacagagaaggcaggaatgtgtggcagatttagtgaaagctagagatatggcagcgaaaggatgtaaacagtgcctgctgaatgatttccaaagagaaaaaaagtttgccagaagtttgtcaagtcaaccaatgtagaaagctttgcttatggtaataaaaatggctcatacttatatagcacttactttgttgcaagtactgctgtaaataaatgctttatgcaaaccaa

SEQ ID NO: 22578 - protein, 427 aa, Homo sapiens; identical to SEQ ID NO: 2973

SEQ ID NO: 22579 - DNA, 762 bp, Homo sapiens
tcaggaggctgaggcagaagaattgaacccaggaggtggaggttgcagtgagctgagatcgtgccgttactctccaacctggacaacaagagcgaaactccgtcttagaagtggaccaggacaggaccagattttggagtcatggtccggtgtccttttcactacaccatgtttgagctcagacccccactctcattccccaggtggctgacccagtccctgggggaagccctggatttcagaaagagcaagtctggatctgggaccctttccttccttccctggcttgtaactccaccaacccatcagaaggagaaggaaggagactcacctctgcctcaatgtgaatcagaccctaccccaccacgatgtggccctggcctgctgggctctccacctcagccttggataatgctgttgcctcatctataacatgcatttgtctttgtaatgtcaccaccttcccagctctccctctggccctgccttcttcggggaactctggaagcatgtaggagaatccaagcgaggtcaacagagaaggcaggaatgtgtggcagatttagtgaaagctagagatatggcagcgaaaggatgtaaacagtgcctgctgaatgatttccaaagagaaaaaaagtttgccagaagtttgtcaagtcaaccaatgtagaaagctttgcttatggtaataaaaatggctcatacttatatagcacttactttgttgcaagtactgctgtaaataaatgctttatgcaaacc

SEQ ID NO: 22580 - protein, 48 aa, Homo sapiens
MWPWPAGLSTSALDNAVASSITCICLCNVTTFPALPLALPSSGNSGSM

SEQ ID NO: 22581 - DNA, 438 bp, Homo sapiens
cagggatggaggcaatggcggccagcacttccctgccgcctcaatgtggttgcaaggccgctgttcacccacagggctaagagctagcgctgccgcaccccagagtgtgggaagggagagcggggcagtctcgggtggctagtcagagagagtgtttgggggttccgtgatgtagggtaaggtgccttcttattctcactccaccacccaaaagtcaaaaggtgcctgtgaggcaggggcggagtgatacaacttcaagtgcatgctctctgcagccagcccagcccagctggtgggaagcgtctgtccgtttactccaaggtggggtctttgtgagagtgagctgtaggtgtgcgggaccggtacagaaaggcgttcttcgaggtggatcacagaggcttcttcagatcagtgcttgagtttggggaatgcggccgc

SEQ ID NO: 22582 - protein, 32 aa, Homo sapiens
MWLQGRCSPTGLRASAAAPQSVGRESGAVSGG

SEQ ID NO: 22583 - DNA, 377 bp, Homo sapiens
ctgttcttacagggatggaggcaatggcggccagcacttccctgcctgaccctggagactttgaccggaacgtgccccggatctgtggggttgtttgggggttccgtgatgtagggtaaggtgccttcttattctcactccaccacccaaaagtcaaaaggtgcctgtgaggcaggggcggagtgatacaacttcaagtgcatgctctctgcagccagcccagcccagctggtgggaagcgtctgtccgtttactccaaggtggggtctttgtgagagtgagctgtaggtgtgcgggaccggtacagaaaggcgttcttcgaggtggatcacagaggcttcttcagatcagtgcttgagtttggggaatgcggccgc

SEQ ID NO: 22584 - protein, 34 aa, Homo sapiens
MEAMAASTSLPDPGDFDRNVPRICGVVWGFRDVG

SEQ ID NO: 22585 - DNA, 926 bp, Homo sapiens
gaggagcactccaagcagtaccgctgcctctccttccagcctgagtgcagcatgaagctaacgccccttgtgctcgaagtgtttggcaatgagatctcctgactaggacagcctgtggcggtgcctgggtggggctgctcctccagggccacgtgccaggcccggggctggcggctactcagcagccctcctcaccccgtctggggttcagcccctcctctgccacctcccctatccacccagcccattctctctcctgtccaacctaacccctttcctgcgggcttttccccggtcccttgagacctcagccatgaggagttgctgtttgtttgacaaagaaacccaagtgggggcagagggcagaggctggaggcagggccttgcccagagatgcctccaccgctgcctaagtggctgctgactgatgttgagggaacagacaggagaaatgcatccattcctcagggacagagacacctgcacctccccccactgcaggccccgcttgtccagcgcctagtggggtctccctctcctgcctactcacgataaataatcggcccacagctcccaccccacccccttcagtgcccaccaacatcccattgccctggttatattctcacgggcagtagctgtggtgaggtgggttttcttcccatcactggagcaccaggcacgaacccacctgctgagagacccaaggaggaaaaacagacaaaaacagcctcacagaagaatatgacagctgtccctgtcaccaagctcacagttcctcgccctgggtctaaggggggcggagtgatacaacttcaagtgcatgctctctgcagccagcccagcccagctggtgggaagcgtctgtccgtttactccaaggtggggtctttgtgagagtgagctgtaggtgtgcgggaccggta

SEQ ID NO: 22586 - protein, 50 aa, Homo sapiens
MTAVPVTKLTVPRPGSKGGGVIQLQVHALCSQPSPAGGKRLSVYSKVGSL

SEQ ID NO: 22587 - DNA, 1287 bp, Homo sapiens
aaaacagaaagccagggaagttgcggctgatgaggaaacacctacctgaaggagcagggggcaggctccaaaccttcggggggctttgctaaaagacacccaacctcgaattagttccactccatttccagtttcccaggctgtgcacgtggtttcaacaaagccggtcagacctcaaatggagttcattataatggaattttacctgaggcagcccctcccccacttcttaacatcatggcacccaagatatgggtgtgcttgccaaagaggctgggcagaagtcacttcctgcccctggcagaagtccggaaattcagagccgtttggaacaaagaactctgccccgaaggtgttttccagcatctccctggccagattggaactgccccattcaccctcgtaccacctgctgcgttttttccagccctcctagacaggaaggggaggagggaagactgagctgaatgaccaggacactgcaggaaaggcaatgcacaaaaatgaagcctgtatcaagtgttgaaaaggatggagaacaatggagactttcatccactgctggaagtgttttttgggacaaccactttggaaagctgtttggcaccctatagcaatgctgaacatagaattccatgggaggcagcaattccaaccctaggtatgtgccctacagaaattcttgtgagtttctcatgaaccagaagacaagtataacatgtacacccctagcagtactgtcctatcgtaatagctcaactggaaacaacccaaatgtccatcagtgagaggaggatatacaaatcgtggtgtatttttccaatggaattctacacagcagtgcaaactcatgaactgcagtggtgtgcatcgacatggatgaacctcagaaaactcatattgactcaaagaagagtgcatcacagagaacacacagtgagaatgacttccttcctggcagagtaactgagagtcactacatggtcatcgtggcggctctgctccctccacgcctatgcccgatcacccacaggctggacctctggggatcccaccctttgcatctggaccatgaggacccaggacccagaaggcaggacagtttctcttccacatgtcgccacagcgggatgcaggcactgccatcaacgcctgtcacttggattgagcaagaacagcctctccccaccctggaccatttccccaatagtcagaccagaccaaagaggcaaactctagtgtctttgggaactgactctgtctcctgcaatgcagcttctccctggc

SEQ ID NO: 22588 - protein, 136 aa, Homo sapiens
MDEPQKTHIDSKKSASQRTHSENDFLPGRVTESHYMVIVAALLPPRLCPITHRLDLWGSHPLHLDHEDPGPRRQDSFSSTCRHSGMQALPSTPVTWIEQEQPLPTLDHFPNSQTRPKRQTLVSLGTDSVSCNAASP

SEQ ID NO: 22589 - DNA, 1071 bp, Homo sapiens
gagcgcgcgcccgcgttctcctggcgggcttggtatttggcgcctgcgcgctgagtgcgtgccgctccgccgaccgaagaggctggacatgacaccagtggcatatcacggccatggggtctcagcattccgctgctgctcgcccctcctcctgcaggcgaaagcaagaagatgacagggacggtttgctggctgaacgagagcaggaagaagccattgctcagttcccatatgtggaattcaccgggagagatagcatcacctgtctcacgtgccaggggacaggctacattccaacagagcaagtaaatgagttggtggctttgatcccacacagtgatcagagattgcgccctcagcgaactaagcaatatgtcctcctgtccatcctgctttgtctcctggcatctggtttggtggttttcttcctgtttccgcattcagtccttgtggatgatgacggcatcaaagtggtgaaagtcacatttaataagcaagactcccttgtaattctcaccatcatggccaccctgaaaatcaggaactccaacttctacacggtggcagtgaccagcctgtccagccagattcagtacatgaacacagtggtgaattttaccgggaaggccgagatgggaggaccgttttcctatgtgtacttcttctgcacggtacctgagatcctggtgcacaacatagtgatcttcatgcgaacttcagtgaagatttcatacattggcctcatgacccagagctccttggagacacatcactatgtggattgtggaggaaattccacagctatttaacaactgctattggttcttccacacagcgcctgtagaagagagcacagcatatgttcccaaggcctgagttctggacctacccccacgtggtgtaagcagaggaggaattggttcacttaactcccagcaaacatcctcctgccacttaggaggaaacacctccctatggtaccatttatgtttctcagaaccagcagaatcagtgcctagcctgtgcccagcaaatagttggcactcaataaagatttgcagaatttaatac

SEQ ID NO: 22590 - protein, 231 aa, Homo sapiens
MGSQHSAAARPSSCRRKQEDDRDGLLAEREQEEAIAQFPYVEFTGRDSITCLTCQGTGYIPTEQVNELVALIPHSDQRLRPQRTKQYVLLSILLCLLASGLVVFFLFPHSVLVDDDGIKVVKVTFNKQDSLVILTIMATLKIRNSNFYTVAVTSLSSQIQYMNTVVNFTGKAEMGGPFSYVYFFCTVPEILVHNIVIFMRTSVKISYIGLMTQSSLETHHYVDCGGNSTAI

SEQ ID NO: 22591 - DNA, 1466 bp, Homo sapiens
gagcgcgcgcccgcgttctcctggcgggcttggtatttggcgcctgcgcgctgagtgcgtgccgctccgccgaccgaagaggctggacatgacaccagtggcatatcacggccatggggtctcagcattccgctgctgctcgcccctcctcctgcaggcgaaagcaagaagatgacagggacggtttgctggctgaacgagagcaggaagaagccattgctcagttcccatatgtggaattcaccgggagagatagcatcacctgtctcacgtgccaggggacaggctacattccaacagagcaagtaaatgagttggtggctttgatcccacacagtgatcagagattgcgccctcagcgaactaagcaatatgtcctcctgtccatcctgctttgtctcctggcatctggtttggtggttttcttcctgtttccgcattcagtccttgtggatgatgacggcatcaaagtggtgaaagtcacatttaataagcaagactcccttgtaattctcaccatcatggccaccctgaaaatcaggaactccaacttctacacggtggcagtgaccagcctgtccagccagattcagtacatgaacacagtggtgaattttaccgggaaggccgagatgggaggaccgttttcctatgtgtacttcttctgcacggtacctgagatcctggtgcacaacatagtgatcttcatgcgaacttcagtgaagatttcatacattggcctcatgacccagagctccttggagacacatcactatgtggattgtggaggaaattccacagctatttaacaactgctattggttcttccacacagcgcctgtagaagagagcacagcatatgttcccaaggcctgagttctggacctacccccacgtggtgtaagcagaggaggaattggttcacttaactcccagcaaacatcctcctgccacttaggaggaaacacctccctatggtaccatttatgtttctcagaaccagcagaatcagtgcctagcctgtgcccagcaaatagttggcactcaataaagatttgcagaatttaatacagatcttttcagctgttcttagggcattataaatggaaatcataacgtggttctaggttatcaaaccatggagtgatgtggagctaggattgtgagtgacctgcaggccattatcagtgcctcatctgtgcagaagtggcagcagagagggaccatccaaatacctaagagaaaacagacctagtcaggatatgaatttgtttcagctgttcccaaaggcctgggagctttttgaaaagaaagaaaaaagtgtgttggctttttttttttttagaaagttagaattgtttttaccaagagtctatgtggggcttgattcacccttcatccattggctggaacatggattggggatttgatagaaaaataaaccctgcttttgattcatctgtgtc

SEQ ID NO: 22592 - protein, 231 aa, Homo sapiens; identical to SEQ ID NO: 22590

SEQ ID NO: 22593 - DNA, 1112 bp, Homo sapiens
cgttctcctggcgggcttggtatttggcgcctgcgcgctgagtgcgtgccgctccgccgaccgaagaggctggacatgacaccagtggcatatcacggccatggggtctcagcattccgctgctgctcgcccctcctcctgcaggcgaaagcaagaagatgacagggacggtttgctggctgaacgagagcaggaagaagccattgctcagttcccatatgtggaattcaccgggagagatagcatcacctgtctcacgtgccaggggacaggctacattccaacagagcaagtaaatgagttggtggctttgatcccacacagtgatcagagattgcgccctcagcgaactaagcaatatgtcctcctgtccatcctgctttgtctcctggcatctggtttggtggttttcttcctgtttccgcattcagtccttgtggatgatgacggcatcaaagtggtgaaagtcacatttaataagcaagactcccttgtaattctcaccatcatggccaccctgaaaatcaggaactccaacttctacacggtggcagtgaccagcctgtccagccagattcagtacatgaacacagtggtcagtacatatgtgactactaacgtctcccttattccacctcggagtgagcaactggtgaattttaccgggaaggccgagatgggaggaccgttttcctatgtgtacttcttctgcacggtacctgagatcctggtgcacaacatagtgatcttcatgcgaacttcagtgaagatttcatacattggcctcatgacccagagctccttggagacacatcactatgtggattgtggaggaaattccacagctatttaacaactgctattggttcttccacacagcgcctgtagaagagagcacagcatatgttcccaaggcctgagttctggacctacccccacgtggtgtaagcagaggaggaattggttcacttaactcccagcaaacatcctcctgccacttaggaggaaacacctccctatggtaccatttatgtttctcagaaccagcagaatcagtgcctagcctgtgcccagcaaatagttggcactcaataaagatttgcagaatttaa

SEQ ID NO: 22594 - protein, 250 aa, Homo sapiens; identical to SEQ ID NO: 2977

SEQ ID NO: 22595 - DNA, 1510 bp, Homo sapiens
cgttctcctggcgggcttggtatttggcgcctgcgcgctgagtgcgtgccgctccgccgaccgaagaggctggacatgacaccagtggcatatcacggccatggggtctcagcattccgctgctgctcgcccctcctcctgcaggcgaaagcaagaagatgacagggacggtttgctggctgaacgagagcaggaagaagccattgctcagttcccatatgtggaattcaccgggagagatagcatcacctgtctcacgtgccaggggacaggctacattccaacagagcaagtaaatgagttggtggctttgatcccacacagtgatcagagattgcgccctcagcgaactaagcaatatgtcctcctgtccatcctgctttgtctcctggcatctggtttggtggttttcttcctgtttccgcattcagtccttgtggatgatgacggcatcaaagtggtgaaagtcacatttaataagcaagactcccttgtaattctcaccatcatggccaccctgaaaatcaggaactccaacttctacacggtggcagtgaccagcctgtccagccagattcagtacatgaacacagtggtcagtacatatgtgactactaacgtctcccttattccacctcggagtgagcaactggtgaattttaccgggaaggccgagatgggaggaccgttttcctatgtgtacttcttctgcacggtacctgagatcctggtgcacaacatagtgatcttcatgcgaacttcagtgaagatttcatacattggcctcatgacccagagctccttggagacacatcactatgtggattgtggaggaaattccacagctatttaacaactgctattggttcttccacacagcgcctgtagaagagagcacagcatatgttcccaaggcctgagttctggacctacccccacgtggtgtaagcagaggaggaattggttcacttaactcccagcaaacatcctcctgccacttaggaggaaacacctccctatggtaccatttatgtttctcagaaccagcagaatcagtgcctagcctgtgcccagcaaatagttggcactcaataaagatttgcagaatttaatacagatcttttcagctgttcttagggcattataaatggaaatcataacgtggttctaggttatcaaaccatggagtgatgtggagctaggattgtgagtgacctgcaggccattatcagtgcctcatctgtgcagaagtggcagcagagagggaccatccaaatacctaagagaaaacagacctagtcaggatatgaatttgtttcagctgttcccaaaggcctgggagctttttgaaaagaaagaaaaaagtgtgttggctttttttttttttagaaagttagaattgtttttaccaagagtctatgtggggcttgattcacccttcatccattggctggaacatggattggggatttgatagaaaaataaaccctgcttttgattcatctgtgtc

SEQ ID NO: 22596 - protein, 250 aa, Homo sapiens; identical to SEQ ID NO: 2977

SEQ ID NO: 22597 - DNA, 888 bp, Homo sapiens
ctggcgggcttggtatttggcgcctgcgcgctgagtgcgtgccgctccgccgaccgaagaggctggacatgacaccagtggcatatcacggccatggggtctcagcattccgctgctgctcgcccctcctcctgcaggcgaaagcaagaagatgacagggacggtttgctggctgaacgagagcaggaagaagccattgctcagttcccatatgtggaattcaccgggagagatagcatcacctgtctcacgtgccaggggacaggctacattccaacagagcaagtaaatgagttggtggctttgatcccacacagtgatcagagattgcgccctcagcgaacgccaccctgaaaatcaggaactccaacttctacacggtggcagtgaccagcctgtccagccagattcagtacatgaacacagtggtgaattttaccgggaaggccgagatgggaggaccgttttcctatgtgtacttcttctgcacggtacctgagatcctggtgcacaacatagtgatcttcatgcgaacttcagtgaagatttcatacattggcctcatgacccagagctccttggagacacatcactatgtggattgtggaggaaattccacagctatttaacaactgctattggttcttccacacagcgcctgtagaagagagcacagcatatgttcccaaggcctgagttctggacctacccccacgtggtgtaagcagaggaggaattggttcacttaactcccagcaaacatcctcctgccacttaggaggaaacacctccctatggtaccatttatgtttctcagaaccagcagaatcagtgcctagcctgtgcccagcaaatagttggcactcaataaagatttgcagaatttaa

SEQ ID NO: 22598 - protein, 86 aa, Homo sapiens
MGSQHSAAARPSSCRRKQEDDRDGLLAEREQEEAIAQFPYVEFTGRDSITCLTCQGTGYIPTEQVNELVALIPHSDQRLRPQRTPP

SEQ ID NO: 22599 - DNA, 1286 bp, Homo sapiens
ctggcgggcttggtatttggcgcctgcgcgctgagtgcgtgccgctccgccgaccgaagaggctggacatgacaccagtggcatatcacggccatggggtctcagcattccgctgctgctcgcccctcctcctgcaggcgaaagcaagaagatgacagggacggtttgctggctgaacgagagcaggaagaagccattgctcagttcccatatgtggaattcaccgggagagatagcatcacctgtctcacgtgccaggggacaggctacattccaacagagcaagtaaatgagttggtggctttgatcccacacagtgatcagagattgcgccctcagcgaacgccaccctgaaaatcaggaactccaacttctacacggtggcagtgaccagcctgtccagccagattcagtacatgaacacagtggtgaattttaccgggaaggccgagatgggaggaccgttttcctatgtgtacttcttctgcacggtacctgagatcctggtgcacaacatagtgatcttcatgcgaacttcagtgaagatttcatacattggcctcatgacccagagctccttggagacacatcactatgtggattgtggaggaaattccacagctatttaacaactgctattggttcttccacacagcgcctgtagaagagagcacagcatatgttcccaaggcctgagttctggacctacccccacgtggtgtaagcagaggaggaattggttcacttaactcccagcaaacatcctcctgccacttaggaggaaacacctccctatggtaccatttatgtttctcagaaccagcagaatcagtgcctagcctgtgcccagcaaatagttggcactcaataaagatttgcagaatttaatacagatcttttcagctgttcttagggcattataaatggaaatcataacgtggttctaggttatcaaaccatggagtgatgtggagctaggattgtgagtgacctgcaggccattatcagtgcctcatctgtgcagaagtggcagcagagagggaccatccaaatacctaagagaaaacagacctagtcaggatatgaatttgtttcagctgttcccaaaggcctgggagctttttgaaaagaaagaaaaaagtgtgttggctttttttttttttagaaagttagaattgtttttaccaagagtctatgtggggcttgattcacccttcatccattggctggaacatggattggggatttgatagaaaaataaaccctgcttttgattcatctgtgtc

SEQ ID NO: 22600 - protein, 86 aa, Homo sapiens; identical to SEQ ID NO: 22598

SEQ ID NO: 22601 - DNA, 1130 bp, Homo sapiens
gtgcgtgccgctccgccgaccgaagaggctggacatgacaccagtggcatatcacggccatggggtctcagcattccgctgctgctcgcccctcctcctgcaggcgaaagcaagaagatgacagggacggtttgctggctgaacgagagcaggaagaagccattgctcagttcccatatgtggaattcaccgggagagatagcatcacctgtctcacgtgccaggggacaggctacattccaacagagcaagtaaatgagttggtggctttgatcccacacagtgatcagagattgcgccctcagcgaacgtgagttacctgcttctcacctgttaatacctacttctgtccctaatctctttctgtatgtatgaatgccagttaattctttgaaaactacacatgttcttataagttccccattttccttataactgtttgcccaagcaagatatctctgcccccatcacaatctggggaaagaaacttgaagctggaaatgctttgaaggtcaaggaatggaatcagaagaaactgggaaagtggagtgttctgggaggtgtgggactgtctctgtccacatagctcctttcttcagcttttcttcccagagtgcaaacagtgtttaaaggagttttaaaaggtttctcctgcttcactgcttcttaactggtttatggttcctggctcttggaacttccctttcagctcccttctctttcctggttttgtgtttaatcttgacacattgaaccttgatatctgactgcctgggtcggtcatgtgctgtgtcatttgcagtaagcaatatgtcctcctgtccatcctgctttgtctcctggcatctggtttggtggttttcttcctgtttccgcattcagtccttgtggatgatgacggcatcaaagtggtgaaagtcacatttaataagcaagactcccttgtaattctcaccatcatggtaagccttagggtttcattccctgggttgtgcacctgccaggctgggacccaggacacttacacttgtttcctgacttgccctgatgtaggccaccctgaaaatcaggaactccaacttctacacggtggcagtgaccagcctgtccagccagattcagtacatgaa

SEQ ID NO: 22602 - protein, 84 aa, Homo sapiens
MGSQHSAAARPSSCRRKQEDDRDGLLAEREQEEAIAQFPYVEFTGRDSITCLTCQGTGYIPTEQVNELVALIPHSDQRLRPQRT

SEQ ID NO: 22603 - DNA, 1125 bp, Homo sapiens
gaccgaagaggctggtaagtcctcaagctggcaggtggtcgggggagcggccggagaggagctgccgggagttcgtgccctgcaggacatgacaccagtggcatatcacggccatggggtctcagcattccgctgctgctcgcccctcctcctgcaggcgaaagcaagaagatgacagggacggtttgctggctgaacgagagcaggaagaagccattgctcagttcccatatgtggaattcaccgggagagatagcatcacctgtctcacgtgccaggggacaggctacattccaacagagcaagtaaatgagttggtggctttgatcccacacagtgatcagagattgcgccctcagcgaactaagcaatatgtcctcctgtccatcctgctttgtctcctggcatctggtttggtggttttcttcctgtttccgcattcagtccttgtggatgatgacggcatcaaagtggtgaaagtcacatttaataagcaagactcccttgtaattctcaccatcatggccaccctgaaaatcaggaactccaacttctacacggtggcagtgaccagcctgtccagccagattcagtacatgaacacagtggtcagtacatatgtgactactaacgtctcccttattccacctcggagtgagcaactggtgaattttaccgggaaggccgagatgggaggaccgttttcctatgtgtacttcttctgcacggtacctgagatcctggtgcacaacatagtgatcttcatgcgaacttcagtgaagatttcatacattggcctcatgacccagagctccttggagacacatcactatgtggattgtggaggaaattccacagctatttaacaactgctattggttcttccacacagcgcctgtagaagagagcacagcatatgttcccaaggcctgagttctggacctacccccacgtggtgtaagcagaggaggaattggttcacttaactcccagcaaacatcctcctgccacttaggaggaaacacctccctatggtaccatttatgtttctcagaaccagcagaatcagtgcctagcctgtgcccagcaaatagttggcactcaataaagatttgcagaatttaa

SEQ ID NO: 22604 - protein, 250 aa, Homo sapiens; identical to SEQ ID NO: 2977

SEQ ID NO: 22605 - DNA, 1523 bp, Homo sapiens
gaccgaagaggctggtaagtcctcaagctggcaggtggtcgggggagcggccggagaggagctgccgggagttcgtgccctgcaggacatgacaccagtggcatatcacggccatggggtctcagcattccgctgctgctcgcccctcctcctgcaggcgaaagcaagaagatgacagggacggtttgctggctgaacgagagcaggaagaagccattgctcagttcccatatgtggaattcaccgggagagatagcatcacctgtctcacgtgccaggggacaggctacattccaacagagcaagtaaatgagttggtggctttgatcccacacagtgatcagagattgcgccctcagcgaactaagcaatatgtcctcctgtccatcctgctttgtctcctggcatctggtttggtggttttcttcctgtttccgcattcagtccttgtggatgatgacggcatcaaagtggtgaaagtcacatttaataagcaagactcccttgtaattctcaccatcatggccaccctgaaaatcaggaactccaacttctacacggtggcagtgaccagcctgtccagccagattcagtacatgaacacagtggtcagtacatatgtgactactaacgtctcccttattccacctcggagtgagcaactggtgaattttaccgggaaggccgagatgggaggaccgttttcctatgtgtacttcttctgcacggtacctgagatcctggtgcacaacatagtgatcttcatgcgaacttcagtgaagatttcatacattggcctcatgacccagagctccttggagacacatcactatgtggattgtggaggaaattccacagctatttaacaactgctattggttcttccacacagcgcctgtagaagagagcacagcatatgttcccaaggcctgagttctggacctacccccacgtggtgtaagcagaggaggaattggttcacttaactcccagcaaacatcctcctgccacttaggaggaaacacctccctatggtaccatttatgtttctcagaaccagcagaatcagtgcctagcctgtgcccagcaaatagttggcactcaataaagatttgcagaatttaatacagatcttttcagctgttcttagggcattataaatggaaatcataacgtggttctaggttatcaaaccatggagtgatgtggagctaggattgtgagtgacctgcaggccattatcagtgcctcatctgtgcagaagtggcagcagagagggaccatccaaatacctaagagaaaacagacctagtcaggatatgaatttgtttcagctgttcccaaaggcctgggagctttttgaaaagaaagaaaaaagtgtgttggctttttttttttttagaaagttagaattgtttttaccaagagtctatgtggggcttgattcacccttcatccattggctggaacatggattggggatttgatagaaaaataaaccctgcttttgattcatctgtgtc

SEQ ID NO: 22606 - protein, 250 aa, Homo sapiens; identical to SEQ ID NO: 2977

SEQ ID NO: 22607 - DNA, 1583 bp, Homo sapiens
aggctggtaagtcctcaagctggcaggtggtcgggggagcggccggagaggagctgccgggagttcgtgccctgcaggacatgacaccagtggcatatcacggccatggggtctcagcattccgctgctgctcgcccctcctcctgcaggcgaaagcaagaagatgacagggacggtttgctggctgaacgagagcaggaagaagccattgctcagttcccatatgtggaattcaccgggagagatagcatcacctgtctcacgtgccaggggacaggctacattccaacagagcaagtaaatgagttggtggctttgatcccacacagtgatcagagattgcgccctcagcgaactaagcaatatgtcctcctgtccatcctgctttgtctcctggcatctggtttggtggttttcttcctgtttccgcattcagtccttgtggatgatgacggcatcaaagtggtgaaagtcacatttaataagcaagactcccttgtaattctcaccatcatggccaccctgaaaatcaggaactccaacttctacacggtggcagtgaccagcctgtccagccagattcagtacatgaacacagtggtgaattttaccgggaaggccgagatgggaggaccgttttcctatgtgtagtaaggacactgttctctctgtgtgtgctctctactggaggaaagggattcaaagtcatactccattgattggggcctggtcctgccttagatctcagcttttgacttataggttccctggctttggatgtcttgagatttatttgaagaatgtattattattatgtgtgtatttgaagaatgtattatttgatatgtgacagaagtgctggaatttctaaaagagaacattaagccactaaaaacgttaccaagctccagcacttatgtgatgggtttgaaaaaacagaaagtggtatgacgctgtgggaggatgaaaatgacagtggcagggactgagagctgacaagccttggcagcacttaggtcggaagggggaggggggcaccccaaacaggacagtgtaactctgcactcttctactgaggctttaaaaaaaaaaaaactgactatttccatatttgctgtttggtagcttcttctgcacggtacctgagatcctggtgcacaacatagtgatcttcatgcggtgcgtctctcttccctatcccgatggcctgtccggccatgtgagcctaccacctttgctcaggaggcccctgtgtgaccacagggcagaggcacctagcccgaggggacaccctgtgcctcacaggcacagatacagtagacccttggtgttctctaaacacagtgtccacatgcccttcacaaatcaccagtcaccctgagcagtcaaacattttctccataaaatgggtctagtttaactaaacacttgatcccctcagaatcctaatgagacagtcatgaacagaaaagctttctcaagatgttaagtactgggcatttgaccagacttcctctctagccacacaaattaccacatgtcatggacctttagggttgttttctggaagcatggctgttaaa

SEQ ID NO: 22608 - protein, 181 aa, Homo sapiens
MGSQHSAAARPSSCRRKQEDDRDGLLAEREQEEAIAQFPYVEFTGRDSITCLTCQGTGYIPTEQVNELVALIPHSDQRLRPQRTKQYVLLSILLCLLASGLVVFFLFPHSVLVDDDGIKVVKVTFNKQDSLVILTIMATLKIRNSNFYTVAVTSLSSQIQYMNTVVNFTGKAEMGGPFSYV

SEQ ID NO: 22609 - DNA, 1063 bp, Homo sapiens
aggctggtaagtcctcaagctggcaggtggtcgggggagcggccggagaggagctgccgggagttcgtgccctgcaggacatgacaccagtggcatatcacggccatggggtctcagcattccgctgctgctcgcccctcctcctgcaggcgaaagcaagaagatgacagggacggtttgctggctgaacgagagcaggaagaagccattgctcagttcccatatgtggaattcaccgggagagatagcatcacctgtctcacgtgccaggggacaggctacattccaacagagcaagtaaatgagttggtggctttgatcccacacagtgatcagagattgcgccctcagcgaactaagcaatatgtcctcctgtccatcctgctttgtctcctggcatctggtttggtggttttcttcctgtttccgcattcagtccttgtggatgatgacggcatcaaagtggtgaaagtcacatttaataagcaagactcccttgtaattctcaccatcatggccaccctgaaaatcaggaactccaacttctacacggtggcagtgaccagcctgtccagccagattcagtacatgaacacagtggtgaattttaccgggaaggccgagatgggaggaccgttttcctatgtgtacttcttctgcacggtacctgagatcctggtgcacaacatagtgatcttcatgcgaacttcagtgaagatttcatacattggcctcatgacccagagctccttggagacacatcactatgtggattgtggaggaaattccacagctatttaacaactgctattggttcttccacacagcgcctgtagaagagagcacagcatatgttcccaaggcctgagttctggacctacccccacgtggtgtaagcagaggaggaattggttcacttaactcccagcaaacatcctcctgccacttaggaggaaacacctccctatggtaccatttatgtttctcagaaccagcagaatcagtgcctagcctgtgcccagcaaatagttggcactcaataaagatttgcagaatttaatac

SEQ ID NO: 22610 - protein, 231 aa, Homo sapiens; identical to SEQ ID NO: 22590

SEQ ID NO: 22611 - DNA, 1458 bp, Homo sapiens
aggctggtaagtcctcaagctggcaggtggtcgggggagcggccggagaggagctgccgggagttcgtgccctgcaggacatgacaccagtggcatatcacggccatggggtctcagcattccgctgctgctcgcccctcctcctgcaggcgaaagcaagaagatgacagggacggtttgctggctgaacgagagcaggaagaagccattgctcagttcccatatgtggaattcaccgggagagatagcatcacctgtctcacgtgccaggggacaggctacattccaacagagcaagtaaatgagttggtggctttgatcccacacagtgatcagagattgcgccctcagcgaactaagcaatatgtcctcctgtccatcctgctttgtctcctggcatctggtttggtggttttcttcctgtttccgcattcagtccttgtggatgatgacggcatcaaagtggtgaaagtcacatttaataagcaagactcccttgtaattctcaccatcatggccaccctgaaaatcaggaactccaacttctacacggtggcagtgaccagcctgtccagccagattcagtacatgaacacagtggtgaattttaccgggaaggccgagatgggaggaccgttttcctatgtgtacttcttctgcacggtacctgagatcctggtgcacaacatagtgatcttcatgcgaacttcagtgaagatttcatacattggcctcatgacccagagctccttggagacacatcactatgtggattgtggaggaaattccacagctatttaacaactgctattggttcttccacacagcgcctgtagaagagagcacagcatatgttcccaaggcctgagttctggacctacccccacgtggtgtaagcagaggaggaattggttcacttaactcccagcaaacatcctcctgccacttaggaggaaacacctccctatggtaccatttatgtttctcagaaccagcagaatcagtgcctagcctgtgcccagcaaatagttggcactcaataaagatttgcagaatttaatacagatcttttcagctgttcttagggcattataaatggaaatcataacgtggttctaggttatcaaaccatggagtgatgtggagctaggattgtgagtgacctgcaggccattatcagtgcctcatctgtgcagaagtggcagcagagagggaccatccaaatacctaagagaaaacagacctagtcaggatatgaatttgtttcagctgttcccaaaggcctgggagctttttgaaaagaaagaaaaaagtgtgttggctttttttttttttagaaagttagaattgtttttaccaagagtctatgtggggcttgattcacccttcatccattggctggaacatggattggggatttgatagaaaaataaaccctgcttttgattcatctgtgtc

SEQ ID NO: 22612 - protein, 231 aa, Homo sapiens; identical to SEQ ID NO: 22590

SEQ ID NO: 22613 - DNA, 715 bp, Homo sapiens
ggacatgacaccagtggcatatcacggccatggggtctcagcattccgctgctgctcgcccctcctcctgcaggcgaaagcaagaagatgacagggacggtttgctggctgaacgagagcaggaagaagccattgctcagttcccatatgtggaattcaccgggagagatagcatcacctgtctcacgtgccaggggacaggctacattccaacaggtgatcatggagggatgattccctgatgagaatcccaaggtgaattttaccgggaaggccgagatgggaggaccgttttcctatgtgtacttcttctgcacggtacctgagatcctggtgcacaacatagtgatcttcatgcgaacttcagtgaagatttcatacattggcctcatgacccagagctccttggagacacatcactatgtggattgtggaggaaattccacagctatttaacaactgctattggttcttccacacagcgcctgtagaagagagcacagcatatgttcccaaggcctgagttctggacctacccccacgtggtgtaagcagaggaggaattggttcacttaactcccagcaaacatcctcctgccacttaggaggaaacacctccctatggtaccatttatgtttctcagaaccagcagaatcagtgcctagcctgtgcccagcaaatagttggcactcaataaagatttgcagaatttaa

SEQ ID NO: 22614 - protein, 58 aa, Homo sapiens
MGGPFSYVYFFCTVPEILVHNIVIFMRTSVKISYIGLMTQSSLETHHYVDCGGNSTAI

SEQ ID NO: 22615 - DNA, 1113 bp, Homo sapiens
ggacatgacaccagtggcatatcacggccatggggtctcagcattccgctgctgctcgcccctcctcctgcaggcgaaagcaagaagatgacagggacggtttgctggctgaacgagagcaggaagaagccattgctcagttcccatatgtggaattcaccgggagagatagcatcacctgtctcacgtgccaggggacaggctacattccaacaggtgatcatggagggatgattccctgatgagaatcccaaggtgaattttaccgggaaggccgagatgggaggaccgttttcctatgtgtacttcttctgcacggtacctgagatcctggtgcacaacatagtgatcttcatgcgaacttcagtgaagatttcatacattggcctcatgacccagagctccttggagacacatcactatgtggattgtggaggaaattccacagctatttaacaactgctattggttcttccacacagcgcctgtagaagagagcacagcatatgttcccaaggcctgagttctggacctacccccacgtggtgtaagcagaggaggaattggttcacttaactcccagcaaacatcctcctgccacttaggaggaaacacctccctatggtaccatttatgtttctcagaaccagcagaatcagtgcctagcctgtgcccagcaaatagttggcactcaataaagatttgcagaatttaatacagatcttttcagctgttcttagggcattataaatggaaatcataacgtggttctaggttatcaaaccatggagtgatgtggagctaggattgtgagtgacctgcaggccattatcagtgcctcatctgtgcagaagtggcagcagagagggaccatccaaatacctaagagaaaacagacctagtcaggatatgaatttgtttcagctgttcccaaaggcctgggagctttttgaaaagaaagaaaaaagtgtgttggctttttttttttttagaaagttagaattgtttttaccaagagtctatgtggggcttgattcacccttcatccattggctggaacatggattggggatttgatagaaaaataaaccctgcttttgattcatctgtgtc

SEQ ID NO: 22616 - protein, 58 aa, Homo sapiens; identical to SEQ ID NO: 22614

SEQ ID NO: 22617 - DNA, 1922 bp, Homo sapiens
aaacagtgtttaaaggagttttaaaaggtttctcctgcttcactgcttcttaactggtttatggttcctggctcttggaacttccctttcagctcccttctctttcctggttttgtgtttaatcttgacacattgaaccttgatatctgactgcctgggtcggtcatgtgctgtgtcatttgcagtaagcaatatgtcctcctgtccatcctgctttgtctcctggcatctggtttggtggttttcttcctgtttccgcattcagtccttgtggatgatgacggcatcaaagtggtgaaagtcacatttaataagcaagactcccttgtaattctcaccatcatggccaccctgaaaatcaggaactccaacttctacacggtggcagtgaccagcctgtccagccagattcagtacatgaacacagtggtcagtacatatgtgactactaacgtctcccttattccacctcggagtgagcaactggtatgctgttcttttaggaatcttgccccacaggcctaagagaagagtagggggctgtaggaatgccatagctgtgtcactttcctttttgtctcctcatttctacttgtaggaactggtgatgaggaagacctgttgggccctgtaattataaataattgtgagaaaaaacagctatcatttaagcatttggggagcagaataatttgtaagagacaaagatttgctacaaaataagaagcagcagtgttacagcctgaggtccattggcctctcaaaagggaagaggttggcagtatcaattagaggctcatagactatattagggacaatctcagggaagtattttgcatgtgatggaagaatgacccaaggtctttggattgctaataataatactgttctgtgtcaagcctgcttggccacagaccaactctggtatcttattttcaggtgaattttaccgggaaggccgagatgggaggaccgttttcctatgtgtagtaaggacactgttctctctgtgtgtgctctctactggaggaaagggattcaaagtcatactccattgattggggcctggtcctgccttagatctcagcttttgacttataggttccctggctttggatgtcttgagatttatttgaagaatgtattattattatgtgtgtatttgaagaatgtattatttgatatgtgacagaagtgctggaatttctaaaagagaacattaagccactaaaaacgttaccaagctccagcacttatgtgatgggtttgaaaaaacagaaagtggtatgacgctgtgggaggatgaaaatgacagtggcagggactgagagctgacaagccttggcagcacttaggtcggaagggggaggggggcaccccaaacaggacagtgtaactctgcactcttctactgaggctttaaaaaaaaaaaaactgactatttccatatttgctgtttggtagcttcttctgcacggtacctgagatcctggtgcacaacatagtgatcttcatgcggtgcgtctctcttccctatcccgatggcctgtccggccatgtgagcctaccacctttgctcaggaggcccctgtgtgaccacagggcagaggcacctagcccgaggggacaccctgtgcctcacaggcacagatacagtagacccttggtgttctctaaacacagtgtccacatgcccttcacaaatcaccagtcaccctgagcagtcaaacattttctccataaaatgggtctagtttaactaaacacttgatcccctcagaatcctaatgagacagtcatgaacagaaaagctttctcaagatgttaagtactgggcatttgaccagacttcctctctagccacacaaattaccacatgtcatggacctttagggttgttttctggaagcatggctgttaaa

SEQ ID NO: 22618 - protein, 119 aa, Homo sapiens
MCCVICSKQYVLLSILLCLLASGLVVFFLFPHSVLVDDDGIKVVKVTFNKQDSLVILTIMATLKIRNSNFYTVAVTSLSSQIQYMNTVVSTYVTTNVSLIPPRSEQLVCCSFRNLAPQA

SEQ ID NO: 22619 - DNA, 718 bp, Homo sapiens
agcagaataatttgtaagagacaaagatttgctacaaaataagaagcagcagtgttacagcctgaggtccattggcctctcaaaagggaagaggttggcagtatcaattagaggctcatagactatattagggacaatctcagggaagtattttgcatgtgatggaagaatgacccaaggtctttggattgctaataataatactgttctgtgtcaagcctgcttggccacagaccaactctggtatcttattttcaggtgaattttaccgggaaggccgagatgggaggaccgttttcctatgtgtacttcttctgcacggtacctgagatcctggtgcacaacatagtgatcttcatgcgaacttcagtgaagatttcatacattggcctcatgacccagagctccttggagacacatcactatgtggattgtggaggaaattccacagctatttaacaactgctattggttcttccacacagcgcctgtagaagagagcacagcatatgttcccaaggcctgagttctggacctacccccacgtggtgtaagcagaggaggaattggttcacttaactcccagcaaacatcctcctgccacttaggaggaaacacctccctatggtaccatttatgtttctcagaaccagcagaatcagtgcctagcctgtgcccagcaaatagttggcactcaataaagatttgcagaatttaa

SEQ ID NO: 22620 - protein, 58 aa, Homo sapiens; identical to SEQ ID NO: 22614

SEQ ID NO: 22621 - DNA, 1116 bp, Homo sapiens
agcagaataatttgtaagagacaaagatttgctacaaaataagaagcagcagtgttacagcctgaggtccattggcctctcaaaagggaagaggttggcagtatcaattagaggctcatagactatattagggacaatctcagggaagtattttgcatgtgatggaagaatgacccaaggtctttggattgctaataataatactgttctgtgtcaagcctgcttggccacagaccaactctggtatcttattttcaggtgaattttaccgggaaggccgagatgggaggaccgttttcctatgtgtacttcttctgcacggtacctgagatcctggtgcacaacatagtgatcttcatgcgaacttcagtgaagatttcatacattggcctcatgacccagagctccttggagacacatcactatgtggattgtggaggaaattccacagctatttaacaactgctattggttcttccacacagcgcctgtagaagagagcacagcatatgttcccaaggcctgagttctggacctacccccacgtggtgtaagcagaggaggaattggttcacttaactcccagcaaacatcctcctgccacttaggaggaaacacctccctatggtaccatttatgtttctcagaaccagcagaatcagtgcctagcctgtgcccagcaaatagttggcactcaataaagatttgcagaatttaatacagatcttttcagctgttcttagggcattataaatggaaatcataacgtggttctaggttatcaaaccatggagtgatgtggagctaggattgtgagtgacctgcaggccattatcagtgcctcatctgtgcagaagtggcagcagagagggaccatccaaatacctaagagaaaacagacctagtcaggatatgaatttgtttcagctgttcccaaaggcctgggagctttttgaaaagaaagaaaaaagtgtgttggctttttttttttttagaaagttagaattgtttttaccaagagtctatgtggggcttgattcacccttcatccattggctggaacatggattggggatttgatagaaaaataaaccctgcttttgattcatctgtgtc

SEQ ID NO: 22622 - protein, 58 aa, Homo sapiens; identical to SEQ ID NO: 22614

SEQ ID NO: 22623 - DNA, 1975 bp, Homo sapiens
gttcctcagttgcagtgagatgtgaggcacttgcagagactcagtccaccaccctgggcagctttcaccaccctgggcagcttttccgagacgtagggactggcttgccgtaattcatagcttctgctgtcccttgctacatacctgcttctcaaatcagaaaaaaaaaaaatcagtggattagaggacccttaccacaacttcttattgacactttatctgagtgcatatgagttatcacacagatctccactaaacacaaatgaaagttctgaaatggggaaataatggttgatgtactcaattgcttgctgggatgtgcttccctgaggcttgccagtgtgctgacaaccacagaaacacattcattcattaacatatggaacgtatgtggcacctctgctagacagttgtgccaggtaccaaggatcccccaaaagcagtaacaacctgatcctgccttcattgccacttacatccacccatgggaaacagatttaacgaaagagcaattggaattcatgtgctctgatgtgggaagtacatgatactatggaagcccagagaaagggtacctaacccagattttgaagaaatgagaaatgcttcctggaagatgagacaactaccctaagacctgcaaaatcaataggagtatgacctatgaagtgagagaagaaagataaaaataatggacatgaggaaaactctactactatttagccattttctgtcgtacattttaaataagaattagaaattaagcaagcattttacagattactccagaaactgctcttctaaaggcaagctccactgaatttttctagaaaaaaggaagcctcctgaattctcaccaaataaatgcctgatactctacctgcttgctccagctgacacagtcaagagaaacctaagtccacatctgcagaccatggagttccctgaacaaaaacctcttaaatgcttggaatcccaactttcagactagccaaagagtagtccagaaaaggctggagtgcggtggcatgatctcggctcactgcaaactctgcctccccagttcaaatgattcttctgccttctgcctcagcctcccaaatagctggaactacagcaaggccaacttttctaccagataaccctgacctcatcctgtcagaattgaatggaccaagaattgagctaccctaaaaggccagttttctggaaatagtttgaagataccgactcatggttaaatgtttcacatttaccctcagaaatgagtgctactgttcagaaacggaggtgcccactttgcttgtgggatttaggaggaaatgccacacactgtcatagaaaaaatggcgtctcactctattgcccaggctagagtacaatagtgcaatcttggctcactgcaacctccccctcccaggttcaagccattctcctgcctcagcctcccgagtagctagaactacaagcacgtgcactgtacccagctaattttttgtatttttagcagagacggggtttctccatgttggccaggctggtctcgaactcctgacctcaggtaatccaccgcctcatcctcccaaaatgcattatctcttcccaaaatgcattatctatttcattaagaaaaaggagaaagcaaccatgctaagcttcaaataaaagcatgtgagcacacctgatgacgctagacccactggaatctcgcataactcatcctgaacgtgttgggaatcaagtctctcaggattagccctggtaatctgaaagtcaccagtcatcaagaagtggcatctctaccatgtggtgcaatcatagccctgaactcaaatttctgtctgatatatttgatgtgatccctccttttatacccttttaacttctgcttggagagacccactgaccttgtagctgactgtcagaacttttccttgccaggccagcaataaatttggcattgttttggacattg

SEQ ID NO: 22624 - protein, 52 aa, Homo sapiens
MVDVLNCLLGCASLRLASVLTTTETHSFINIWNVCGTSARQLCQVPRIPQKQ

SEQ ID NO: 22625 - DNA, 422 bp, Homo sapiens
ataaatggcggagacttttccctaaatgggttacttgatttaagagctgctggctaattttggtcggataatttaatagaagagggaagaggaaaggaaagaaaggggcttgaagaaagaggaagagaaaagaaacacaaggatggagaacaaggagagaccatttgttctcaaacagtagctgccacttctagctgggagagaaatgagagctctgctcatggtgatccagtatctccagaatccatcaccactgctgacctcccactccatgtctccaagtgctctgctatacctgccaccagcagctgccacctccagactttggaaggttataataaaacctctgttctacgatctgccttctgcttcaacatcctcactccccacaaacaattctaataaacagcaattaatctgaa

SEQ ID NO: 22626 - protein, 71 aa, Homo sapiens
MRALLMVIQYLQNPSPLLTSHSMSPSALLYLPPAAATSRLWKVIIKPLFYDLPSASTSSLPTNNSNKQQLI

SEQ ID NO: 22627 - DNA, 988 bp, Homo sapiens
ggattttgttatctatttgggatccccagagattccatatgaatggatgaagttttgctctgtccccaagctggaatgcagtggtgcaatcttggttcactgcaacctctgcctcccaggttcaagcgattctcctgtctcagcctcctgagtagctgggattacaggtgcatgccaccatgcccagctaatttttatatttttagtagagactgggtttcaccatgttggccaggctggtctcgaactcccgacctcaggtgatccgactgcctcagcctcccaaagtgctgggattacaagcatgagccactgcgcccagacttaatgatcattctttaacagccctttcttgatttgtgtgtttgtatgtgtgtgtgtgtgtgcgtgggtgtgaatgtaatgcatgtagtggaggtgtttcttatatattatttttccttttccttttttcttatgtctattactactccattttataacatttatattctatattagcaaaattgttatctcaaatttaatgtttgtaaggttcttgtcactaaccaatctatctttatagtttctctgtcagcagtttttttttataacagagttatttacttttttattcatgcttcttttcattcatcatcttttggtgtgtttctctctgtagtggatatcatgtttgctcatcgtttgaaatgtcttgttatatataacatttgtaagaaacatgttgaaattttatgctcacattttcaagctgcatttcaagctctttctcttggtctgtaataatcaatttataaggttatttcattcacaaactaaacttaaaaaattctgatatggcatgcttgttcatttgtatgtctggattctggtcatacttactctttatttttatttgtacacataaattatacttcatgaatatatattttcattcattaagaataaataaaacattaataaatcagcattctcttactttcaaagg

SEQ ID NO: 22628 - protein, 73 aa, Homo sapiens
MDEVLLCPQAGMQWCNLGSLQPLPPRFKRFSCLSLLSSWDYRCMPPCPANFYIFSRDWVSPCWPGWSRTPDLR

SEQ ID NO: 22629 - DNA, 2040 bp, Homo sapiens
gctgcgctgaatatggatatggtgagtgaatctagagcagccatttggaggtatgaagagatcttggaaatagaggccatgtgtgttgaaacaagaccgaacaactccaagttcctgaagacttcatttcaccaacccagaacctccttgatcatcacagcctttgcatggatgattgtctgtcctctgttgggccccttctgaagagttggagttggctttatacaattattcccaaatcttctaaactgacagtgagggagagtaatttgaaaggactgctcaactcaacgtcatttgaagatttgcaccacagctgcatttttccaatttcctggcatctattctgctctcctggacttttcaaaaacaatttctttcagatccctggaggcctctcccagggcctgtggtgtggagagttggacttgaccctactgtaagagacccaacttccaaagactgcatcagatgaaaggctctccatatagactacagacttgtcagctggttaaggaggcaaacagaacagtctgctacaaactccagtccatgtatctgtgctgaaaataaaaggagtcttcaggaatcaaagaagaaaatatttttataaagaaattttattgcataattcttgtatacaataaacataggaaaagggtttttaatgaaaattcatgtcatttttcaaaagtgttgaactgtctggagaaaaattattacaaagctatctaaggcaaaaataatatttaaccatctaaacaaaagataatcccctttaccatttgttttgtatttaaagcaagacattttaaacacaagtaatacggagaagttttcaaattgctacgtcatttgcattaagaatttaaatgcatctaagaagtgaagagtttaaacacatgggaatgttctctagtaacagatattgctgctttcttcagatccattctgcttgaatgtaaggctatactttttgcacaccaacagaattctgcatcttctaatggtacagtaagagctggagtgcagagagggaaagtcccatgcacttcctatgttaaatggcataactcccacagatcacatacaccttgccatattgactcagttcattgcactccatatcctgcaaaaataaatctagtgcttgacagctgacattattgctcactgacgttttagtaatatatttctttcacataagacagaaatatactgaaatttgataccacttaaacccaaaagcaatctggaattaaaccacatgcatacaccccactttttttcaatagatgttgcatttttcttaaagtcgatcctggaaaatgtggtagaagaaaaactggctttccttgaaacaaagactaaggattagaaaaagaggggcttttttttgagtgaaatgttaagccctacgatataaatgaaggaacaatgacaatccagtctctgtggagagggaagaggcctctcactgatcctccttgtctacctcaacactgtggcccgcgtcccacggaccccaggggaggctatcctacagagctggagcagccgagaggtgctgtgtgtgcctctgaaggatgggctggaggctgtggcaaagccctgagagacctatttctttggccaccccaacgtggaatcctggggtcactgggaaatactagggctttctctgtgagattgggaaagacttctaggatggtctggacgctgatggctgaggtctggtcttaaattttacacgtcatttctagagagacgtgaagcctacgaattccagagtgaacccagggcctggggtgaaatgtcttggaacctgagggaacatctggatgctcagatagaaacctcttatctgagcatccagataagaccagagctcatctggaatcaagtgtacatgactataaagagtccaccgggatgtcaggcttcttagagaggtgcttgtagagagagacatgtaggaatgtggacatggccacactgacgctgtttgtcacagattttcattctaatttcttgttgttt

SEQ ID NO: 22630 - protein, 91 aa, Homo sapiens
MDDCLSSVGPLLKSWSWLYTIIPKSSKLTVRESNLKGLLNSTSFEDLHHSCIFPISWHLFCSPGLFKNNFFQIPGGLSQGLWCGELDLTLL

SEQ ID NO: 22631 - DNA, 689 bp, Homo sapiens
gctgcgctgaatatggatatggtgagtgaatctagagcagccatttggaggtatgaagagatcttggaaatagaggccatgtgtgttgaaacaagaccgaacaactccaagttcctgaagacttcatttcaccaacccagaacctccttgatcatcacagcctttgcatggatgattgtctgtcctctgttgggccccttctgaagagttggagttggctttatacaattattcccaaatcttctaaactgacagtgagggagagtaatttgaaaggactgctcaactcaacgtcatttgaagatttgcaccacagctgcatttttccaatttcctggcatctattctgctctcctggacttttcaaaaacaatttctttcagatccctggaggcctctcccagggcctgtggtgtggagagttggacttgaccctactgtaagagacccaacttccaaagactgcatcagatgaaaggctctccatatagactacagacttgtcagctggttaaggaggcaaacagaacagtctgctacaaactccagtccatgtatctgtgctgaaaataaaaggagtcttcaggaatcaaagaagaaaatatttttataaagaaattttattgcataattcttgtatacaataaacataggaaaagggtttttaatgaaaattcatgtcatttttc

SEQ ID NO: 22632 - protein, 91 aa, Homo sapiens; identical to SEQ ID NO: 22630

SEQ ID NO: 22633 - DNA, 1028 bp, Homo sapiens
cacagcccggcatctcacacagaagtggcttgatgaggattctactgcctccacagctcctgccatcatcttcatctgcaccatagatgctcagaacccagtctgtgtctgcatgttgctgacttccaaatgagagcttcatgagagtgtatttggttggtagaacataggtcccagaccttctccctgggagctggaagagatgctgggaaattctgccctggaaaaataaaactcacaatgtgggaaacaaagaaaatgtacagcaggggtttaacagaatgacagctacagtttagactcctgtggtacagttggctttcccaggctcccggcgtccatgctgtctcggcgctatctcgcagcctgacgccacgcgccatctgctggccttgagctgcatagctctagagtaacttcagaggccacgggggaacaaagagcactcgcctacttgactgagctccgacaggccgtccctctgcttcaggtgtaggcgtgaacaagtccagaccactaccttaacagctttatacaattattcccaaatcttctaaactgacagtgagggagagtaatttgaaaggactgctcaactcaacgtcatttgaagatttgcaccacagctgcatttttccaatttcctggcatctattctgctctcctggacttttcaaaaacaattgtaagtggatgaataaatataataactgattccattgatactcttagaccatcctttggactttctgcttttggacattttacagtttaaaatttatttatcatctatcgatgtttcccaaagaaggactcaaagtacacattgtcaaagatctcatggatctaattaaggacagggaacaggtacagaatcatacattgtctctacacagaggggataatttctgaaggaaagaagaaagtaaattccttaatcacccttatgattataactacacaattgaatttgtttacttcatcagctttgggaataaagtaaggtcctacacttttcaatttttcaa

SEQ ID NO: 22634 - protein, 38 aa, Homo sapiens [sequence omitted]

SEQ ID NO: 22635 - DNA, 850 bp, Homo sapiens
catttggaggtatgaagagatcttggaaatagaggccatgtgtgttgaaacaagaccgaacaactccaagttcctgaagacttcatttcaccaacccagaacctccttgatcatcacagtgttcaaatggtttccagcaacattcctaccacctactttgctgacacaaaggtgcataaacagaagtcctatgtggtcgaaccattttacattttcaccagcaatgaaggagggttcctgttgctctaccatttggtactgtcagcgttttggatattagccgtcctaatagcctttgcatggatgattgtctgtcctctgttgggccccttctgaagagttggagttggctttatacaattattcccaaatcttctaaactgacagtgagggagagtaatttgaaaggactgctcaactcaacgtcatttgaagatttgcaccacagctgcatttttccaatttcctggcatctattctgctctcctggacttttcaaaaacaattgtaagtggatgaataaatataataactgattccattgatactcttagaccatcctttggactttctgcttttggacattttacagtttaaaatttatttatcatctatcgatgtttcccaaagaaggactcaaagtacacattgtcaaagatctcatggatctaattaaggacagggaacaggtacagaatcatacattgtctctacacagaggggataatttctgaaggaaagaagaaagtaaattccttaatcacccttatgattataactacacaattgaatttgtttacttcatcagctttgggaataaagtaaggtcctacacttttcaatttttcaa

SEQ ID NO: 22636 - protein, 80 aa, Homo sapiens
MCVETRPNNSKFLKTSFHQPRTSLIITVFKWFPATFLPPTLLTQRCINRSPMWSNHFTFSPAMKEGSCCSTIWYCQRFGY

SEQ ID NO: 22637 - DNA, 724 bp, Homo sapiens
cacagcccggcatctcacacagaagtggcttgatgaggattctactgcctccacagctcctgccatcatcttcatctgcaccatagatgctcagaacccagtctgtgtctgcatgttgctgacttccaaatgagagcttcatgagagtgtatttggttggtagaacataggtcccagaccttctccctgggagctggaagagatgctgggaaattctgccctggaaaaataaaactcacaatgtgggaaacaaagaaaatgtacagcaggggtttaacagaatgacagctacagtttagactcctgtggtacagttggctttcccaggctcccggcgtccatgctgtctcggcgctatctcgcagcctgacgccacgcgccatctgctggccttgagctgcatagctctagagtaacttcagaggccacgggggaacaaagagcactcgcctacttgactgagctccgacaggccgtccctctgcttcaggtgtaggcgtgaacaagtccagaccactaccttaacagctttatacaattattcccaaatcttctaaactgacagtgagggagagtaatttgaaaggactgctcaactcaacgtcatttgaagatttgcaccacagctgcatttttccaatttcctggcatctattctgctctcctggacttttcaaaaacaattgtaagtggatgaataaatataataactgattccattgat

SEQ ID NO: 22638 - protein, 36 aa, Homo sapiens
QLQFRLLWYSWLSQAPGVHAVSALSRSLTPRAICWP

SEQ ID NO: 22639 - DNA, 999 bp, Homo sapiens
atttgtaaactgtcatggcactgctgagagtgtctattagcctgctaatgcattataattaacgtacaatgagcagtgaggatgaccagaggtcactttcatcaccatcttggttttggccggcttctttatggcatcctgttttatcaccagggtctttatgacccgtatcttgtgatatcaatcctgccgacctcctatctcatcctgtggctaagaatgtctaacctcctgggaatgctgcccagcaggtctcattctcattttaccgagcccctactcaagatggagtcgctctggtttgaacgcctctgacacttccactctcaaggaatggtgtttttattctcttctccccagaatgtacttctggtctgtcccgctgttccattccacagcattttaggaggttctcaagagtgtcctaaacaagcagagaagaatggtgagacttacccattcctagtttaagaaatgagtgaaatggggtctgagttatatcacagctacagtttagactcctgtggtacagttggctttcccaggctcccggcgtccatgctgtctcggcgctatctcgcagcctgacgccacgcgccatctgctggccttgagctgcatagctctagagtaacttcagaggccacgggggaacaaagagcactcgcctacttgactgagctccgacaggccgtccctctgcttcaggtgtaggcgtgaacaagtccagaccactaccttaacagtaacaagtacttgacacatgtccttggtctagaaaggatggaggagccacagacagctgaggtgcaggctccagctcaatggcctgtcattacaagaggctcttggagtttctgatcttcttcgcctctctctatgcccaaccctgtctagagtgcacctcagcatgattttagaaaacagcatggagaaagagaagttgaggccagtctttctcctccgatcaccaagtatctattaaaagccattccctcc

SEQ ID NO: 22640 - protein, 37 aa, Homo sapiens
MSEMGSELYHSYSLDSCGTVGFPRLPASMLSRRYLAA

SEQ ID NO: 22641 - DNA, 718 bp, Homo sapiens
atcgctgataccctttcttccagttgatcacatcagctcctgaggcttctgcattcttcacatagttctcgagccttggttttcagctccatcagctcctttaagcacttctctgtattgtttattgtagttatacattcttctaaatttttttcaaaatgttcaacttctttgcctttggtttgaatgtcctcccgtagctcggagtaatttgattgtctgaagccttcttctctcagctcgtcaaagtcattctccatccagctttgttccattgctggtgagaagggaataagggcaggaattatgagaaaactgaaacatggaaaggtaaatcaacttgtgaagaaaggtctcttggctcgttgctggcaacactggatctagaactccgctttcagggtgtccgaattcgttctcaatacttctccacccctgtctgccagtttctctctgtacttggagacctaaatacaaaaactggctccagaatttgaaatctatgccttagcttttttagggtgaccataagttgagggaggaacaaggatgctggtcaaagttcccatcagtgacctgcggaaaattggaaaatatcaggtaccaccacttcctcccttcccacaagtcttctagacctctctctctttgcaaagagtcgtcagagaaggttccaagccaactgcttaatgaattaatagcccttattccactgtac

SEQ ID NO: 22642 - protein, 70 aa, Homo sapiens
EGNKGRNYEKTETWKGKSTCEERSLGSLLATLDLELRFQGVRIRSQYFSTPVCQFLSVLGDLNTKTGSRI

SEQ ID NO: 22643 - DNA, 1628 bp, Homo sapiens
agccatttggaggtatgaagagatcttggaaatagaggccatgtgtgttgaaacaagaccgaacaactccaagttcctgaagacttcatttcaccaacccagaacctccttgatcatcacagtggtcgaaccattttacattttcaccagcaatgaaggagggttcctgttgctctaccatttggtactgtcagcgttttggatattagccgtcctaatagaaaagagtgagtaactagtggcctttagatgagccaaccgcaagcctggactcatctttgacatctcctgcttccctccataatgaccgtcgttgctcctcttgcccaaggtgtttgactcttcctacagcctttgcatggatgattgtctgtcctctgttgggccccttctgaagagttggagttggttgcaaactatagaaaccatttgggctggtttgagcataaaaggaaattactgggagttattaggtgctcggtgattcattgggaggtctggcaaaaaagaagctcaaggctaagctcataggaacacagcccggcatctcacacagaagtggcttgatgaggattctactgcctccacagctcctgccatcatcttcatctgcaccatagatgctcagaacccagtctgtgtctgcatgttgctgacttccaaatgagagcttcatgagagtgtatttggttggtagaacataggtcccagaccttctccctgggagctggaagagatgctgggaaattctgccctggaaaaataaaactcacaatgtgggaaacaaagaaaatgtacagcaggggtttaacagaatgacaggtatctgctaaagaaaatattgattttttttaaaaaaaaaaaagacaattttccctttagagccccagaaagattcaggccttagaggcactaagtactatagaaaatgaggctgaagcatggggctgaaacttggtttggttgaaggtctctggaaggcagagcagtttaacctctaggttccctcatccacccccatacagccagacaattatccctccacccttctgttctcctcccctcttcccttagaaaacttgaagtttattctctagagaagttccaggctcagtgacaccaggccaaggtgctggactgaaaacaattagattaagttaaaatctgcttgataagtgtacaagtaatctattttcaaaacctaagagatgttgtcagctatctctaactatatgccagcagtaggccttctaggaaactgtactatgattccaggaaactcgattgtgggctggggaaggacaataaagtggattgtatgatcatctgcttctgttactggaaagggatcctgatccagaccccaagagagggttcttggatcttgtgcaagaaagaattcaggagtccataaagtgaaagcaagtttatcagagaagtaaagaaacaaaaggatggctaccccatagacagagagccctgagggctgctggttggacatttttatggttatttcttgatcatatgctaaacaaggggtagattattcataagttttctgggaaaggggaggttcccaaaactgagggttcctcccctttttagaccatataaggtaacttgggtgt

SEQ ID NO: 22644 - protein, 64 aa, Homo sapiens
MCVETRPNNSKFLKTSFHQPRTSLIITVVEPFYIFTSNEGGFLLLYHLVLSAFWILAVLIEKSE

SEQ ID NO: 22645 - DNA, 1324 bp, Homo sapiens
agccatttggaggtatgaagagatcttggaaatagaggccatgtgtgttgaaacaagaccgaacaactccaagttcctgaagacttcatttcaccaacccagaacctccttgatcatcacagtggtcgaaccattttacattttcaccagcaatgaaggagggttcctgttgctctaccatttggtactgtcagcgttttggatattagccgtcctaatagaaaagagtgagtaactagtggcctttagatgagccaaccgcaagcctggactcatctttgacatctcctgcttccctccataatgaccgtcgttgctcctcttgcccaaggtgtttgactcttcctacagcctttgcatggatgattgtctgtcctctgttgggccccttctgaagagttggagttggttgcaaactatagaaaccatttgggctggtttgagcataaaaggaaattactgggagttattaggtgctcggtgattcattgggaggtctggcaaaaaagaagctcaaggctaagctcataggaacacagcccggcatctcacacagaagtggcttgatgaggattctactgcctccacagctcctgccatcatcttcatctgcaccatagatgctcagaacccagtctgtgtctgcatgttgctgacttccaaatgagagcttcatgagagtgtatttggttggtagaacataggtcccagaccttctccctgggagctggaagagatgctgggaaattctgccctggaaaaataaaactcacaatgtgggaaacaaagaaaatgtacagcaggggtttaacagaatgacaggtatctgctaaagaaaatattgattttttttaaaaaaaaaaaagacaattttccctttagagccccagaaagattcaggccttagaggcactaagtactatagaaaatgaggctgaagcatggggctgaaacttggtttggttgaaggtctctggaaggcagagcagtttaacctctaggttccctcatccacccccatacagccagacaattatccctccacccttctgttctcctcccctcttcccttagaaaacttgaagtttattctctagagaagttccaggctcagtgacaccaggccaaggtgctggactgaaaacaattagattaagttaaaatctgcttgataagtgtacaagtaatctattttcaaaacctaagagatgttgtcagctatctctaactatatgccagcagtaggccttctaggaaactgtactatgattccaggaaactcgattgtgggctggggaaggacaataaagtggattgtatgatc

SEQ ID NO: 22646 - protein, 64 aa, Homo sapiens; identical to SEQ ID NO: 22644

SEQ ID NO: 22647 - DNA, 1385 bp, Homo sapiens
gagctcattgatcatcataacagagtctattgaaagtcctcagcaggcggtgtgacgatgtgaccagctctggccaaggagctgtaggcagaagtgtcttgcagcagctcctgtaaatcttaaaagacagctggtgcgtgtcttttttcctttttttttcccttcccccttcctgctgcgctgaatatggatatggtgagtgaatctagagcagccatttggaggtatgaagagatcttggaaatagaggccatgtgtgttgaaacaagaccgaacaactccaagttcctgaagacttcatttcaccaacccagaacctccttgatcatcacagcctttgcatggatgattgtctgtcctctgttgggccccttctgaagagttggagttgggttgctgctgctgtgcagctgaggtacaatccctctcgttctttgggcatcagcctctgttctccctacatgtgctgtttgcaaactatagaaaccatttgggctggtttgagcataaaaggaaattactgggagttattaggtgctcggtgattcattgggaggtctggcaaaaaagaagctcaaggctaagctcataggaacacagcccggcatctcacacagaagtggcttgatgaggattctactgcctccacagctcctgccatcatcttcatctgcaccatagatgctcagaacccagtctgtgtctgcatgttgctgacttccaaatgagagcttcatgagagtgtatttggttggtagaacataggtcccagaccttctccctgggagctggaagagatgctgggaaattctgccctggaaaaataaaactcacaatgtgggaaacaaagaaaatgtacagcaggggtttaacagaatgacaggtatctgctaaagaaaatattgattttttttaaaaaaaaaaaagacaattttccctttagagccccagaaagattcaggccttagaggcactaagtactatagaaaatgaggctgaagcatggggctgaaacttggtttggttgaaggtctctggaaggcagagcagtttaacctctaggttccctcatccacccccatacagccagacaattatccctccacccttctgttctcctcccctcttcccttagaaaacttgaagtttattctctagagaagttccaggctcagtgacaccaggccaaggtgctggactgaaaacaattagattaagttaaaatctgcttgataagtgtacaagtaatctattttcaaaacctaagagatgttgtcagctatctctaactatatgccagcagtaggccttctaggaaactgtactatgattccaggaaactcgattgtgggctggggaaggacaataaagtggattgtatgatc

SEQ ID NO: 22648 - protein, 67 aa, Homo sapiens
MDDCLSSVGPLLKSWSWVAAAVQLRYNPSRSLGISLCSPYMCCLQTIETIWAGLSIKGNYWELLGAR

SEQ ID NO: 22649 - DNA, 444 bp, Homo sapiens
gggcagaatttcccagcatctcttccagctcccagggagaaggtctgggacctatgttctaccaaccaaatacactctcatgaagctctcatttggaagtcagcaacatgcagacacagactgggttctgagcatctatggtgcagatgaagatgatggcaggagctgtggaggcagtagaatcctcatcaagccacttctgtgtgagatgccgggctgtgttcctatgagcttagccttgagcttcttttttgccagacctcccaatgaatcaccgagcacctaataactcccagcctctagacctgcagtagcatgaagaggtctgaggaagctgtgcgtccctcaagaaagcaattctttattgcccatcaaagatgaatccataggggatcattaacaaggagatcatcccagagagcagcttctagaatcaccaaccaa

SEQ ID NO: 22650 - protein, 68 aa, Homo sapiens
MKLSFGSQQHADTDWVLSIYGADEDDGRSCGGSRILIKPLLCEMPGCVPMSLALSFFFARPPNESPST

SEQ ID NO: 22651 - DNA, 464 bp, Homo sapiens
ctgcagtagcatgaagaggtctgaggaagctgtgcgtccctcaagaaagcaattctttattgcccatcaaagatgaatccataggggatcattaacaaggagatcatcccagagagcagcttctagaatcaccaaccaagtttccttcatttctattcagcctcatgaaataaagaaataaagaaaacaaacaagtaaataaaaacaagatctttatggatgtggcagaaagctttgcaagccaagaaagtcttctatccaggtgatgcaaataactgtaaaacttcagacttcttgaactacaaagatgaactctgccaacccaagttctagtacttcctctactcccagcctgacccccactgtttcttggtttcctcactccttctctttctgtttgactcttgagagtaataaactcagccaagtcctactacttgagcccatatttaaatgcagaacaa

SEQ ID NO: 22652 - protein, 51 aa, Homo sapiens
MNSANPSSSTSSTPSLTPTVSWFPHSFSFCLTLESNKLSQVLLLEPIFKCR

SEQ ID NO: 22653 - DNA, 874 bp, Homo sapiens
tgctctaccatttggtactgtcagcgttttggatattagccgtcctaataggtgcaatgaatgtgtcctgctcttacttgggataggttcaaaaataaatgcaattgaaaaaaaatctcctggggccaggcgtggtggctcacgcctgtaatcctagcactttgggaggccgaagtgggcagatcatgaagtcaagagatcgagactatcctggccaacatggtgaaacctcatctctcctaaaaatacaaaaaattagctgagtatggtggcacatgtctgtaatcccagctactcgggaggctgaggcaggagaatggcttgaacccgggaggcagaggttgcagtgagccaagatcgtgccactgcactccagcctgggtgacagggctcagactccgtctaaacaaacaaaaaaaatctcctggaagtcccatttgatcttggttacatgagcttactagagaattttgttgttcccaacattagctgagaaatgtactctaagaagtgaatagactaaagtggaaccagggtgcagtggagaacgagagctgttatctagaaaacctttctcaggcatgtttcagcacactctgctcctgacgatggctctatcatcaaagaattctgtggtcaggtgtatgggatatgctgcataggctccctatgagcctccaaattgtaagttaaaggctctgagagcttggcagtaagtagaagactcctggtcacatttgtttaacccagtgtttcccaaactcatttggccttggaactctatttcttgggacatttattagctgctggtggaaccagtgttcaaaaaattactccctagacaatttaggcaaaacatcttttctataaataa

SEQ ID NO: 22654 - protein, 54 aa, Homo sapiens
MQLKKNLLGPGVVAHACNPSTLGGRSGQIMKSRDRDYPGQHGETSSLLKIQKIS

SEQ ID NO: 22655 - DNA, 545 bp, Homo sapiens
attttggtaaagacattcatctcagtcgtttctctctcccagcttgaccttaggttaatatttcatttgggtcaagaaaagaatatgtaggagagctatgttgctttaacaagaaaatggacaaaaatggatagtttgcctcattaaagaacacgcatgctcgcagaagccattacaatcccgtcgtgcagcagcctgtgctattgaccagcctagaagtcatttttcgactcaaggggagaagggtgggtttctgctctttccttgcaccatctgaaggacacggcagaagataaaggaaaatggccatgagatgctccagcggagctgggtccaaggcctggcgctcaccaaagattgcactactctcagcatggtacaggaagacaactgatgggacaatgcaagctgggacaatctccaacccaaagggtatctcagaaaacagcactagagtctgaaatgattccacctggtcttagcagaaagctggcccggaagttgtaatacatgaagatccaacagccaccacgtgaccaagagaa

SEQ ID NO: 22656 - protein, 52 aa, Homo sapiens
MAMRCSSGAGSKAWRSPKIALLSAWYRKTTDGTMQAGTISNPKGISENSTRV

SEQ ID NO: 22657 - DNA, 545 bp, Homo sapiens
catttgggtcaagaaaagaatatgtaggagagctatgttgctttaacaagaaaatggacaaaaatggatagtttgcctcattaaagaacacgcatgctcgcagaagccattacaatcccgtcgtgcagcagcctgtgctattgaccagcctagaagtcatttttcgactcaaggggagaagggtgggtttctgctctttccttgcaccatctgaaggacacggcagaagataaaggaaaatggccatgagatgctccagcggagctgggtccaaggcctggcgctcaccaaagattgcactactctcagcatggtacaggaagacaactgatgggacaatgcaagctgggacaatctccaacccaaagggtatctcagaaaacagcactaggtgagaccacagcacaaccccagtcaacctttaaatcagaaaaggagctggaggatgcaattcattgatgtatagaaagttttaaaaagtaaaaactgaaatacagaaaacaaagtttgcaatgtgtaagaaataaaggactgaaatttgtacc

SEQ ID NO: 22658 - protein, 51 aa, Homo sapiens
MAMRCSSGAGSKAWRSPKIALLSAWYRKTTDGTMQAGTISNPKGISENSTR

SEQ ID NO: 22659 - DNA, 3842 bp, Homo sapiens
ggttttcccgagttgtttgggttgagttcaggagaagcatggccaggtcgagtccgtacctgcgccaacttcagggacctctgctcccacccagggatctggtggaggaggacgacgactacctaaacgacgacgtggaggaggatgaagagtccgtgttcatcgacgccgaggagctctgcagtgggggcgtaaaggctggcagcctccccgggtgcctccgcgtttctatttgtgatgaaaacacacaagagacatgtaaagtgtttggacgttttccgataacaggtgcttggtggagagtgaaggtacaagtaaagcctgtggtgggatcaaggagctatcaatatcaagttcaaggatttccgtcttactttttgcagtctgatatgtcaccaccaaatcaaaaacatatctgtgctctctttcttaaagagtgtgaggtctccagtgatgatgttaataaatttttaacatgggtaaaggaggtatcaaactacaaaaacctaaactttgaaaatcttagggaaacactaagaactttccacaaggaaactggaaggaaagatcaaaagcagcctacacagaatggtcaggaagagttgttcctagacaatgagatgagtcttcctctggaaaacacaattccatttagaaatgtaatgacagctttgcagtttccgaagataatggaattccttccagttcttctgcctcgacactttaaatggatcatagggtcaggttctaaagagatgttgaaagagatagaagagattttaggtacacatccgtggaaacttggatttagtaaaataacctacagagagtggaaactcctgcgatgtgaggcaagttggatagcattttgtcagtgtgagtctcttctccagctgatgactgatttggagaagaatgcattaataatgtattccagactgaagcagatatgtagagaagatgggcacacatatgttgaagtgaatgacttaactttgacattgtcaaatcatatgtcatttcatgctgcttcagagtctctgaagtttttgaaggatattggtgtggtgacatatgagaagtcctgtgtcttcccttatgacctttaccatgctgaaagagccatcgccttttcaatttgtgacctgatgaagaaacctccttggcatttatgtgtcgatgtcgaaaaggtgcttgcctctattcacaccacaaaacctgagaattcaagcgatgatgcattgaatgagagcaaacctgatgaagtaagattagaaaatcctgtggatgttgtggacacacaggacaatggtgaccatatttggactaatggtgaaaatgaaattaatgcagaaataagtgaagttcagctggatcaggatcaggttgaagttccactggatcgggatcaggtggctgctttggaaatgatttgctccaatcctgtgacagtcataagtgggaaaggtggatgtgggaagaccacaatcgttagccgtctttttaagcatatagagcagttggaagaaagagaagtaaaaaaagcctgtgaagattttgaacaagaccagaatgcttcagaagaatggattacctttactgagcaaagtcaactagaggcggacaaggctatagaagttttgctcacagcacctacagggaaagcagctggcttactaagacagaaaactggtcttcatgcctacacactgtgtcaggtcaattatagcttctattcatggactcaaacaatgatgaccacaaacaaaccatggaaattttcttcggttagagttctggttgtggatgaagggagtttggtatctgtaggaatcttcaaatcggtcttaaatttattgtgtgagcactccaaactttctaagcttattatccttggtgacattagacagttacccagtattgaacctggtaacttgctgaaagatctttttgagactcttaagtcaagaaattgtgctattgagctaaagacaaaccatagagcagaatctcagctcattgtggacaatgctacaagaatctcaagacgccaatttccaaaatttgatgcagaactaaatatctctgataatccaacattacccatctcaattcaagataagacatttatttttgtcaggctcccagaagaggatgccagttctcagtcatctaaaactaatcatcactcttgtttatattctgcagttaaaactttactacaagaaaataacttacaaaatgcaaaaacatcacaatttattgcatttagaaggcaagactgtgatctaattaatgactgctgctgcaaacactacacaggccacctcaccaaagaccatcagagtagacttgtttttggaattggtgataaaatttgttgtaccaggaatgcatacctctcagacttactacctgaaaatatctctggaagtcagcaaaataatgatctagatgccagtagtgaagacttttctggtacgcttcctgattttgctaaaaataagcgtgactttgaaagtaacgttcgactgtgcaatggagagatatttttcataacaaatgatgtaactgatgtaacttttggaaagagaagatctttgaccattaataatatggctggcctggaagtaactgtggattttaagaaactaatgaaatattgtcgcataaaacatgcatgggcaagaactattcacacttttcaggggtccgaggagcaaacagttgtctatgtggtggggaaggcgggccgccagcactggcagcatgtctacaccgccgtgaccaggggccgctgccgagtgtatgtgattgcagaggagtctcagctccggaatgccattatgaaaaacagttttcctagaaaaactcgtttgaaacatttcttgcaaagtaagctctcctctagcggcgcacctccagcagattttccgtccccacggaagagctctggagacagtggaggacccagcacaccgtcagcatctccactccctgtagtcacagaccacgccatgacaaatgatgtcacctggagcgaggcctcttcgcctgatgagaggacactcacctttgctgaaagatggcaattatcttcacctgatggagtagatacagatgatgatttaccaaaatcgcgagcatccaaaagaacctgtggtgtgaatgatgatgaaagtccaagcaaaatttttatggtgggagaatctccacaagtgtcttccagacttcagaatttgagactgaataatttaattcccaggcaacttttcaagcccaccgataatcaagaaacttagttttatttcaaattgttccgagtaactatgtttttctattggagacaaaatgaacatcgtaacgtcaaagtaccaagataaaaaaagtttcctataactggagttttaaggtatttgtgttagcaaatgttttaaatccatttcatcaaagtattaatgatttcaacacgtcatcatgagaactggtagcactggacataagtgaagagattagatattttatatacatatatatttttatacaattatgtacattaagccaggcacggtggctcatgcctgtaatcccagcactttgggaggctgaggcaggtggatcaccagaggccaggagtttgagaccagcctgaccaacatggtgaaaccccatctctactaaaaatgcaaaaattatatgggtgtggtagcacatgcctgtaatctcagctactcaggaggctgaggcaggagaatcgcttgaacccgggaggcggaggttgcagtgagctgagattgcaccattgcactccatcctgggtggcagagcgagactccgtctcc

SEQ ID NO: 22660 - protein, 1087 aa, Homo sapiens
MARSSPYLRQLQGPLLPPRDLVEEDDDYLNDDVEEDEESVFIDAEELCSGGVKAGSLPGCLRVSICDENTQETCKVFGRFPITGAWWRVKVQVKPVVGSRSYQYQVQGFPSYFLQSDMSPPNQKHICALFLKECEVSSDDVNKFLTWVKEVSNYKNLNFENLRETLRTFHKETGRKDQKQPTQNGQEELFLDNEMSLPLENTIPFRNVMTALQFPKIMEFLPVLLPRHFKWIIGSGSKEMLKEIEEILGTHPWKLGFSKITYREWKLLRCEASWIAFCQCESLLQLMTDLEKNALIMYSRLKQICREDGHTYVEVNDLTLTLSNHMSFHAASESLKFLKDIGVVTYEKSCVFPYDLYHAERAIAFSICDLMKKPPWHLCVDVEKVLASIHTTKPENSSDDALNESKPDEVRLENPVDVVDTQDNGDHIWTNGENEINAEISEVQLDQDQVEVPLDRDQVAALEMICSNPVTVISGKGGCGKTTIVSRLFKHIEQLEEREVKKACEDFEQDQNASEEWITFTEQSQLEADKAIEVLLTAPTGKAAGLLRQKTGLHAYTLCQVNYSFYSWTQTMMTTNKPWKFSSVRVLVVDEGSLVSVGIFKSVLNLLCEHSKLSKLIILGDIRQLPSIEPGNLLKDLFETLKSRNCAIELKTNHRAESQLIVDNATRISRRQFPKFDAELNISDNPTLPISIQDKTFIFVRLPEEDASSQSSKTNHHSCLYSAVKTLLQENNLQNAKTSQFIAFRRQDCDLINDCCCKHYTGHLTKDHQSRLVFGIGDKICCTRNAYLSDLLPENISGSQQNNDLDASSEDFSGTLPDFAKNKRDFESNVRLCNGEIFFITNDVTDVTFGKRRSLTINNMAGLEVTVDFKKLMKYCRIKHAWARTIHTFQGSEEQTVVYVVGKAGRQHWQHVYTAVTRGRCRVYVIAEESQLRNAIMKNSFPRKTRLKHFLQSKLSSSGAPPADFPSPRKSSGDSGGPSTPSASPLPVVTDHAMTNDVTWSEASSPDERTLTFAERWQLSSPDGVDTDDDLPKSRASKRTCGVNDDESPSKIFMVGESPQVSSRLQNLRLNNLIPRQLFKPTDNQET

SEQ ID NO: 22661 - DNA, 645 bp, Homo sapiens
cagcaccatattgtctttattattgtagctttgtagaaagttttgaaattaagaagtgtgagtccttcaactttgttcttctttttcaagtttgttttggctattatgggtccctacatttccatatgaattttaggatctacttgtcagtttctgcaaagaagcaaactggaattttgttcaggagtgtgttaaacctacagatttgggaactattgccattttaacagtattaaatcttctgatccagcctgggcaacagagtgaaactccatcatcatctcaaaacaaaacaaaacaaaaaaaaattgtgtaggactcaggctagaacattgaaatatattcaaaacaacaccaataatgcatatcctctttatttggctttttaaaatcactgtttattccatttggtagagggttttatttttttccatacaaatatttgaacaattttgaattccccaaaaccatacatagacgataaataccatgctattaaagtattaaatttgtacaaaaatactttacagtttaatacttgtttgttacaaataaaaatacatatttaagtgactcatgatctttttttcttttttcttaacatgatcctgctttatactttcttgccctggcggttctgaaatg

SEQ ID NO: 22662 - protein, 33 aa, Homo sapiens
MNFRIYLSVSAKKQTGILFRSVLNLQIWELLPF

SEQ ID NO: 22663 - DNA, 3797 bp, Homo sapiens
gtgattgtgaagggggaggaggctgtggcaggcaggggtggtagtagtagtgaatgacacagatttgccagatgacatgtagcggacctctgcatcagccaagaggaattaagctttgtcactccccactgggactacctttctcctggtatgtgcgcaaggaattcatatgctgctgctgctgcagccaccagagcagagagccttgagtacactttgccacagaaagcagtgagcaagaatgatagctgtctcttttaaatgccgttgtcaaattctgaggcgacttactaaagatgagagtccctacactaaatccgccagccagacaaagccgcctgatggagcgttggctgtgaggagacagagcatcccagaggaattcaagggctccacagtcgtcgagctgatgaagaaggaaggcactaccctgggtctgacggtatcgggaggaattgataaggatggcaagccaagagtatctaatctgcggcaaggaggaattgctgctagaagtgaccagctggatgtgggtgactacatcaaagcagtgaatggaatcaacctggccaaattccgccatgacgagatcatcagcttgctgaagaatgtgggagaaagagtggttcttgaagtagagtacgagcttccaccggtctctgtgcaaggatcaagtgttattttccgaacagtggaggtcacattacataaagaaggcaatacctttggttttgtaattcgagggggagcacatgatgatagaaataaatctcgtccagttgtgataacatgtgttcgtcctggagggcctgctgacagagagggcacgatcaaacccggtgacaggttgctcagtgtggatggaattcggcttcttggaactacgcatgctgaagccatgagtattcttaaacaatgtggacaagaagcagcactgctgatagaatatgatgtctcagtaatggactctgtggcaacagcatccgggccactactagtcgaagttgccaaaactcctggtgccagccttggggttgccctaactacctcgatgtgctgtaacaaacaagtcattgtcatagacaaaatcaaatctgcaagtattgcagacagatgtggcgcattgcatgtgggagatcacatcctctccatcgatggaaccagcatggagtactgtacacttgcagaagcaacccagttcctggccaacaccactgaccaggtcaagcttgagatccttccccatcatcagacccggctggccctaaaggggcccgaccatgtgaaaattcagaggagcgacaggcaacttacctgggattcctgggccagcaaccacagcagccttcacaccaaccatcactataacacgtaccaccctgaccattgcagagtaccagccctgacattcccgaaagcacctcctccaaacagccctccagctttggtgtcttcatccttctctcctacctccatgagtgcatacagcctgagttccctgaacatggggactctacctcgaagcctctactccaccagcccacgtggaaccatgatgaggaggagactgaaaaagaaagacttcaaaagctcattgtccttagcctccagcacagtaggattggctgggcaggttgttcacacagaaaccacagaggttgtgctgacggcagatcctgtcacaggatttgggatccaactgcagggcagtgtgtttgccacagaaactctctcttctccacctctgatttcctatatcgaagctgacagcccagcagagagatgtggggtgctacagattggagacagagtgatggccatcaatggaattccaacagaagacagcaccttcgaagaagccagtcagctcctccgagactcttcaatcacgagcaaggtcacactggaaatcgagtttgatgttgcagagtctgtcatcccaagtagtggaacatttcatgtaaagctgcctaagaagcacaatgtggaacttggaataaccataagttcaccatccagtagaaaaccaggagaccccctcgtcatttcagatatcaagaaagggagtgtggcacacagaactgggaccctggaacttggggataaattgctcgcaatagataatatccggctggacaactgttccatggaagatgcagttcagatcctccagcaatgtgaagacctggtgaagctcaaaatccgcaaagatgaagataattcagatgagcaagaaagttccggagcaattatttacaccgtggagcttaaacgctacggggggccccttggcatcacaatttcaggaactgaagagccgtttgatcctataatcatttcaagcctcactaaagggggattagctgaaagaactggcgcaatccacataggagaccgaatcctagccatcaatagcagcagcttgaaagggaagcctctgagtgaagccatccatttgttacagatggcaggagagactgtcaccttgaaaattaagaaacagacagatgcccagtcagcatcgagccccaagaagttccctatttctagccatttgagtgacctgggggatgtggaggaggactcctcaccagcacagaagccaggcaagctctccgacatgtacccctccacggtgcccagtgtggacagtgctgtggattcatgggatgggtctgcaatagacaccagctatggaactcaaggcactagttttcaggcctcaggatacaatttcaacacctatgactggaggagtccaaaacagagaggcagcttgtccccagtcactaagcctcgaagccagacttacccagatgtggggctgagttatgaagactgggaccggtccacagccagtggttttgcaggggctgccgatagtgcagagacagaacaagaggagaacttctggtctcaagcgctggaggatttggaaacctgcggacagtcaggaattctgagagaactggaggcaacaatcatgtcggggagcacgatgagtttgaatcatgaggctccaacacctcgcagtcagctggggcgacaggccagcttccaggagcgcagcagctcgcggccgcactacagccaaacaactcggagcaacaccctgccttcagatgtgggtaggaagtcagtaaccctgagaaaaatgaaacaagaaataaaggagatcatgtctccaactcctgtggagctgcacaaggtgaccttgtacaaggactctgacatggaggactttgggttcagtgtagcagatggcttactggagaaaggagtgtatgtcaaaaatattcgcccagctgggccaggagatcttggtggcttaaagccctatgacaggctcttacaggtgaatcatgtccgaaccagagactttgactgctgccttgttgtgcccctcatagcagaatccgggaataagctggacctggttattagtagaaacccactggcttcacagaagtctatagaccaacagagtctaccaggagattggagtgaacagaacagtgcttttttccagcagcctagccacggtggtaatttggagacacgagaacccactaatacattatagcaacgctttttataaagcaggacaaaagacaatatctacatggtgctaaaaatcctttaagatttctgtgacctttgaagcacagataatcaatcaacgtggcattaactgcaagcacaggggtcttttaaatctctctcatggctcatgttcacttcccttttcaagttgaagaggtttcttttttggtgaccactatggtatatggtgggca

SEQ ID NO: 22664 - protein, 1113 aa, Homo sapiens
MIAVSFKCRCQILRRLTKDESPYTKSASQTKPPDGALAVRRQSIPEEFKGSTVVELMKKEGTTLGLTVSGGIDKDGKPRVSNLRQGGIAARSDQLDVGDYIKAVNGINLAKFRHDEIISLLKNVGERVVLEVEYELPPVSVQGSSVIFRTVEVTLHKEGNTFGFVIRGGAHDDRNKSRPVVITCVRPGGPADREGTIKPGDRLLSVDGIRLLGTTHAEAMSILKQCGQEAALLIEYDVSVMDSVATASGPLLVEVAKTPGASLGVALTTSMCCNKQVIVIDKIKSASIADRCGALHVGDHILSIDGTSMEYCTLAEATQFLANTTDQVKLEILPHHQTRLALKGPDHVKIQRSDRQLTWDSWASNHSSLHTNHHYNTYHPDHCRVPALTFPKAPPPNSPPALVSSSFSPTSMSAYSLSSLNMGTLPRSLYSTSPRGTMMRRRLKKKDFKSSLSLASSTVGLAGQVVHTETTEVVLTADPVTGFGIQLQGSVFATETLSSPPLISYIEADSPAERCGVLQIGDRVMAINGIPTEDSTFEEASQLLRDSSITSKVTLEIEFDVAESVIPSSGTFHVKLPKKHNVELGITISSPSSRKPGDPLVISDIKKGSVAHRTGTLELGDKLLAIDNIRLDNCSMEDAVQILQQCEDLVKLKIRKDEDNSDEQESSGAIIYTVELKRYGGPLGITISGTEEPFDPIIISSLTKGGLAERTGAIHIGDRILAINSSSLKGKPLSEAIHLLQMAGETVTLKIKKQTDAQSASSPKKFPISSHLSDLGDVEEDSSPAQKPGKLSDMYPSTVPSVDSAVDSWDGSAIDTSYGTQGTSFQASGYNFNTYDWRSPKQRGSLSPVTKPRSQTYPDVGLSYEDWDRSTASGFAGAADSAETEQEENFWSQALEDLETCGQSGILRELEATIMSGSTMSLNHEAPTPRSQLGRQASFQERSSSRPHYSQTTRSNTLPSDVGRKSVTLRKMKQEIKEIMSPTPVELHKVTLYKDSDMEDFGFSVADGLLEKGVYVKNIRPAGPGDLGGLKPYDRLLQVNHVRTRDFDCCLVVPLIAESGNKLDLVISRNPLASQKSIDQQSLPGDWSEQNSAFFQQPSHGGNLETREPTNTL

SEQ ID NO: 22665 - DNA, 591 bp, Homo sapiens
tcagcaattacttgatgatgcacgtgtcaagagtcattctacatgctggagataccgtggtacagaagacagaggaggtccttgccctagtggagtcagcaagctaaaaagaaaacagaaaaactagtggcaagtacaatgaagaaaaccagatcaaagttttgggatggagtggtggaggtgttgaatgagagtccctacactaaatccgccagccagacaaagccgcctgatggagcgttggctgtgaggagacagagcatcccaggggatgactttcacaatagcatccatttctttactgagccatagctggcagaaataagggattcacaattgccgcaacagatcatgtatgctgaatgcaaaattattcttttcttctcatctctttgaacctgagtttgcttccattggacagctcttataaaatttgtgattttgtttccttaggaaagtgtgagtcatattattgtaatacaatgagtcatatatatgtctttccaacaaaacattttgaagaaatatctttaaatgtctttaccccaaaacgtcaatattttgaagctttgatttgtgaatgacacaaaa

SEQ ID NO: 22666 - protein, 57 aa, Homo sapiens
MKKTRSKFWDGVVEVLNESPYTKSASQTKPPDGALAVRRQSIPGDDFHNSIHFFTEP

SEQ ID NO: 22667 - DNA, 5598 bp, Homo sapiens
agtgcccttcagtgagcgctcgcaagaggacggcagaggcccggcagctcggagctccgggaccttgtggcgcatcaggacgcggctgtccctctgccgggacccagagccgccgccgccgctctgcctcctgcgtgttagcctcctctgcgcgctccgggcaggcggccgtgggagccgctggggcgaggacggcgcgaggctgctgctgctgcccccggcccgcgcggctggaaacggagaggccgagccaagcggcggcccctcttatgctgggaggatgctggagacagcagcagcagcaacagcagcagcagcagcagcaacaacagcccgggcaggggccggccgagccgtcccaacccagtggccccgctgtcgccagcctcgagccgccggtcaagctcaaggaactgcacttctccaacatgaagaccgtggactgtgtggagcgcaagggcaagtacatgtacttcactgtggtgatggcagagggcaaggagatcgactttcggtgcccgcaagaccagggctggaacgccgagatcacgctgcagatggtgcagtacaagaatcgtcaggccatcctggcggtcaaatccacgcggcagaagcagcagcacctggtccagcagcagcccccctcgcagccgcagccgcagccgcagctccagccccaaccccagcctcagcctcagccgcaaccccagccccaatcacaaccccagcctcagccccaacccaagcctcagccccagcagctccacccgtatccgcatccacatccacatccacactctcatcctcactcgcacccacaccctcacccgcacccgcatccgcaccaaataccgcacccacacccacagccgcactcgcagccgcacgggcaccggcttctccgcagcacctccaactctgcctgaaaggggcagctcccgggcaagacaaggttttgaggacttgaggaagtgggacgagcacatttctattgtcttcacttggatcaaaagcaaaacagtctctccgccccgcaccagatcaagtagtttggacatcaccctactgaaaacttgcgattcttcttagttttctgcatacttttcatcacgatgcaggaaacgatttcgagtcaagaagacttttatttatgaacctttgaaaggatcgtcttgtatggtgaattttctaggagcgatgatgtactgtaattttattttaatgtattttgatttatgattatttattagtttttttttaaatgcttgttctaagacatttctgaatgtagaccattttccaaaaaggaaactttattttcaaaaacctaatccgtagtaattcctaatcttggagaataaaaaagggcggtggaggggaaaacattaagaatttattcattatttctcgagtactttcagaaagtctgacactttcattgttgtgccagctggttgaaattaaaactctgatattactttttttgaggatttttatttttgtttttgcttaaacatatagtttgtctagaagtttaaaaagctaaaagttaaaaatggtgtaattatgaaaatctaacactcaagatagtttctaaaaggaaatcagtagttaaggatacctgatttcaaaatatttaaagcataacctaactgatggtaggatgattgtatcttgaatatgtggtagggccacatctattgtaggaaaaccttgcttttatcatctgtgtgtaaagggcttaataaggagaagaggccttttgactgatttgtgagtataaatgcatttgctgtttcatttcaaaaatgttgtggaggaaaagagtacatttaacttgtataagagaatatttgtactcctgtccaggctgcaggacctttcttcgagagctttgcacacttgacttgaaccacattttctgatccctttactttgttttagaagcacactgaaaaatctcgttgtttaaagtacaatttgtaaatatttcaaaggtctaggagtcataacttttgttttcatactgaaaatgatgttgatcagagaaaccaactgttttgcttttcattgctctgtgagaaatttgaggattctgttttgctgttaggtaagctaaactcagaaattgaaaaggaaaagactggataaacacaggattttcagtaagaaaacaaccccagtcttgtcttagaagccacttgttgaggagtctgttgggggaaaaaagaggatatgcttttaaaggtagaacaaaccttcttctgtgttaaatcaaaaggatgttcaaaatccaccaggacagatgctacttgggtttaaatggagccatagatgatacaaagtcctcttggggctgaaaatcacttcctatttgcatggctttactaactggtttctgttttccattatctttttcacagaaagtcttggtcagtatttttccagcatttaaattgaaacggtcagtattagaccactgctaggttatgtagtcaagaaataaaaatagaattacatgctacagatgtctttattctccttccatctagaaaggagttccaaggtcaaattactttttagtgcaatagttaaatgacattttgagatcataactcatatccaaaaagttgcagggaaaattaaaatagctttcccctattaagctaatggcaaacaaaacttaagtggacccccacttccagtggttgtttaggttgcagttgtgaaaatatgctgccaacatttaaaaacttgtttcatatgtatatatgtatacacatatatgaatatgtatgtatatatacatatatgagaacatgtgtgtacacatatatgaatatgtatatatgtgtatgtatgtatatatgtatatgaaatgagagccacatctaaagatttcttaaatcaagtttggttcagcttccttagaactgtggctgtactttttgaggagtacctcatagtactatatttttaatgcatgcaaatcataatagctccaaatgaaccacagttttttcccaatggaggatttttttttaattcttgtactaaaaaaaaaaaatccataccaaatatttttacaaattaagattgatgtaggttttaaaaaaggcatttgtatgttgttagcttacatatggggctaggtaatttcattgcttaaaaagatgcgcctaggctccctcttggtggctggatttctttttcttcgcccgtggtggccatggttcttaatagggccaccggaatcatggtttctttttttttttttttttttgagatggagtctcgccctgtgacccaggctggagtgcagtggcacgatctcggctcactgcaacctctgcctcctgggttcacgccattctcctgtctcagcctcctgagtagctgggactacaggtgaatgccaccacgcccggctgatttttgtatttttagtagagatggggtttcaccatagtggtcaggctgttctcgaactcctgacctcaggtgatccacctgccttggcctcccaaagtgctaggattacaggtgtgagccaccacacccggccccagaataatggtttcttgactttctgtagcccttgttccttagtctgctgtgatatttatgttgacctttatcattttctattctgaacccctcttagcatttaatgtgaaatctaagaaattagaagtagaatggcttttattgttttgacacctttgaaattattattaataatttttccagagcaaaaaagcaaacacgctcaataagactaaacaaaacaaaatataaatgtacatcatttaatgtcccagtggctctattctacctgtaagaaaatgatacaaaaccacctaagatattttgaagcctgacaaatcagcttcatggaaaaaggtaaaaaatgcatttttcaaccgaaagggcagatccaatagaagacccgctccttaaataaacataaaatgtaaaaagttggaaaattaagagtaatgttccatctggaaactgaacttttgtccttgaacttgtgttggcaccaagcctcatacacagtgagctcaataactgttgggacaaaggaaggaaggacaaaatgtgtaacttcccagcatctgggagatgctgtctcttgcctcactgagtgttccttttctttgctctcatgtcattccctgagaacaatgaattctgggacaggctaaacatcatgatgaagtttcttaaacagactttcttagtggaaatccatttagatctgggtgtgctctatggggagtgctgacgtcaaagagcaaatgtctataaggggcccttttaaaatgaacattttcctcattgagcaagctgggattctctaatgtagaaatcaagccatctttataatttcacttcagatgtttatgtttttgttttttttgtctccaatgatggtaaaaataaaaactacgcattacttaaaggagtttccctcacatgtaaacactgttaggaagtctggattaagttgaaagtcctgttttaactttttttctctcatataccaaacactctgtatttctcttaaagaagccctttaagagaaagccctaattttatatctgacagtaaagtttgctgcaagtgtatgagttcaaacacatcccttgttttctgtccctaggggaaaagtcatgtagttttagcttggctccagtgttaatattatattcagtagcagccttagaagagtggtctaagacttgaacctggagcaattttatagcacagaatcctacgaagataggactgtgaacatttgttttctttttcgtgtgtgtcaaactaactggtttttgctttaccaataaaatgtcctcggcagagtaaattttaaacgtgaaaattatagatcttgatattgaatccatcagtgattcaagagatacacctatttgcctaaaacaacctaagatgtattggttatggaatcatgtgttggataggttcttaagacctgtttcctcaaatcttgacacagttttcaagggtggcttattgacttgcacggttgggcagataatccagatttacctaagattgggtaaaaaagtcatctgtgactttgctggcagggcatttgctaagtggagtacaggatctaaaagggttttcttagaaagggcaatattgtccaatgaagtaagcagaaggactctgggttagaagcatctgcacaaaaactggtgagacctactctccactgctctgcagctggatggctgatggcaggctgagcagtggggaagcaggttttaacaacagggagtccttccaggtcactgtatattgagaagaaacataaaactattgtctgttacattccgaggtcagccttcttcttaacgttttataatatgcaaatgccagcttctggaaagcaagtatcatcatgtaccaaatgctttatacaccatcacattcatgaattttttagcatggtcagaacttgtgtaaatatgtctcttagatgattttggggagatgtgatttatttttcatattttcaaaatgcatttcatttcaaataaagttatctattgagacaaccga

SEQ ID NO: 22668 - protein, 228 aa, Homo sapiens
MLETAAAATAAAAAATTARAGAGRAVPTQWPRCRQPRAAGQAQGTALLQHEDRGLCGAQGQVHVLHCGDGRGQGDRLSVPARPGLERRDHAADGAVQESSGHPGGQIHAAEAAAPGPAAAPLAAAAAAAAPAPTPASASAATPAPITTPASAPTQASAPAAPPVSASTSTSTLSSSLAPTPSPAPASAPNTAPTPTAALAAARAPASPQHLQLCLKGAAPGQDKVLRT

SEQ ID NO: 22669 - DNA, 5326 bp, Homo sapiens
ggcgtgcgccggctgccgagcgcctcttggagctgggctttcccccgcggtgcgggcgccaggagccgccttttccgctgggtgtcactcgggggtggggaagatggcccattcaaaagcgccgcgagggggcccggccagtgcccttcagtgagcgctcgcaagaggacggcagaggcccggcagctcggagctccgggaccttgtggcgcatcaggacgcggctgtccctctgccgggacccagagccgccgccgccgctctgcctcctgcgtgttagcctcctctgcgcgctccgggcaggcggccgtgggagccgctggggcgaggacggcgcgaggctgctgctgctgcccccggcccgcgcggctggaaacggagaggccgagccaagcggcggcccctcttatgctgggaggatgctggagagtagcggctgcaaagcgctgaaggagggcgtgctggagaagcgcacctcagccccagcagctccacccgtatccgcatccacatccacatccacactctcatcctcactcgcacccacaccctcacccgcacccgcatccgcaccaaataccgcacccacacccacagccgcactcgcagccgcacgggcaccggcttctccgcagcacctccaactctgcctgaaaggggcagctcccgggcaagacaaggttttgaggacttgaggaagtgggacgagcacatttctattgtcttcacttggatcaaaagcaaaacagtctctccgccccgcaccagatcaagtagtttggacatcaccctactgaaaacttgcgattcttcttagttttctgcatacttttcatcacgatgcaggaaacgatttcgagtcaagaagacttttatttatgaacctttgaaaggatcgtcttgtatggtgaattttctaggagcgatgatgtactgtaattttattttaatgtattttgatttatgattatttattagtttttttttaaatgcttgttctaagacatttctgaatgtagaccattttccaaaaaggaaactttattttcaaaaacctaatccgtagtaattcctaatcttggagaataaaaaagggcggtggaggggaaaacattaagaatttattcattatttctcgagtactttcagaaagtctgacactttcattgttgtgccagctggttgaaattaaaactctgatattactttttttgaggatttttatttttgtttttgcttaaacatatagtttgtctagaagtttaaaaagctaaaagttaaaaatggtgtaattatgaaaatctaacactcaagatagtttctaaaaggaaatcagtagttaaggatacctgatttcaaaatatttaaagcataacctaactgatggtaggatgattgtatcttgaatatgtggtagggccacatctattgtaggaaaaccttgcttttatcatctgtgtgtaaagggcttaataaggagaagaggccttttgactgatttgtgagtataaatgcatttgctgtttcatttcaaaaatgttgtggaggaaaagagtacatttaacttgtataagagaatatttgtactcctgtccaggctgcaggacctttcttcgagagctttgcacacttgacttgaaccacattttctgatccctttactttgttttagaagcacactgaaaaatctcgttgtttaaagtacaatttgtaaatatttcaaaggtctaggagtcataacttttgttttcatactgaaaatgatgttgatcagagaaaccaactgttttgcttttcattgctctgtgagaaatttgaggattctgttttgctgttaggtaagctaaactcagaaattgaaaaggaaaagactggataaacacaggattttcagtaagaaaacaaccccagtcttgtcttagaagccacttgttgaggagtctgttgggggaaaaaagaggatatgcttttaaaggtagaacaaaccttcttctgtgttaaatcaaaaggatgttcaaaatccaccaggacagatgctacttgggtttaaatggagccatagatgatacaaagtcctcttggggctgaaaatcacttcctatttgcatggctttactaactggtttctgttttccattatctttttcacagaaagtcttggtcagtatttttccagcatttaaattgaaacggtcagtattagaccactgctaggttatgtagtcaagaaataaaaatagaattacatgctacagatgtctttattctccttccatctagaaaggagttccaaggtcaaattactttttagtgcaatagttaaatgacattttgagatcataactcatatccaaaaagttgcagggaaaattaaaatagctttcccctattaagctaatggcaaacaaaacttaagtggacccccacttccagtggttgtttaggttgcagttgtgaaaatatgctgccaacatttaaaaacttgtttcatatgtatatatgtatacacatatatgaatatgtatgtatatatacatatatgagaacatgtgtgtacacatatatgaatatgtatatatgtgtatgtatgtatatatgtatatgaaatgagagccacatctaaagatttcttaaatcaagtttggttcagcttccttagaactgtggctgtactttttgaggagtacctcatagtactatatttttaatgcatgcaaatcataatagctccaaatgaaccacagttttttcccaatggaggatttttttttaattcttgtactaaaaaaaaaaaatccataccaaatatttttacaaattaagattgatgtaggttttaaaaaaggcatttgtatgttgttagcttacatatggggctaggtaatttcattgcttaaaaagatgcgcctaggctccctcttggtggctggatttctttttcttcgcccgtggtggccatggttcttaatagggccaccggaatcatggtttctttttttttttttttttttgagatggagtctcgccctgtgacccaggctggagtgcagtggcacgatctcggctcactgcaacctctgcctcctgggttcacgccattctcctgtctcagcctcctgagtagctgggactacaggtgaatgccaccacgcccggctgatttttgtatttttagtagagatggggtttcaccatagtggtcaggctgttctcgaactcctgacctcaggtgatccacctgccttggcctcccaaagtgctaggattacaggtgtgagccaccacacccggccccagaataatggtttcttgactttctgtagcccttgttccttagtctgctgtgatatttatgttgacctttatcattttctattctgaacccctcttagcatttaatgtgaaatctaagaaattagaagtagaatggcttttattgttttgacacctttgaaattattattaataatttttccagagcaaaaaagcaaacacgctcaataagactaaacaaaacaaaatataaatgtacatcatttaatgtcccagtggctctattctacctgtaagaaaatgatacaaaaccacctaagatattttgaagcctgacaaatcagcttcatggaaaaaggtaaaaaatgcatttttcaaccgaaagggcagatccaatagaagacccgctccttaaataaacataaaatgtaaaaagttggaaaattaagagtaatgttccatctggaaactgaacttttgtccttgaacttgtgttggcaccaagcctcatacacagtgagctcaataactgttgggacaaaggaaggaaggacaaaatgtgtaacttcccagcatctgggagatgctgtctcttgcctcactgagtgttccttttctttgctctcatgtcattccctgagaacaatgaattctgggacaggctaaacatcatgatgaagtttcttaaacagactttcttagtggaaatccatttagatctgggtgtgctctatggggagtgctgacgtcaaagagcaaatgtctataaggggcccttttaaaatgaacattttcctcattgagcaagctgggattctctaatgtagaaatcaagccatctttataatttcacttcagatgtttatgtttttgttttttttgtctccaatgatggtaaaaataaaaactacgcattacttaaaggagtttccctcacatgtaaacactgttaggaagtctggattaagttgaaagtcctgttttaactttttttctctcatataccaaacactctgtatttctcttaaagaagccctttaagagaaagccctaattttatatctgacagtaaagtttgctgcaagtgtatgagttcaaacacatcccttgttttctgtccctaggggaaaagtcatgtagttttagcttggctccagtgttaatattatattcagtagcagccttagaagagtggtctaagacttgaacctggagcaattttatagcacagaatcctacgaagataggactgtgaacatttgttttctttttcgtgtgtgtcaaactaactggtttttgctttaccaataaaatgtcctcggcagagtaaattttaaacgtgaaaattatagatcttgatattgaatccatcagtgattcaagagatacacctatttgcctaaaacaacctaagatgtattggttatggaatcatgtgttggataggttcttaagacctgtttcctcaaatcttgacacagttttcaagggtggcttattgacttgcacggttgggcagataatccagatttacctaagattgggtaaaaaagtcatctgtgactttgctggcagggcatttgctaagtggagtacaggatctaaaagggttttcttagaaagggcaatattgtccaatgaagtaagcagaaggactctgggttagaagcatctgcacaaaaactggtgagacctactctccactgctctgcagctggatggctgatggcaggctgagcagtggggaagcaggttttaacaacagggagtccttccaggtcactgtatattgagaagaaacataaaactattgtctgttacattccgaggtcagccttcttcttaacgttttataatatgcaaatgccagcttctggaaagcaagtatcatcatgtaccaaatgctttatacaccatcacattcatgaattttttagcatggtcagaacttgtgtaaatatgtctcttagatgattttggggagatgtgatttatttttcatattttcaaaatgcatttcatttcaaataaagttatctattgagacaaccga

SEQ ID NO: 22670 - protein, 91 aa, Homo sapiens
MLESSGCKALKEGVLEKRTSAPAAPPVSASTSTSTLSSSLAPTPSPAPASAPNTAPTPTAALAAARAPASPQHLQLCLKGAAPGQDKVLRT

SEQ ID NO: 22671 - DNA, 6038 bp, Homo sapiens
ctccttgggcgatcgccctgggtagaggagaggagtttccggggctcgggtccgggtcgccttccaggggaacgagcgcggaagcaagtgggcggcgagaggcggagcaagagacgctggagggcgtggacgcagcgggctttggaaaggccccaagttaatgaggcgtgcgccggctgccgagcgcctcttggagctgggctttcccccgcggtgcgggcgccaggagccgccttttccgctgggtgtcactcgggggtggggaagatggcccattcaaaagcgccgcgagggggcccggccagtgcccttcagtgagcgctcgcaagaggacggcagaggcccggcagctcggagctccgggaccttgtggcgcatcaggacgcggctgtccctctgccgggacccagagccgccgccgccgctctgcctcctgcgtgttagcctcctctgcgcgctccgggcaggcggccgtgggagccgctggggcgaggacggcgcgaggctgctgctgctgcccccggcccgcgcggctggaaacggagaggccgagccaagcggcggcccctcttatgctgggaggatgctggagagtagcggctgcaaagcgctgaaggagggcgtgctggagaagcgcagcgacgggttgttgcagctctggaagaaaaagtgttgcatcctcaccgaggaagggctgctgcttatcccgcccaagcagctgcaacaccagcagcagcagcagcaacagcagcagcagcagcagcaacaacagcccgggcaggggccggccgagccgtcccaacccagtggccccgctgtcgccagcctcgagccgccggtcaagctcaaggaactgcacttctccaacatgaagaccgtggactgtgtggagcgcaagggcaagtacatgtacttcactgtggtgatggcagagggcaaggagatcgactttcggtgcccgcaagaccagggctggaacgccgagatcacgctgcagatggtgcagtacaagaatcgtcaggccatcctggcggtcaaatccacgcggcagaagcagcagcacctggtccagcagcagcccccctcgcagccgcagccgcagccgcagctccagccccaaccccagcctcagcctcagccgcaaccccagccccaatcacaaccccagcctcagccccaacccaagcctcagccccagcagctccacccgtatccgcatccacatccacatccacactctcatcctcactcgcacccacaccctcacccgcacccgcatccgcaccaaataccgcacccacacccacagccgcactcgcagccgcacgggcaccggcttctccgcagcacctccaactctgcctgaaaggggcagctcccgggcaagacaaggttttgaggacttgaggaagtgggacgagcacatttctattgtcttcacttggatcaaaagcaaaacagtctctccgccccgcaccagatcaagtagtttggacatcaccctactgaaaacttgcgattcttcttagttttctgcatacttttcatcacgatgcaggaaacgatttcgagtcaagaagacttttatttatgaacctttgaaaggatcgtcttgtatggtgaattttctaggagcgatgatgtactgtaattttattttaatgtattttgatttatgattatttattagtttttttttaaatgcttgttctaagacatttctgaatgtagaccattttccaaaaaggaaactttattttcaaaaacctaatccgtagtaattcctaatcttggagaataaaaaagggcggtggaggggaaaacattaagaatttattcattatttctcgagtactttcagaaagtctgacactttcattgttgtgccagctggttgaaattaaaactctgatattactttttttgaggatttttatttttgtttttgcttaaacatatagtttgtctagaagtttaaaaagctaaaagttaaaaatggtgtaattatgaaaatctaacactcaagatagtttctaaaaggaaatcagtagttaaggatacctgatttcaaaatatttaaagcataacctaactgatggtaggatgattgtatcttgaatatgtggtagggccacatctattgtaggaaaaccttgcttttatcatctgtgtgtaaagggcttaataaggagaagaggccttttgactgatttgtgagtataaatgcatttgctgtttcatttcaaaaatgttgtggaggaaaagagtacatttaacttgtataagagaatatttgtactcctgtccaggctgcaggacctttcttcgagagctttgcacacttgacttgaaccacattttctgatccctttactttgttttagaagcacactgaaaaatctcgttgtttaaagtacaatttgtaaatatttcaaaggtctaggagtcataacttttgttttcatactgaaaatgatgttgatcagagaaaccaactgttttgcttttcattgctctgtgagaaatttgaggattctgttttgctgttaggtaagctaaactcagaaattgaaaaggaaaagactggataaacacaggattttcagtaagaaaacaaccccagtcttgtcttagaagccacttgttgaggagtctgttgggggaaaaaagaggatatgcttttaaaggtagaacaaaccttcttctgtgttaaatcaaaaggatgttcaaaatccaccaggacagatgctacttgggtttaaatggagccatagatgatacaaagtcctcttggggctgaaaatcacttcctatttgcatggctttactaactggtttctgttttccattatctttttcacagaaagtcttggtcagtatttttccagcatttaaattgaaacggtcagtattagaccactgctaggttatgtagtcaagaaataaaaatagaattacatgctacagatgtctttattctccttccatctagaaaggagttccaaggtcaaattactttttagtgcaatagttaaatgacattttgagatcataactcatatccaaaaagttgcagggaaaattaaaatagctttcccctattaagctaatggcaaacaaaacttaagtggacccccacttccagtggttgtttaggttgcagttgtgaaaatatgctgccaacatttaaaaacttgtttcatatgtatatatgtatacacatatatgaatatgtatgtatatatacatatatgagaacatgtgtgtacacatatatgaatatgtatatatgtgtatgtatgtatatatgtatatgaaatgagagccacatctaaagatttcttaaatcaagtttggttcagcttccttagaactgtggctgtactttttgaggagtacctcatagtactatatttttaatgcatgcaaatcataatagctccaaatgaaccacagttttttcccaatggaggatttttttttaattcttgtactaaaaaaaaaaaatccataccaaatatttttacaaattaagattgatgtaggttttaaaaaaggcatttgtatgttgttagcttacatatggggctaggtaatttcattgcttaaaaagatgcgcctaggctccctcttggtggctggatttctttttcttcgcccgtggtggccatggttcttaatagggccaccggaatcatggtttctttttttttttttttttttgagatggagtctcgccctgtgacccaggctggagtgcagtggcacgatctcggctcactgcaacctctgcctcctgggttcacgccattctcctgtctcagcctcctgagtagctgggactacaggtgaatgccaccacgcccggctgatttttgtatttttagtagagatggggtttcaccatagtggtcaggctgttctcgaactcctgacctcaggtgatccacctgccttggcctcccaaagtgctaggattacaggtgtgagccaccacacccggccccagaataatggtttcttgactttctgtagcccttgttccttagtctgctgtgatatttatgttgacctttatcattttctattctgaacccctcttagcatttaatgtgaaatctaagaaattagaagtagaatggcttttattgttttgacacctttgaaattattattaataatttttccagagcaaaaaagcaaacacgctcaataagactaaacaaaacaaaatataaatgtacatcatttaatgtcccagtggctctattctacctgtaagaaaatgatacaaaaccacctaagatattttgaagcctgacaaatcagcttcatggaaaaaggtaaaaaatgcatttttcaaccgaaagggcagatccaatagaagacccgctccttaaataaacataaaatgtaaaaagttggaaaattaagagtaatgttccatctggaaactgaacttttgtccttgaacttgtgttggcaccaagcctcatacacagtgagctcaataactgttgggacaaaggaaggaaggacaaaatgtgtaacttcccagcatctgggagatgctgtctcttgcctcactgagtgttccttttctttgctctcatgtcattccctgagaacaatgaattctgggacaggctaaacatcatgatgaagtttcttaaacagactttcttagtggaaatccatttagatctgggtgtgctctatggggagtgctgacgtcaaagagcaaatgtctataaggggcccttttaaaatgaacattttcctcattgagcaagctgggattctctaatgtagaaatcaagccatctttataatttcacttcagatgtttatgtttttgttttttttgtctccaatgatggtaaaaataaaaactacgcattacttaaaggagtttccctcacatgtaaacactgttaggaagtctggattaagttgaaagtcctgttttaactttttttctctcatataccaaacactctgtatttctcttaaagaagccctttaagagaaagccctaattttatatctgacagtaaagtttgctgcaagtgtatgagttcaaacacatcccttgttttctgtccctaggggaaaagtcatgtagttttagcttggctccagtgttaatattatattcagtagcagccttagaagagtggtctaagacttgaacctggagcaattttatagcacagaatcctacgaagataggactgtgaacatttgttttctttttcgtgtgtgtcaaactaactggtttttgctttaccaataaaatgtcctcggcagagtaaattttaaacgtgaaaattatagatcttgatattgaatccatcagtgattcaagagatacacctatttgcctaaaacaacctaagatgtattggttatggaatcatgtgttggataggttcttaagacctgtttcctcaaatcttgacacagttttcaagggtggcttattgacttgcacggttgggcagataatccagatttacctaagattgggtaaaaaagtcatctgtgactttgctggcagggcatttgctaagtggagtacaggatctaaaagggttttcttagaaagggcaatattgtccaatgaagtaagcagaaggactctgggttagaagcatctgcacaaaaactggtgagacctactctccactgctctgcagctggatggctgatggcaggctgagcagtggggaagcaggttttaacaacagggagtccttccaggtcactgtatattgagaagaaacataaaactattgtctgttacattccgaggtcagccttcttcttaacgttttataatatgcaaatgccagcttctggaaagcaagtatcatcatgtaccaaatgctttatacaccatcacattcatgaattttttagcatggtcagaacttgtgtaaatatgtctcttagatgattttggggagatgtgatttatttttcatattttcaaaatgcatttcatttcaaataaagttatctattgagacaaccga

SEQ ID NO: 22672 - protein, 401 aa, Homo sapiens; identical to SEQ ID NO: 2981

SEQ ID NO: 22673 - DNA, 4465 bp, Homo sapiens
agtgcccttcagtgagcgctcgcaagaggacggcagaggcccggcagctcggagctccgggaccttgtggcgcatcaggacgcggctgtccctctgccgggacccagagccgccgccgccgctctgcctcctgcgtgttagcctcctctgcgcgctccgggcaggcggccgtgggagccgctggggcgaggacggcgcgaggctgctgctgctgcccccggcccgcgcggctggaaacggagaggccgagccaagcggcggcccctcttatgctgggaggatgctggagacagcagcagcagcaacagcagcagcagcagcagcaacaacagcccgggcaggggccggccgagccgtcccaacccagtggccccgctgtcgccagcctcgagccgccggtcaagctcaaggaactgcacttctccaacatgaagaccgtggactgtgtggagcgcaagggcaagtacatgtacttcactgtggtgatggcagagggcaaggagatcgactttcggtgcccgcaagaccagggctggaacgccgagatcacgctgcagatggtgcagtacaagaatcgtcaggccatcctggcggtcaaatccacgcggcagaagcagcagcacctggtccagcagcagcccccctcgcagccgcagccgcagccgcagctccagccccaaccccagcctcagcctcagccgcaaccccagccccaatcacaaccccagcctcagccccaacccaagcctcagccccagcagctccacccgtatccgcatccacatccacatccacactctcatcctcactcgcacccacaccctcacccgcacccgcatccgcaccaaataccgcacccacacccacagccgcactcgcagccgcacgggcaccggcttctccgcagcacctccaactctgcctgaaaggggcagctcccgggcaagacaaggttttgaggacttgaggaagtgggacgagcacatttctattgtcttcacttggatcaaaagcaaaacagtctctccgccccgcaccagatcaagtagtttggacatcaccctactgaaaacttgcgattcttcttagttttctgcatacttttcatcacgatgcaggaaacgatttcgagtcaagaagacttttatttatgaacctttgaaaggatcgtcttgtatggtgaattttctaggagcgatgatgtactgtaattttattttaatgtattttgatttatgattatttattagtttttttttaaatgcttgttctaagacatttctgaatgtagaccattttccaaaaaggaaactttattttcaaaaacctaatccgtagtaattcctaatcttggagaataaaaaagggcggtggaggggaaaacattaagaatttattcattatttctcgagtactttcagaaagtctgacactttcattgttgtgccagctggttgaaattaaaactctgatattactttttttgaggatttttatttttgtttttgcttaaacatatagtttgtctagaagtttaaaaagctaaaagttaaaaatggtgtaattatgaaaatctaacactcaagatagtttctaaaaggaaatcagtagttaaggatacctgatttcaaaatatttaaagcataacctaactgatggtaggatgattgtatcttgaatatgtggtagggccacatctattgtaggaaaaccttgcttttatcatctgtgtgtaaagggcttaataaggagaagaggccttttgactgatttgtgagtataaatgcatttgctgtttcatttcaaaaatgttgtggaggaaaagagtacatttaacttgtataagagaatatttgtactcctgtccaggctgcaggacctttcttcgagagctttgcacacttgacttgaaccacattttctgatccctttactttgttttagaagcacactgaaaaatctcgttgtttaaagtacaatttgtaaatatttcaaaggtctaggagtcataacttttgttttcatactgaaaatgatgttgatcagagaaaccaactgttttgcttttcattgctctgtgagaaatttgaggattctgttttgctgttaggtaagctaaactcagaaattgaaaaggaaaagactggataaacacaggattttcagtaagaaaacaaccccagtcttgtcttagaagccacttgttgaggagtctgttgggggaaaaaagaggatatgcttttaaaggtagaacaaaccttcttctgtgttaaatcaaaaggatgttcaaaatccaccaggacagatgctacttgggtttaaatggagccatagatgatacaaagtcctcttggggctgaaaatcacttcctatttgcatggctttactaactggtttctgttttccattatctttttcacagaaagtcttggtcagtatttttccagcatttaaattgaaacggtcagtattagaccactgctaggttatgtagtcaagaaataaaaatagaattacatgctacagatgtctttattctccttccatctagaaaggagttccaaggtcaaattactttttagtgcaatagttaaatgacattttgagatcataactcatatccaaaaagttgcagggaaaattaaaatagctttcccctattaagctaatggcaaacaaaacttaagtggacccccacttccagtggttgtttaggttgcagttgtgaaaatatgctgccaacatttaaaaacttgtttcatatgtatatatgtatacacatatatgaatatgtatgtatatatacatatatgagaacatgtgtgtacacatatatgaatatgtatatatgtgtatgtatgtatatatgtatatgaaatgagagccacatctaaagatttcttaaatcaagtttggttcagcttccttagaactgtggctgtactttttgaggagtacctcatagtactatatttttaatgcatgcaaatcataatagctccaaatgaaccacagttttttcccaatggaggatttttttttaattcttgtactaaaaaaaaaaaatccataccaaatatttttacaaattaagattgatgtaggttttaaaaaaggcatttgtatgttgttagcttacatatggggctaggtaatttcattgcttaaaaagatgcgcctaggctccctcttggtggctggatttctttttcttcgcccgtggtggccatggttcttaatagggccaccggaatcatggtttctttttttttttttttttttgagatggagtctcgccctgtgacccaggctggagtgcagtggcacgatctcggctcactgcaacctctgcctcctgggttcacgccattctcctgtctcagcctcctgagtagctgggactacaggtgaatgccaccacgcccggctgatttttgtatttttagtagagatggggtttcaccatagtggtcaggctgttctcgaactcctgacctcaggtgatccacctgccttggcctcccaaagtgctaggattacaggtgtgagccaccacacccggccccagaataatggtttcttgactttctgtagcccttgttccttagtctgctgtgatatttatgttgacctttatcattttctattctgaacccctcttagcatttaatgtgaaatctaagaaattagaagtagaatggcttttattgttttgacacctttgaaattattattaataatttttccagagcaaaaaagcaaacacgctcaataagactaaacaaaacaaaatataaatgtacatcatttaatgtcccagtggctctattctacctgtaagaaaatgatacaaaaccacctaagatattttgaagcctgacaaatcagcttcatggaaaaaggtaaaaaatgcatttttcaaccgaaagggcagatccaatagaagacccgctccttaaataaacataaaatgtaaaaagttggaaaattaagagtaatgttccatctggaaactgaacttttgtccttgaacttgtgttggcaccaagcctcatacacagtgagctcaataactgttgggacaaaggaaggaaggacaaaatgtgtaacttcccagcatctgggagatgctgtctcttgcctcactgagtgttccttttctttgctctcatgtcattccctgagaacaatgaattctgggacaggctaaacatcatgatgaagtttcttaaacagactttcttagtggaaatccatttagatctgggtgtgctctatggggagtgctgacgtcaaagagcaaatgtctataaggggcccttttaaaatgaacattttcctcattgagcaagctgggattctctaatgtagaaatcaagccatctttataatttcacttcagatgtttatgtttttgttttttttgtctccaatgatggtaaaaataaaaactacgcattactt

SEQ ID NO: 22674 - protein, 228 aa, Homo sapiens; identical to SEQ ID NO: 22668

SEQ ID NO: 22675 - DNA, 4193 bp, Homo sapiens
ggcgtgcgccggctgccgagcgcctcttggagctgggctttcccccgcggtgcgggcgccaggagccgccttttccgctgggtgtcactcgggggtggggaagatggcccattcaaaagcgccgcgagggggcccggccagtgcccttcagtgagcgctcgcaagaggacggcagaggcccggcagctcggagctccgggaccttgtggcgcatcaggacgcggctgtccctctgccgggacccagagccgccgccgccgctctgcctcctgcgtgttagcctcctctgcgcgctccgggcaggcggccgtgggagccgctggggcgaggacggcgcgaggctgctgctgctgcccccggcccgcgcggctggaaacggagaggccgagccaagcggcggcccctcttatgctgggaggatgctggagagtagcggctgcaaagcgctgaaggagggcgtgctggagaagcgcacctcagccccagcagctccacccgtatccgcatccacatccacatccacactctcatcctcactcgcacccacaccctcacccgcacccgcatccgcaccaaataccgcacccacacccacagccgcactcgcagccgcacgggcaccggcttctccgcagcacctccaactctgcctgaaaggggcagctcccgggcaagacaaggttttgaggacttgaggaagtgggacgagcacatttctattgtcttcacttggatcaaaagcaaaacagtctctccgccccgcaccagatcaagtagtttggacatcaccctactgaaaacttgcgattcttcttagttttctgcatacttttcatcacgatgcaggaaacgatttcgagtcaagaagacttttatttatgaacctttgaaaggatcgtcttgtatggtgaattttctaggagcgatgatgtactgtaattttattttaatgtattttgatttatgattatttattagtttttttttaaatgcttgttctaagacatttctgaatgtagaccattttccaaaaaggaaactttattttcaaaaacctaatccgtagtaattcctaatcttggagaataaaaaagggcggtggaggggaaaacattaagaatttattcattatttctcgagtactttcagaaagtctgacactttcattgttgtgccagctggttgaaattaaaactctgatattactttttttgaggatttttatttttgtttttgcttaaacatatagtttgtctagaagtttaaaaagctaaaagttaaaaatggtgtaattatgaaaatctaacactcaagatagtttctaaaaggaaatcagtagttaaggatacctgatttcaaaatatttaaagcataacctaactgatggtaggatgattgtatcttgaatatgtggtagggccacatctattgtaggaaaaccttgcttttatcatctgtgtgtaaagggcttaataaggagaagaggccttttgactgatttgtgagtataaatgcatttgctgtttcatttcaaaaatgttgtggaggaaaagagtacatttaacttgtataagagaatatttgtactcctgtccaggctgcaggacctttcttcgagagctttgcacacttgacttgaaccacattttctgatccctttactttgttttagaagcacactgaaaaatctcgttgtttaaagtacaatttgtaaatatttcaaaggtctaggagtcataacttttgttttcatactgaaaatgatgttgatcagagaaaccaactgttttgcttttcattgctctgtgagaaatttgaggattctgttttgctgttaggtaagctaaactcagaaattgaaaaggaaaagactggataaacacaggattttcagtaagaaaacaaccccagtcttgtcttagaagccacttgttgaggagtctgttgggggaaaaaagaggatatgcttttaaaggtagaacaaaccttcttctgtgttaaatcaaaaggatgttcaaaatccaccaggacagatgctacttgggtttaaatggagccatagatgatacaaagtcctcttggggctgaaaatcacttcctatttgcatggctttactaactggtttctgttttccattatctttttcacagaaagtcttggtcagtatttttccagcatttaaattgaaacggtcagtattagaccactgctaggttatgtagtcaagaaataaaaatagaattacatgctacagatgtctttattctccttccatctagaaaggagttccaaggtcaaattactttttagtgcaatagttaaatgacattttgagatcataactcatatccaaaaagttgcagggaaaattaaaatagctttcccctattaagctaatggcaaacaaaacttaagtggacccccacttccagtggttgtttaggttgcagttgtgaaaatatgctgccaacatttaaaaacttgtttcatatgtatatatgtatacacatatatgaatatgtatgtatatatacatatatgagaacatgtgtgtacacatatatgaatatgtatatatgtgtatgtatgtatatatgtatatgaaatgagagccacatctaaagatttcttaaatcaagtttggttcagcttccttagaactgtggctgtactttttgaggagtacctcatagtactatatttttaatgcatgcaaatcataatagctccaaatgaaccacagttttttcccaatggaggatttttttttaattcttgtactaaaaaaaaaaaatccataccaaatatttttacaaattaagattgatgtaggttttaaaaaaggcatttgtatgttgttagcttacatatggggctaggtaatttcattgcttaaaaagatgcgcctaggctccctcttggtggctggatttctttttcttcgcccgtggtggccatggttcttaatagggccaccggaatcatggtttctttttttttttttttttttgagatggagtctcgccctgtgacccaggctggagtgcagtggcacgatctcggctcactgcaacctctgcctcctgggttcacgccattctcctgtctcagcctcctgagtagctgggactacaggtgaatgccaccacgcccggctgatttttgtatttttagtagagatggggtttcaccatagtggtcaggctgttctcgaactcctgacctcaggtgatccacctgccttggcctcccaaagtgctaggattacaggtgtgagccaccacacccggccccagaataatggtttcttgactttctgtagcccttgttccttagtctgctgtgatatttatgttgacctttatcattttctattctgaacccctcttagcatttaatgtgaaatctaagaaattagaagtagaatggcttttattgttttgacacctttgaaattattattaataatttttccagagcaaaaaagcaaacacgctcaataagactaaacaaaacaaaatataaatgtacatcatttaatgtcccagtggctctattctacctgtaagaaaatgatacaaaaccacctaagatattttgaagcctgacaaatcagcttcatggaaaaaggtaaaaaatgcatttttcaaccgaaagggcagatccaatagaagacccgctccttaaataaacataaaatgtaaaaagttggaaaattaagagtaatgttccatctggaaactgaacttttgtccttgaacttgtgttggcaccaagcctcatacacagtgagctcaataactgttgggacaaaggaaggaaggacaaaatgtgtaacttcccagcatctgggagatgctgtctcttgcctcactgagtgttccttttctttgctctcatgtcattccctgagaacaatgaattctgggacaggctaaacatcatgatgaagtttcttaaacagactttcttagtggaaatccatttagatctgggtgtgctctatggggagtgctgacgtcaaagagcaaatgtctataaggggcccttttaaaatgaacattttcctcattgagcaagctgggattctctaatgtagaaatcaagccatctttataatttcacttcagatgtttatgtttttgttttttttgtctccaatgatggtaaaaataaaaactacgcattactt

SEQ ID NO: 22676 - protein, 91 aa, Homo sapiens; identical to SEQ ID NO: 22670

SEQ ID NO: 22677 - DNA, 4905 bp, Homo sapiens
ctccttgggcgatcgccctgggtagaggagaggagtttccggggctcgggtccgggtcgccttccaggggaacgagcgcggaagcaagtgggcggcgagaggcggagcaagagacgctggagggcgtggacgcagcgggctttggaaaggccccaagttaatgaggcgtgcgccggctgccgagcgcctcttggagctgggctttcccccgcggtgcgggcgccaggagccgccttttccgctgggtgtcactcgggggtggggaagatggcccattcaaaagcgccgcgagggggcccggccagtgcccttcagtgagcgctcgcaagaggacggcagaggcccggcagctcggagctccgggaccttgtggcgcatcaggacgcggctgtccctctgccgggacccagagccgccgccgccgctctgcctcctgcgtgttagcctcctctgcgcgctccgggcaggcggccgtgggagccgctggggcgaggacggcgcgaggctgctgctgctgcccccggcccgcgcggctggaaacggagaggccgagccaagcggcggcccctcttatgctgggaggatgctggagagtagcggctgcaaagcgctgaaggagggcgtgctggagaagcgcagcgacgggttgttgcagctctggaagaaaaagtgttgcatcctcaccgaggaagggctgctgcttatcccgcccaagcagctgcaacaccagcagcagcagcagcaacagcagcagcagcagcagcaacaacagcccgggcaggggccggccgagccgtcccaacccagtggccccgctgtcgccagcctcgagccgccggtcaagctcaaggaactgcacttctccaacatgaagaccgtggactgtgtggagcgcaagggcaagtacatgtacttcactgtggtgatggcagagggcaaggagatcgactttcggtgcccgcaagaccagggctggaacgccgagatcacgctgcagatggtgcagtacaagaatcgtcaggccatcctggcggtcaaatccacgcggcagaagcagcagcacctggtccagcagcagcccccctcgcagccgcagccgcagccgcagctccagccccaaccccagcctcagcctcagccgcaaccccagccccaatcacaaccccagcctcagccccaacccaagcctcagccccagcagctccacccgtatccgcatccacatccacatccacactctcatcctcactcgcacccacaccctcacccgcacccgcatccgcaccaaataccgcacccacacccacagccgcactcgcagccgcacgggcaccggcttctccgcagcacctccaactctgcctgaaaggggcagctcccgggcaagacaaggttttgaggacttgaggaagtgggacgagcacatttctattgtcttcacttggatcaaaagcaaaacagtctctccgccccgcaccagatcaagtagtttggacatcaccctactgaaaacttgcgattcttcttagttttctgcatacttttcatcacgatgcaggaaacgatttcgagtcaagaagacttttatttatgaacctttgaaaggatcgtcttgtatggtgaattttctaggagcgatgatgtactgtaattttattttaatgtattttgatttatgattatttattagtttttttttaaatgcttgttctaagacatttctgaatgtagaccattttccaaaaaggaaactttattttcaaaaacctaatccgtagtaattcctaatcttggagaataaaaaagggcggtggaggggaaaacattaagaatttattcattatttctcgagtactttcagaaagtctgacactttcattgttgtgccagctggttgaaattaaaactctgatattactttttttgaggatttttatttttgtttttgcttaaacatatagtttgtctagaagtttaaaaagctaaaagttaaaaatggtgtaattatgaaaatctaacactcaagatagtttctaaaaggaaatcagtagttaaggatacctgatttcaaaatatttaaagcataacctaactgatggtaggatgattgtatcttgaatatgtggtagggccacatctattgtaggaaaaccttgcttttatcatctgtgtgtaaagggcttaataaggagaagaggccttttgactgatttgtgagtataaatgcatttgctgtttcatttcaaaaatgttgtggaggaaaagagtacatttaacttgtataagagaatatttgtactcctgtccaggctgcaggacctttcttcgagagctttgcacacttgacttgaaccacattttctgatccctttactttgttttagaagcacactgaaaaatctcgttgtttaaagtacaatttgtaaatatttcaaaggtctaggagtcataacttttgttttcatactgaaaatgatgttgatcagagaaaccaactgttttgcttttcattgctctgtgagaaatttgaggattctgttttgctgttaggtaagctaaactcagaaattgaaaaggaaaagactggataaacacaggattttcagtaagaaaacaaccccagtcttgtcttagaagccacttgttgaggagtctgttgggggaaaaaagaggatatgcttttaaaggtagaacaaaccttcttctgtgttaaatcaaaaggatgttcaaaatccaccaggacagatgctacttgggtttaaatggagccatagatgatacaaagtcctcttggggctgaaaatcacttcctatttgcatggctttactaactggtttctgttttccattatctttttcacagaaagtcttggtcagtatttttccagcatttaaattgaaacggtcagtattagaccactgctaggttatgtagtcaagaaataaaaatagaattacatgctacagatgtctttattctccttccatctagaaaggagttccaaggtcaaattactttttagtgcaatagttaaatgacattttgagatcataactcatatccaaaaagttgcagggaaaattaaaatagctttcccctattaagctaatggcaaacaaaacttaagtggacccccacttccagtggttgtttaggttgcagttgtgaaaatatgctgccaacatttaaaaacttgtttcatatgtatatatgtatacacatatatgaatatgtatgtatatatacatatatgagaacatgtgtgtacacatatatgaatatgtatatatgtgtatgtatgtatatatgtatatgaaatgagagccacatctaaagatttcttaaatcaagtttggttcagcttccttagaactgtggctgtactttttgaggagtacctcatagtactatatttttaatgcatgcaaatcataatagctccaaatgaaccacagttttttcccaatggaggatttttttttaattcttgtactaaaaaaaaaaaatccataccaaatatttttacaaattaagattgatgtaggttttaaaaaaggcatttgtatgttgttagcttacatatggggctaggtaatttcattgcttaaaaagatgcgcctaggctccctcttggtggctggatttctttttcttcgcccgtggtggccatggttcttaatagggccaccggaatcatggtttctttttttttttttttttttgagatggagtctcgccctgtgacccaggctggagtgcagtggcacgatctcggctcactgcaacctctgcctcctgggttcacgccattctcctgtctcagcctcctgagtagctgggactacaggtgaatgccaccacgcccggctgatttttgtatttttagtagagatggggtttcaccatagtggtcaggctgttctcgaactcctgacctcaggtgatccacctgccttggcctcccaaagtgctaggattacaggtgtgagccaccacacccggccccagaataatggtttcttgactttctgtagcccttgttccttagtctgctgtgatatttatgttgacctttatcattttctattctgaacccctcttagcatttaatgtgaaatctaagaaattagaagtagaatggcttttattgttttgacacctttgaaattattattaataatttttccagagcaaaaaagcaaacacgctcaataagactaaacaaaacaaaatataaatgtacatcatttaatgtcccagtggctctattctacctgtaagaaaatgatacaaaaccacctaagatattttgaagcctgacaaatcagcttcatggaaaaaggtaaaaaatgcatttttcaaccgaaagggcagatccaatagaagacccgctccttaaataaacataaaatgtaaaaagttggaaaattaagagtaatgttccatctggaaactgaacttttgtccttgaacttgtgttggcaccaagcctcatacacagtgagctcaataactgttgggacaaaggaaggaaggacaaaatgtgtaacttcccagcatctgggagatgctgtctcttgcctcactgagtgttccttttctttgctctcatgtcattccctgagaacaatgaattctgggacaggctaaacatcatgatgaagtttcttaaacagactttcttagtggaaatccatttagatctgggtgtgctctatggggagtgctgacgtcaaagagcaaatgtctataaggggcccttttaaaatgaacattttcctcattgagcaagctgggattctctaatgtagaaatcaagccatctttataatttcacttcagatgtttatgtttttgttttttttgtctccaatgatggtaaaaataaaaactacgcattactt

SEQ ID NO: 22678 - protein, 401 aa, Homo sapiens; identical to SEQ ID NO: 2981

SEQ ID NO: 22679 - DNA, 2523 bp, Homo sapiens
agtgcccttcagtgagcgctcgcaagaggacggcagaggcccggcagctcggagctccgggaccttgtggcgcatcaggacgcggctgtccctctgccgggacccagagccgccgccgccgctctgcctcctgcgtgttagcctcctctgcgcgctccgggcaggcggccgtgggagccgctggggcgaggacggcgcgaggctgctgctgctgcccccggcccgcgcggctggaaacggagaggccgagccaagcggcggcccctcttatgctgggaggatgctggagacagcagcagcagcaacagcagcagcagcagcagcaacaacagcccgggcaggggccggccgagccgtcccaacccagtggccccgctgtcgccagcctcgagccgccggtcaagctcaaggaactgcacttctccaacatgaagaccgtggactgtgtggagcgcaagggcaagtacatgtacttcactgtggtgatggcagagggcaaggagatcgactttcggtgcccgcaagaccagggctggaacgccgagatcacgctgcagatggtgcagtacaagaatcgtcaggccatcctggcggtcaaatccacgcggcagaagcagcagcacctggtccagcagcagcccccctcgcagccgcagccgcagccgcagctccagccccaaccccagcctcagcctcagccgcaaccccagccccaatcacaaccccagcctcagccccaacccaagcctcagccccagcagctccacccgtatccgcatccacatccacatccacactctcatcctcactcgcacccacaccctcacccgcacccgcatccgcaccaaataccgcacccacacccacagccgcactcgcagccgcacgggcaccggcttctccgcagcacctccaactctgcctgaaaggggcagctcccgggcaagacaaggttttgaggacttgaggaagtgggacgagcacatttctattgtcttcacttggatcaaaagcaaaacagtctctccgccccgcaccagatcaagtagtttggacatcaccctactgaaaacttgcgattcttcttagttttctgcatacttttcatcacgatgcaggaaacgatttcgagtcaagaagacttttatttatgaacctttgaaaggatcgtcttgtatggtgaattttctaggagcgatgatgtactgtaattttattttaatgtattttgatttatgattatttattagtttttttttaaatgcttgttctaagacatttctgaatgtagaccattttccaaaaaggaaactttattttcaaaaacctaatccgtagtaattcctaatcttggagaataaaaaagggcggtggaggggaaaacattaagaatttattcattatttctcgagtactttcagaaagtctgacactttcattgttgtgccagctggttgaaattaaaactctgatattactttttttgaggatttttatttttgtttttgcttaaacatatagtttgtctagaagtttaaaaagctaaaagttaaaaatggtgtaattatgaaaatctaacactcaagatagtttctaaaaggaaatcagtagttaaggatacctgatttcaaaatatttaaagcataacctaactgatggtaggatgattgtatcttgaatatgtggtagggccacatctattgtaggaaaaccttgcttttatcatctgtgtgtaaagggcttaataaggagaagaggccttttgactgatttgtgagtataaatgcatttgctgtttcatttcaaaaatgttgtggaggaaaagagtacatttaacttgtataagagaatatttgtactcctgtccaggctgcaggacctttcttcgagagctttgcacacttgacttgaaccacattttctgatccctttactttgttttagaagcacactgaaaaatctcgttgtttaaagtacaatttgtaaatatttcaaaggtctaggagtcataacttttgttttcatactgaaaatgatgttgatcagagaaaccaactgttttgcttttcattgctctgtgagaaatttgaggattctgttttgctgttaggtaagctaaactcagaaattgaaaaggaaaagactggataaacacaggattttcagtaagaaaacaaccccagtcttgtcttagaagccacttgttgaggagtctgttgggggaaaaaagaggatatgcttttaaaggtagaacaaaccttcttctgtgttaaatcaaaaggatgttcaaaatccaccaggacagatgctacttgggtttaaatggagccatagatgatacaaagtcctcttggggctgaaaatcacttcctatttgcatggctttactaactggtttctgttttccattatctttttcacagaaagtcttggtcagtatttttccagcatttaaattgaaacggtcagtattagaccactgctaggttatgtagtcaagaaataaaaatagaattacatgct

SEQ ID NO: 22680 - protein, 228 aa, Homo sapiens; identical to SEQ ID NO: 22668

SEQ ID NO: 22681 - DNA, 2251 bp, Homo sapiens
ggcgtgcgccggctgccgagcgcctcttggagctgggctttcccccgcggtgcgggcgccaggagccgccttttccgctgggtgtcactcgggggtggggaagatggcccattcaaaagcgccgcgagggggcccggccagtgcccttcagtgagcgctcgcaagaggacggcagaggcccggcagctcggagctccgggaccttgtggcgcatcaggacgcggctgtccctctgccgggacccagagccgccgccgccgctctgcctcctgcgtgttagcctcctctgcgcgctccgggcaggcggccgtgggagccgctggggcgaggacggcgcgaggctgctgctgctgcccccggcccgcgcggctggaaacggagaggccgagccaagcggcggcccctcttatgctgggaggatgctggagagtagcggctgcaaagcgctgaaggagggcgtgctggagaagcgcacctcagccccagcagctccacccgtatccgcatccacatccacatccacactctcatcctcactcgcacccacaccctcacccgcacccgcatccgcaccaaataccgcacccacacccacagccgcactcgcagccgcacgggcaccggcttctccgcagcacctccaactctgcctgaaaggggcagctcccgggcaagacaaggttttgaggacttgaggaagtgggacgagcacatttctattgtcttcacttggatcaaaagcaaaacagtctctccgccccgcaccagatcaagtagtttggacatcaccctactgaaaacttgcgattcttcttagttttctgcatacttttcatcacgatgcaggaaacgatttcgagtcaagaagacttttatttatgaacctttgaaaggatcgtcttgtatggtgaattttctaggagcgatgatgtactgtaattttattttaatgtattttgatttatgattatttattagtttttttttaaatgcttgttctaagacatttctgaatgtagaccattttccaaaaaggaaactttattttcaaaaacctaatccgtagtaattcctaatcttggagaataaaaaagggcggtggaggggaaaacattaagaatttattcattatttctcgagtactttcagaaagtctgacactttcattgttgtgccagctggttgaaattaaaactctgatattactttttttgaggatttttatttttgtttttgcttaaacatatagtttgtctagaagtttaaaaagctaaaagttaaaaatggtgtaattatgaaaatctaacactcaagatagtttctaaaaggaaatcagtagttaaggatacctgatttcaaaatatttaaagcataacctaactgatggtaggatgattgtatcttgaatatgtggtagggccacatctattgtaggaaaaccttgcttttatcatctgtgtgtaaagggcttaataaggagaagaggccttttgactgatttgtgagtataaatgcatttgctgtttcatttcaaaaatgttgtggaggaaaagagtacatttaacttgtataagagaatatttgtactcctgtccaggctgcaggacctttcttcgagagctttgcacacttgacttgaaccacattttctgatccctttactttgttttagaagcacactgaaaaatctcgttgtttaaagtacaatttgtaaatatttcaaaggtctaggagtcataacttttgttttcatactgaaaatgatgttgatcagagaaaccaactgttttgcttttcattgctctgtgagaaatttgaggattctgttttgctgttaggtaagctaaactcagaaattgaaaaggaaaagactggataaacacaggattttcagtaagaaaacaaccccagtcttgtcttagaagccacttgttgaggagtctgttgggggaaaaaagaggatatgcttttaaaggtagaacaaaccttcttctgtgttaaatcaaaaggatgttcaaaatccaccaggacagatgctacttgggtttaaatggagccatagatgatacaaagtcctcttggggctgaaaatcacttcctatttgcatggctttactaactggtttctgttttccattatctttttcacagaaagtcttggtcagtatttttccagcatttaaattgaaacggtcagtattagaccactgctaggttatgtagtcaagaaataaaaatagaattacatgct

SEQ ID NO: 22682 - protein, 91 aa, Homo sapiens; identical to SEQ ID NO: 22670

SEQ ID NO: 22683 - DNA, 2963 bp, Homo sapiens
ctccttgggcgatcgccctgggtagaggagaggagtttccggggctcgggtccgggtcgccttccaggggaacgagcgcggaagcaagtgggcggcgagaggcggagcaagagacgctggagggcgtggacgcagcgggctttggaaaggccccaagttaatgaggcgtgcgccggctgccgagcgcctcttggagctgggctttcccccgcggtgcgggcgccaggagccgccttttccgctgggtgtcactcgggggtggggaagatggcccattcaaaagcgccgcgagggggcccggccagtgcccttcagtgagcgctcgcaagaggacggcagaggcccggcagctcggagctccgggaccttgtggcgcatcaggacgcggctgtccctctgccgggacccagagccgccgccgccgctctgcctcctgcgtgttagcctcctctgcgcgctccgggcaggcggccgtgggagccgctggggcgaggacggcgcgaggctgctgctgctgcccccggcccgcgcggctggaaacggagaggccgagccaagcggcggcccctcttatgctgggaggatgctggagagtagcggctgcaaagcgctgaaggagggcgtgctggagaagcgcagcgacgggttgttgcagctctggaagaaaaagtgttgcatcctcaccgaggaagggctgctgcttatcccgcccaagcagctgcaacaccagcagcagcagcagcaacagcagcagcagcagcagcaacaacagcccgggcaggggccggccgagccgtcccaacccagtggccccgctgtcgccagcctcgagccgccggtcaagctcaaggaactgcacttctccaacatgaagaccgtggactgtgtggagcgcaagggcaagtacatgtacttcactgtggtgatggcagagggcaaggagatcgactttcggtgcccgcaagaccagggctggaacgccgagatcacgctgcagatggtgcagtacaagaatcgtcaggccatcctggcggtcaaatccacgcggcagaagcagcagcacctggtccagcagcagcccccctcgcagccgcagccgcagccgcagctccagccccaaccccagcctcagcctcagccgcaaccccagccccaatcacaaccccagcctcagccccaacccaagcctcagccccagcagctccacccgtatccgcatccacatccacatccacactctcatcctcactcgcacccacaccctcacccgcacccgcatccgcaccaaataccgcacccacacccacagccgcactcgcagccgcacgggcaccggcttctccgcagcacctccaactctgcctgaaaggggcagctcccgggcaagacaaggttttgaggacttgaggaagtgggacgagcacatttctattgtcttcacttggatcaaaagcaaaacagtctctccgccccgcaccagatcaagtagtttggacatcaccctactgaaaacttgcgattcttcttagttttctgcatacttttcatcacgatgcaggaaacgatttcgagtcaagaagacttttatttatgaacctttgaaaggatcgtcttgtatggtgaattttctaggagcgatgatgtactgtaattttattttaatgtattttgatttatgattatttattagtttttttttaaatgcttgttctaagacatttctgaatgtagaccattttccaaaaaggaaactttattttcaaaaacctaatccgtagtaattcctaatcttggagaataaaaaagggcggtggaggggaaaacattaagaatttattcattatttctcgagtactttcagaaagtctgacactttcattgttgtgccagctggttgaaattaaaactctgatattactttttttgaggatttttatttttgtttttgcttaaacatatagtttgtctagaagtttaaaaagctaaaagttaaaaatggtgtaattatgaaaatctaacactcaagatagtttctaaaaggaaatcagtagttaaggatacctgatttcaaaatatttaaagcataacctaactgatggtaggatgattgtatcttgaatatgtggtagggccacatctattgtaggaaaaccttgcttttatcatctgtgtgtaaagggcttaataaggagaagaggccttttgactgatttgtgagtataaatgcatttgctgtttcatttcaaaaatgttgtggaggaaaagagtacatttaacttgtataagagaatatttgtactcctgtccaggctgcaggacctttcttcgagagctttgcacacttgacttgaaccacattttctgatccctttactttgttttagaagcacactgaaaaatctcgttgtttaaagtacaatttgtaaatatttcaaaggtctaggagtcataacttttgttttcatactgaaaatgatgttgatcagagaaaccaactgttttgcttttcattgctctgtgagaaatttgaggattctgttttgctgttaggtaagctaaactcagaaattgaaaaggaaaagactggataaacacaggattttcagtaagaaaacaaccccagtcttgtcttagaagccacttgttgaggagtctgttgggggaaaaaagaggatatgcttttaaaggtagaacaaaccttcttctgtgttaaatcaaaaggatgttcaaaatccaccaggacagatgctacttgggtttaaatggagccatagatgatacaaagtcctcttggggctgaaaatcacttcctatttgcatggctttactaactggtttctgttttccattatctttttcacagaaagtcttggtcagtatttttccagcatttaaattgaaacggtcagtattagaccactgctaggttatgtagtcaagaaataaaaatagaattacatgct

SEQ ID NO: 22684 - protein, 401 aa, Homo sapiens; identical to SEQ ID NO: 2981

SEQ ID NO: 22685 - DNA, 1482 bp, Homo sapiens
agtgcccttcagtgagcgctcgcaagaggacggcagaggcccggcagctcggagctccgggaccttgtggcgcatcaggacgcggctgtccctctgccgggacccagagccgccgccgccgctctgcctcctgcgtgttagcctcctctgcgcgctccgggcaggcggccgtgggagccgctggggcgaggacggcgcgaggctgctgctgctgcccccggcccgcgcggctggaaacggagaggccgagccaagcggcggcccctcttatgctgggaggatgctggagacagcagcagcagcaacagcagcagcagcagcagcaacaacagcccgggcaggggccggccgagccgtcccaacccagtggccccgctgtcgccagcctcgagccgccggtcaagctcaaggaactgcacttctccaacatgaagaccgtggactgtgtggagcgcaagggcaagtacatgtacttcactgtggtgatggcagagggcaaggagatcgactttcggtgcccgcaagaccagggctggaacgccgagatcacgctgcagatggtgcagtacaagaatcgtcaggccatcctggcggtcaaatccacgcggcagaagcagcagcacctggtccagcagcagcccccctcgcagccgcagccgcagccgcagctccagccccaaccccagcctcagcctcagccgcaaccccagccccaatcacaaccccagcctcagccccaacccaagcctcagccccagcagctccacccgtatccgcatccacatccacatccacactctcatcctcactcgcacccacaccctcacccgcacccgcatccgcaccaaataccgcacccacacccacagccgcactcgcagccgcacgggcaccggcttctccgcagcacctccaactctgcctgaaaggggcagctcccgggcaagacaaggttttgaggacttgaggaagtgggacgagcacatttctattgtcttcacttggatcaaaagcaaaacagtctctccgccccgcaccagatcaagtagtttggacatcaccctactgaaaacttgcgattcttcttagttttctgcatacttttcatcacgatgcaggaaacgatttcgagtcaagaagacttttatttatgaacctttgaaaggatcgtcttgtatggtgaattttctaggagcgatgatgtactgtaattttattttaatgtattttgatttatgattatttattagtttttttttaaatgcttgttctaagacatttctgaatgtagaccattttccaaaaaggaaactttattttcaaaaacctaatccgtagtaattcctaatcttggagaataaaaaagggcggtggaggggaaaacattaagaatttattcattatttctcgagtactttcagaaagtctgacactttcattgttgtgccagctggttgaaattaaaactctgatattactttt

SEQ ID NO: 22686 - protein, 228 aa, Homo sapiens; identical to SEQ ID NO: 22668

SEQ ID NO: 22687 - DNA, 2070 bp, Homo sapiens
ggcgtgcgccggctgccgagcgcctcttggagctgggctttcccccgcggtgcgggcgccaggagccgccttttccgctgggtgtcactcgggggtggggaagatggcccattcaaaagcgccgcgagggggcccggccagtgcccttcagtgagcgctcgcaagaggacggcagaggcccggcagctcggagctccgggaccttgtggcgcatcaggacgcggctgtccctctgccgggacccagagccgccgccgccgctctgcctcctgcgtgttagcctcctctgcgcgctccgggcaggcggccgtgggagccgctggggcgaggacggcgcgaggctgctgctgctgcccccggcccgcgcggctggaaacggagaggccgagccaagcggcggcccctcttatgctgggaggatgctggagagtagcggctgcaaagcgctgaaggagggcgtgctggagaagcgcagcgacgggttgttgcagctctggaagaaaaagtgttgcatcctcaccgagccgtcccaacccagtggccccgctgtcgccagcctcgagccgccggtcaagctcaaggaactgcacttctccaacatgaagaccgtggactgtgtggagcgcaagggcaagtacatgtacttcactgtggtgatggcagagggcaaggagatcgactttcggtgcccgcaagaccagggctggaacgccgagatcacgctgcagatggtgcagtacaagaatcgtcaggccatcctggcggtcaaatccacgcggcagaagcagcagcacctggtccagcagcagcccccctcgcagccgcagccgcagccgcagctccagccccaaccccagcctcagcctcagccgcaaccccagccccaatcacaaccccagcctcagccccaacccaagcctcagccccagcagctccacccgtatccgcatccacatccacatccacactctcatcctcactcgcacccacaccctcacccgcacccgcatccgcaccaaataccgcacccacacccacagccgcactcgcagccgcacgggcaccggcttctccgcagcacctccaactctgcctgaaaggggcagctcccgggcaagacaaggtaaggtcccggcactcgcgctcccgaggagtgggtctcgggggtagtgagttgggaggagtaggaagcttgttcacaggttcggctcctgtatggagaaatcaaaactcataccaagtttctggggcaatggaagaaacagaaacaagctggggccaggagagctgggcagagaggggaggctggggagatccgggccaggcagggggcctcgcggaccgcgcccgcgcccgcgcccatcacgaccgtccttgtcccgtggtgcgtcccccagccccacttgactatatgtttgggcagttgagggaaacaccacggtgtctttctgagcccgctttgtcaggcggactggcccgaacagaactggtctcggagggttcttagccacctacttcactcggtgtcatttctttccaggttttgaggacttgaggaagtgggacgagcacatttctattgtcttcacttggatcaaaagcaaaacagtctctccgccccgcaccagatcaagtagtttggacatcaccctactgaaaacttgcgattcttcttagttttctgcatacttttcatcacgatgcaggaaacgatttcgagtcaagaagacttttatttatgaacctttgaaaggatcgtcttgtatggtgaattttctaggagcgatgatgtactgtaattttattttaatgtattttgatttatgattatttattagtttttttttaaatgcttgttctaagacatttctgaatgtagaccattttccaaaaaggaaactttattttcaaaaacctaatccgtagtaattcctaatcttggagaataaaaaagggcggtggaggggaaaacattaagaatttattcattatttctcgagtactttcagaaagtctgacactttcattgttgtgccagctggttgaaattaaaactctgatattactttt

SEQ ID NO: 22688 - protein, 225 aa, Homo sapiens
MLESSGCKALKEGVLEKRSDGLLQLWKKKCCILTEPSQPSGPAVASLEPPVKLKELHFSNMKTVDCVERKGKYMYFTVVMAEGKEIDFRCPQDQGWNAEITLQMVQYKNRQAILAVKSTRQKQQHLVQQQPPSQPQPQPQLQPQPQPQPQPQPQPQSQPQPQPQPKPQPQQLHPYPHPHPHPHSHPHSHPHPHPHPHPHQIPHPHPQPHSQPHGHRLLRSTSNSA

SEQ ID NO: 22689 - DNA, 2050 bp, Homo sapiens
ggcgtgcgccggctgccgagcgcctcttggagctgggctttcccccgcggtgcgggcgccaggagccgccttttccgctgggtgtcactcgggggtggggaagatggcccattcaaaagcgccgcgagggggcccggccagtgcccttcagtgagcgctcgcaagaggacggcagaggcccggcagctcggagctccgggaccttgtggcgcatcaggacgcggctgtccctctgccgggacccagagccgccgccgccgctctgcctcctgcgtgttagcctcctctgcgcgctccgggcaggcggccgtgggagccgctggggcgaggacggcgcgaggctgctgctgctgcccccggcccgcgcggctggaaacggagaggccgagccaagcggcggcccctcttatgctgggaggatgctggagagtagcggctgcaaagcgctgaaggagggcgtgctggagaagccagcaacaacagcccgggcaggggccggccgagccgtcccaacccagtggccccgctgtcgccagcctcgagccgccggtcaagctcaaggaactgcacttctccaacatgaagaccgtggactgtgtggagcgcaagggcaagtacatgtacttcactgtggtgatggcagagggcaaggagatcgactttcggtgcccgcaagaccagggctggaacgccgagatcacgctgcagatggtgcagtacaagaatcgtcaggccatcctggcggtcaaatccacgcggcagaagcagcagcacctggtccagcagcagcccccctcgcagccgcagccgcagccgcagctccagccccaaccccagcctcagcctcagccgcaaccccagccccaatcacaaccccagcctcagccccaacccaagcctcagccccagcagctccacccgtatccgcatccacatccacatccacactctcatcctcactcgcacccacaccctcacccgcacccgcatccgcaccaaataccgcacccacacccacagccgcactcgcagccgcacgggcaccggcttctccgcagcacctccaactctgcctgaaaggggcagctcccgggcaagacaaggtaaggtcccggcactcgcgctcccgaggagtgggtctcgggggtagtgagttgggaggagtaggaagcttgttcacaggttcggctcctgtatggagaaatcaaaactcataccaagtttctggggcaatggaagaaacagaaacaagctggggccaggagagctgggcagagaggggaggctggggagatccgggccaggcagggggcctcgcggaccgcgcccgcgcccgcgcccatcacgaccgtccttgtcccgtggtgcgtcccccagccccacttgactatatgtttgggcagttgagggaaacaccacggtgtctttctgagcccgctttgtcaggcggactggcccgaacagaactggtctcggagggttcttagccacctacttcactcggtgtcatttctttccaggttttgaggacttgaggaagtgggacgagcacatttctattgtcttcacttggatcaaaagcaaaacagtctctccgccccgcaccagatcaagtagtttggacatcaccctactgaaaacttgcgattcttcttagttttctgcatacttttcatcacgatgcaggaaacgatttcgagtcaagaagacttttatttatgaacctttgaaaggatcgtcttgtatggtgaattttctaggagcgatgatgtactgtaattttattttaatgtattttgatttatgattatttattagtttttttttaaatgcttgttctaagacatttctgaatgtagaccattttccaaaaaggaaactttattttcaaaaacctaatccgtagtaattcctaatcttggagaataaaaaagggcggtggaggggaaaacattaagaatttattcattatttctcgagtactttcagaaagtctgacactttcattgttgtgccagctggttgaaattaaaactctgatattactttt

SEQ ID NO: 22690 - protein, 355 aa, Homo sapiens [sequence omitted]

SEQ ID NO: 22691 - DNA, 1927 bp, Homo sapiens
ggcgtgcgccggctgccgagcgcctcttggagctgggctttcccccgcggtgcgggcgccaggagccgccttttccgctgggtgtcactcgggggtggggaagatggcccattcaaaagcgccgcgagggggcccggccagtgcccttcagtgagcgctcgcaagaggacggcagaggcccggcagctcggagctccgggaccttgtggcgcatcaggacgcggctgtccctctgccgggacccagagccgccgccgccgctctgcctcctgcgtgttagcctcctctgcgcgctccgggcaggcggccgtgggagccgctggggcgaggacggagcagcagcagcagcagcaacaacagcccgggcaggggccggccgagccgtcccaacccagtggccccgctgtcgccagcctcgagccgccggtcaagctcaaggaactgcacttctccaacatgaagaccgtggactgtgtggagcgcaagggcaagtacatgtacttcactgtggtgatggcagagggcaaggagatcgactttcggtgcccgcaagaccagggctggaacgccgagatcacgctgcagatggtgcagtacaagaatcgtcaggccatcctggcggtcaaatccacgcggcagaagcagcagcacctggtccagcagcagcccccctcgcagccgcagccgcagccgcagctccagccccaaccccagcctcagcctcagccgcaaccccagccccaatcacaaccccagcctcagccccaacccaagcctcagccccagcagctccacccgtatccgcatccacatccacatccacactctcatcctcactcgcacccacaccctcacccgcacccgcatccgcaccaaataccgcacccacacccacagccgcactcgcagccgcacgggcaccggcttctccgcagcacctccaactctgcctgaaaggggcagctcccgggcaagacaaggtaaggtcccggcactcgcgctcccgaggagtgggtctcgggggtagtgagttgggaggagtaggaagcttgttcacaggttcggctcctgtatggagaaatcaaaactcataccaagtttctggggcaatggaagaaacagaaacaagctggggccaggagagctgggcagagaggggaggctggggagatccgggccaggcagggggcctcgcggaccgcgcccgcgcccgcgcccatcacgaccgtccttgtcccgtggtgcgtcccccagccccacttgactatatgtttgggcagttgagggaaacaccacggtgtctttctgagcccgctttgtcaggcggactggcccgaacagaactggtctcggagggttcttagccacctacttcactcggtgtcatttctttccaggttttgaggacttgaggaagtgggacgagcacatttctattgtcttcacttggatcaaaagcaaaacagtctctccgccccgcaccagatcaagtagtttggacatcaccctactgaaaacttgcgattcttcttagttttctgcatacttttcatcacgatgcaggaaacgatttcgagtcaagaagacttttatttatgaacctttgaaaggatcgtcttgtatggtgaattttctaggagcgatgatgtactgtaattttattttaatgtattttgatttatgattatttattagtttttttttaaatgcttgttctaagacatttctgaatgtagaccattttccaaaaaggaaactttattttcaaaaacctaatccgtagtaattcctaatcttggagaataaaaaagggcggtggaggggaaaacattaagaatttattcattatttctcgagtactttcagaaagtctgacactttcattgttgtgccagctggttgaaattaaaactctgatattactttt

SEQ ID NO: 22692 - protein, 165 aa, Homo sapiens
MKTVDCVERKGKYMYFTVVMAEGKEIDFRCPQDQGWNAEITLQMVQYKNRQAILAVKSTRQKQQHLVQQQPPSQPQPQPQLQPQPQPQPQPQPQPQSQPQPQPQPKPQPQQLHPYPHPHPHPHSHPHSHPHPHPHPHPHQIPHPHPQPHSQPHGHRLLRSTSNSA

SEQ ID NO: 22693 - DNA, 1210 bp, Homo sapiens
ggcgtgcgccggctgccgagcgcctcttggagctgggctttcccccgcggtgcgggcgccaggagccgccttttccgctgggtgtcactcgggggtggggaagatggcccattcaaaagcgccgcgagggggcccggccagtgcccttcagtgagcgctcgcaagaggacggcagaggcccggcagctcggagctccgggaccttgtggcgcatcaggacgcggctgtccctctgccgggacccagagccgccgccgccgctctgcctcctgcgtgttagcctcctctgcgcgctccgggcaggcggccgtgggagccgctggggcgaggacggcgcgaggctgctgctgctgcccccggcccgcgcggctggaaacggagaggccgagccaagcggcggcccctcttatgctgggaggatgctggagagtagcggctgcaaagcgctgaaggagggcgtgctggagaagcgcacctcagccccagcagctccacccgtatccgcatccacatccacatccacactctcatcctcactcgcacccacaccctcacccgcacccgcatccgcaccaaataccgcacccacacccacagccgcactcgcagccgcacgggcaccggcttctccgcagcacctccaactctgcctgaaaggggcagctcccgggcaagacaaggttttgaggacttgaggaagtgggacgagcacatttctattgtcttcacttggatcaaaagcaaaacagtctctccgccccgcaccagatcaagtagtttggacatcaccctactgaaaacttgcgattcttcttagttttctgcatacttttcatcacgatgcaggaaacgatttcgagtcaagaagacttttatttatgaacctttgaaaggatcgtcttgtatggtgaattttctaggagcgatgatgtactgtaattttattttaatgtattttgatttatgattatttattagtttttttttaaatgcttgttctaagacatttctgaatgtagaccattttccaaaaaggaaactttattttcaaaaacctaatccgtagtaattcctaatcttggagaataaaaaagggcggtggaggggaaaacattaagaatttattcattatttctcgagtactttcagaaagtctgacactttcattgttgtgccagctggttgaaattaaaactctgatattactttt

SEQ ID NO: 22694 - protein, 91 aa, Homo sapiens; identical to SEQ ID NO: 22670

SEQ ID NO: 22695 - DNA, 1922 bp, Homo sapiens
ctccttgggcgatcgccctgggtagaggagaggagtttccggggctcgggtccgggtcgccttccaggggaacgagcgcggaagcaagtgggcggcgagaggcggagcaagagacgctggagggcgtggacgcagcgggctttggaaaggccccaagttaatgaggcgtgcgccggctgccgagcgcctcttggagctgggctttcccccgcggtgcgggcgccaggagccgccttttccgctgggtgtcactcgggggtggggaagatggcccattcaaaagcgccgcgagggggcccggccagtgcccttcagtgagcgctcgcaagaggacggcagaggcccggcagctcggagctccgggaccttgtggcgcatcaggacgcggctgtccctctgccgggacccagagccgccgccgccgctctgcctcctgcgtgttagcctcctctgcgcgctccgggcaggcggccgtgggagccgctggggcgaggacggcgcgaggctgctgctgctgcccccggcccgcgcggctggaaacggagaggccgagccaagcggcggcccctcttatgctgggaggatgctggagagtagcggctgcaaagcgctgaaggagggcgtgctggagaagcgcagcgacgggttgttgcagctctggaagaaaaagtgttgcatcctcaccgaggaagggctgctgcttatcccgcccaagcagctgcaacaccagcagcagcagcagcaacagcagcagcagcagcagcaacaacagcccgggcaggggccggccgagccgtcccaacccagtggccccgctgtcgccagcctcgagccgccggtcaagctcaaggaactgcacttctccaacatgaagaccgtggactgtgtggagcgcaagggcaagtacatgtacttcactgtggtgatggcagagggcaaggagatcgactttcggtgcccgcaagaccagggctggaacgccgagatcacgctgcagatggtgcagtacaagaatcgtcaggccatcctggcggtcaaatccacgcggcagaagcagcagcacctggtccagcagcagcccccctcgcagccgcagccgcagccgcagctccagccccaaccccagcctcagcctcagccgcaaccccagccccaatcacaaccccagcctcagccccaacccaagcctcagccccagcagctccacccgtatccgcatccacatccacatccacactctcatcctcactcgcacccacaccctcacccgcacccgcatccgcaccaaataccgcacccacacccacagccgcactcgcagccgcacgggcaccggcttctccgcagcacctccaactctgcctgaaaggggcagctcccgggcaagacaaggttttgaggacttgaggaagtgggacgagcacatttctattgtcttcacttggatcaaaagcaaaacagtctctccgccccgcaccagatcaagtagtttggacatcaccctactgaaaacttgcgattcttcttagttttctgcatacttttcatcacgatgcaggaaacgatttcgagtcaagaagacttttatttatgaacctttgaaaggatcgtcttgtatggtgaattttctaggagcgatgatgtactgtaattttattttaatgtattttgatttatgattatttattagtttttttttaaatgcttgttctaagacatttctgaatgtagaccattttccaaaaaggaaactttattttcaaaaacctaatccgtagtaattcctaatcttggagaataaaaaagggcggtggaggggaaaacattaagaatttattcattatttctcgagtactttcagaaagtctgacactttcattgttgtgccagctggttgaaattaaaactctgatattactttt

SEQ ID NO: 22696 - protein, 401 aa, Homo sapiens; identical to SEQ ID NO: 2981

SEQ ID NO: 22697 - DNA, 1036 bp, Homo sapiens
ggcgtgcgccggctgccgagcgcctcttggagctgggctttcccccgcggtgcgggcgccaggagccgccttttccgctgggtgtcactcgggggtggggaagatggcccattcaaaagcgccgcgagggggcccggccagtgcccttcagtgagcgctcgcaagaggacggcagaggcccggcagctcggagctccgggaccttgtggcgcatcaggacgcggctgtccctctgccgggacccagagccgccgccgccgctctgcctcctgcgtgttagcctcctctgcgcgctccgggcaggcggccgtgggagccgctggggcgaggacggcgcgaggctgctgctgctgcccccggcccgcgcggctggaaacggagaggccgagccaagcggcggcccctcttatgctgggaggatgctggagagtagcggctgcaaagcgctgaaggagggcgtgctggagaagcgcacctcagccccagcagctccacccgtatccgcatccacatccacatccacactctcatcctcactcgcacccacaccctcacccgcacccgcatccgcaccaaataccgcacccacacccacagccgcactcgcagccgcacgggcaccggcttctccgcagcacctccaactctgcctgaaaggggcagctcccgggcaagacaaggttttgaggacttgaggaagtgggacgagcacatttctattgtcttcacttggatcaaaagcaaaacagtctctccgccccgcaccagatcaagtagtttggacatcaccctactgaaaacttgcgattcttcttagttttctgcatacttttcatcacgatgcaggaaacgatttcgagtcaagaagacttttatttatgaacctttgaaaggatcgtcttgtatggtgaattttctaggagcgatgatgtactgtaattttattttaatgtattttgatttatgattatttattagtttttttttaaatgcttgttctaagacatttctgaatgtagaccattttccaaaaagg

SEQ ID NO: 22698 - protein, 91 aa, Homo sapiens; identical to SEQ ID NO: 22670

SEQ ID NO: 22699 - DNA, 1318 bp, Homo sapiens
ggcgtgcgccggctgccgagcgcctcttggagctgggctttcccccgcggtgcgggcgccaggagccgccttttccgctgggtgtcactcgggggtggggaagatggcccattcaaaagcgccgcgagggggcccggccagtgcccttcagtgagcgctcgcaagaggacggcagaggcccggcagctcggagctccgggaccttgtggcgcatcaggacgcggctgtccctctgccgggacccagagccgccgccgccgctctgcctcctgcgtgttagcctcctctgcgcgctccgggcaggcggccgtgggagccgctggggcgaggacggcgcgaggctgctgctgctgcccccggcccgcgcggctggaaacggagaggccgagccaagcggcggcccctcttatgctgggaggatgctggagagtagcggctgcaaagcgctgaaggagggcgtgctggagaagcgcagcgacgggttgttgcagctctggaagaaaaagtgttgcatcctcaccgaggaagggctgctgcttatcccgcccaagcagctgcaacaccagcagcagcagcagcaacagcagcagcagcagcagcaacaacagcccgggcaggggccggccgagccgtcccaacccagtggccccgctgtcgccagcctcgagccgccggtcaagctcaaggaactgcacttctccaacatgaagaccgtggactgtgtggagcgcaagggcaagtacatgtacttcactgtggtgatggcagagggcaaggagatcgactttcggtgcccgcaagaccagggctggaacgccgagatcacgaaccccagcctcagccccaacccaagcctcagccccagcagctccacccgtatccgcatccacatccacatccacactctcatcctcactcgcacccacaccctcacccgcacccgcatccgcaccaaataccgcacccacacccacagccgcactcgcagccgcacgggcaccggcttctccgcagcacctccaactctgcctgaaaggggcagctcccgggcaagacaaggtaaggtcccggcactcgcgctcccgaggagtgggtctcgggggtagtgagttgggaggagtaggaagcttgttcacaggttcggctcctgtatggagaaatcaaaactcataccaagtttctggggcaatggaagaaacagaaacaagctggggccaggagagctgggcagagaggggaggctggggagatccgggccaggcagggggcctcgcggaccgcgcccgcgcccgcgcccatcacgaccgtccttgtcccg

SEQ ID NO: 22700 - protein, 228 aa, Homo sapiens
MLESSGCKALKEGVLEKRSDGLLQLWKKKCCILTEEGLLLIPPKQLQHQQQQQQQQQQQQQQQPGQGPAEPSQPSGPAVASLEPPVKLKELHFSNMKTVDCVERKGKYMYFTVVMAEGKEIDFRCPQDQGWNAEITNPSLSPNPSLSPSSSTRIRIHIHIHTLILTRTHTLTRTRIRTKYRTHTHSRTRSRTGTGFSAAPPTLPERGSSRARQGKVPALALPRSGSRG

SEQ ID NO: 22701 - DNA, 1220 bp, Homo sapiens
ccgcttcctgggaagtaaggcataaccgagacctagcctcccggtagggaagttcatccgtttagtaaacagccccaactacgtgcggaccctcacggggatacgaagaattcaaccagggctggacaagtcagagtgggccaaggacaagtgagcattccagagaatttctacatgaccagctgttcattcttttaagaggatgacattcttcagctcatctggaaaggatacttcctttaagtctgttattcacagtctccaagggcaggtgtagttgggaaagacatttcatatggaaaaacaaacttgatagggtaaaaaaaaaaaaaatgagatgtaatctggaggcccaagtcattttcttaggagaaactcaaatgtgtttggtgttatctaaccttctgcagtttatcagtctgaaacaaatgcattctattctcatttgaaaatgtctgaacagccaccaattttcaaaatcacccatttaactagagactttaaagcccagaatttgcagttacgtatttcagaatgatttagtaattttgtgagcagctcagaggttaagtctacaatgtctgactacggtgcattattgaaaatatcagtagtgtaaggatcccgtagattggtgataactttgctcttgttatttcaacagttaccaccaacagttggtgacttaacaaattaagagcatagttgccatatgctcatatttggcaaatatgtcaaaatggccatatttgccaatttttaagacaataaattcacagaaaatgcattacagaaaataacttaaaaaaaaaaaaaacaacttttgggccaggcatggtggttcacacctgtaataccaacactctaggaggctgaggtgagaggatcccttgagcccaggagtttgaaaccaacctgggctacatggcaaggcctccctctacaaatgtaaaaaaaaaattagccaggtgtggtggcatgcgccatgtagccccagctacttgggaggctgaggtggaggactgtttgagcccagaagttcaaggttgcaggagctaggatcgcaccactatacaagcctgggtggcagcaagaccctgtttaaaaaaaaaaaaaaattcagctgtatatgcaatgaaaacctacaagtcactgaaaagttactgaagtttagaaaactagccaacaaaatcattgctttggtaaacaaatttgaaatg

SEQ ID NO: 22702 - protein, 44 aa, Homo sapiens
MARPPSTNVKKKLARCGGMRHVAPATWEAEVEDCLSPEVQGCRS

SEQ ID NO: 22703 - DNA, 2193 bp, Homo sapiens
ctcagtttttaacacattgttgaagaaaaggtaccagctttggaacgagatgctatactaataagcaagtgtaaaaaaaaaaaaaaaagaggaagaaaatcttaagtgattgatgctgttttcttttaaaaaaaaaaaaaaaaattcattttctttgggttagagctagagagaaggccccaagcttctatggtttcttctaattcttattgcttaaagtatgagtatgtcacttacccgtgcttctgtttactgtgtaattaaaatgggtagtactgtttacctaactacctcatggatgtgttaaggcatattgagttaaatctcatataatgtttctcaatcttgttaaaagctcaaaattttgggcctatttgtaatgccagtgtgacactaagcattttgttcacaccacgctttgataactaaactggaaaacaaaggtgttaagtacctctgttctggatctgggcagtcagcactctttttagatctttgtgtggctcctatttttatagaagtggagggatgcactatttcacaaggtccaagatttgttttcagatatttttgatgactgtattgtaaatactacagggatagcactatagtattgtagtcatgagacttaaagtggaaataagactatttttgacaaaagatgccattaaatttcagactgtagagccacatttacaatacctcaggctaattactgttaattttggggttgaacttttttttgacagtgagggtggattattggattgtcattagaggaaggtctagatttcctgctcttaataaaattacattgaattgatttttagaggtaatgaaaacttcctttctgagaagttagtgttaaggtcttggaatgtgaacacattgtttgtagtgctatccattcctctcctgagattttaacttactactggaaatccttaaccaattataatagctttttttctttattttcaaaatgatttcctttgctttgattagacactatgtgctttttttttttaaccatagttcatcgaaatgcagctttttctgaacttcaaagatagaatcccatttttaatgaactgaagtagcaaaatcatctttttcattctttaggaaatagctattgccaaagtgaaggtgtagataatacctagtcttgttacataaaggggatgtggtttgcagaagaattttctttgatagtttaacatggatgtctgaaagccacatatataatttcttaggattcttaaattagtaaatctagcttactgaagcagtattagcatcactattttagattgcaaaaataccttaattgtgtggaactggcttgtagagtggtacttaagaaaaatgggattctacctctatttctgttttagcacacttaatcaggaaaggatatattaactttcataaaaatatttttgttgtgtgaataggttaatgatatggtaaggcccctaaaataactgaattaattgtttattgtaattgtaggccattcccattattaaaaataaagacaaaacttgaagtaactgaaaatcttatcgtgctatgtagaaatattgaactaatattcaaatatttgaatgctttggtttcagggattggtttaaaattggagtccttttttatgggttagtcttacaaaaatttaagcctttatatttttgactttaaatcaaaacaaatgttattttaaatgtacagaatagattggtagtgcagaagagtgtaagttcttcataggagctttagaaaagagaaatatgtgctaattcagtttttttttaatctgcactgtacatatatacttggtaattatgagcttgattttgtttttggaaatatgtgttcataatttaggtaatttgctacttaaagcactaagtctctgatacctgaaaagtacatgtaaatggtgatggtgaaataatactgcagttaacttaatagatgtatactggtgatttttgtatgctggattaaaactccagatattaaaatataacctggataaaaagccaagttcttggactgattgaggatcacttacatgactttacagaaatggaaacatccttgttggtatatgaaattattttactcaaggataagtattcataagaaattttgattgatgtatattttcaaaaatacagtatgctttgt

SEQ ID NO: 22704 - protein, 51 aa, Homo sapiens
MRLKVEIRLFLTKDAIKFQTVEPHLQYLRLITVNFGVELFFDSEGGLLDCH

SEQ ID NO: 22705 - DNA, 2863 bp, Homo sapiens
atttgacaagcctattttcaagttatttgttgtttgtttgcttgtttttgtttttgcagctaaaataaaaatttcaaatacaattttagttcttacaagataatgtcttaattttgtaccaattcaggtagaagtagaggcctaccttgaattaagggttatactcagtttttaacacattgttgaagaaaaggtaccagctttggaacgagatgctatactaataagcaagtgtaaaaaaaaaaaaaaaagaggaagaaaatcttaagtgattgatgctgttttcttttaaaaaaaaaaaaaaaaattcattttctttgggttagagctagagagaaggccccaagcttctatggtttcttctaattcttattgcttaaagtatgagtatgtcacttacccgtgcttctgtttactgtgtaattaaaatgggtagtactgtttacctaactacctcatggatgtgttaaggcatattgagttaaatctcatataatgtttctcaatcttgttaaaagctcaaaattttgggcctatttgtaatgccagtgtgacactaagcattttgttcacaccacgctttgataactaaactggaaaacaaaggtgttaagtacctctgttctggatctgggcagtcagcactctttttagatctttgtgtggctcctatttttatagaagtggagggatgcactatttcacaaggtccaagatttacttaaagtggaaataagactatttttgacaaaagatgccattaaatttcagactgtagagccacatttacaatacctcaggctaattactgttaattttggggttgaacttttttttgacagtgagggtggattattggattgtcattagaggaaggtctagatttcctgctcttaataaaattacattgaattgatttttagaggtaatgaaaacttcctttctgagaagttagtgttaaggtcttggaatgtgaacacattgtttgtagtgctatccattcctctcctgagattttaacttactactggaaatccttaaccaattataatagctttttttctttattttcaaaatgatttcctttgctttgattagacactatgtgctttttttttttaaccatagttcatcgaaatgcagctttttctgaacttcaaagatagaatcccatttttaatgaactgaagtagcaaaatcatctttttcattctttaggaaatagctattgccaaagtgaaggtgtagataatacctagtcttgttacataaaggggatgtggtttgcagaagaattttctttataaaattgaagttttaagggacgtcagtgtttatgccatttttccagttccaaaatgattccattccattctagaaatttgaagtatgtaacctgaaatccttaataaaatttggatttaattttataaaatgtactggtgatattttgggtgtttttttttaaatgaatgtatatactttttttttgaagagtggagagtagtgatgtctagagggagctattttgtgctgaggccactatgttctgtaaatatataattttaagagcaacctcacaatccctgctaagtggagtttattatttgaagactaaaatggaattccatagttcctgataggttatattctgggttattattctgagttatctacaaacatttttgagatttgtctttacactctgattgtagtttccagcagcccatgcacactgccaagtaagtctcattttttcctgttagaaatggtgaaatatcatataatcacttataaagaaaactgatatgaaaaaattttagagttgtttgctttatggtcactcaagtagggtaagtgttccacaaattccacaagttgatagtttaacatggatgtctgaaagccacatatataatttcttaggattcttaaattagtaaatctagcttactgaagcagtattagcatcactattttagattgcaaaaataccttaattgtgtggaactggcttgtagagtggtacttaagaaaaatgggattctacctctatttctgttttagcacacttaatcaggaaaggatatattaactttcataaaaatatttttgttgtgtgaataggttaatgatatggtaaggcccctaaaataactgaattaattgtttattgtaattgtaggccattcccattattaaaaataaagacaaaacttgaagtaactgaaaatcttatcgtgctatgtagaaatattgaactaatattcaaatatttgaatgctttggtttcagggattggtttaaaattggagtccttttttatgggttagtcttacaaaaatttaagcctttatatttttgactttaaatcaaaacaaatgttattttaaatgtacagaatagattggtagtgcagaagagtgtaagttcttcataggagctttagaaaagagaaatatgtgctaattcagtttttttttaatctgcactgtacatatatacttggtaattatgagcttgattttgtttttggaaatatgtgttcataatttaggtaatttgctacttaaagcactaagtctctgatacctgaaaagtacatgtaaatggtgatggtgaaataatactgcagttaacttaatagatgtatactggtgatttttgtatgctggattaaaactccagatattaaaatataacctggataaaaagccaagttcttggactgattgaggatcacttacatgactttacagaaatggaaacatccttgttggtatatgaaattattttactcaaggataagtattcataagaaattttgattgatgtatattttcaaaaatacagtatgctttgt

SEQ ID NO: 22706 - protein, 31 aa, Homo sapiens
MFCKYIILRATSQSLLSGVYYLKTKMEFHSS

SEQ ID NO: 22707 - DNA, 3778 bp, Homo sapiens
tatgatgaagaaggtgaagaagcggatgaggtaatgtttaccaaatgagcaaataattctctgtggttaacacattgagaagcaaattgaatgacttatgtattcctttgctataatcattctgtgatttgggataaaaacattttggaaaacatgattttagaattctacagccaaacaatgtatgtataaggtttcaataaataaattgcaaaactcagcaacatttttttatttcaaataattttgttctgctgcagggttatcagctctttgaagaagtcaaaagctgcagtaaacttttccaacgttggctgcagtaactattttcaataaaagctgtctggatgtctcaagttgtgttgggaaatttttcatattagaagctttcaaattaaattgtattatcatcaaagtctgtaatcatgaaaatctgttgatccgtagagtaacttgtattaaattttccctacattatgagccagtttacctactatgtacatacttcatggatgcattttgaactttaatataggaaggggaagaagaaggagatgaggaaaatgatccagactatgacccaaaggttaagaatttccagtatgaccacacccaataactgttattagagtgttaatggattattgtgttttaggtgacatagttaactgtaaagtaacctgactcagtatagttactggtaccacagtgaggtgaataaaacgggattttcagaagttagcctgaatttaactgtatttttaaatttaacctccattaactaagcatcttttctttgtggtagggtctaccttctgcttccctggaaaggatgaatttacatcatttgacaagcctattttcaagttatttgttgtttgtttgcttgtttttgtttttgcagctaaaataaaaatttcaaatacaattttagttcttacaagataatgtcttaattttgtaccaattcaggtagaagtagaggcctaccttgaattaagggttatactcagtttttaacacattgttgaagaaaaggtaccagctttggaacgagatgctatactaataagcaagtgtaaaaaaaaaaaaaaaagaggaagaaaatcttaagtgattgatgctgttttcttttaaaaaaaaaaaaaaaaattcattttctttgggttagagctagagagaaggccccaagcttctatggtttcttctaattcttattgcttaaagtatgagtatgtcacttacccgtgcttctgtttactgtgtaattaaaatgggtagtactgtttacctaactacctcatggatgtgttaaggcatattgagttaaatctcatataatgtttctcaatcttgttaaaagctcaaaattttgggcctatttgtaatgccagtgtgacactaagcattttgttcacaccacgctttgataactaaactggaaaacaaaggtgttaagtacctctgttctggatctgggcagtcagcactctttttagatctttgtgtggctcctatttttatagaagtggagggatgcactatttcacaaggtccaagatttgttttcagatatttttgatgactgtattgtaaatactacagggatagcactatagtattgtagtcatgagacttaaagtggaaataagactatttttgacaaaagatgccattaaatttcagactgtagagccacatttacaatacctcaggctaattactgttaattttggggttgaacttttttttgacagtgagggtggattattggattgtcattagaggaaggtctagatttcctgctcttaataaaattacattgaattgatttttagaggtaatgaaaacttcctttctgagaagttagtgttaaggtcttggaatgtgaacacattgtttgtagtgctatccattcctctcctgagattttaacttactactggaaatccttaaccaattataatagctttttttctttattttcaaaatgatttcctttgctttgattagacactatgtgctttttttttttaaccatagttcatcgaaatgcagctttttctgaacttcaaagatagaatcccatttttaatgaactgaagtagcaaaatcatctttttcattctttaggaaatagctattgccaaagtgaaggtgtagataatacctagtcttgttacataaaggggatgtggtttgcagaagaattttctttataaaattgaagttttaagggacgtcagtgtttatgccatttttccagttccaaaatgattccattccattctagaaatttgaagtatgtaacctgaaatccttaataaaatttggatttaattttataaaatgtactggtgatattttgggtgtttttttttaaatgaatgtatatactttttttttgaagagtggagagtagtgatgtctagagggagctattttgtgctgaggccactatgttctgtaaatatataattttaagagcaacctcacaatccctgctaagtggagtttattatttgaagactaaaatggaattccatagttcctgataggttatattctgggttattattctgagttatctacaaacatttttgagatttgtctttacactctgattgtagtttccagcagcccatgcacactgccaagtaagtctcattttttcctgttagaaatggtgaaatatcatataatcacttataaagaaaactgatatgaaaaaattttagagttgtttgctttatggtcactcaagtagggtaagtgttccacaaattccacaagttgatagtttaacatggatgtctgaaagccacatatataatttcttaggattcttaaattagtaaatctagcttactgaagcagtattagcatcactattttagattgcaaaaataccttaattgtgtggaactggcttgtagagtggtacttaagaaaaatgggattctacctctatttctgttttagcacacttaatcaggaaaggatatattaactttcataaaaatatttttgttgtgtgaataggttaatgatatggtaaggcccctaaaataactgaattaattgtttattgtaattgtaggccattcccattattaaaaataaagacaaaacttgaagtaactgaaaatcttatcgtgctatgtagaaatattgaactaatattcaaatatttgaatgctttggtttcagggattggtttaaaattggagtccttttttatgggttagtcttacaaaaatttaagcctttatatttttgactttaaatcaaaacaaatgttattttaaatgtacagaatagattggtagtgcagaagagtgtaagttcttcataggagctttagaaaagagaaatatgtgctaattcagtttttttttaatctgcactgtacatatatacttggtaattatgagcttgattttgtttttggaaatatgtgttcataatttaggtaatttgctacttaaagcactaagtctctgatacctgaaaagtacatgtaaatggtgatggtgaaataatactgcagttaacttaatagatgtatactggtgatttttgtatgctggattaaaactccagatattaaaatataacctggataaaaagccaagttcttggactgattgaggatcacttacatgactttacagaaatggaaacatccttgttggtatatgaaattattttactcaaggataagtattcataagaaattttgattgatgtatattttcaaaaatacagtatgctttgt

SEQ ID NO: 22708 - protein, 51 aa, Homo sapiens; identical to SEQ ID NO: 22704

SEQ ID NO: 22709 - DNA, 3633 bp, Homo sapiens
agtatgatgaagaaggtgaagaagcggatgaggtaatgtttaccaaatgagcaaataattctctgtggttaacacattgagaagcaaattgaatgacttatgtattcctttgctataatcattctgtgatttgggataaaaacattttggaaaacatgattttagaattctacagccaaacaatgtatgtataaggtttcaataaataaattgcaaaactcagcaacatttttttatttcaaataattttgttctgctgcagggttatcagctctttgaagaagtcaaaagctgcagtaaacttttccaacgttggctgcagtaactattttcaataaaagctgtctggatgtctcaagttgtgttgggaaatttttcatattagaagctttcaaattaaattgtattatcatcaaagtctgtaatcatgaaaatctgttgatccgtagagtaacttgtattaaattttccctacattatgagccagtttacctactatgtacatacttcatggatgcattttgaactttaatataggaaggggaagaagaaggagatgaggaaaatgatccagactatgacccaaagaaggatcaaaacccagcagagtgcaagcagcagtgaagcaggatgtatgtggccttgaggataacctgcactggtctaccttctgcttccctggaaaggatgaatttacatcatttgacaagcctattttcaagttatttgttgtttgtttgcttgtttttgtttttgcagctaaaataaaaatttcaaatacaattttagttcttacaagataatgtcttaattttgtaccaattcaggtagaagtagaggcctaccttgaattaagggttatactcagtttttaacacattgttgaagaaaaggtaccagctttggaacgagatgctatactaataagcaagtgtaaaaaaaaaaaaaaaagaggaagaaaatcttaagtgattgatgctgttttcttttaaaaaaaaaaaaaaaaattcattttctttgggttagagctagagagaaggccccaagcttctatggtttcttctaattcttattgcttaaagtatgagtatgtcacttacccgtgcttctgtttactgtgtaattaaaatgggtagtactgtttacctaactacctcatggatgtgttaaggcatattgagttaaatctcatataatgtttctcaatcttgttaaaagctcaaaattttgggcctatttgtaatgccagtgtgacactaagcattttgttcacaccacgctttgataactaaactggaaaacaaaggtgttaagtacctctgttctggatctgggcagtcagcactctttttagatctttgtgtggctcctatttttatagaagtggagggatgcactatttcacaaggtccaagatttgttttcagatatttttgatgactgtattgtaaatactacagggatagcactatagtattgtagtcatgagacttaaagtggaaataagactatttttgacaaaagatgccattaaatttcagactgtagagccacatttacaatacctcaggctaattactgttaattttggggttgaacttttttttgacagtgagggtggattattggattgtcattagaggaaggtctagatttcctgctcttaataaaattacattgaattgatttttagaggtaatgaaaacttcctttctgagaagttagtgttaaggtcttggaatgtgaacacattgtttgtagtgctatccattcctctcctgagattttaacttactactggaaatccttaaccaattataatagctttttttctttattttcaaaatgatttcctttgctttgattagacactatgtgctttttttttttaaccatagttcatcgaaatgcagctttttctgaacttcaaagatagaatcccatttttaatgaactgaagtagcaaaatcatctttttcattctttaggaaatagctattgccaaagtgaaggtgtagataatacctagtcttgttacataaaggggatgtggtttgcagaagaattttctttataaaattgaagttttaagggacgtcagtgtttatgccatttttccagttccaaaatgattccattccattctagaaatttgaagtatgtaacctgaaatccttaataaaatttggatttaattttataaaatgtactggtgatattttgggtgtttttttttaaatgaatgtatatactttttttttgaagagtggagagtagtgatgtctagagggagctattttgtgctgaggccactatgttctgtaaatatataattttaagagcaacctcacaatccctgctaagtggagtttattatttgaagactaaaatggaattccatagttcctgataggttatattctgggttattattctgagttatctacaaacatttttgagatttgtctttacactctgattgtagtttccagcagcccatgcacactgccaagtaagtctcattttttcctgttagaaatggtgaaatatcatataatcacttataaagaaaactgatatgaaaaaattttagagttgtttgctttatggtcactcaagtagggtaagtgttccacaaattccacaagttgatagtttaacatggatgtctgaaagccacatatataatttcttaggattcttaaattagtaaatctagcttactgaagcagtattagcatcactattttagattgcaaaaataccttaattgtgtggaactggcttgtagagtggtacttaagaaaaatgggattctacctctatttctgttttagcacacttaatcaggaaaggatatattaactttcataaaaatatttttgttgtgtgaataggttaatgatatggtaaggcccctaaaataactgaattaattgtttattgtaattgtaggccattcccattattaaaaataaagacaaaacttgaagtaactgaaaatcttatcgtgctatgtagaaatattgaactaatattcaaatatttgaatgctttggtttcagggattggtttaaaattggagtccttttttatgggttagtcttacaaaaatttaagcctttatatttttgactttaaatcaaaacaaatgttattttaaatgtacagaatagattggtagtgcagaagagtgtaagttcttcataggagctttagaaaagagaaatatgtgctaattcagtttttttttaatctgcactgtacatatatacttggtaattatgagcttgattttgtttttggaaatatgtgttcataatttaggtaatttgctacttaaagcactaagtctctgatacctgaaaagtacatgtaaatggtgatggtgaaataatactgcagttaacttaatagatgtatactggtgatttttgtatgctggattaaaactccagatattaaaatataacctggataaaaagccaagttcttggactgattgaggatcacttacatgactttacagaaatggaaacatccttgttggtatatgaaattattttactcaaggataagtattcataagaaattttgattgatgtatattttcaaaaatacagtatgctttgt

SEQ ID NO: 22710 - protein, 45 aa, Homo sapiens
MYVALRITCTGLPSASLERMNLHHLTSLFSSYLLFVCLFLFLQLK

SEQ ID NO: 22711 - DNA, 3373 bp, Homo sapiens
aactattaagaagaagcagaaacacaagggacgtgggacagttcgtactgtgactaaaacagtttccaatgactctttctttaacttttttgcccctcctgaagttcctgagagtggagatctggatgatgatgctgaagctatccttgctgcagacttcgaaattggtcactttttacgtgagcgtataatcccaagatcagtgttatattttactggagaagctattgaagatgatgatgatgattatgatgaagaaggtgaagaagcggatgaggaaggggaagaagaaggagatgaggaaaatgatccagactatgacccaaagaaggatcaaaacccagcagagtgcaagcagcagtgaagcaggatgtatgtggccttgaggataacctgcactggtctaccttctgcttccctggaaaggatgaatttacatcatttgacaagcctattttcaagttatttgttgtttgtttgcttgtttttgtttttgcagctaaaataaaaatttcaaatacaattttagttcttacaagataatgtcttaattttgtaccaattcaggtagaagtagaggcctaccttgaattaagggttatactcagtttttaacacattgttgaagaaaaggtaccagctttggaacgagatgctatactaataagcaagtgtaaaaaaaaaaaaaaaagaggaagaaaatcttaagtgattgatgctgttttcttttaaaaaaaaaaaaaaaaattcattttctttgggttagagctagagagaaggccccaagcttctatggtttcttctaattcttattgcttaaagtatgagtatgtcacttacccgtgcttctgtttactgtgtaattaaaatgggtagtactgtttacctaactacctcatggatgtgttaaggcatattgagttaaatctcatataatgtttctcaatcttgttaaaagctcaaaattttgggcctatttgtaatgccagtgtgacactaagcattttgttcacaccacgctttgataactaaactggaaaacaaaggtgttaagtacctctgttctggatctgggcagtcagcactctttttagatctttgtgtggctcctatttttatagaagtggagggatgcactatttcacaaggtccaagatttgttttcagatatttttgatgactgtattgtaaatactacagggatagcactatagtattgtagtcatgagacttaaagtggaaataagactatttttgacaaaagatgccattaaatttcagactgtagagccacatttacaatacctcaggctaattactgttaattttggggttgaacttttttttgacagtgagggtggattattggattgtcattagaggaaggtctagatttcctgctcttaataaaattacattgaattgatttttagaggtaatgaaaacttcctttctgagaagttagtgttaaggtcttggaatgtgaacacattgtttgtagtgctatccattcctctcctgagattttaacttactactggaaatccttaaccaattataatagctttttttctttattttcaaaatgatttcctttgctttgattagacactatgtgctttttttttttaaccatagttcatcgaaatgcagctttttctgaacttcaaagatagaatcccatttttaatgaactgaagtagcaaaatcatctttttcattctttaggaaatagctattgccaaagtgaaggtgtagataatacctagtcttgttacataaaggggatgtggtttgcagaagaattttctttataaaattgaagttttaagggacgtcagtgtttatgccatttttccagttccaaaatgattccattccattctagaaatttgaagtatgtaacctgaaatccttaataaaatttggatttaattttataaaatgtactggtgatattttgggtgtttttttttaaatgaatgtatatactttttttttgaagagtggagagtagtgatgtctagagggagctattttgtgctgaggccactatgttctgtaaatatataattttaagagcaacctcacaatccctgctaagtggagtttattatttgaagactaaaatggaattccatagttcctgataggttatattctgggttattattctgagttatctacaaacatttttgagatttgtctttacactctgattgtagtttccagcagcccatgcacactgccaagtaagtctcattttttcctgttagaaatggtgaaatatcatataatcacttataaagaaaactgatatgaaaaaattttagagttgtttgctttatggtcactcaagtagggtaagtgttccacaaattccacaagttgatagtttaacatggatgtctgaaagccacatatataatttcttaggattcttaaattagtaaatctagcttactgaagcagtattagcatcactattttagattgcaaaaataccttaattgtgtggaactggcttgtagagtggtacttaagaaaaatgggattctacctctatttctgttttagcacacttaatcaggaaaggatatattaactttcataaaaatatttttgttgtgtgaataggttaatgatatggtaaggcccctaaaataactgaattaattgtttattgtaattgtaggccattcccattattaaaaataaagacaaaacttgaagtaactgaaaatcttatcgtgctatgtagaaatattgaactaatattcaaatatttgaatgctttggtttcagggattggtttaaaattggagtccttttttatgggttagtcttacaaaaatttaagcctttatatttttgactttaaatcaaaacaaatgttattttaaatgtacagaatagattggtagtgcagaagagtgtaagttcttcataggagctttagaaaagagaaatatgtgctaattcagtttttttttaatctgcactgtacatatatacttggtaattatgagcttgattttgtttttggaaatatgtgttcataatttaggtaatttgctacttaaagcactaagtctctgatacctgaaaagtacatgtaaatggtgatggtgaaataatactgcagttaacttaatagatgtatactggtgatttttgtatgctggattaaaactccagatattaaaatataacctggataaaaagccaagttcttggactgattgaggatcacttacatgactttacagaaatggaaacatccttgttggtatatgaaattattttactcaaggataagtattcataagaaattttgattgatgtatattttcaaaaatacagtatgctttgt

SEQ ID NO: 22712 - protein, 50 aa, Homo sapiens
MMMMIMMKKVKKRMRKGKKKEMRKMIQTMTQRRIKTQQSASSSEAGCMWP

SEQ ID NO: 22713 - DNA, 5288 bp, Homo sapiens
aaactattaagaagaagcagaaacacaagggacgtgggacagttcgtactgtgactaaaacagtttccaatgactctttctttaacttttttgcccctcctgaagttcctgagagtggagatctggatgatgatgctgaagctatccttgctgcagacttcgaaattggtcactttttacgtgagcgtataatcccaagatcagtgttatattttactggagaagctattgaagatgatgatgatgattatgatgaagaaggtgaagaagcggatgaggtaatgtttaccaaatgagcaaataattctctgtggttaacacattgagaagcaaattgaatgacttatgtattcctttgctataatcattctgtgatttgggataaaaacattttggaaaacatgattttagaattctacagccaaacaatgtatgtataaggtttcaataaataaattgcaaaactcagcaacatttttttatttcaaataattttgttctgctgcagggttatcagctctttgaagaagtcaaaagctgcagtaaacttttccaacgttggctgcagtaactattttcaataaaagctgtctggatgtctcaagttgtgttgggaaatttttcatattagaagctttcaaattaaattgtattatcatcaaagtctgtaatcatgaaaatctgttgatccgtagagtaacttgtattaaattttccctacattatgagccagtttacctactatgtacatacttcatggatgcattttgaactttaatataggaaggggaagaagaaggagatgaggaaaatgatccagactatgacccaaaggtgagcaaaattagtgctgctttctattaaatttaagatagctaaagtaagagttggtgtttttgaatatcaagtttctctccgttaaagtctttaataaataaagcctattgactggataactttgttttttcagtcccactggcattgtgaacagtacacataatttcagtggacgtttttctaaaaaacattgttttttgtttggacttcgtgctttttatagtttcaggtacagtgaaccctaggattctattttaatgggacgatttgtaacagtttttaagcattagaaaataaaggtttttaaaagatctggttgtaggagtgttcgggaactggggagcagtgcagtttgttagatccttccaactactcttactcagtccctgagagtcctagtctattattcctgagaatttgttatattaggattagcaaaaacaaagctgattggtaatataactaacataaattgcttggtaactttatttttttaagattatggtttagcgtgtgtcacattttatggagttaattctacagtgtaaagtttgagcttgattttagcatttcagtgacttgctaataaaataaataatttaccaccattgtcctataccatttcttttgacaacagtgagctactgttataattaaggcagtaattactattgagaaattcactgaagcaggtagaagaagatagattgacttgttgttttcctttaacagaaggatcaaaacccagcagagtgcaagcagcagtgaagcaggatgtatgtggccttgaggataacctgcactgtaatagcctaaacacaactcttatttacttacagccttatgtttttgtattttcttggtagactaggtaatttttttttaaaggacaggaaactgatattttaaagaccaatttgttctacctagcattttaactagtttttctgccagctatgttgaatgcacaaattctgtcacgcatgttcattcattgctacataatttggttcttctggaatatttttatgtagctcttggagtacagctatgaaaattaacaactgttaaaggaaataccttttttttttttttgtaattttttccttgaagaaccaaagtattttttcagctggttgttgaatagggttaagtccgcttggattagctgtgcctttcattactttgttacagaaatgcagtgacttatactaagacaatttattgtttaaaaaaaaaattggcaagacaactatatggttaagaatttccagtatgaccacacccaataactgttattagagtgttaatggattattgtgttttaggtgacatagttaactgtaaagtaacctgactcagtatagttactggtaccacagtgaggtgaataaaacgggattttcagaagttagcctgaatttaactgtatttttaaatttaacctccattaactaagcatcttttctttgtggtagggtctaccttctgcttccctggaaaggatgaatttacatcatttgacaagcctattttcaagttatttgttgtttgtttgcttgtttttgtttttgcagctaaaataaaaatttcaaatacaattttagttcttacaagataatgtcttaattttgtaccaattcaggtagaagtagaggcctaccttgaattaagggttatactcagtttttaacacattgttgaagaaaaggtaccagctttggaacgagatgctatactaataagcaagtgtaaaaaaaaaaaaaaaagaggaagaaaatcttaagtgattgatgctgttttcttttaaaaaaaaaaaaaaaaattcattttctttgggttagagctagagagaaggccccaagcttctatggtttcttctaattcttattgcttaaagtatgagtatgtcacttacccgtgcttctgtttactgtgtaattaaaatgggtagtactgtttacctaactacctcatggatgtgttaaggcatattgagttaaatctcatataatgtttctcaatcttgttaaaagctcaaaattttgggcctatttgtaatgccagtgtgacactaagcattttgttcacaccacgctttgataactaaactggaaaacaaaggtgttaagtacctctgttctggatctgggcagtcagcactctttttagatctttgtgtggctcctatttttatagaagtggagggatgcactatttcacaaggtccaagatttgttttcagatatttttgatgactgtattgtaaatactacagggatagcactatagtattgtagtcatgagacttaaagtggaaataagactatttttgacaaaagatgccattaaatttcagactgtagagccacatttacaatacctcaggctaattactgttaattttggggttgaacttttttttgacagtgagggtggattattggattgtcattagaggaaggtctagatttcctgctcttaataaaattacattgaattgatttttagaggtaatgaaaacttcctttctgagaagttagtgttaaggtcttggaatgtgaacacattgtttgtagtgctatccattcctctcctgagattttaacttactactggaaatccttaaccaattataatagctttttttctttattttcaaaatgatttcctttgctttgattagacactatgtgctttttttttttaaccatagttcatcgaaatgcagctttttctgaacttcaaagatagaatcccatttttaatgaactgaagtagcaaaatcatctttttcattctttaggaaatagctattgccaaagtgaaggtgtagataatacctagtcttgttacataaaggggatgtggtttgcagaagaattttctttataaaattgaagttttaagggacgtcagtgtttatgccatttttccagttccaaaatgattccattccattctagaaatttgaagtatgtaacctgaaatccttaataaaatttggatttaattttataaaatgtactggtgatattttgggtgtttttttttaaatgaatgtatatactttttttttgaagagtggagagtagtgatgtctagagggagctattttgtgctgaggccactatgttctgtaaatatataattttaagagcaacctcacaatccctgctaagtggagtttattatttgaagactaaaatggaattccatagttcctgataggttatattctgggttattattctgagttatctacaaacatttttgagatttgtctttacactctgattgtagtttccagcagcccatgcacactgccaagtaagtctcattttttcctgttagaaatggtgaaatatcatataatcacttataaagaaaactgatatgaaaaaattttagagttgtttgctttatggtcactcaagtagggtaagtgttccacaaattccacaagttgatagtttaacatggatgtctgaaagccacatatataatttcttaggattcttaaattagtaaatctagcttactgaagcagtattagcatcactattttagattgcaaaaataccttaattgtgtggaactggcttgtagagtggtacttaagaaaaatgggattctacctctatttctgttttagcacacttaatcaggaaaggatatattaactttcataaaaatatttttgttgtgtgaataggttaatgatatggtaaggcccctaaaataactgaattaattgtttattgtaattgtaggccattcccattattaaaaataaagacaaaacttgaagtaactgaaaatcttatcgtgctatgtagaaatattgaactaatattcaaatatttgaatgctttggtttcagggattggtttaaaattggagtccttttttatgggttagtcttacaaaaatttaagcctttatatttttgactttaaatcaaaacaaatgttattttaaatgtacagaatagattggtagtgcagaagagtgtaagttcttcataggagctttagaaaagagaaatatgtgctaattcagtttttttttaatctgcactgtacatatatacttggtaattatgagcttgattttgtttttggaaatatgtgttcataatttaggtaatttgctacttaaagcactaagtctctgatacctgaaaagtacatgtaaatggtgatggtgaaataatactgcagttaacttaatagatgtatactggtgatttttgtatgctggattaaaactccagatattaaaatataacctggataaaaagccaagttcttggactgattgaggatcacttacatgactttacagaaatggaaacatccttgttggtatatgaaattattttactcaaggataagtattcataagaaattttgattgatgtatattttcaaaaatacagtatgctttgt

SEQ ID NO: 22714 - protein, 40 aa, Homo sapiens
MTLSLTFLPLLKFLRVEIWMMMLKLSLLQTSKLVTFYVSV

SEQ ID NO: 22715 - DNA, 4873 bp, Homo sapiens
agcgccatctgctcgcggcgccgcctcctgctcctcccgctgctgctgccgctgccgccctgagtcactgcctgcgcagctccggccgcctggctccccatactagtcgccgcaaagaacagtctgaacttgatcaagatttggatgatgttgaagaagtagaagaagaggaaactggtgaagaaacaaaactcaaagcacgtcagctaactgttcagatgatgcaaaatcctcagattcttgcagcccttcaagaaagacttgatggtctggtagaaacaccaacaggatacattgaaagcctgcctagggtagttaaaagacgagtgaatgctctcaaaaacctgcaagttaaatgtgcacagatagaagccaaattctatgaggaagttcacgatcttgaaaggaagtatgctgttctctatcagcctctatttgataaggaggaattgaaagaaaaggccaagattgaagatgagaaaaaagatgaagaaaaagaagaccccaaaggaattcctgaattttggttaactgtttttaagaatgttgacttgctcagtgatatggttcaggaacacgatgaacctattctgaagcacttgaaagatattaaagtgaagttctcagatgctggccagcctatgagttttgtcttagaatttcactttgaacccaatgaatattttacaaatgaagtgctgacaaagacatacaggatgaggtcagaaccagatgattctgatcccttttcttttgatggaccagaaattatgggttgtacagggtgccagatagattggaaaaaaggaaagaatgtcactttgaaaactattaagaagaagcagaaacacaagggacgtgggacagttcgtactgtgactaaaacagtttccaatgactctttctttaacttttttgcccctcctgaagttcctgagagtggagatctggatgatgatgctgaagctatccttgctgcagacttcgaaattggtcactttttacgtgagcgtataatcccaagatcagtgttatattttactggagaagctattgaagatgatgatgatgattatgatgaagaaggtgaagaagcggatgaggaaggggaagaagaaggagatgaggaaaatgatccagactatgacccaaagaaggatcaaaacccagcagagtgcaagcagcagtgaagcaggatgtatgtggccttgaggataacctgcactgtaatagcctaaacacaactcttatttacttacagccttatgtttttgtattttcttggtagactaggtaatttttttttaaaggacaggaaactgatattttaaagaccaatttgttctacctagcattttaactagtttttctgccagctatgttgaatgcacaaattctgtcacgcatgttcattcattgctacataatttggttcttctggaatatttttatgtagctcttggagtacagctatgaaaattaacaactgttaaaggaaataccttttttttttttttgtaattttttccttgaagaaccaaagtattttttcagctggttgttgaatagggttaagtccgcttggattagctgtgcctttcattactttgttacagaaatgcagtgacttatactaagacaatttattgtttaaaaaaaaaattggcaagacaactatatggttaagaatttccagtatgaccacacccaataactgttattagagtgttaatggattattgtgttttaggtgacatagttaactgtaaagtaacctgactcagtatagttactggtaccacagtgaggtgaataaaacgggattttcagaagttagcctgaatttaactgtatttttaaatttaacctccattaactaagcatcttttctttgtggtagggtctaccttctgcttccctggaaaggatgaatttacatcatttgacaagcctattttcaagttatttgttgtttgtttgcttgtttttgtttttgcagctaaaataaaaatttcaaatacaattttagttcttacaagataatgtcttaattttgtaccaattcaggtagaagtagaggcctaccttgaattaagggttatactcagtttttaacacattgttgaagaaaaggtaccagctttggaacgagatgctatactaataagcaagtgtaaaaaaaaaaaaaaaagaggaagaaaatcttaagtgattgatgctgttttcttttaaaaaaaaaaaaaaaaattcattttctttgggttagagctagagagaaggccccaagcttctatggtttcttctaattcttattgcttaaagtatgagtatgtcacttacccgtgcttctgtttactgtgtaattaaaatgggtagtactgtttacctaactacctcatggatgtgttaaggcatattgagttaaatctcatataatgtttctcaatcttgttaaaagctcaaaattttgggcctatttgtaatgccagtgtgacactaagcattttgttcacaccacgctttgataactaaactggaaaacaaaggtgttaagtacctctgttctggatctgggcagtcagcactctttttagatctttgtgtggctcctatttttatagaagtggagggatgcactatttcacaaggtccaagatttgttttcagatatttttgatgactgtattgtaaatactacagggatagcactatagtattgtagtcatgagacttaaagtggaaataagactatttttgacaaaagatgccattaaatttcagactgtagagccacatttacaatacctcaggctaattactgttaattttggggttgaacttttttttgacagtgagggtggattattggattgtcattagaggaaggtctagatttcctgctcttaataaaattacattgaattgatttttagaggtaatgaaaacttcctttctgagaagttagtgttaaggtcttggaatgtgaacacattgtttgtagtgctatccattcctctcctgagattttaacttactactggaaatccttaaccaattataatagctttttttctttattttcaaaatgatttcctttgctttgattagacactatgtgctttttttttttaaccatagttcatcgaaatgcagctttttctgaacttcaaagatagaatcccatttttaatgaactgaagtagcaaaatcatctttttcattctttaggaaatagctattgccaaagtgaaggtgtagataatacctagtcttgttacataaaggggatgtggtttgcagaagaattttctttataaaattgaagttttaagggacgtcagtgtttatgccatttttccagttccaaaatgattccattccattctagaaatttgaagtatgtaacctgaaatccttaataaaatttggatttaattttataaaatgtactggtgatattttgggtgtttttttttaaatgaatgtatatactttttttttgaagagtggagagtagtgatgtctagagggagctattttgtgctgaggccactatgttctgtaaatatataattttaagagcaacctcacaatccctgctaagtggagtttattatttgaagactaaaatggaattccatagttcctgataggttatattctgggttattattctgagttatctacaaacatttttgagatttgtctttacactctgattgtagtttccagcagcccatgcacactgccaagtaagtctcattttttcctgttagaaatggtgaaatatcatataatcacttataaagaaaactgatatgaaaaaattttagagttgtttgctttatggtcactcaagtagggtaagtgttccacaaattccacaagttgatagtttaacatggatgtctgaaagccacatatataatttcttaggattcttaaattagtaaatctagcttactgaagcagtattagcatcactattttagattgcaaaaataccttaattgtgtggaactggcttgtagagtggtacttaagaaaaatgggattctacctctatttctgttttagcacacttaatcaggaaaggatatattaactttcataaaaatatttttgttgtgtgaataggttaatgatatggtaaggcccctaaaataactgaattaattgtttattgtaattgtaggccattcccattattaaaaataaagacaaaacttgaagtaactgaaaatcttatcgtgctatgtagaaatattgaactaatattcaaatatttgaatgctttggtttcagggattggtttaaaattggagtccttttttatgggttagtcttacaaaaatttaagcctttatatttttgactttaaatcaaaacaaatgttattttaaatgtacagaatagattggtagtgcagaagagtgtaagttcttcataggagctttagaaaagagaaatatgtgctaattcagtttttttttaatctgcactgtacatatatacttggtaattatgagcttgattttgtttttggaaatatgtgttcataatttaggtaatttgctacttaaagcactaagtctctgatacctgaaaagtacatgtaaatggtgatggtgaaataatactgcagttaacttaatagatgtatactggtgatttttgtatgctggattaaaactccagatattaaaatataacctggataaaaagccaagttcttggactgattgaggatcacttacatgactttacagaaatggaaacatccttgttggtatatgaaattattttactcaaggataagtattcataagaaattttgattgatgtatattttcaaaaatacagtatgctttgt

SEQ ID NO: 22716 - protein, 323 aa, Homo sapiens
MMQNPQILAALQERLDGLVETPTGYIESLPRVVKRRVNALKNLQVKCAQIEAKFYEEVHDLERKYAVLYQPLFDKEELKEKAKIEDEKKDEEKEDPKGIPEFWLTVFKNVDLLSDMVQEHDEPILKHLKDIKVKFSDAGQPMSFVLEFHFEPNEYFTNEVLTKTYRMRSEPDDSDPFSFDGPEIMGCTGCQIDWKKGKNVTLKTIKKKQKHKGRGTVRTVTKTVSNDSFFNFFAPPEVPESGDLDDDAEAILAADFEIGHFLRERIIPRSVLYFTGEAIEDDDDDYDEEGEEADEEGEEEGDEENDPDYDPKKDQNPAECKQQ

SEQ ID NO: 22717 - DNA, 4672 bp, Homo sapiens
cgggcgccgggcacgcgggccaggccttccccacaactgatggggttgaaatttcctttccggctcagcagggagaaaagatatggtggggtgcttaacagaggaggttagacaccggcgggaaccagaggagcccaagcgcggcgcctgggcctcggggctgcaggagtcctcggtgggggtatggaggtcgccggggaaggaggacggttcagttgctaggcaacccggcctggacccgcctctcgctcgcgttgctgggagactacaaggccgggaggagggcggcgaaagggccctacgtgctgacgctaattgtatatgagcgcgagcggcgggctcttgggtcttttttagcgccatctgctcgcggcgccgcctcctgctcctcccgctgctgctgccgctgccgccctgagtcactgcctgcgcagctccggccgcctggctccccatactagtcgccgatatttggagttcttacaacatggcagacattgacaacaaagaacagtctgaacttgatcaagatttggatgatgttgaagaagtagaagaagaggaaactggtgaagaaacaaaactcaaagcacgtcagctaactgttcagatgatgcaaaatcctcagattcttgcagcccttcaagaaagacttgatggtctggtagaaacaccaacaggatacattgaaagcctgcctagggtagttaaaagacgagtgaatgctctcaaaaacctgcaagttaaatgtgcacagatagaagccaaattctatgaggaagttcacgatcttgaaaggaagtatgctgttctctatcagcctctatttgataagcgatttgaaattattaatgcaatttatgaacctacggaagaagaatgtgaatggaaaccagatgaagaagatgagatttcggaggaattgaaagaaaaggccaagattgaagatgagaaaaaagatgaagaaaaagaagaccccaaaggaattcctgaattttggttaactgtttttaagaatgttgacttgctcagtgatatggttcaggaacacgatgaacctattctgaagcacttgaaagatattaaagtgaagttctcagatgctggccagcctatgagttttgtcttagaatttcactttgaacccaatgaatattttacaaatgaagtgctgacaaagacatacaggatgaggtcagaaccagatgattctgatcccttttcttttgatggaccagaaattatgggttgtacagggtgccagatagattggaaaaaaggaaagaatgtcactttgaaaactattaagaagaagcagaaacacaagggacgtgggacagttcgtactgtgactaaaacagtttccaatgactctttctttaacttttttgcccctcctgaagttcctgagagtggagatctggatgatgatgctgaagctatccttgctgcagacttcgaaattggtcactttttacgtgagcgtataatcccaagatcagtgttatattttactggagaagctattgaagatgatgatgatgattatgatgaagaaggtgaagaagcggatgaggaaggggaagaagaaggagatgaggaaaatgatccagactatgacccaaagaaggatcaaaacccagcagagtgcaagcagcagtgaagcaggatgtatgtggccttgaggataacctgcactggtctaccttctgcttccctggaaaggatgaatttacatcatttgacaagcctattttcaagttatttgttgtttgtttgcttgtttttgtttttgcagctaaaataaaaatttcaaatacaattttagttcttacaagataatgtcttaattttgtaccaattcaggtagaagtagaggcctaccttgaattaagggttatactcagtttttaacacattgttgaagaaaaggtaccagctttggaacgagatgctatactaataagcaagtgtaaaaaaaaaaaaaaaagaggaagaaaatcttaagtgattgatgctgttttcttttaaaaaaaaaaaaaaaaattcattttctttgggttagagctagagagaaggccccaagcttctatggtttcttctaattcttattgcttaaagtatgagtatgtcacttacccgtgcttctgtttactgtgtaattaaaatgggtagtactgtttacctaactacctcatggatgtgttaaggcatattgagttaaatctcatataatgtttctcaatcttgttaaaagctcaaaattttgggcctatttgtaatgccagtgtgacactaagcattttgttcacaccacgctttgataactaaactggaaaacaaaggtgttaagtacctctgttctggatctgggcagtcagcactctttttagatctttgtgtggctcctatttttatagaagtggagggatgcactatttcacaaggtccaagatttgttttcagatatttttgatgactgtattgtaaatactacagggatagcactatagtattgtagtcatgagacttaaagtggaaataagactatttttgacaaaagatgccattaaatttcagactgtagagccacatttacaatacctcaggctaattactgttaattttggggttgaacttttttttgacagtgagggtggattattggattgtcattagaggaaggtctagatttcctgctcttaataaaattacattgaattgatttttagaggtaatgaaaacttcctttctgagaagttagtgttaaggtcttggaatgtgaacacattgtttgtagtgctatccattcctctcctgagattttaacttactactggaaatccttaaccaattataatagctttttttctttattttcaaaatgatttcctttgctttgattagacactatgtgctttttttttttaaccatagttcatcgaaatgcagctttttctgaacttcaaagatagaatcccatttttaatgaactgaagtagcaaaatcatctttttcattctttaggaaatagctattgccaaagtgaaggtgtagataatacctagtcttgttacataaaggggatgtggtttgcagaagaattttctttataaaattgaagttttaagggacgtcagtgtttatgccatttttccagttccaaaatgattccattccattctagaaatttgaagtatgtaacctgaaatccttaataaaatttggatttaattttataaaatgtactggtgatattttgggtgtttttttttaaatgaatgtatatactttttttttgaagagtggagagtagtgatgtctagagggagctattttgtgctgaggccactatgttctgtaaatatataattttaagagcaacctcacaatccctgctaagtggagtttattatttgaagactaaaatggaattccatagttcctgataggttatattctgggttattattctgagttatctacaaacatttttgagatttgtctttacactctgattgtagtttccagcagcccatgcacactgccaagtaagtctcattttttcctgttagaaatggtgaaatatcatataatcacttataaagaaaactgatatgaaaaaattttagagttgtttgctttatggtcactcaagtagggtaagtgttccacaaattccacaagttgatagtttaacatggatgtctgaaagccacatatataatttcttaggattcttaaattagtaaatctagcttactgaagcagtattagcatcactattttagattgcaaaaataccttaattgtgtggaactggcttgtagagtggtacttaagaaaaatgggattctacctctatttctgttttagcacacttaatcaggaaaggatatattaactttcataaaaatatttttgttgtgtgaataggttaatgatatggtaaggcccctaaaataactgaattaattgtttattgtaattgtaggccattcccattattaaaaataaagacaaaacttgaagtaactgaaaatcttatcgtgctatgtagaaatattgaactaatattcaaatatttgaatgctttggtttcagggattggtttaaaattggagtccttttttatgggttagtcttacaaaaatttaagcctttatatttttgactttaaatcaaaacaaatgttattttaaatgtacagaatagattggtagtgcagaagagtgtaagttcttcataggagctttagaaaagagaaatatgtgctaattcagtttttttttaatctgcactgtacatatatacttggtaattatgagcttgattttgtttttggaaatatgtgttcataatttaggtaatttgctacttaaagcactaagtctctgatacctgaaaagtacatgtaaatggtgatggtgaaataatactgcagttaacttaatagatgtatactggtgatttttgtatgctggattaaaactccagatattaaaatataacctggataaaaagccaagttcttggactgattgaggatcacttacatgactttacagaaatggaaacatccttgttggtatatgaaattattttactcaaggataagtattcataagaaattttgattgatgtatattttcaaaaatacagtatgctttgt

SEQ ID NO: 22718 - protein, 391 aa, Homo sapiens; identical to SEQ ID NO: 2983

SEQ ID NO: 22719 - DNA, 5346 bp, Homo sapiens
cgggcgccgggcacgcgggccaggccttccccacaactgatggggttgaaatttcctttccggctcagcagggagaaaagatatggtggggtgcttaacagaggaggttagacaccggcgggaaccagaggagcccaagcgcggcgcctgggcctcggggctgcaggagtcctcggtgggggtatggaggtcgccggggaaggaggacggttcagttgctaggcaacccggcctggacccgcctctcgctcgcgttgctgggagactacaaggccgggaggagggcggcgaaagggccctacgtgctgacgctaattgtatatgagcgcgagcggcgggctcttgggtcttttttagcgccatctgctcgcggcgccgcctcctgctcctcccgctgctgctgccgctgccgccctgagtcactgcctgcgcagctccggccgcctggctccccatactagtcgccgatatttggagttcttacaacatggcagacattgacaacaaagaacagtctgaacttgatcaagatttggatgatgttgaagaagtagaagaagaggaaactggtgaagaaacaaaactcaaagcacgtcagctaactgttcagatgatgcaaaatcctcagattcttgcagcccttcaagaaagacttgatggtctggtagaaacaccaacaggatacattgaaagcctgcctagggtagttaaaagacgagtgaatgctctcaaaaacctgcaagttaaatgtgcacagatagaagccaaattctatgaggaagttcacgatcttgaaaggaagtatgctgttctctatcagcctctatttgataagcgatttgaaattattaatgcaatttatgaacctacggaagaagaatgtgaatggaaaccagatgaagaagatgagatttcggaggaattgaaagaaaaggccaagattgaagatgagaaaaaagatgaagaaaaagaagaccccaaaggaattcctgaattttggttaactgtttttaagaatgttgacttgctcagtgatatggttcaggaacacgatgaacctattctgaagcacttgaaagatattaaagtgaagttctcagatgctggccagcctatgagttttgtcttagaatttcactttgaacccaatgaatattttacaaatgaagtgctgacaaagacatacaggatgaggtcagaaccagatgattctgatcccttttcttttgatggaccagaaattatgggttgtacagggtgccagatagattggaaaaaaggaaagaatgtcactttgaaaactattaagaagaagcagaaacacaagggacgtgggacagttcgtactgtgactaaaacagtttccaatgactctttctttaacttttttgcccctcctgaagttcctgagagtggagatctggatgatgatgctgaagctatccttgctgcagacttcgaaattggtcactttttacgtgagcgtataatcccaagatcagtgttatattttactggagaagctattgaagatgatgatgatgattatgatgaagaaggtgaagaagcggatgaggaaggggaagaagaaggagatgaggaaaatgatccagactatgacccaaagaaggatcaaaacccagcagagtgcaagcagcagtgaagcaggatgtatgtggccttgaggataacctgcactgtaatagcctaaacacaactcttatttacttacagccttatgtttttgtattttcttggtagactaggtaatttttttttaaaggacaggaaactgatattttaaagaccaatttgttctacctagcattttaactagtttttctgccagctatgttgaatgcacaaattctgtcacgcatgttcattcattgctacataatttggttcttctggaatatttttatgtagctcttggagtacagctatgaaaattaacaactgttaaaggaaataccttttttttttttttgtaattttttccttgaagaaccaaagtattttttcagctggttgttgaatagggttaagtccgcttggattagctgtgcctttcattactttgttacagaaatgcagtgacttatactaagacaatttattgtttaaaaaaaaaattggcaagacaactatatggttaagaatttccagtatgaccacacccaataactgttattagagtgttaatggattattgtgttttaggtgacatagttaactgtaaagtaacctgactcagtatagttactggtaccacagtgaggtgaataaaacgggattttcagaagttagcctgaatttaactgtatttttaaatttaacctccattaactaagcatcttttctttgtggtagggtctaccttctgcttccctggaaaggatgaatttacatcatttgacaagcctattttcaagttatttgttgtttgtttgcttgtttttgtttttgcagctaaaataaaaatttcaaatacaattttagttcttacaagataatgtcttaattttgtaccaattcaggtagaagtagaggcctaccttgaattaagggttatactcagtttttaacacattgttgaagaaaaggtaccagctttggaacgagatgctatactaataagcaagtgtaaaaaaaaaaaaaaaagaggaagaaaatcttaagtgattgatgctgttttcttttaaaaaaaaaaaaaaaaattcattttctttgggttagagctagagagaaggccccaagcttctatggtttcttctaattcttattgcttaaagtatgagtatgtcacttacccgtgcttctgtttactgtgtaattaaaatgggtagtactgtttacctaactacctcatggatgtgttaaggcatattgagttaaatctcatataatgtttctcaatcttgttaaaagctcaaaattttgggcctatttgtaatgccagtgtgacactaagcattttgttcacaccacgctttgataactaaactggaaaacaaaggtgttaagtacctctgttctggatctgggcagtcagcactctttttagatctttgtgtggctcctatttttatagaagtggagggatgcactatttcacaaggtccaagatttgttttcagatatttttgatgactgtattgtaaatactacagggatagcactatagtattgtagtcatgagacttaaagtggaaataagactatttttgacaaaagatgccattaaatttcagactgtagagccacatttacaatacctcaggctaattactgttaattttggggttgaacttttttttgacagtgagggtggattattggattgtcattagaggaaggtctagatttcctgctcttaataaaattacattgaattgatttttagaggtaatgaaaacttcctttctgagaagttagtgttaaggtcttggaatgtgaacacattgtttgtagtgctatccattcctctcctgagattttaacttactactggaaatccttaaccaattataatagctttttttctttattttcaaaatgatttcctttgctttgattagacactatgtgctttttttttttaaccatagttcatcgaaatgcagctttttctgaacttcaaagatagaatcccatttttaatgaactgaagtagcaaaatcatctttttcattctttaggaaatagctattgccaaagtgaaggtgtagataatacctagtcttgttacataaaggggatgtggtttgcagaagaattttctttataaaattgaagttttaagggacgtcagtgtttatgccatttttccagttccaaaatgattccattccattctagaaatttgaagtatgtaacctgaaatccttaataaaatttggatttaattttataaaatgtactggtgatattttgggtgtttttttttaaatgaatgtatatactttttttttgaagagtggagagtagtgatgtctagagggagctattttgtgctgaggccactatgttctgtaaatatataattttaagagcaacctcacaatccctgctaagtggagtttattatttgaagactaaaatggaattccatagttcctgataggttatattctgggttattattctgagttatctacaaacatttttgagatttgtctttacactctgattgtagtttccagcagcccatgcacactgccaagtaagtctcattttttcctgttagaaatggtgaaatatcatataatcacttataaagaaaactgatatgaaaaaattttagagttgtttgctttatggtcactcaagtagggtaagtgttccacaaattccacaagttgatagtttaacatggatgtctgaaagccacatatataatttcttaggattcttaaattagtaaatctagcttactgaagcagtattagcatcactattttagattgcaaaaataccttaattgtgtggaactggcttgtagagtggtacttaagaaaaatgggattctacctctatttctgttttagcacacttaatcaggaaaggatatattaactttcataaaaatatttttgttgtgtgaataggttaatgatatggtaaggcccctaaaataactgaattaattgtttattgtaattgtaggccattcccattattaaaaataaagacaaaacttgaagtaactgaaaatcttatcgtgctatgtagaaatattgaactaatattcaaatatttgaatgctttggtttcagggattggtttaaaattggagtccttttttatgggttagtcttacaaaaatttaagcctttatatttttgactttaaatcaaaacaaatgttattttaaatgtacagaatagattggtagtgcagaagagtgtaagttcttcataggagctttagaaaagagaaatatgtgctaattcagtttttttttaatctgcactgtacatatatacttggtaattatgagcttgattttgtttttggaaatatgtgttcataatttaggtaatttgctacttaaagcactaagtctctgatacctgaaaagtacatgtaaatggtgatggtgaaataatactgcagttaacttaatagatgtatactggtgatttttgtatgctggattaaaactccagatattaaaatataacctggataaaaagccaagttcttggactgattgaggatcacttacatgactttacagaaatggaaacatccttgttggtatatgaaattattttactcaaggataagtattcataagaaattttgattgatgtatattttcaaaaatacagtatgctttgt

SEQ ID NO: 22720 - protein, 391 aa, Homo sapiens; identical to SEQ ID NO: 2983

SEQ ID NO: 22721 - DNA, 1438 bp, Homo sapiens
atttgacaagcctattttcaagttatttgttgtttgtttgcttgtttttgtttttgcagctaaaataaaaatttcaaatacaattttagttcttacaagataatgtcttaattttgtaccaattcaggtagaagtagaggcctaccttgaattaagggttatactcagtttttaacacattgttgaagaaaaggtaccagctttggaacgagatgctatactaataagcaagtgtaaaaaaaaaaaaaaaagaggaagaaaatcttaagtgattgatgctgttttcttttaaaaaaaaaaaaaaaaattcattttctttgggttagagctagagagaaggccccaagcttctatggtttcttctaattcttattgcttaaagtatgagtatgtcacttacccgtgcttctgtttactgtgtaattaaaatgggtagtactgtttacctaactacctcatggatgtgttaaggcatattgagttaaatctcatataatgtttctcaatcttgttaaaagctcaaaattttgggcctatttgtaatgccagtgtgacactaagcattttgttcacaccacgctttgataactaaactggaaaacaaaggtgttaagtacctctgttctggatctgggcagtcagcactctttttagatctttgtgtggctcctatttttatagaagtggagggatgcactatttcacaaggtccaagatttacttaaagtggaaataagactatttttgacaaaagatgccattaaatttcagactgtagagccacatttacaatacctcaggctaattactgttaattttggggttgaacttttttttgacagtgagggtggattattggattgtcattagaggaaggtctagatttcctgctcttaataaaattacattgaattgatttttagaggtaatgaaaacttcctttctgagaagttagtgttaaggtcttggaatgtgaacacattgtttgtagtgctatccattcctctcctgagattttaacttactactggaaatccttaaccaattataatagctttttttctttattttcaaaatgatttcctttgctttgattagacactatgtgctttttttttttaaccatagttcatcgaaatgcagctttttctgaacttcaaagatagaatcccatttttaatgaactgaagtagcaaaatcatctttttcattctttaggaaatagctattgccaaagtgaaggtgtagataatacctagtcttgttacataaaggggatgtggtttgcagaagaattttctttataaaattgaagttttaagggacgtcagtgtttatgccatttttccagttccaaaatgattccattccattctagaaatttgaagtatgtaacctgaaatccttaataaaatttggatttaattttataaaatgt

SEQ ID NO: 22722 - protein, 62 aa, Homo sapiens
KWRDALFHKVQDLLKVEIRLFLTKDAIKFQTVEPHLQYLRLITVNFGVELFFDSEGGLLDCH

SEQ ID NO: 22723 - DNA, 2353 bp, Homo sapiens
tatgatgaagaaggtgaagaagcggatgaggtaatgtttaccaaatgagcaaataattctctgtggttaacacattgagaagcaaattgaatgacttatgtattcctttgctataatcattctgtgatttgggataaaaacattttggaaaacatgattttagaattctacagccaaacaatgtatgtataaggtttcaataaataaattgcaaaactcagcaacatttttttatttcaaataattttgttctgctgcagggttatcagctctttgaagaagtcaaaagctgcagtaaacttttccaacgttggctgcagtaactattttcaataaaagctgtctggatgtctcaagttgtgttgggaaatttttcatattagaagctttcaaattaaattgtattatcatcaaagtctgtaatcatgaaaatctgttgatccgtagagtaacttgtattaaattttccctacattatgagccagtttacctactatgtacatacttcatggatgcattttgaactttaatataggaaggggaagaagaaggagatgaggaaaatgatccagactatgacccaaaggttaagaatttccagtatgaccacacccaataactgttattagagtgttaatggattattgtgttttaggtgacatagttaactgtaaagtaacctgactcagtatagttactggtaccacagtgaggtgaataaaacgggattttcagaagttagcctgaatttaactgtatttttaaatttaacctccattaactaagcatcttttctttgtggtagggtctaccttctgcttccctggaaaggatgaatttacatcatttgacaagcctattttcaagttatttgttgtttgtttgcttgtttttgtttttgcagctaaaataaaaatttcaaatacaattttagttcttacaagataatgtcttaattttgtaccaattcaggtagaagtagaggcctaccttgaattaagggttatactcagtttttaacacattgttgaagaaaaggtaccagctttggaacgagatgctatactaataagcaagtgtaaaaaaaaaaaaaaaagaggaagaaaatcttaagtgattgatgctgttttcttttaaaaaaaaaaaaaaaaattcattttctttgggttagagctagagagaaggccccaagcttctatggtttcttctaattcttattgcttaaagtatgagtatgtcacttacccgtgcttctgtttactgtgtaattaaaatgggtagtactgtttacctaactacctcatggatgtgttaaggcatattgagttaaatctcatataatgtttctcaatcttgttaaaagctcaaaattttgggcctatttgtaatgccagtgtgacactaagcattttgttcacaccacgctttgataactaaactggaaaacaaaggtgttaagtacctctgttctggatctgggcagtcagcactctttttagatctttgtgtggctcctatttttatagaagtggagggatgcactatttcacaaggtccaagatttgttttcagatatttttgatgactgtattgtaaatactacagggatagcactatagtattgtagtcatgagacttaaagtggaaataagactatttttgacaaaagatgccattaaatttcagactgtagagccacatttacaatacctcaggctaattactgttaattttggggttgaacttttttttgacagtgagggtggattattggattgtcattagaggaaggtctagatttcctgctcttaataaaattacattgaattgatttttagaggtaatgaaaacttcctttctgagaagttagtgttaaggtcttggaatgtgaacacattgtttgtagtgctatccattcctctcctgagattttaacttactactggaaatccttaaccaattataatagctttttttctttattttcaaaatgatttcctttgctttgattagacactatgtgctttttttttttaaccatagttcatcgaaatgcagctttttctgaacttcaaagatagaatcccatttttaatgaactgaagtagcaaaatcatctttttcattctttaggaaatagctattgccaaagtgaaggtgtagataatacctagtcttgttacataaaggggatgtggtttgcagaagaattttctttataaaattgaagttttaagggacgtcagtgtttatgccatttttccagttccaaaatgattccattccattctagaaatttgaagtatgtaacctgaaatccttaataaaatttggatttaattttataaaatgt

SEQ ID NO: 22724 - protein, 51 aa, Homo sapiens; identical to SEQ ID NO: 22704

SEQ ID NO: 22725 - DNA, 2208 bp, Homo sapiens
agtatgatgaagaaggtgaagaagcggatgaggtaatgtttaccaaatgagcaaataattctctgtggttaacacattgagaagcaaattgaatgacttatgtattcctttgctataatcattctgtgatttgggataaaaacattttggaaaacatgattttagaattctacagccaaacaatgtatgtataaggtttcaataaataaattgcaaaactcagcaacatttttttatttcaaataattttgttctgctgcagggttatcagctctttgaagaagtcaaaagctgcagtaaacttttccaacgttggctgcagtaactattttcaataaaagctgtctggatgtctcaagttgtgttgggaaatttttcatattagaagctttcaaattaaattgtattatcatcaaagtctgtaatcatgaaaatctgttgatccgtagagtaacttgtattaaattttccctacattatgagccagtttacctactatgtacatacttcatggatgcattttgaactttaatataggaaggggaagaagaaggagatgaggaaaatgatccagactatgacccaaagaaggatcaaaacccagcagagtgcaagcagcagtgaagcaggatgtatgtggccttgaggataacctgcactggtctaccttctgcttccctggaaaggatgaatttacatcatttgacaagcctattttcaagttatttgttgtttgtttgcttgtttttgtttttgcagctaaaataaaaatttcaaatacaattttagttcttacaagataatgtcttaattttgtaccaattcaggtagaagtagaggcctaccttgaattaagggttatactcagtttttaacacattgttgaagaaaaggtaccagctttggaacgagatgctatactaataagcaagtgtaaaaaaaaaaaaaaaagaggaagaaaatcttaagtgattgatgctgttttcttttaaaaaaaaaaaaaaaaattcattttctttgggttagagctagagagaaggccccaagcttctatggtttcttctaattcttattgcttaaagtatgagtatgtcacttacccgtgcttctgtttactgtgtaattaaaatgggtagtactgtttacctaactacctcatggatgtgttaaggcatattgagttaaatctcatataatgtttctcaatcttgttaaaagctcaaaattttgggcctatttgtaatgccagtgtgacactaagcattttgttcacaccacgctttgataactaaactggaaaacaaaggtgttaagtacctctgttctggatctgggcagtcagcactctttttagatctttgtgtggctcctatttttatagaagtggagggatgcactatttcacaaggtccaagatttgttttcagatatttttgatgactgtattgtaaatactacagggatagcactatagtattgtagtcatgagacttaaagtggaaataagactatttttgacaaaagatgccattaaatttcagactgtagagccacatttacaatacctcaggctaattactgttaattttggggttgaacttttttttgacagtgagggtggattattggattgtcattagaggaaggtctagatttcctgctcttaataaaattacattgaattgatttttagaggtaatgaaaacttcctttctgagaagttagtgttaaggtcttggaatgtgaacacattgtttgtagtgctatccattcctctcctgagattttaacttactactggaaatccttaaccaattataatagctttttttctttattttcaaaatgatttcctttgctttgattagacactatgtgctttttttttttaaccatagttcatcgaaatgcagctttttctgaacttcaaagatagaatcccatttttaatgaactgaagtagcaaaatcatctttttcattctttaggaaatagctattgccaaagtgaaggtgtagataatacctagtcttgttacataaaggggatgtggtttgcagaagaattttctttataaaattgaagttttaagggacgtcagtgtttatgccatttttccagttccaaaatgattccattccattctagaaatttgaagtatgtaacctgaaatccttaataaaatttggatttaattttataaaatgt

SEQ ID NO: 22726 - protein, 45 aa, Homo sapiens; identical to SEQ ID NO: 22710

SEQ ID NO: 22727 - DNA, 1948 bp, Homo sapiens
aactattaagaagaagcagaaacacaagggacgtgggacagttcgtactgtgactaaaacagtttccaatgactctttctttaacttttttgcccctcctgaagttcctgagagtggagatctggatgatgatgctgaagctatccttgctgcagacttcgaaattggtcactttttacgtgagcgtataatcccaagatcagtgttatattttactggagaagctattgaagatgatgatgatgattatgatgaagaaggtgaagaagcggatgaggaaggggaagaagaaggagatgaggaaaatgatccagactatgacccaaagaaggatcaaaacccagcagagtgcaagcagcagtgaagcaggatgtatgtggccttgaggataacctgcactggtctaccttctgcttccctggaaaggatgaatttacatcatttgacaagcctattttcaagttatttgttgtttgtttgcttgtttttgtttttgcagctaaaataaaaatttcaaatacaattttagttcttacaagataatgtcttaattttgtaccaattcaggtagaagtagaggcctaccttgaattaagggttatactcagtttttaacacattgttgaagaaaaggtaccagctttggaacgagatgctatactaataagcaagtgtaaaaaaaaaaaaaaaagaggaagaaaatcttaagtgattgatgctgttttcttttaaaaaaaaaaaaaaaaattcattttctttgggttagagctagagagaaggccccaagcttctatggtttcttctaattcttattgcttaaagtatgagtatgtcacttacccgtgcttctgtttactgtgtaattaaaatgggtagtactgtttacctaactacctcatggatgtgttaaggcatattgagttaaatctcatataatgtttctcaatcttgttaaaagctcaaaattttgggcctatttgtaatgccagtgtgacactaagcattttgttcacaccacgctttgataactaaactggaaaacaaaggtgttaagtacctctgttctggatctgggcagtcagcactctttttagatctttgtgtggctcctatttttatagaagtggagggatgcactatttcacaaggtccaagatttgttttcagatatttttgatgactgtattgtaaatactacagggatagcactatagtattgtagtcatgagacttaaagtggaaataagactatttttgacaaaagatgccattaaatttcagactgtagagccacatttacaatacctcaggctaattactgttaattttggggttgaacttttttttgacagtgagggtggattattggattgtcattagaggaaggtctagatttcctgctcttaataaaattacattgaattgatttttagaggtaatgaaaacttcctttctgagaagttagtgttaaggtcttggaatgtgaacacattgtttgtagtgctatccattcctctcctgagattttaacttactactggaaatccttaaccaattataatagctttttttctttattttcaaaatgatttcctttgctttgattagacactatgtgctttttttttttaaccatagttcatcgaaatgcagctttttctgaacttcaaagatagaatcccatttttaatgaactgaagtagcaaaatcatctttttcattctttaggaaatagctattgccaaagtgaaggtgtagataatacctagtcttgttacataaaggggatgtggtttgcagaagaattttctttataaaattgaagttttaagggacgtcagtgtttatgccatttttccagttccaaaatgattccattccattctagaaatttgaagtatgtaacctgaaatccttaataaaatttggatttaattttataaaatgt

SEQ ID NO: 22728 - protein, 50 aa, Homo sapiens; identical to SEQ ID NO: 22712

SEQ ID NO: 22729 - DNA, 3863 bp, Homo sapiens
aaactattaagaagaagcagaaacacaagggacgtgggacagttcgtactgtgactaaaacagtttccaatgactctttctttaacttttttgcccctcctgaagttcctgagagtggagatctggatgatgatgctgaagctatccttgctgcagacttcgaaattggtcactttttacgtgagcgtataatcccaagatcagtgttatattttactggagaagctattgaagatgatgatgatgattatgatgaagaaggtgaagaagcggatgaggtaatgtttaccaaatgagcaaataattctctgtggttaacacattgagaagcaaattgaatgacttatgtattcctttgctataatcattctgtgatttgggataaaaacattttggaaaacatgattttagaattctacagccaaacaatgtatgtataaggtttcaataaataaattgcaaaactcagcaacatttttttatttcaaataattttgttctgctgcagggttatcagctctttgaagaagtcaaaagctgcagtaaacttttccaacgttggctgcagtaactattttcaataaaagctgtctggatgtctcaagttgtgttgggaaatttttcatattagaagctttcaaattaaattgtattatcatcaaagtctgtaatcatgaaaatctgttgatccgtagagtaacttgtattaaattttccctacattatgagccagtttacctactatgtacatacttcatggatgcattttgaactttaatataggaaggggaagaagaaggagatgaggaaaatgatccagactatgacccaaaggtgagcaaaattagtgctgctttctattaaatttaagatagctaaagtaagagttggtgtttttgaatatcaagtttctctccgttaaagtctttaataaataaagcctattgactggataactttgttttttcagtcccactggcattgtgaacagtacacataatttcagtggacgtttttctaaaaaacattgttttttgtttggacttcgtgctttttatagtttcaggtacagtgaaccctaggattctattttaatgggacgatttgtaacagtttttaagcattagaaaataaaggtttttaaaagatctggttgtaggagtgttcgggaactggggagcagtgcagtttgttagatccttccaactactcttactcagtccctgagagtcctagtctattattcctgagaatttgttatattaggattagcaaaaacaaagctgattggtaatataactaacataaattgcttggtaactttatttttttaagattatggtttagcgtgtgtcacattttatggagttaattctacagtgtaaagtttgagcttgattttagcatttcagtgacttgctaataaaataaataatttaccaccattgtcctataccatttcttttgacaacagtgagctactgttataattaaggcagtaattactattgagaaattcactgaagcaggtagaagaagatagattgacttgttgttttcctttaacagaaggatcaaaacccagcagagtgcaagcagcagtgaagcaggatgtatgtggccttgaggataacctgcactgtaatagcctaaacacaactcttatttacttacagccttatgtttttgtattttcttggtagactaggtaatttttttttaaaggacaggaaactgatattttaaagaccaatttgttctacctagcattttaactagtttttctgccagctatgttgaatgcacaaattctgtcacgcatgttcattcattgctacataatttggttcttctggaatatttttatgtagctcttggagtacagctatgaaaattaacaactgttaaaggaaataccttttttttttttttgtaattttttccttgaagaaccaaagtattttttcagctggttgttgaatagggttaagtccgcttggattagctgtgcctttcattactttgttacagaaatgcagtgacttatactaagacaatttattgtttaaaaaaaaaattggcaagacaactatatggttaagaatttccagtatgaccacacccaataactgttattagagtgttaatggattattgtgttttaggtgacatagttaactgtaaagtaacctgactcagtatagttactggtaccacagtgaggtgaataaaacgggattttcagaagttagcctgaatttaactgtatttttaaatttaacctccattaactaagcatcttttctttgtggtagggtctaccttctgcttccctggaaaggatgaatttacatcatttgacaagcctattttcaagttatttgttgtttgtttgcttgtttttgtttttgcagctaaaataaaaatttcaaatacaattttagttcttacaagataatgtcttaattttgtaccaattcaggtagaagtagaggcctaccttgaattaagggttatactcagtttttaacacattgttgaagaaaaggtaccagctttggaacgagatgctatactaataagcaagtgtaaaaaaaaaaaaaaaagaggaagaaaatcttaagtgattgatgctgttttcttttaaaaaaaaaaaaaaaaattcattttctttgggttagagctagagagaaggccccaagcttctatggtttcttctaattcttattgcttaaagtatgagtatgtcacttacccgtgcttctgtttactgtgtaattaaaatgggtagtactgtttacctaactacctcatggatgtgttaaggcatattgagttaaatctcatataatgtttctcaatcttgttaaaagctcaaaattttgggcctatttgtaatgccagtgtgacactaagcattttgttcacaccacgctttgataactaaactggaaaacaaaggtgttaagtacctctgttctggatctgggcagtcagcactctttttagatctttgtgtggctcctatttttatagaagtggagggatgcactatttcacaaggtccaagatttgttttcagatatttttgatgactgtattgtaaatactacagggatagcactatagtattgtagtcatgagacttaaagtggaaataagactatttttgacaaaagatgccattaaatttcagactgtagagccacatttacaatacctcaggctaattactgttaattttggggttgaacttttttttgacagtgagggtggattattggattgtcattagaggaaggtctagatttcctgctcttaataaaattacattgaattgatttttagaggtaatgaaaacttcctttctgagaagttagtgttaaggtcttggaatgtgaacacattgtttgtagtgctatccattcctctcctgagattttaacttactactggaaatccttaaccaattataatagctttttttctttattttcaaaatgatttcctttgctttgattagacactatgtgctttttttttttaaccatagttcatcgaaatgcagctttttctgaacttcaaagatagaatcccatttttaatgaactgaagtagcaaaatcatctttttcattctttaggaaatagctattgccaaagtgaaggtgtagataatacctagtcttgttacataaaggggatgtggtttgcagaagaattttctttataaaattgaagttttaagggacgtcagtgtttatgccatttttccagttccaaaatgattccattccattctagaaatttgaagtatgtaacctgaaatccttaataaaatttggatttaattttataaaatgt

SEQ ID NO: 22730 - protein, 40 aa, Homo sapiens; identical to SEQ ID NO: 22714

SEQ ID NO: 22731 - DNA, 3448 bp, Homo sapiens
agcgccatctgctcgcggcgccgcctcctgctcctcccgctgctgctgccgctgccgccctgagtcactgcctgcgcagctccggccgcctggctccccatactagtcgccgcaaagaacagtctgaacttgatcaagatttggatgatgttgaagaagtagaagaagaggaaactggtgaagaaacaaaactcaaagcacgtcagctaactgttcagatgatgcaaaatcctcagattcttgcagcccttcaagaaagacttgatggtctggtagaaacaccaacaggatacattgaaagcctgcctagggtagttaaaagacgagtgaatgctctcaaaaacctgcaagttaaatgtgcacagatagaagccaaattctatgaggaagttcacgatcttgaaaggaagtatgctgttctctatcagcctctatttgataaggaggaattgaaagaaaaggccaagattgaagatgagaaaaaagatgaagaaaaagaagaccccaaaggaattcctgaattttggttaactgtttttaagaatgttgacttgctcagtgatatggttcaggaacacgatgaacctattctgaagcacttgaaagatattaaagtgaagttctcagatgctggccagcctatgagttttgtcttagaatttcactttgaacccaatgaatattttacaaatgaagtgctgacaaagacatacaggatgaggtcagaaccagatgattctgatcccttttcttttgatggaccagaaattatgggttgtacagggtgccagatagattggaaaaaaggaaagaatgtcactttgaaaactattaagaagaagcagaaacacaagggacgtgggacagttcgtactgtgactaaaacagtttccaatgactctttctttaacttttttgcccctcctgaagttcctgagagtggagatctggatgatgatgctgaagctatccttgctgcagacttcgaaattggtcactttttacgtgagcgtataatcccaagatcagtgttatattttactggagaagctattgaagatgatgatgatgattatgatgaagaaggtgaagaagcggatgaggaaggggaagaagaaggagatgaggaaaatgatccagactatgacccaaagaaggatcaaaacccagcagagtgcaagcagcagtgaagcaggatgtatgtggccttgaggataacctgcactgtaatagcctaaacacaactcttatttacttacagccttatgtttttgtattttcttggtagactaggtaatttttttttaaaggacaggaaactgatattttaaagaccaatttgttctacctagcattttaactagtttttctgccagctatgttgaatgcacaaattctgtcacgcatgttcattcattgctacataatttggttcttctggaatatttttatgtagctcttggagtacagctatgaaaattaacaactgttaaaggaaataccttttttttttttttgtaattttttccttgaagaaccaaagtattttttcagctggttgttgaatagggttaagtccgcttggattagctgtgcctttcattactttgttacagaaatgcagtgacttatactaagacaatttattgtttaaaaaaaaaattggcaagacaactatatggttaagaatttccagtatgaccacacccaataactgttattagagtgttaatggattattgtgttttaggtgacatagttaactgtaaagtaacctgactcagtatagttactggtaccacagtgaggtgaataaaacgggattttcagaagttagcctgaatttaactgtatttttaaatttaacctccattaactaagcatcttttctttgtggtagggtctaccttctgcttccctggaaaggatgaatttacatcatttgacaagcctattttcaagttatttgttgtttgtttgcttgtttttgtttttgcagctaaaataaaaatttcaaatacaattttagttcttacaagataatgtcttaattttgtaccaattcaggtagaagtagaggcctaccttgaattaagggttatactcagtttttaacacattgttgaagaaaaggtaccagctttggaacgagatgctatactaataagcaagtgtaaaaaaaaaaaaaaaagaggaagaaaatcttaagtgattgatgctgttttcttttaaaaaaaaaaaaaaaaattcattttctttgggttagagctagagagaaggccccaagcttctatggtttcttctaattcttattgcttaaagtatgagtatgtcacttacccgtgcttctgtttactgtgtaattaaaatgggtagtactgtttacctaactacctcatggatgtgttaaggcatattgagttaaatctcatataatgtttctcaatcttgttaaaagctcaaaattttgggcctatttgtaatgccagtgtgacactaagcattttgttcacaccacgctttgataactaaactggaaaacaaaggtgttaagtacctctgttctggatctgggcagtcagcactctttttagatctttgtgtggctcctatttttatagaagtggagggatgcactatttcacaaggtccaagatttgttttcagatatttttgatgactgtattgtaaatactacagggatagcactatagtattgtagtcatgagacttaaagtggaaataagactatttttgacaaaagatgccattaaatttcagactgtagagccacatttacaatacctcaggctaattactgttaattttggggttgaacttttttttgacagtgagggtggattattggattgtcattagaggaaggtctagatttcctgctcttaataaaattacattgaattgatttttagaggtaatgaaaacttcctttctgagaagttagtgttaaggtcttggaatgtgaacacattgtttgtagtgctatccattcctctcctgagattttaacttactactggaaatccttaaccaattataatagctttttttctttattttcaaaatgatttcctttgctttgattagacactatgtgctttttttttttaaccatagttcatcgaaatgcagctttttctgaacttcaaagatagaatcccatttttaatgaactgaagtagcaaaatcatctttttcattctttaggaaatagctattgccaaagtgaaggtgtagataatacctagtcttgttacataaaggggatgtggtttgcagaagaattttctttataaaattgaagttttaagggacgtcagtgtttatgccatttttccagttccaaaatgattccattccattctagaaatttgaagtatgtaacctgaaatccttaataaaatttggatttaattttataaaatgt

SEQ ID NO: 22732 - protein, 323 aa, Homo sapiens; identical to SEQ ID NO: 22716

SEQ ID NO: 22733 - DNA, 3247 bp, Homo sapiens
cgggcgccgggcacgcgggccaggccttccccacaactgatggggttgaaatttcctttccggctcagcagggagaaaagatatggtggggtgcttaacagaggaggttagacaccggcgggaaccagaggagcccaagcgcggcgcctgggcctcggggctgcaggagtcctcggtgggggtatggaggtcgccggggaaggaggacggttcagttgctaggcaacccggcctggacccgcctctcgctcgcgttgctgggagactacaaggccgggaggagggcggcgaaagggccctacgtgctgacgctaattgtatatgagcgcgagcggcgggctcttgggtcttttttagcgccatctgctcgcggcgccgcctcctgctcctcccgctgctgctgccgctgccgccctgagtcactgcctgcgcagctccggccgcctggctccccatactagtcgccgatatttggagttcttacaacatggcagacattgacaacaaagaacagtctgaacttgatcaagatttggatgatgttgaagaagtagaagaagaggaaactggtgaagaaacaaaactcaaagcacgtcagctaactgttcagatgatgcaaaatcctcagattcttgcagcccttcaagaaagacttgatggtctggtagaaacaccaacaggatacattgaaagcctgcctagggtagttaaaagacgagtgaatgctctcaaaaacctgcaagttaaatgtgcacagatagaagccaaattctatgaggaagttcacgatcttgaaaggaagtatgctgttctctatcagcctctatttgataagcgatttgaaattattaatgcaatttatgaacctacggaagaagaatgtgaatggaaaccagatgaagaagatgagatttcggaggaattgaaagaaaaggccaagattgaagatgagaaaaaagatgaagaaaaagaagaccccaaaggaattcctgaattttggttaactgtttttaagaatgttgacttgctcagtgatatggttcaggaacacgatgaacctattctgaagcacttgaaagatattaaagtgaagttctcagatgctggccagcctatgagttttgtcttagaatttcactttgaacccaatgaatattttacaaatgaagtgctgacaaagacatacaggatgaggtcagaaccagatgattctgatcccttttcttttgatggaccagaaattatgggttgtacagggtgccagatagattggaaaaaaggaaagaatgtcactttgaaaactattaagaagaagcagaaacacaagggacgtgggacagttcgtactgtgactaaaacagtttccaatgactctttctttaacttttttgcccctcctgaagttcctgagagtggagatctggatgatgatgctgaagctatccttgctgcagacttcgaaattggtcactttttacgtgagcgtataatcccaagatcagtgttatattttactggagaagctattgaagatgatgatgatgattatgatgaagaaggtgaagaagcggatgaggaaggggaagaagaaggagatgaggaaaatgatccagactatgacccaaagaaggatcaaaacccagcagagtgcaagcagcagtgaagcaggatgtatgtggccttgaggataacctgcactggtctaccttctgcttccctggaaaggatgaatttacatcatttgacaagcctattttcaagttatttgttgtttgtttgcttgtttttgtttttgcagctaaaataaaaatttcaaatacaattttagttcttacaagataatgtcttaattttgtaccaattcaggtagaagtagaggcctaccttgaattaagggttatactcagtttttaacacattgttgaagaaaaggtaccagctttggaacgagatgctatactaataagcaagtgtaaaaaaaaaaaaaaaagaggaagaaaatcttaagtgattgatgctgttttcttttaaaaaaaaaaaaaaaaattcattttctttgggttagagctagagagaaggccccaagcttctatggtttcttctaattcttattgcttaaagtatgagtatgtcacttacccgtgcttctgtttactgtgtaattaaaatgggtagtactgtttacctaactacctcatggatgtgttaaggcatattgagttaaatctcatataatgtttctcaatcttgttaaaagctcaaaattttgggcctatttgtaatgccagtgtgacactaagcattttgttcacaccacgctttgataactaaactggaaaacaaaggtgttaagtacctctgttctggatctgggcagtcagcactctttttagatctttgtgtggctcctatttttatagaagtggagggatgcactatttcacaaggtccaagatttgttttcagatatttttgatgactgtattgtaaatactacagggatagcactatagtattgtagtcatgagacttaaagtggaaataagactatttttgacaaaagatgccattaaatttcagactgtagagccacatttacaatacctcaggctaattactgttaattttggggttgaacttttttttgacagtgagggtggattattggattgtcattagaggaaggtctagatttcctgctcttaataaaattacattgaattgatttttagaggtaatgaaaacttcctttctgagaagttagtgttaaggtcttggaatgtgaacacattgtttgtagtgctatccattcctctcctgagattttaacttactactggaaatccttaaccaattataatagctttttttctttattttcaaaatgatttcctttgctttgattagacactatgtgctttttttttttaaccatagttcatcgaaatgcagctttttctgaacttcaaagatagaatcccatttttaatgaactgaagtagcaaaatcatctttttcattctttaggaaatagctattgccaaagtgaaggtgtagataatacctagtcttgttacataaaggggatgtggtttgcagaagaattttctttataaaattgaagttttaagggacgtcagtgtttatgccatttttccagttccaaaatgattccattccattctagaaatttgaagtatgtaacctgaaatccttaataaaatttggatttaattttataaaatgt

SEQ ID NO: 22734 - protein, 391 aa, Homo sapiens; identical to SEQ ID NO: 2983

SEQ ID NO: 22735 - DNA, 3921 bp, Homo sapiens
cgggcgccgggcacgcgggccaggccttccccacaactgatggggttgaaatttcctttccggctcagcagggagaaaagatatggtggggtgcttaacagaggaggttagacaccggcgggaaccagaggagcccaagcgcggcgcctgggcctcggggctgcaggagtcctcggtgggggtatggaggtcgccggggaaggaggacggttcagttgctaggcaacccggcctggacccgcctctcgctcgcgttgctgggagactacaaggccgggaggagggcggcgaaagggccctacgtgctgacgctaattgtatatgagcgcgagcggcgggctcttgggtcttttttagcgccatctgctcgcggcgccgcctcctgctcctcccgctgctgctgccgctgccgccctgagtcactgcctgcgcagctccggccgcctggctccccatactagtcgccgatatttggagttcttacaacatggcagacattgacaacaaagaacagtctgaacttgatcaagatttggatgatgttgaagaagtagaagaagaggaaactggtgaagaaacaaaactcaaagcacgtcagctaactgttcagatgatgcaaaatcctcagattcttgcagcccttcaagaaagacttgatggtctggtagaaacaccaacaggatacattgaaagcctgcctagggtagttaaaagacgagtgaatgctctcaaaaacctgcaagttaaatgtgcacagatagaagccaaattctatgaggaagttcacgatcttgaaaggaagtatgctgttctctatcagcctctatttgataagcgatttgaaattattaatgcaatttatgaacctacggaagaagaatgtgaatggaaaccagatgaagaagatgagatttcggaggaattgaaagaaaaggccaagattgaagatgagaaaaaagatgaagaaaaagaagaccccaaaggaattcctgaattttggttaactgtttttaagaatgttgacttgctcagtgatatggttcaggaacacgatgaacctattctgaagcacttgaaagatattaaagtgaagttctcagatgctggccagcctatgagttttgtcttagaatttcactttgaacccaatgaatattttacaaatgaagtgctgacaaagacatacaggatgaggtcagaaccagatgattctgatcccttttcttttgatggaccagaaattatgggttgtacagggtgccagatagattggaaaaaaggaaagaatgtcactttgaaaactattaagaagaagcagaaacacaagggacgtgggacagttcgtactgtgactaaaacagtttccaatgactctttctttaacttttttgcccctcctgaagttcctgagagtggagatctggatgatgatgctgaagctatccttgctgcagacttcgaaattggtcactttttacgtgagcgtataatcccaagatcagtgttatattttactggagaagctattgaagatgatgatgatgattatgatgaagaaggtgaagaagcggatgaggaaggggaagaagaaggagatgaggaaaatgatccagactatgacccaaagaaggatcaaaacccagcagagtgcaagcagcagtgaagcaggatgtatgtggccttgaggataacctgcactgtaatagcctaaacacaactcttatttacttacagccttatgtttttgtattttcttggtagactaggtaatttttttttaaaggacaggaaactgatattttaaagaccaatttgttctacctagcattttaactagtttttctgccagctatgttgaatgcacaaattctgtcacgcatgttcattcattgctacataatttggttcttctggaatatttttatgtagctcttggagtacagctatgaaaattaacaactgttaaaggaaataccttttttttttttttgtaattttttccttgaagaaccaaagtattttttcagctggttgttgaatagggttaagtccgcttggattagctgtgcctttcattactttgttacagaaatgcagtgacttatactaagacaatttattgtttaaaaaaaaaattggcaagacaactatatggttaagaatttccagtatgaccacacccaataactgttattagagtgttaatggattattgtgttttaggtgacatagttaactgtaaagtaacctgactcagtatagttactggtaccacagtgaggtgaataaaacgggattttcagaagttagcctgaatttaactgtatttttaaatttaacctccattaactaagcatcttttctttgtggtagggtctaccttctgcttccctggaaaggatgaatttacatcatttgacaagcctattttcaagttatttgttgtttgtttgcttgtttttgtttttgcagctaaaataaaaatttcaaatacaattttagttcttacaagataatgtcttaattttgtaccaattcaggtagaagtagaggcctaccttgaattaagggttatactcagtttttaacacattgttgaagaaaaggtaccagctttggaacgagatgctatactaataagcaagtgtaaaaaaaaaaaaaaaagaggaagaaaatcttaagtgattgatgctgttttcttttaaaaaaaaaaaaaaaaattcattttctttgggttagagctagagagaaggccccaagcttctatggtttcttctaattcttattgcttaaagtatgagtatgtcacttacccgtgcttctgtttactgtgtaattaaaatgggtagtactgtttacctaactacctcatggatgtgttaaggcatattgagttaaatctcatataatgtttctcaatcttgttaaaagctcaaaattttgggcctatttgtaatgccagtgtgacactaagcattttgttcacaccacgctttgataactaaactggaaaacaaaggtgttaagtacctctgttctggatctgggcagtcagcactctttttagatctttgtgtggctcctatttttatagaagtggagggatgcactatttcacaaggtccaagatttgttttcagatatttttgatgactgtattgtaaatactacagggatagcactatagtattgtagtcatgagacttaaagtggaaataagactatttttgacaaaagatgccattaaatttcagactgtagagccacatttacaatacctcaggctaattactgttaattttggggttgaacttttttttgacagtgagggtggattattggattgtcattagaggaaggtctagatttcctgctcttaataaaattacattgaattgatttttagaggtaatgaaaacttcctttctgagaagttagtgttaaggtcttggaatgtgaacacattgtttgtagtgctatccattcctctcctgagattttaacttactactggaaatccttaaccaattataatagctttttttctttattttcaaaatgatttcctttgctttgattagacactatgtgctttttttttttaaccatagttcatcgaaatgcagctttttctgaacttcaaagatagaatcccatttttaatgaactgaagtagcaaaatcatctttttcattctttaggaaatagctattgccaaagtgaaggtgtagataatacctagtcttgttacataaaggggatgtggtttgcagaagaattttctttataaaattgaagttttaagggacgtcagtgtttatgccatttttccagttccaaaatgattccattccattctagaaatttgaagtatgtaacctgaaatccttaataaaatttggatttaattttataaaatgt

SEQ ID NO: 22736 - protein, 391 aa, Homo sapiens; identical to SEQ ID NO: 2983

SEQ ID NO: 22737 - DNA, 796 bp, Homo sapiens
agtatgatgaagaaggtgaagaagcggatgaggtaatgtttaccaaatgagcaaataattctctgtggttaacacattgagaagcaaattgaatgacttatgtattcctttgctataatcattctgtgatttgggataaaaacattttggaaaacatgattttagaattctacagccaaacaatgtatgtataaggtttcaataaataaattgcaaaactcagcaacatttttttatttcaaataattttgttctgctgcagggttatcagctctttgaagaagtcaaaagctgcagtaaacttttccaacgttggctgcagtaactattttcaataaaagctgtctggatgtctcaagttgtgttgggaaatttttcatattagaagctttcaaattaaattgtattatcatcaaagtctgtaatcatgaaaatctgttgatccgtagagtaacttgtattaaattttccctacattatgagccagtttacctactatgtacatacttcatggatgcattttgaactttaatataggaaggggaagaagaaggagatgaggaaaatgatccagactatgacccaaagaaggatcaaaacccagcagagtgcaagcagcagtgaagcaggatgtatgtggccttgaggataacctgcactggtctaccttctgcttccctggaaaggatgaatttacatcatttgacaagcctattttcaagttatttgttgtttgtttgcttgtttttgtttttgcagctaaaataaaaatttcaaatacaattttagttcttac

SEQ ID NO: 22738 - protein, 45 aa, Homo sapiens; identical to SEQ ID NO: 22710

SEQ ID NO: 22739 - DNA, 536 bp, Homo sapiens
aactattaagaagaagcagaaacacaagggacgtgggacagttcgtactgtgactaaaacagtttccaatgactctttctttaacttttttgcccctcctgaagttcctgagagtggagatctggatgatgatgctgaagctatccttgctgcagacttcgaaattggtcactttttacgtgagcgtataatcccaagatcagtgttatattttactggagaagctattgaagatgatgatgatgattatgatgaagaaggtgaagaagcggatgaggaaggggaagaagaaggagatgaggaaaatgatccagactatgacccaaagaaggatcaaaacccagcagagtgcaagcagcagtgaagcaggatgtatgtggccttgaggataacctgcactggtctaccttctgcttccctggaaaggatgaatttacatcatttgacaagcctattttcaagttatttgttgtttgtttgcttgtttttgtttttgcagctaaaataaaaatttcaaatacaattttagttcttac

SEQ ID NO: 22740 - protein, 50 aa, Homo sapiens; identical to SEQ ID NO: 22712

SEQ ID NO: 22741 - DNA, 2450 bp, Homo sapiens
aaactattaagaagaagcagaaacacaagggacgtgggacagttcgtactgtgactaaaacagtttccaatgactctttctttaacttttttgcccctcctgaagttcctgagagtggagatctggatgatgatgctgaagctatccttgctgcagacttcgaaattggtcactttttacgtgagcgtataatcccaagatcagtgttatattttactggagaagctattgaagatgatgatgatgattatgatgaagaaggtgaagaagcggatgaggtaatgtttaccaaatgagcaaataattctctgtggttaacacattgagaagcaaattgaatgacttatgtattcctttgctataatcattctgtgatttgggataaaaacattttggaaaacatgattttagaattctacagccaaacaatgtatgtataaggtttcaataaataaattgcaaaactcagcaacatttttttatttcaaataattttgttctgctgcagggttatcagctctttgaagaagtcaaaagctgcagtaaacttttccaacgttggctgcagtaactattttcaataaaagctgtctggatgtctcaagttgtgttgggaaatttttcatattagaagctttcaaattaaattgtattatcatcaaagtctgtaatcatgaaaatctgttgatccgtagagtaacttgtattaaattttccctacattatgagccagtttacctactatgtacatacttcatggatgcattttgaactttaatataggaaggggaagaagaaggagatgaggaaaatgatccagactatgacccaaaggtgagcaaaattagtgctgctttctattaaatttaagatagctaaagtaagagttggtgtttttgaatatcaagtttctctccgttaaagtctttaataaataaagcctattgactggataactttgttttttcagtcccactggcattgtgaacagtacacataatttcagtggacgtttttctaaaaaacattgttttttgtttggacttcgtgctttttatagtttcaggtacagtgaaccctaggattctattttaatgggacgatttgtaacagtttttaagcattagaaaataaaggtttttaaaagatctggttgtaggagtgttcgggaactggggagcagtgcagtttgttagatccttccaactactcttactcagtccctgagagtcctagtctattattcctgagaatttgttatattaggattagcaaaaacaaagctgattggtaatataactaacataaattgcttggtaactttatttttttaagattatggtttagcgtgtgtcacattttatggagttaattctacagtgtaaagtttgagcttgattttagcatttcagtgacttgctaataaaataaataatttaccaccattgtcctataccatttcttttgacaacagtgagctactgttataattaaggcagtaattactattgagaaattcactgaagcaggtagaagaagatagattgacttgttgttttcctttaacagaaggatcaaaacccagcagagtgcaagcagcagtgaagcaggatgtatgtggccttgaggataacctgcactgtaatagcctaaacacaactcttatttacttacagccttatgtttttgtattttcttggtagactaggtaatttttttttaaaggacaggaaactgatattttaaagaccaatttgttctacctagcattttaactagtttttctgccagctatgttgaatgcacaaattctgtcacgcatgttcattcattgctacataatttggttcttctggaatatttttatgtagctcttggagtacagctatgaaaattaacaactgttaaaggaaataccttttttttttttttgtaattttttccttgaagaaccaaagtattttttcagctggttgttgaatagggttaagtccgcttggattagctgtgcctttcattactttgttacagaaatgcagtgacttatactaagacaatttattgtttaaaaaaaaaattggcaagacaactatatggttaagaatttccagtatgaccacacccaataactgttattagagtgttaatggattattgtgttttaggtgacatagttaactgtaaagtaacctgactcagtatagttactggtaccacagtgaggtgaataaaacgggattttcagaagttagcctgaatttaactgtatttttaaatttaacctccattaactaagcatcttttctttgtggtagggtctaccttctgcttccctggaaaggatgaatttacatcatttgacaagcctattttcaagttatttgttgtttgtttgcttgtttttgtttttgcagctaaaataaaaatttcaaatacaattttagttctta

SEQ ID NO: 22742 - protein, 40 aa, Homo sapiens; identical to SEQ ID NO: 22714

SEQ ID NO: 22743 - DNA, 2035 bp, Homo sapiens
agcgccatctgctcgcggcgccgcctcctgctcctcccgctgctgctgccgctgccgccctgagtcactgcctgcgcagctccggccgcctggctccccatactagtcgccgcaaagaacagtctgaacttgatcaagatttggatgatgttgaagaagtagaagaagaggaaactggtgaagaaacaaaactcaaagcacgtcagctaactgttcagatgatgcaaaatcctcagattcttgcagcccttcaagaaagacttgatggtctggtagaaacaccaacaggatacattgaaagcctgcctagggtagttaaaagacgagtgaatgctctcaaaaacctgcaagttaaatgtgcacagatagaagccaaattctatgaggaagttcacgatcttgaaaggaagtatgctgttctctatcagcctctatttgataaggaggaattgaaagaaaaggccaagattgaagatgagaaaaaagatgaagaaaaagaagaccccaaaggaattcctgaattttggttaactgtttttaagaatgttgacttgctcagtgatatggttcaggaacacgatgaacctattctgaagcacttgaaagatattaaagtgaagttctcagatgctggccagcctatgagttttgtcttagaatttcactttgaacccaatgaatattttacaaatgaagtgctgacaaagacatacaggatgaggtcagaaccagatgattctgatcccttttcttttgatggaccagaaattatgggttgtacagggtgccagatagattggaaaaaaggaaagaatgtcactttgaaaactattaagaagaagcagaaacacaagggacgtgggacagttcgtactgtgactaaaacagtttccaatgactctttctttaacttttttgcccctcctgaagttcctgagagtggagatctggatgatgatgctgaagctatccttgctgcagacttcgaaattggtcactttttacgtgagcgtataatcccaagatcagtgttatattttactggagaagctattgaagatgatgatgatgattatgatgaagaaggtgaagaagcggatgaggaaggggaagaagaaggagatgaggaaaatgatccagactatgacccaaagaaggatcaaaacccagcagagtgcaagcagcagtgaagcaggatgtatgtggccttgaggataacctgcactgtaatagcctaaacacaactcttatttacttacagccttatgtttttgtattttcttggtagactaggtaatttttttttaaaggacaggaaactgatattttaaagaccaatttgttctacctagcattttaactagtttttctgccagctatgttgaatgcacaaattctgtcacgcatgttcattcattgctacataatttggttcttctggaatatttttatgtagctcttggagtacagctatgaaaattaacaactgttaaaggaaataccttttttttttttttgtaattttttccttgaagaaccaaagtattttttcagctggttgttgaatagggttaagtccgcttggattagctgtgcctttcattactttgttacagaaatgcagtgacttatactaagacaatttattgtttaaaaaaaaaattggcaagacaactatatggttaagaatttccagtatgaccacacccaataactgttattagagtgttaatggattattgtgttttaggtgacatagttaactgtaaagtaacctgactcagtatagttactggtaccacagtgaggtgaataaaacgggattttcagaagttagcctgaatttaactgtatttttaaatttaacctccattaactaagcatcttttctttgtggtagggtctaccttctgcttccctggaaaggatgaatttacatcatttgacaagcctattttcaagttatttgttgtttgtttgcttgtttttgtttttgcagctaaaataaaaatttcaaatacaattttagttctta

SEQ ID NO: 22744 - protein, 323 aa, Homo sapiens; identical to SEQ ID NO: 22716

SEQ ID NO: 22745 - DNA, 2256 bp, Homo sapiens
aaactattaagaagaagcagaaacacaagggacgtgggacagttcgtactgtgactaaaacagtttccaatgactctttctttaacttttttgcccctcctgaagttcctgagagtggagatctggatgatgatgctgaagctatccttgctgcagacttcgaaattggtcactttttacgtgagcgtataatcccaagatcagtgttatattttactggagaagctattgaagatgatgatgatgattatgatgaagaaggtgaagaagcggatgaggtaatgtttaccaaatgagcaaataattctctgtggttaacacattgagaagcaaattgaatgacttatgtattcctttgctataatcattctgtgatttgggataaaaacattttggaaaacatgattttagaattctacagccaaacaatgtatgtataaggtttcaataaataaattgcaaaactcagcaacatttttttatttcaaataattttgttctgctgcagggttatcagctctttgaagaagtcaaaagctgcagtaaacttttccaacgttggctgcagtaactattttcaataaaagctgtctggatgtctcaagttgtgttgggaaatttttcatattagaagctttcaaattaaattgtattatcatcaaagtctgtaatcatgaaaatctgttgatccgtagagtaacttgtattaaattttccctacattatgagccagtttacctactatgtacatacttcatggatgcattttgaactttaatataggaaggggaagaagaaggagatgaggaaaatgatccagactatgacccaaaggtgagcaaaattagtgctgctttctattaaatttaagatagctaaagtaagagttggtgtttttgaatatcaagtttctctccgttaaagtctttaataaataaagcctattgactggataactttgttttttcagtcccactggcattgtgaacagtacacataatttcagtggacgtttttctaaaaaacattgttttttgtttggacttcgtgctttttatagtttcaggtacagtgaaccctaggattctattttaatgggacgatttgtaacagtttttaagcattagaaaataaaggtttttaaaagatctggttgtaggagtgttcgggaactggggagcagtgcagtttgttagatccttccaactactcttactcagtccctgagagtcctagtctattattcctgagaatttgttatattaggattagcaaaaacaaagctgattggtaatataactaacataaattgcttggtaactttatttttttaagattatggtttagcgtgtgtcacattttatggagttaattctacagtgtaaagtttgagcttgattttagcatttcagtgacttgctaataaaataaataatttaccaccattgtcctataccatttcttttgacaacagtgagctactgttataattaaggcagtaattactattgagaaattcactgaagcaggtagaagaagatagattgacttgttgttttcctttaacagaaggatcaaaacccagcagagtgcaagcagcagtgaagcaggatgtatgtggccttgaggataacctgcactgtaatagcctaaacacaactcttatttacttacagccttatgtttttgtattttcttggtagactaggtaatttttttttaaaggacaggaaactgatattttaaagaccaatttgttctacctagcattttaactagtttttctgccagctatgttgaatgcacaaattctgtcacgcatgttcattcattgctacataatttggttcttctggaatatttttatgtagctcttggagtacagctatgaaaattaacaactgttaaaggaaataccttttttttttttttgtaattttttccttgaagaaccaaagtattttttcagctggttgttgaatagggttaagtccgcttggattagctgtgcctttcattactttgttacagaaatgcagtgacttatactaagacaatttattgtttaaaaaaaaaattggcaagacaactatatggttaagaatttccagtatgaccacacccaataactgttattagagtgttaatggattattgtgttttaggtgacatagttaactgtaaagtaacctgactcagtatagttactggtaccacagtgaggtgaataaaacgggattttcagaagttagcctg

SEQ ID NO: 22746 - protein, 40 aa, Homo sapiens; identical to SEQ ID NO: 22714

SEQ ID NO: 22747 - DNA, 602 bp, Homo sapiens
aaactattaagaagaagcagaaacacaagggacgtgggacagttcgtactgtgactaaaacagtttccaatgactctttctttaacttttttgcccctcctgaagttcctgagagtggagatctggatgatgatgctgaagctatccttgctgcagacttcgaaattggtcactttttacgtgagcgtataatcccaagatcagtgttatattttactggagaagctattgaagatgatgatgatgattatgatgaagaaggtgaagaagcggatgaggtaatgtttaccaaatgagcaaataattctctgtggttaacacattgagaagcaaattgaatgacttatgtattcctttgctataatcattctgtgatttgggataaaaacattttggaaaacatgattttagaattctacagccaaacaatgtatgtataaggtttcaataaataaattgcaaaactcagcaacatttttttatttcaaataattttgttctgctgcagggttatcagctctttgaagaagtcaaaagctgcagtaaacttttccaacgttggctgcagtaactattttcaataaaagctgtctggatgtctc

SEQ ID NO: 22748 - protein, 40 aa, Homo sapiens; identical to SEQ ID NO: 22714

SEQ ID NO: 22749 - DNA, 379 bp, Homo sapiens
actttgaaaactattaagaagaagcagaaacacaagggacgtgggacagttcgtactgtgactaaaacagtttccaatgactctttctttaacttttttgcccctcctgaagttcctgagagtggagatctggatgatgatgctgaagctatccttgctgcagacttcgaaattggtcactttttacgtgagcgtataatcccaagatcagtgttatattttactggagaagctattgaagatgatgatgatgattatgatgaagaaggtgaagaagcggatgagggttatcagctctttgaagaagtcaaaagctgcagtaaacttttccaacgttggctgcagtaactattttcaataaaagctgtctggatgtctc

SEQ ID NO: 22750 - protein, 40 aa, Homo sapiens; identical to SEQ ID NO: 22714

SEQ ID NO: 22751 - DNA, 2526 bp, Homo sapiens
gccacaacccttgtcacatatttctttgctctgggaattttggctatagtaaccttttgtggtaccgtctttgtttttttgttttatttgaccccttccacctctcttctgttttttcttctcctcttcttcccctgctgttccttgaccttgacagattccagcttcttgtttgggtgaattttccacagtaagttttgcatattcatttggaaaattcttctctaatcattgtctacatttagcaacatcaggcatatattcacagtactctattggtaatgaacagactccacaataaaggactcaaagtaggtaatcagcatctaacttggctctgttccttgggtctcctttgcagtcagccctattggaatcggaaacgtcagcagccatttcacaaacccaggcagttgcacaggccccgccagctctgctcccgccactgttgccagctgagccgacaaatgcaactcgtttccccggccagggcctccctagagcatcagttgtatttttatacctaggaaatatttttcctttttgtaagaatgataatgcagatgaactgttattcaacctggcaccaccatctgtactcaaaaagtcattatttccttacattttatagtttttttgtttaagagacagggacttgctgtgttgcccaggctggagtacactggcatgatcttggctcactgcagctcattcctgggcccaagctattctcccacctcagcctcccaagttgctaggactatctgaagctactatgcccagcttaatctacttttttttgtagaggcagagtcttcttgcctaggctggtcttagactcctggcttcaagcaatcttcgcacctcagcctcccaaactgttgggattatgggcttgaaccactgagccactgtgcccagcctatttttatagtttttttgagtctctgttgcccaggctggagtgcagtctcggcttattgcaacctccacctcctgggttcaagcaattcttctgcctccttctcccagtaactggataacaggcgtgcgccaccatgcctgactaattttttgtacttttagtaaagatggggtttcgccatgttggccaggctggtctccaactcctgaccttaaatgatccacccacctcacttcccaaagtgctgggattacaagcgtgagccactgcgcctggcttacagtttttagtttgtagattcattatattctttttttttttttaacttcatggtaggctgaggattgttgccattttcaagtgaagacatggaggcttctaagtgacttgcccacaatgaataatggcagagctgtgacacacattcagtgctgtgttaagtgttccacctctctagcattgctattttatgttgtttggtaaagagaatataatgttttgattaagaacaccatggggtgaggcaatggaccaaattagtatttctgttgcttttcttgtttattatgcttaagtcttcatttttaattagtttttacattttttttttactaaaatggtttttcctacacatcttggtcaccttagtggttctctttggaggggtgtggtagcagtaattttgatgggattaaggtttgttatgggcaacggcggtgtttacacagatagactagaactttgaaggtaatatctggtgactgtgctttttggtttttatacctttgctactttatcatgaggtctaatctatgtattaaataatgtttgctgtcacttaatcaaggaggaattgaaagaaaaggccaagattgaagatgagaaaaaagatgaagaaaaagaagaccccaaaggaattcctgaattttggttaactgtttttaagaatgttgacttgctcagtgatatggttcaggaacacgatgaacctattctgaagcacttgaaagatattaaagtgaagttctcagatgctggccagcctatgagttttgtcttagaatttcactttgaacccaatgaatattttacaaatgaagtgctgacaaagacatacaggatgaggtcagaaccagatgattctgatcccttttcttttgatggaccagaaattatgggttgtacagggtgccagatagattggaaaaaaggaaagaatgtcactttgaaaactattaagaagaagcagaaacacaagggacgtgggacagttcgtactgtgactaaaacagtttccaatgactctttctttaacttttttgcccctcctgaagttcctgagagtggagatctggatgatgatgctgaagctatccttgctgcagacttcgaaattggtcactttttacgtgagcgtataatcccaagatcagtgttatattttactggagaagctattgaagatgatgatgatgattatgatgaagaaggtgaagaagcggatgagggttatcagctctttgaagaagtcaaaagctgcagtaaacttttccaacgttggctgcagtaactattttcaataaaagctgtctggatgtctc

SEQ ID NO: 22752 - protein, 200 aa, Homo sapiens
MVQEHDEPILKHLKDIKVKFSDAGQPMSFVLEFHFEPNEYFTNEVLTKTYRMRSEPDDSDPFSFDGPEIMGCTGCQIDWKKGKNVTLKTIKKKQKHKGRGTVRTVTKTVSNDSFFNFFAPPEVPESGDLDDDAEAILAADFEIGHFLRERIIPRSVLYFTGEAIEDDDDDYDEEGEEADEGYQLFEEVKSCSKLFQRWLQ

SEQ ID NO: 22753 - DNA, 443 bp, Homo sapiens
aagggacgtgggacagttcgtactgtgactaaaacagtttccaatgactctttctttaacttttttgcccctcctgaaggtaaataatgttttaggatgatgatgctgaagctatccttgctgcagacttcgaaattggtcactttttacgtgagcgtataatcccaagatcagtgttatattttactggagaagctattgaagatgatgatgatgattatgatgaagaaggtgaagaagcggatgaggtaatgtttaccaaatgagcaaataattctctgtggttaacacattgagaagcaaattgaatgacttatgtattcctttgctataatcattctgtgatttgggataaaaacattttggaaaacatgattttagaattctacagccaaacaatgtatgtataaggtttcaataaataaattgcaaaactcagcaac

SEQ ID NO: 22754 - protein, 33 aa, Homo sapiens
MTYVFLCYNHSVIWDKNILENMILEFYSQTMYV

SEQ ID NO: 22755 - DNA, 3590 bp, Homo sapiens
cgtttccggccgttcccacccctgttttcggtcggcccgggtgttctgcaagctggtcaaaaaggggaagcggcccagatatgttaagttctatggccgctgcagggtctgtgaaggcggcgttgcaggtggccgaggtgctggaagccatcgtgagctgctgcgtggggcccgagggacggcaagttttgtgtacgaagcccactggcgaggtgcttctcagccggaatggaggccgcctcctggaggcgctacacttagagcatcccatagccaggatgatagtggactgtgtttccagtcatctcaaaaaaacaggagatggtgcaaaaacatttattatctttctttgccatttgcttagaggacttcatgcaatcacagacagagaaaaggatcctttgatgtgtgaaaacattcaaacccatggaaggcattggaaaaattgttctcggtggaaatttatttcccaggctctcctaacgtttcagacacaaatattagacggtattatggaccagtacctaagtagacactttttgtctatcttttcgtctgctaaagagagaacattgtgtaggagctctttagagttgctcttagaagcatacttttgtggaagagtgggaagaaataatcataaatttatttcacagttgatgtgtgactactttttcaagtgtatgacttgtaaaagtgggattggtgtatttgagttagtggatgaccattttgtagagttgaatgttggtgtcactggccttcctgtttcagattccaggatcatagctggtcttgtgcttcagaaagatttttctgtgtaccgcccagcagatggtgacatgcgaatggtgatagtaacagaaaccattcagcctcttttttccacttctggatcagagtttattctaaattcagaagcacagtttcagacatctcaattttggattatggaaaagacaaaagcaataatgaaacatctacatagtcagaatgtaaaattgctcatatctagtgtgaaacaaccagatttagttagttattatgcaggggtgaatggcatatcagtggttgagtgtttatcatcagaagaagtttctcttatccggaggatcattggtctttctccatttgtaccaccacaggccttttcgcagtgtgaaatacctaacactgctttggtgaaattttgtaaacctcttatccttagatccaaaagatatgttcatctaggcttgataagcacatgtgcatttataccacactctatagttctttgtggaccagtgcatggtctcattgaacaacatgaggatgctttacatggagcacttaaaatgcttcggcaattatttaaagaccttgatctaaattacatgacacaaaccaatgaccaaaatggcacttcaagtctttttatttataagaacagtggagaaagttatcaagcaccagatcctggtaatggctcaatacaaaggccttatcaggacacagttgcagagaacaaagatgcattggaaaaaactcaaacatatttaaaagtacattctaatttggtaattccagatgtagaattagaaacatatattccgtattcaacccccacactgacaccaacagatacattccaaacagttgaaacgctgacatgtttgtctttggaaagaaacaggctaactgattattatgaaccattactcaagaacaattccactgcttattcaacaaggggaaatagaatagaaatttcttacgaaaatttacaggtcacaaatattactagaaagggaagcatgttaccagtgagctgtaagttaccgaatatgggtacttcccagagttacctttcctcatctatgccagctggttgtgttttgccagtaggtggtaattttgagatcttgttacattactatcttctcaattatgccaaaaaatgccatcaatcagaagaaaccatggttagtatgataatagctaatgcacttttaggcattcccaaagtcctttataaatctaaaacaggaaagtacagctttccacatacatatataagagctgtccatgcactgcaaaccaatcaacccttggtaagcagtcagacaggtttggaatcagtaatgggtaaataccagctactaacttcagttcttcagtgtttgacaaaaatattaaccattgacatggtaatcactgttaagagacaccctcagaaagttcacaatcaagattcagaagatgaactataacatcagaagtttttaattaaccaaacttttcatctaactcaagccaagtaaagcagtcatgtgaccactggttctaaagtcagttcagtctacttaggaaaatagcgtaactttaaaagtctttagaagaagcacactaaggtcaccagaccagatacaaatattaaattactttatggaacaaatctagaggggaagccaagatttggctaagtgtgtctgttttttccctattttatgcctctgtgtctcagctctgtgttagcctatgtgtttaggggagggtttttctttatagctcctttttactctcctgtatctttttcactccagccctccttcatcgttacatgtttagttcatagaatcatttaatctctgatttgggtgggcttattctaattgtttttaatattgaatacattatttgcattaattttccctactcatactttgtaaagctgagtaaaaggctcaaattatttttttcaaaaagcataaaattaaattagcagtgagtaaaaggctcaaattttttttcaaaaagcataaaattaatttttacttttatgtggtcattggtttactgccacttcatttggaaaacttggatagattttcacctttgatatacctttgaatatatgttacctgaaatataactgtgcattgttaactctttcatttctgtagtaaaaggttaatactagaaaggatatgcaattaatactttgattttctcctgaccccaagagcttgtaaggatatgtcatgtatttactggtttttcttgtatctggtgcatagccagagttccacagtaacaaataatttgacaatttttatttctaatgtttatttctgttttatttttaatttttatttctaatttatttcatttacaaatgttcatattttaaaaacttgtcaatgtaaataatatgatgcatcttatcatggacaaggacagtgttttctacctttatcagttctctgtaatacccaaaacagtgctgtatttactccaagtattcagaagtgcttgttgaacaaaacagtgttatctttaattcattcctttaaatacatgtttccagtttacttattcaacagattcttacttgggattgactgaagaaaaaaaactttaattatagttgaataagtgttgactaatgtattttaaaaactataatatcaaaattttttatattaaatgtaattctgattttttaaacatttatgctatatgatgcattattttgtttctgtgaatatggagagaataaattagctcttttgctgaattcatggatgaatgaactttaaaactgctgc

SEQ ID NO: 22756 - protein, 723 aa, Homo sapiens; identical to SEQ ID NO: 2989

SEQ ID NO: 22757 - DNA, 3557 bp, Homo sapiens
cgtttccggccgttcccacccctgttttcggtcggcccgggtgttctgcaagctggtcaaaaaggggaagcggcccagatatgttaagttctatggccgctgcagggtctgtgaaggcggcgttgcaggtggccgaggtgctggaagccatcgtgagctgctgcgtggggcccgagggacggcaagttttgtgtacgaagcccactggcgaggtgcttctcagccggaatggaggccgcctcctggaggcgctacacttagagcatcccatagccaggatgatagtggactgtgtttccagtcatctcaaaaaaacaggagatggtgcaaaaacatttattatctttctttgccatttgcttagaggacttcatgcaatcacagacagagaaaaggatcctttgatgtgtgaaaacattcaaacccatggaaggcattggaaaaattgttctcggtggaaatttatttcccaggctctcctaacgtttcagacacaaatattagacggtattatggaccagtacctaagtagacactttttgtctatcttttcgtctgctaaagagagaacattgtgtaggagctctttagagttgctcttagaagcatacttttgtggaagagtgggaagaaataatcataaatttatttcacagttgatgtgtgactactttttcaagtgtatgacttgtaaaagtgggattggtgtatttgagttagtggatgaccattttgtagagttgaatgttggtgtcactggccttcctgtttcagattccaggatcatagctggtcttgtgcttcagaaagatttttctgtgtaccgcccagcagatggtgacatgcgaatggtgatagtaacagaaaccattcagcctcttttttccacttctggatcagagtttattctaaattcagaagcacagtttcagacatctcaattttggattatggaaaagacaaaagcaataatgaaacatctacatagtcagaatgtaaaattgctcatatctagtgtgaaacaaccagatttagttagttattatgcaggggtgaatggcatatcagtggttgagtgtttatcatcagaagaagtttctcttatccggaggatcattggtctttctccatttgtaccaccacaggccttttcgcagtgtgaaatacctaacactgctttggtgaaattttgtaaacctcttatccttagatccaaaagatatgttcatctaggcttgataagcacatgtgcatttataccacactctatagttctttgtggaccagtgcatggtctcattgaacaacatgaggatgctttacatggagcacttaaaatgcttcggcaattatttaaagaccttgatctaaattacatgacacaaaccaatgaccaaaatggcacttcaagtctttttatttataagaacagtggagaaagttatcaagcaccagatcctggtaatggctcaatacaaaggccttatcaggacacagttgcagagaacaaagatgcattggaaaaaactcaaacatatttaaaagtacattctaatttggtaattccagatgtagaattagaaacatatattccgtattcaacccccacactgacaccaacagatacattccaaacagttgaaacgctgacatgtttgtctttggaaagaaacaggctaactgattattatgaaccattactcaagaacaattccactgcttattcaacaaggggaaatagaatagaaatttcttacgaaaatttacaggtcacaaatattactagaaagggaagcatgttaccagtgagctgtaagttaccgaatatgggtacttcccagagttacctttcctcatctatgccagctggttgtgttttgccagtaggtggtaattttgagatcttgttacattactatcttctcaattatgccaaaaaatgccatcaatcagaagaaaccatggttagtatgataatagctaatgcacttttaggcattcccaaagtcctttataaatctaaaacaggaaagtacagctttccacatacatatataagagctgtccatgcactgcaaaccaatcaacccttggtaagcagtcagacaggtttggaatcagtaatgggtaaataccagctactaacttcagttcttcagtgtttgacaaaaatattaaccattgacatggtaatcactgttaagagacaccctcagaaagttcacaatcaagattcagaagatgaactataacatcagaagtttttaattaaccaaacttttcatctaactcaagccaagtaaagcagtcatgtgaccactggttctaaagtcagttcagtctacttaggaaaatagcgtaactttaaaagtctttagaagaagcacactaaggtcaccagaccagatacaaatattaaattactttatggaacaaatctagaggggaagccaagatttggctaagtgtgtctgttttttccctattttatgcctctgtgtctcagctctgtgttagcctatgtgtttaggggagggtttttctttatagctcctttttactctcctgtatctttttcactccagccctccttcatcgttacatgtttagttcatagaatcatttaatctctgatttgggtgggcttattctaattgtttttaatattgaatacattatttgcattaattttccctactcatactttgtaaagctgagtaaaaggctcaaattatttttttcaaaaagcataaaattaaattagcagtgagtaaaaggctcaaattttttttcaaaaagcataaaattaatttttacttttatgtggtcattggtttactgccacttcatttggaaaacttggatagattttcacctttgatatacctttgaatatatgttacctgaaatataactgtgcattgttaactctttcatttctgtagtaaaaggttaatactagaaaggatatgcaattaatactttgattttctcctgaccccaagagcttgtaaggatatgtcatgtatttactggtttttcttgtatctggtgcatagccagagttccacagtaacaaataatttgacaatttttatttctaatgtttatttctgttttatttttaatttttatttctaatttatttcatttacaaatgttcatattttaaaaacttgtcaatgtaaataatatgatgcatcttatcatggacaaggacagtgttttctacctttatcagttctctgtaatacccaaaacagtgctgtatttactccaagtattcagaagtgcttgttgaacaaaacagtgttatctttaattcattcctttaaatacatgtttccagtttacttattcaacagattcttacttgggattgactgaagaaaaaaaactttaattatagttgaataagtgttgactaatgtattttaaaaactataatatcaaaattttttatattaaatgtaattctgattttttaaacatttatgctatatgatgcattattttgtttctgtgaatatggagagaataaattagctcttttgctg

SEQ ID NO: 22758 - protein, 723 aa, Homo sapiens; identical to SEQ ID NO: 2989

SEQ ID NO: 22759 - DNA, 3333 bp, Homo sapiens
cgtttccggccgttcccacccctgttttcggtcggcccgggtgttctgcaagctggtcaaaaaggggaagcggcccagatatgttaagttctatggccgctgcagggtctgtgaaggcggcgttgcaggtggccgaggtgctggaagccatcgtgagctgctgcgtggggcccgagggacggcaagttttgtgtacgaagcccactggcgaggtgcttctcagccggaatggaggccgcctcctggaggcgctacacttagagcatcccatagccaggatgatagtggactgtgtttccagtcatctcaaaaaaacaggagatggtgcaaaaacatttattatctttctttgccatttgcttagaggacttcatgcaatcacagacagagaaaaggatcctttgatgtgtgaaaacattcaaacccatggaaggcattggaaaaattgttctcggtggaaatttatttcccaggctctcctaacgtttcagacacaaatattagacggtattatggaccagtacctaagtagacactttttgtctatcttttcgtctgctaaagagagaacattgtgtaggagctctttagagttgctcttagaagcatacttttgtggaagagtgggaagaaataatcataaatttatttcacagttgatgtgtgactactttttcaagtgtatgacttgtaaaagtgggattggtgtatttgagttagtggatgaccattttgtagagttgaatgttggtgtcactggccttcctgtttcagattccaggatcatagctggtcttgtgcttcagaaagatttttctgtgtaccgcccagcagatggtgacatgcgaatggtgatagtaacagaaaccattcagcctcttttttccacttctggatcagagtttattctaaattcagaagcacagtttcagacatctcaattttggattatggaaaagacaaaagcaataatgaaacatctacatagtcagaatgtaaaattgctcatatctagtgtgaaacaaccagatttagttagttattatgcaggggtgaatggcatatcagtggttgagtgtttatcatcagaagaagtttctcttatccggaggatcattggtctttctccatttgtaccaccacaggccttttcgcagtgtgaaatacctaacactgctttggtgaaattttgtaaacctcttatccttagatccaaaagatatgttcatctaggcttgataagcacatgtgcatttataccacactctatagttctttgtggaccagtgcatggtctcattgaacaacatgaggatgctttacatggagcacttaaaatgcttcggcaattatttaaagaccttgatctaaattacatgacacaaaccaatgaccaaaatggcacttcaagtctttttatttataagaacagtggagaaagttatcaagcaccagatcctggtaatggctcaatacaaaggccttatcaggacacagttgcagagaacaaagatgcattggaaaaaactcaaacatatttaaaagtacattctaatttggtaattccagatgtagaattagaaacatatattccgtattcaacccccacactgacaccaacagatacattccaaacagttgaaacgctgacatgtttgtctttggaaagaaacaggctaactgattattatgaaccattactcaagaacaattccactgcttattcaacaaggggaaatagaatagaaatttcttacgaaaatttacaggtcacaaatattactagaaagggaagcatgttaccagtgagctgtaagttaccgaatatgggtacttcccagagttacctttcctcatctatgccagctggttgtgttttgccagtaggtggtaattttgagatcttgttacattactatcttctcaattatgccaaaaaatgccatcaatcagaagaaaccatggttagtatgataatagctaatgcacttttaggcattcccaaagtcctttataaatctaaaacaggaaagtacagctttccacatacatatataagagctgtccatgcactgcaaaccaatcaacccttggtaagcagtcagacaggtttggaatcagtaatgggtaaataccagctactaacttcagttcttcagtgtttgacaaaaatattaaccattgacatggtaatcactgttaagagacaccctcagaaagttcacaatcaagattcagaagatgaactataacatcagaagtttttaattaaccaaacttttcatctaactcaagccaagtaaagcagtcatgtgaccactggttctaaagtcagttcagtctacttaggaaaatagcgtaactttaaaagtctttagaagaagcacactaaggtcaccagaccagatacaaatattaaattactttatggaacaaatctagaggggaagccaagatttggctaagtgtgtctgttttttccctattttatgcctctgtgtctcagctctgtgttagcctatgtgtttaggggagggtttttctttatagctcctttttactctcctgtatctttttcactccagccctccttcatcgttacatgtttagttcatagaatcatttaatctctgatttgggtgggcttattctaattgtttttaatattgaatacattatttgcattaattttccctactcatactttgtaaagctgagtaaaaggctcaaattatttttttcaaaaagcataaaattaaattagcagtgagtaaaaggctcaaattttttttcaaaaagcataaaattaatttttacttttatgtggtcattggtttactgccacttcatttggaaaacttggatagattttcacctttgatatacctttgaatatatgttacctgaaatataactgtgcattgttaactctttcatttctgtagtaaaaggttaatactagaaaggatatgcaattaatactttgattttctcctgaccccaagagcttgtaaggatatgtcatgtatttactggtttttcttgtatctggtgcatagccagagttccacagtaacaaataatttgacaatttttatttctaatgtttatttctgttttatttttaatttttatttctaatttatttcatttacaaatgttcatattttaaaaacttgtcaatgtaaataatatgatgcatcttatcatggacaaggacagtgttttctacctttatcagttctctgtaatacccaaaacagtgctgtatttactccaagtattcagaagtgcttgttgaacaaaacagtgttatctttaattcattccttt

SEQ ID NO: 22760 - protein, 723 aa, Homo sapiens; identical to SEQ ID NO: 2989

SEQ ID NO: 22761 - DNA, 5831 bp, Homo sapiens
gaagaaaatgggtgtggaaattcttggcttatgaagaaggctgttgtcacattgatttaaatgaaaaacggatgcttcttggtgatagcaaagatgtccttgggccatcaactgttgtagcaaacagtgacgaatctcagcttctgacaccaggaaagatgagtcagcgccaaggaaaagaagcttatccaacgccaaccaaagatttgcatcagccatctcttagtccagcaagtcctcatagccagggttttgaaagagggaaggaagatatttctcaaaataaagatgaatcttcactttctatgtcaaagagcaagtctgaatctaaactttataatggctcagagaaggacagttcaacttcaagcaaactcacaaaaaaagaatctcttaaggtacaaaagaaaaattaccgagaagaaaagaaaagagccacaaaggagctgctcagtacaatcacagatccttctgttattgttatggctgattggttaaagattcgtggtactctaaagagctggaccaagttatggtgtgtgttgaaacctggggtgctactgatctataaaacccaaaaaaatggtcagtgggtaggaacagttcttctgaatgcctgtgaaatcattgaacgtccatcaaaaaaggatggcttttgtttcaaacttttccatcctttggagcaatctatttgggcagtgaagggtccaaaaggtgaagcggttggatccattactcaacccttacctagcagttatttgatcatccgagctacttcagagtcagatggaaggtgctggatggatgctttggagttggctttgaaatgttctagtcttcttaaacgtacaatgatcagagaaggaaaggaacatgacctgagcgtttcatcagatagcacacatgtgactttctatggcttactacgtgctaacaatctccacagtggtgataacttccagttaaatgatagtgaaattgaacgacaacattttaaggaccaagatatgtattctgataaatctgataaagaaaatgatcaagaacatgatgagtctgataatgaggtgatggggaaaagtgaagaaagtgacacagatacatcagaaagacaagatgactcatatatcgaacctgagcctgttgagcctttaaaggagactacctacactgaacagagccatgaagaacttggagaggcaggtgaggcttctcaaacagaaactgtatctgaagaaaacaaaagccttatctggacactattgaaacaagtccgtcctggcatggacctatccaaggtggttctgcctacatttattttggaaccccttaatgatatgatacagtttgaaaaagatggtgttattcagaccaaagtgaaacatcgtactccaatggttagcgtccccaaaatgaaacataagccaaccaggcaacagaagaaagtagcaaaaggctattcctccccagaacctgacattcaagactcctctggaagtgaagctcaatcagtaaaaccaagtacaagaagaaagaaaggaatagaactgggagacattcagagttccatcgaatctataaaacaaacacaggaagaaattaaaagaaatattatggctcttcgaaatcatttagtttcaagcacaccggccacggattattttctgcaacaaaaagactacttcatcattttcctcctgattttgcttcaagtcataataaacttcatgttcaagtagaagttctctaccattgaatcagtgaactagaaagatctgatttggcctgggaccagtgttcaagttggtttggtctttattaaaaatcacaatattccgaaaacaaaaaaacctaggagataaatgtagaggtattgacttttcgtatcttttatcttcacactgaaacaagagctatcctatttgattattaaagtgagctatgtgttaagtgccaggacatttctagcttttgtgagaatgtgtctacatatgagtataataaacccacatgtatacacaattgtctcttatgtactcctacctgacagtagtctttgtattctatagtatgttctgagatataatgttaacattgttcataacaaaaaatgctatcaatcttataaatatatgtaatctattttcttcataaaacaggcacaaaagttttatcagtaaggaattacagattgagaaatgatggaataatagacataattaattcaatacactactgttaaaatcatttgcaaagcactcagctcaattatcttcttagaaagaaagaaaaagtatgaatggtcaaaatgaatacatcgagagagataaatggcaaattgcttttttaaaagtttacataagttttttttaacccctagaatttaatatttgtagatgcaggtaaatatatatacttacgtgtatatcagtataaaaacactggtgtgcaattaattggattgattataataccaccttaagcacttgctgaaaaaagtgtggtcaaaattgattgctgtccttttgtcttatttttgtttttcttaagtcagctggttcataacataggccaaattctagagatgtttatagagcatttgaagtgctgataatttatgttttttcattatgaaaacttattttagctttagactccagtgtgttcagtgaataagtagaatataaaaaaatataaccagtattttacttcaaaagccaaaaagaggcaataagaaaagacactttgtggtggcctttatgtgtgcattaaaattggtttctgtaaaacgtgtaataagttgagtatctacgaagagtatcaagttctgaagtttaatttttttattatcctcctctcttcttagtaacttctttctgtggcaaaaccacaattctttaagattcctattgttcaggctaaggcaaatttttttgtttgtttcttcagtttaatattttgattttgtgtttttacgtaaatatttatattccttgaaagcaatttttgccaaggtagttcagtttaggaatatgttgttctaaaatatgtcttagaatcctgaaagcatagattttgaaatgtttttttaatgaaaatgaaggtcagagagaataattgccctgaccacatttgcctttcagtaggaggaggctgtgaaatagtaaaattataatcgtttatgccatgataaatacaagattggtaaataaatacattgattggtaaattatgagaatcaaaatgataaaaagagcctgcttttttccctaaccaatatagctatcttaagtatccttaggtttctgtgaagaaccatttcccatgttttcttggcaaaataatgctgtattccatatgtacatgtgaaatgatgttttaaattgataaaagcttaaataagatctacctatacccagtattttcatgatattagaacaaatgggtttttggttatattttatatttgtcaatataatttttgtattcacattctgttacactctgcctattcattgatatatgatattctgtaaatattgtacaatttgatcttttttatggtttaaattagttaattacatacaaattgattggcttatcacaaaaatcatttcatcagtaaaccttgttaacattttgtactggtgacccacctcttaggactttggtcttatccacgtgtatgttgttttcatttggtccaaataatattttatttgtatgggtatcttctaagactaaataggtagttgtgttctttatttttaaaatttctttttagagcaaatgttatgggttcttacccaaagagtcaaaaactatttcttaagaaagagcagagttattcatgactgttctttatacactaaaagcatgcatctaatctaatagtcctcttattatgcttttagttgtatgagtctctttctatgaactgaacacaaaactcaggaattggtggcttaattttagatcagtgcttgtactaggcttagttatatgaatctttataacacataattactaactttgtagccatatatgtaattgactttgaatgttatttacctgaaattaatcttccttcacacatggaccgtaaacggttcccagttgtctgagagcctcatgagggtttctaggatttatgaccttatgaccagtttttttcatttaccaagattttattttcctacatgaaaatttaattgagtaataattattcacatgtgcattttctttttagctgttaaatgtactatgccatcatccaccatttagtaaaatgtagctggcccaggacatgtaaaaaaaaaaaaaaaacaacaacaataaatagggcatgtgaaatgttaagttacagcaatagatattttatttgtatttcatgttagtacttttttgttttatatcacttataaaggtacagtgtactctttgtcacagctcagttggtaaccgcattccattgaaaagttggccttgtaaaatacaactctcatttaatattcatgcttttgtgcctttaagaaaatattttttgtcattttttgtgttacagaactataatgtgattcaaggtgtttataggcttgtcataaaagggtcatttctgtgtgttactttctttttatatagctatagtatatttaaacaataatactatcttttataggggtttgtctatttacctattctttactcagacattgatgtagacttgtcagattattctgagtattgttaacagtgccttttcgatggaatcacactttttggctgtcaccttgtgccatatacacacaaaattttgtggaaggcagttttaactttctgaagaatatctgtcaaaatttaagaaaacaaatgtataaaattccattttttccagtgtttagcatttctagtaagcagtgaggttgtttgacatacagtgatgatggcattattgataagccatacatgagactgcagattatattgaatcatattaaatgtacagaaataaaatattagatttatatcaaattttccaatttgaaccagtggggaaaatcccacagaaatcagtaagtttacatttcaatttctatcttatttgactaagtggaaagagattctttaaaatgtataacctgccattatgtaatttggtttcattttattctacctgttgtgtgagtttagtatatttaatttactttttgttactctttacatactgtttatttttgttagtttttaattgaagatggactgttgaaattgtataggaccagtgtcttattaatatgattaatatatttagaagagccacgtgaaacccatgacaaaatgaatgtgaatattctttctaaaaatttagaaaatgttatctttttgcatttattatgtaaaactgttttacagtatcaaaatttttcacttaaagaaaaaaaatgccatgaaacatttgaactgatgagccacagaacttcagttgaaatttttttcactttttagcatgctaaatatacatctgagtttaaatgttctgtttaatggccattcataaattcaagcactaccactggtcagttttgtgtgatagaataaaaatatgttacctgcagtgtaagtacagcacactgtcaaattcttttccttaaggtgcacagtaaatgtacagatagttataggccactgttttgtaatgtagtacatttctaatctattattcctaacctattataactgtttgcagaaagaaaagaatttttctaataatctgtaaaattatgctaacttctacaagtaggcttctaaataaaatttttaaaaagagcaaa

SEQ ID NO: 22762 - protein, 555 aa, Homo sapiens
MLLGDSKDVLGPSTVVANSDESQLLTPGKMSQRQGKEAYPTPTKDLHQPSLSPASPHSQGFERGKEDISQNKDESSLSMSKSKSESKLYNGSEKDSSTSSKLTKKESLKVQKKNYREEKKRATKELLSTITDPSVIVMADWLKIRGTLKSWTKLWCVLKPGVLLIYKTQKNGQWVGTVLLNACEIIERPSKKDGFCFKLFHPLEQSIWAVKGPKGEAVGSITQPLPSSYLIIRATSESDGRCWMDALELALKCSSLLKRTMIREGKEHDLSVSSDSTHVTFYGLLRANNLHSGDNFQLNDSEIERQHFKDQDMYSDKSDKENDQEHDESDNEVMGKSEESDTDTSERQDDSYIEPEPVEPLKETTYTEQSHEELGEAGEASQTETVSEENKSLIWTLLKQVRPGMDLSKVVLPTFILEPLNDMIQFEKDGVIQTKVKHRTPMVSVPKMKHKPTRQQKKVAKGYSSPEPDIQDSSGSEAQSVKPSTRRKKGIELGDIQSSIESIKQTQEEIKRNIMALRNHLVSSTPATDYFLQQKDYFIIFLLILLQVIINFMFK

SEQ ID NO: 22763 - DNA, 7242 bp, Homo sapiens
cactagaatgtgaaggatcttcgcggttctgggtgcccagaaaggcggcgacgcggcggatgacaacattaggccgcgacgcgctcctggccaggcggcggctgtagtgttagctttggacgccgcagtagccgctgccggtagcaagccgactgagggaaggtgggggtccgcccgggctggtggacctcggggccgaaagttcccgccccgctcgggggctgagccggcagtgcctccgcggccgctgggcagcgcccttcgtccaggctcgcgccccagctgccgccgacgacagcggccgagagaagttggggtctgactagacgcttacggggcctcggaccccggcgccgcggcgacctcggaggaaccggctccttgcgtcccgcctccctgggagctccgcacgggatttgcagatttacagaatggctgcacattaatggaaagagaagcataaacctatcttctttcattatggagggaggtttggcagatggagaacctgatcgaacttcgcttcttggtgatagcaaagatgtccttgggccatcaactgttgtagcaaacagtgacgaatctcagcttctgacaccaggaaagatgagtcagcgccaaggaaaagaagcttatccaacgccaaccaaagatttgcatcagccatctcttagtccagcaagtcctcatagccagggttttgaaagagggaaggaagatatttctcaaaataaagatgaatcttcactttctatgtcaaagagcaagtctgaatctaaactttataatggctcagagaaggacagttcaacttcaagcaaactcacaaaaaaagaatctcttaaggtacaaaagaaaaattaccgagaagaaaagaaaagagccacaaaggagctgctcagtacaatcacagatccttctgttattgttatggctgattggttaaagattcgtggtactctaaagagctggaccaagttatggtgtgtgttgaaacctggggtgctactgatctataaaacccaaaaaaatggtcagtgggtaggaacagttcttctgaatgcctgtgaaatcattgaacgtccatcaaaaaaggatggcttttgtttcaaacttttccatcctttggagcaatctatttgggcagtgaagggtccaaaaggtgaagcggttggatccattactcaacccttacctagcagttatttgatcatccgagctacttcagagtcagatggaaggtgctggatggatgctttggagttggctttgaaatgttctagtcttcttaaacgtacaatgatcagagaaggaaaggaacatgacctgagcgtttcatcagatagcacacatgtgactttctatggcttactacgtgctaacaatctccacagtggtgataacttccagttaaatgatagtgaaattgaacgacaacattttaaggaccaagatatgtattctgataaatctgataaagaaaatgatcaagaacatgatgagtctgataatgaggtgatggggaaaagtgaagaaagtgacacagatacatcagaaagacaagatgactcatatatcgaacctgagcctgttgagcctttaaaggagactacctacactgaacagagccatgaagaacttggagaggcaggtgaggcttctcaaacagaaactgtatctgaagaaaacaaaagccttatctggacactattgaaacaagtccgtcctggcatggacctatccaaggtggttctgcctacatttattttggaaccccgttctttcctggataaactttcagattactactatcatgcagatttcctatctgaggcagctcttgaagaaaatccttatttccgtttgaagaaagtagtgaaatggtatttgtcaggattctataaaaagccaaagggactgaagaaaccttataatcctatacttggcgagactttccgttgtttatggattcatcccagaacaaacagcaaaactttttatattgctgaacaggtgtcccatcatccaccaatatctgccttttatgttagtaatcgaaaagatggattttgccttagcggtagtatcctggctaagtctaagttttatggaaactcattatctgcaatattagagggagaagcacggttaactttcttgaatagaggtgaagattatgtaatgacaatgccatacgctcattgtaaaggaattctttatggtacaatgacactggagcttggtggaacagtcaatattacatgtcaaaaaactggatacagtgcaatacttgaatttaaactaaagccattcctagggagtagtgactgtgttaatcaaatatcagggaaacttaaactgggaaaagaagtcctagctactttggaaggtcattgggatagtgaagtttttattactgataaaaagactgataattcagaggttttctggaatccaacacctgacattaagcaatggagattaataaggcacactgtaaaatttgaagaacagggagattttgaatcagagaaactctggcaacgggtaactcgagccataaatgccaaagaccaaactgaagctacccaagagaagtatgttttggaagaagctcaaagacaagctgccagggatcggaaaacaaaaaatgaagagtggtcttgcaaattatttgaacttgatccactcacaggagaatggcattacaagtttgcagatacccgaccatgggacccacttaatgatatgatacagtttgaaaaagatggtgttattcagaccaaagtgaaacatcgtactccaatggttagcgtccccaaaatgaaacataagccaaccaggcaacagaagaaagtagcaaaaggctattcctccccagaacctgacattcaagactcctctggaagtgaagctcaatcagtaaaaccaagtacaagaagaaagaaaggaatagaactgggagacattcagagttccatcgaatctataaaacaaacacaggaagaaattaaaagaaatattatggctcttcgaaatcatttagtttcaagcacaccggccacggattattttctgcaacaaaaagactacttcatcattttcctcctgattttgcttcaagtcataataaacttcatgttcaagtagaagttctctaccattgaatcagtgaactagaaagatctgatttggcctgggaccagtgttcaagttggtttggtctttattaaaaatcacaatattccgaaaacaaaaaaacctaggagataaatgtagaggtattgacttttcgtatcttttatcttcacactgaaacaagagctatcctatttgattattaaagtgagctatgtgttaagtgccaggacatttctagcttttgtgagaatgtgtctacatatgagtataataaacccacatgtatacacaattgtctcttatgtactcctacctgacagtagtctttgtattctatagtatgttctgagatataatgttaacattgttcataacaaaaaatgctatcaatcttataaatatatgtaatctattttcttcataaaacaggcacaaaagttttatcagtaaggaattacagattgagaaatgatggaataatagacataattaattcaatacactactgttaaaatcatttgcaaagcactcagctcaattatcttcttagaaagaaagaaaaagtatgaatggtcaaaatgaatacatcgagagagataaatggcaaattgcttttttaaaagtttacataagttttttttaacccctagaatttaatatttgtagatgcaggtaaatatatatacttacgtgtatatcagtataaaaacactggtgtgcaattaattggattgattataataccaccttaagcacttgctgaaaaaagtgtggtcaaaattgattgctgtccttttgtcttatttttgtttttcttaagtcagctggttcataacataggccaaattctagagatgtttatagagcatttgaagtgctgataatttatgttttttcattatgaaaacttattttagctttagactccagtgtgttcagtgaataagtagaatataaaaaaatataaccagtattttacttcaaaagccaaaaagaggcaataagaaaagacactttgtggtggcctttatgtgtgcattaaaattggtttctgtaaaacgtgtaataagttgagtatctacgaagagtatcaagttctgaagtttaatttttttattatcctcctctcttcttagtaacttctttctgtggcaaaaccacaattctttaagattcctattgttcaggctaaggcaaatttttttgtttgtttcttcagtttaatattttgattttgtgtttttacgtaaatatttatattccttgaaagcaatttttgccaaggtagttcagtttaggaatatgttgttctaaaatatgtcttagaatcctgaaagcatagattttgaaatgtttttttaatgaaaatgaaggtcagagagaataattgccctgaccacatttgcctttcagtaggaggaggctgtgaaatagtaaaattataatcgtttatgccatgataaatacaagattggtaaataaatacattgattggtaaattatgagaatcaaaatgataaaaagagcctgcttttttccctaaccaatatagctatcttaagtatccttaggtttctgtgaagaaccatttcccatgttttcttggcaaaataatgctgtattccatatgtacatgtgaaatgatgttttaaattgataaaagcttaaataagatctacctatacccagtattttcatgatattagaacaaatgggtttttggttatattttatatttgtcaatataatttttgtattcacattctgttacactctgcctattcattgatatatgatattctgtaaatattgtacaatttgatcttttttatggtttaaattagttaattacatacaaattgattggcttatcacaaaaatcatttcatcagtaaaccttgttaacattttgtactggtgacccacctcttaggactttggtcttatccacgtgtatgttgttttcatttggtccaaataatattttatttgtatgggtatcttctaagactaaataggtagttgtgttctttatttttaaaatttctttttagagcaaatgttatgggttcttacccaaagagtcaaaaactatttcttaagaaagagcagagttattcatgactgttctttatacactaaaagcatgcatctaatctaatagtcctcttattatgcttttagttgtatgagtctctttctatgaactgaacacaaaactcaggaattggtggcttaattttagatcagtgcttgtactaggcttagttatatgaatctttataacacataattactaactttgtagccatatatgtaattgactttgaatgttatttacctgaaattaatcttccttcacacatggaccgtaaacggttcccagttgtctgagagcctcatgagggtttctaggatttatgaccttatgaccagtttttttcatttaccaagattttattttcctacatgaaaatttaattgagtaataattattcacatgtgcattttctttttagctgttaaatgtactatgccatcatccaccatttagtaaaatgtagctggcccaggacatgtaaaaaaaaaaaaaaaacaacaacaataaatagggcatgtgaaatgttaagttacagcaatagatattttatttgtatttcatgttagtacttttttgttttatatcacttataaaggtacagtgtactctttgtcacagctcagttggtaaccgcattccattgaaaagttggccttgtaaaatacaactctcatttaatattcatgcttttgtgcctttaagaaaatattttttgtcattttttgtgttacagaactataatgtgattcaaggtgtttataggcttgtcataaaagggtcatttctgtgtgttactttctttttatatagctatagtatatttaaacaataatactatcttttataggggtttgtctatttacctattctttactcagacattgatgtagacttgtcagattattctgagtattgttaacagtgccttttcgatggaatcacactttttggctgtcaccttgtgccatatacacacaaaattttgtggaaggcagttttaactttctgaagaatatctgtcaaaatttaagaaaacaaatgtataaaattccattttttccagtgtttagcatttctagtaagcagtgaggttgtttgacatacagtgatgatggcattattgataagccatacatgagactgcagattatattgaatcatattaaatgtacagaaataaaatattagatttatatcaaattttccaatttgaaccagtggggaaaatcccacagaaatcagtaagtttacatttcaatttctatcttatttgactaagtggaaagagattctttaaaatgtataacctgccattatgtaatttggtttcattttattctacctgttgtgtgagtttagtatatttaatttactttttgttactctttacatactgtttatttttgttagtttttaattgaagatggactgttgaaattgtataggaccagtgtcttattaatatgattaatatatttagaagagccacgtgaaacccatgacaaaatgaatgtgaatattctttctaaaaatttagaaaatgttatctttttgcatttattatgtaaaactgttttacagtatcaaaatttttcacttaaagaaaaaaaatgccatgaaacatttgaactgatgagccacagaacttcagttgaaatttttttcactttttagcatgctaaatatacatctgagtttaaatgttctgtttaatggccattcataaattcaagcactaccactggtcagttttgtgtgatagaataaaaatatgttacctgcagtgtaagtacagcacactgtcaaattcttttccttaaggtgcacagtaaatgtacagatagttataggccactgttttgtaatgtagtacatttctaatctattattcctaacctattataactgtttgcagaaagaaaagaatttttctaataatctgtaaaattatgctaacttctacaagtaggcttctaaataaaatttttaaaaagagcaaa

SEQ ID NO: 22764 - protein, 889 aa, Homo sapiens; identical to SEQ ID NO: 2993

SEQ ID NO: 22765 - DNA, 665 bp, Homo sapiens
tatcctatttttttcatagcagcaattcagatttcttattaaacatttctaactaaaatttgagtcagtatttttttactgcttgtgcattcaatagtactgtaactatacaagcaatttttgttgggttttttgttttggttttacattatatgtaaatataagtgaaaagtaaaatgtttaacattttctcgtttaaaagccattcctagggagtagtgactgtgttaatcaaatatcagggaaacttaaactgggaaaagaagtcctagctactttggaaggtcattgggatagtgaagtttttattactgataaaaagactgataattcagaggttttctggaatccaacacctgacattaagcaatggagattaataaggcacactgtaaaatttgaagaacagggagattttgaatcagagaagtaagtatactgttttacagctaacttcatgaggatcagagagtagtttttcaattccttaatgatatggtcattttgtcaccttctgtcatatcttaattcagcaaaatagtttatcatttgtggaagtgacagtattctgtttttgtgtatatgaatgtcaaatataatataaatcgtcttgcttttctgtagctcaaaactactcatttttttctttctcaattgttccagca

SEQ ID NO: 22766 - protein, 77 aa, Homo sapiens
KPFLGSSDCVNQISGKLKLGKEVLATLEGHWDSEVFITDKKTDNSEVFWNPTPDIKQWRLIRHTVKFEEQGDFESEK

SEQ ID NO: 22767 - DNA, 659 bp, Homo sapiens
atagctatagattttattattattttttgtttccacatttaaagaatgcttggagtagtcctgagaagagttcatattttcaacattagctggcttgtttacatatctgtctgaaataaatataatgttttggtaattttcattaattgataaaggcaggtgaggcttctcaaacagaaactgtatctgaagaaaacaaaagccttatctggacactattgaaacaagtccgtcctggcatggacctatccaaggtggttctgcctacatttattttggaaccccgttctttcctggataaactttcagattactactatcatgcagatttcctatctgaggcagctcttgaagaaaatccttatttccgtttgaagaaagtagtgaaatggtatttgtcaggattctataaaaagccaaagggactgaagaaaccttataatcctatacttggcgagactttccgttgtttatggattcatcccagaacaaacagcaaaactttttatattgctgaacaggtattagaaatgcatgtatggaaacaaaactgatctggaagttattggaatatttttatagaaaatatttacccagtaaactcaatattatttagcctttcttatttctgaacatttggtaaacatttaaccttttaa

SEQ ID NO: 22768 - protein, 104 aa, Homo sapiens
MDLSKVVLPTFILEPRSFLDKLSDYYYHADFLSEAALEENPYFRLKKVVKWYLSGFYKKPKGLKKPYNPILGETFRCLWIHPRTNSKTFYIAEQVLEMHVWKQN

SEQ ID NO: 22769 - DNA, 753 bp, Homo sapiens
actagaatgtgaaggatcttcgcggttctgggtgcccagaaaggcggcgacgcggcggatgacaacattaggccgcgacgcgctcctggccaggcggcggctgtagtgttagctttggacgccgcagtagccgctgccggtagcaagccgactgagggaaggtgggggtccgcccgggctggtggacctcggggccgaaagttcccgccccgctcgggggctgagccggcagtgcctccgcggccgctgggcagcgcccttcgtccaggctcgcgccccagctgccgccgacgacagcggccgagagaagttggggtctgactagacgcttacggggcctcggaccccggcgccgcggcgacctcggaggaaccggctccttgcgtcccgcctccctgggagctccgcacgggatttgcagatttacagaatggctgcacattaatggaaagagaagcataaacctatcttctttcattatggagggaggtttggcagatggagaacctgatcgaacttcgcttcttggtgatagcaaagatgtccttgggccatcaactgttgtagcaaacagtgacgaatctcagcttctgacaccaggaaagatgagtcagcgccaaggaaaagaagcttatccaacgccaaccaaagatttgcatcagccatctcttagtccagcaagtcctcatagccagggaatactctcacgcatgtaccagcagaattgttggtaatagaagaaaaacacctgaa

SEQ ID NO: 22770 - protein, 84 aa, Homo sapiens
MEGGLADGEPDRTSLLGDSKDVLGPSTVVANSDESQLLTPGKMSQRQGKEAYPTPTKDLHQPSLSPASPHSQGILSRMYQQNCW

SEQ ID NO: 22771 - DNA, 665 bp, Homo sapiens
agacagggtctcactctgtcacccaggctttaacatggtgctacaaccaaggctcactttagccttgacctcctgggctcaagcaatcctcctgtgtcggactcccaagatactgggattacagacataagctgccacacttggctgctgggatattttattcccttattgttagactggcaagatttaagtttatttcttttgctagacctaggttctcataaaacaactacttttggttagagttacctattaaaaaatgtattactatcctgtcattaatggggcttaggcagtgatagctgctcacacatcttaactcttccctgaattcagacccaattgataggaagccaaaaagataaaataccaacttctcggcttggcatggtggctcatgactataagcccagcacttcagaaggccgaggtgggagagttgcttgagtccaggagttcaagatcagcctagcatagggagactccatctctacaaaatgtttgaaaaattagccaggcatgtggcatatgtctgtatcccattggtttatgtttatctttatgccagtacctactgtattaattactgtagctttgtaatatattttgaaatcagaaaatgtagtgcctccagttttgttctttctcaagattgatttggttat

SEQ ID NO: 22772 - protein, 52 aa, Homo sapiens [sequence omitted]

SEQ ID NO: 22773 - DNA, 719 bp, Homo sapiens
gagctgggctcggcccgcgggctgctaggtggcggcggcgcggggcggggaggcgcggcccggcggaggagggaagaaagagcgagccgggccgggagaggcgccgcgcccggtcccgcgcccggtcccgcacccgctctcagcggcccaagcagtttctttctgggtgacaagaatgtgcctcggttggtttttcttttttttctccatctccttaagacgatttccatagtaacctgatcaagtggctcaaaatcgcaaacctgaggatttccgcggcccgccggcaagacctcggccaggtttacaggaaatctgtcattttttattaaaatggaaaactgtgaagaaagaaaaagatagcagttgaagtcaaaattctcggatgactattttgcttttgaggagtcagcatttaaaaacgatatgctgatttggaaggtcctgggagtaaactgcaaactttattttttccattcaatcaatggattttttaatcattccttggagtcgatgaagttcggaaacggtgtgtgatggggaacgtggcgggccagtgtgttcctagaaattgcatcttggattagtttgctgcttttttgaagagattccattttgaagggcaagaacctaatgtgatggatttatcttcagaaatgaacagacatgggaagaatccagtgagtcacaagctagaagatcagaagaaggtaaaagaa

SEQ ID NO: 22774 - protein, 36 aa, Homo sapiens
MLIWKVLGVNCKLYFFHSINGFFNHSLESMKFGNGV

SEQ ID NO: 22775 - DNA, 371 bp, Homo sapiens
gattcttacaatgagatctaaatgggaccattgttcactttcttgagtgtgataaagatccagcaaggagcctcccagatggagtacatggagaccatgactgtgaaagatgaggatcaagtgcagatttggtggcctctgattgccagtatctggcagccacattctcttcccacaagatgtgctggaaatatgaccaagcagaagttcacttaagtgaatccaacagttaaacctaccatggaagggtgtggtgcacagagggcatgtggagaagagaagaccacagtgggaacctccaaggaactaacatctagctggggatgaggggggatttggctatgtagagagtaaataaagtgatatgagaa

SEQ ID NO: 22776 - protein, 64 aa, Homo sapiens
MGPLFTFLSVIKIQQGASQMEYMETMTVKDEDQVQIWWPLIASIWQPHSLPTRCAGNMTKQKFT

SEQ ID NO: 22777 - DNA, 5877 bp, Homo sapiens
gcactacaacctcaagtggttgttgactctgcatcactggttttgttcagtggaataagcagatattaataatgtatatgtaattttatgttgctgcctttttaaatggtgccataagatttccttaaagtgactatattttatttatacttactaaatatagacccagcactgaataaattacacaaaataatagaagagtcataatcagatcttatgttttcattatcatactttctaatttcctattcttttttatgacttcaggtaggttgaaaaagaggtatctagctgaatctctcaatattcctctctctctttcttattatctgtctctgcccatcacacacacacatgtacacacacacatgttcgcacaaacacacacacacacacacacagctgttttgaaatatcctcagagttcctagtaaaatgctgcatgatctgaaaaagacaaatttttgaagctattgatggggtagcttttctgggtggttcctagaaaggatctggatgttagttagatctgaagtttagaacctgtactggaactgggaactggaactgattacaggcagcaattactttaactcattacttagattaaaatcataggctaattatagtgttaccctgtgttaaaatataagaataaagtttaaatgtttaagaaaagatttactctcaatccctgaacgaaacctaatgcatccttagaatatctgcaataaagcaggagatggttaacatgtggattctgaaggggtaagagcaatggttacatggtgcttgggatgtgaaaatgtgcagtattccaagtgatcctataaatctttcacaattacaagttacaaccattgcaaatgacatttttatgataccttttgaatggcttggctttggtgtgccactcttttatgttttagccaattttatttgtatataagcttcaaaaatatgtgaaaataagaaaattggaaaggaagcagtagtgaaaatgatacctttataaaacactgttattatacattgttacatctcaacatttttggccgcatttcccaggaccaaactgttaaaacttgtttgagatgtcttcatctttttataacacagtatatttgtgtacccatattccaacaagaatagttctttcaagcataactgtttttttaggttgcatttttttagcattcatttggatttttaagggtctgctgtcttactggaacactgaaatttatctggcaagaatatccaatgattttgttttaatggaatagttgtcctttttccagatgtgtattttttttcactcggggagctgatatcctggaagcaagggtattaacatgcaatgccattccaaagctgactacatttgcttttcattatactttatggttaagagaccctctgaatttgataaattttatttgctcaactaactctatcagtagcatgttgtaaagaagcctgtagggtagtaaatgcatgtcatagagcatatataaacaatttccacctctcctgagaagttcctcgttttaggtggacattgtgtgcattctttaaaaatccgttagctgtcttactatttaatcccttgtactcatcacctgcttttatgttttagccagctagtttacctttcttttgactgattcaataccacaataaagacacatcttggcatattgccccttgtgcccacaaatacactgtatgagcagagtatacctaatacttctttatgcatccatttttttctgagatatctgaaaaaatgatttcagtgggaatactggtaagaaaaattctaaaacagatcttagtgtcttatgtgttagaagccaggtctggagaatagttttaacttcatgctcagtatatcttatcttattttttattctttaaatttcctcagtgaagccaggcctggataataaacttcatgctcagtatatcatatcttattttttattatttaaatttcctcattagtcctgaagacaatctattcaaatcattcaaacattttgcaacttgttagtacgagtcatttattctctggggtttaagggaagttcttacctggatgaaggataattttaaaaaatgaaggttcttaaggtcgaatgtgaaagtgataatgcacaatacaatttcagaatggattggaaaaaaaagaacagttaataatttgactctttacttctgcttctattatagactaacagggatcatatttacttccctccaccttaagtataaactgaacaaaagcatataaagcaatattattcagccactggacaatagacaatacaggacaatggttcctgaaagaagggtaatcaaaggggaaagcttacaactgtgctagttgacttcctggaggcaatatccagaccacagagtagagatggagaacccaaatagagttcagaagttttgctgacccttagaaatagagatcaaagtttaggaaagcctcaagggctaaaattttggagccaaagtaccagaaaagaaggaactgcagagagagagagagaaagataaaatgagatagataaacagacagagagacacagagagagatacaaagagataggagagaatgaggatgagcactggagacttacagagatgtttcttctaatctttgacagaggacttatagaggaaacaagcaaatgccagagaaaggaccagcagaaagaagtatgagaaataattgctagcactcacacaaggttgggaatagttgacgttttccccagccagagtgaaaagaccacaaggtgtgtgttagattcacaaaattgtatttctttacaaatggtgcaaaattagctctaggcaatcagatctgtaccttctttaacaatttatttaaaatgctcaaaagctacttaactatgtgccattacaaaatcaaatcctacttgaaatccagtatacaagtgtacaattcaaaatgtctaccatctagtaaaatattaccaggcatgttaaaaagcaatgtgacatgactcatatccaggagggaaaaaaatccattaatggaaacatacttaagaaatggcagaggtgatggaattagcagacaagttgttgttaaaacaactattataaatatgctccatatgttcaagaaggtagaaaaacaaatgtgataaggagagacatggaagaaagaaaagacacccaaatggaactcctagagatgaaaaagtatagtgtgtgaattaaaaatacatgagacaggattacaacagattaaataatatagaggtaaagattaatgaacttggaaacagtaatagaagttatgtgaatgcaaaatgaagcctgtatctactaaaaacacaaaaattagctgggtgtggtggtgtgtgcctgtaatccaagctacttgggaggctgaggcagcaaaatggcttgaacccaggaggcagggattcccgtgagccaagattgcaccactgcactccagcctggtgagagaacaagactccgtctcaaaaacaacaacaacaacaacaacaacaacaacaaagaaaatcaaatagctaaaattagtgataaagaatatcttatcagaagttggataatacagtcaggatacatagaaaggaacaaagatcagacatgtgatggacttcttagaaactatgcaagggaaaatacaatggtgtggcatctttactgaagaagaaaaattgttaactaagaattttgtacccagaaaataattctttcaaaaacggaggcaaagcaaactcttttttagccaaacaaaagctgagacagttaattgccagcaaatctgcaatttgaaaaatgttataaaaggttgtttataaaaggaaaatgataccagataaaaatttgcatctaagcaaaggaaagaagagcaccagaaatggaaattatgtggataaatataaagattattcagtttttaatttttaaaacagaattgataatagaacaaaataatgtgctatgttaatatatgtagaagaaaacgtatgctaacagtagcacaagaaagtgaacaggaatgtaaaattaaatactgtgaggtttgtaaattatatctaaagtggcataatgtaatttgaaggcatattctaataagttaatggtttatatagtaaatcctagaggaaacagaagaataaaatgaaatatgtgtcacctactaagaatccactttataaagatacagataaagttgaaagaacggaaagatgacactagacactaatcaaaatccttgaaaaagtagtttagcacaaagggacatttaggacccccactcacaagactgcaaaagtttgagagatatatggagaatcatcttctaacaaaaagcaagctgaagactaggacaaaatctattcaaatatatatctaagataggacctataccgaaatatataaataattgttgataaaactcagtaataatgagacaaacaaaaagtgggcaagagtttttgacagatatttcaccaaagatgatatatgaatgacaagcacacacatgaaaagataatcaacatcaataaattattagaaaaattcaaattaaaactgcaatgatacacccctactcctgagtagaatggctaaaatgaaagactgaagatatgaagtatagagtatgtggagcaactggacctctcatacattgctagtgggagttcagaatggtatgttttggaaaatagtgtggcacatgcttacacaaatatatagttatcaaatgactcagagataccctttgagttatttgtccatgagaaaataaaataaatatcaacataagacagatataaatatttatagggacaggcaatgtagctcaagtctgtaatcccagtacgttgggaggccaaggcaggtggatcacttgaggtcaggagttcgagaccagcctagccaatatggtgaaaccctgtctctactaaaaatacagatggtgcacatctgtagtccaagctacgcaggaggctgaggcacgagaattgctagaacccaggaggctgaagttgtagtgagccgagatcacaccactgcactccagcctgggtgacagagcgtgactctgtccccctccccccaaaaaattatagaactttcccacactggaaacaaatcaagggtcctttaccagataaatgcataaacgaattgtgccatattcaaacaatggaatgcatttgagccatagaaaagaaagaactaatgttacatataacacatggataaatctcaaaagcattatgctaagtgaaaacagccaaaaacgaaaatactgaatgatttcatttctatgaaattctagaaaaggcaaaactagcgttagaagtcacttcagacattgcctgtgttgagagtgagacattatctacggtaggcatgagagaacattttgaatgaagggaatattctacatcttgatagtggtactggccacattgaattatttccttatatttgttgaatttttacttatatgtaaattccacttcaatcaagctgttaaaaataggaatgtgagaccaggcacagtggttcacgcttgtaatcccagcactttgggaggccaaggcgggcagatcacctgagatcaggagttcgagaccagtctggccaacatggcgaaaccctggcgaaaagctgtcgctactaaaaatacaaaaattagccaggcgtagtggcaggcgcctgtaatcccagctgcttgggaggctgaggcatgagaatcgcttgaacccgggaggcagaggttgcagtgaactgagatcatgaaatatagttactccagcttaggggatagagcaagactctgtctcc

SEQ ID NO: 22778 - protein, 41 aa, Homo sapiens
MKPVSTKNTKISWVWWCVPVIQATWEAEAAKWLEPRRQGFP

SEQ ID NO: 22779 - DNA, 8192 bp, Homo sapiens
gaacccctgtccttccactgttgtggtcttttggctgctctgacagttggactgaagggcttttccttttgattttttcctctttttcaatctcaaagttcagactcagactgctttagtgagaaaaaaaaataagcaaaactaagagctctttaatcctaagaaggagctttgtagcagttaccttgaagaagagtttactccccaaaggagtatttagtattacttagatactgagtcactgaacagagagagagagagagacagagagagagagagagagagagagacagagagagagagagagagagagaaagagagagagagagagaatgagaatgaatatgaatcccagccagcaagaaagaaaagatacttaactaaagatgcagggaagttttgcctcttcctgaaaattatattattagctttttaaaaatcaggatgactgctagttttgtttaaagtatttgttctggaaatactaaagttggagtctaccagactgaggttagaagcattttctttggcagcaagaagataattttatagaagccatgcctgttcttggggttgcctcaaaactgaggcagccagctgttgggtcaaagcctgtgcatactgctcttccgataccaaatcttggcactactgggtcacagcactgttcttcaagacctttggaacttactgaaacagagagctccatgctttcttgtcagcttgcgttaaaatcaacctgtgaatttggagagaagaaacccctccaaggaaaagccaaggagaaagaagacagcaagatttacactgactgggccaaccactacctagcaaaatcaggccacaagcggctgatcaaggacttgcaacaagacattgcagatggagtactcctagcagaaatcatccagattattgcaaatgaaaaagttgaagatatcaatggatgtcctagaagtcagtctcagatgattgaaaatgttgatgtctgccttagttttctagcagccagaggggtaaatgttcaaggtctatctgctgaagaaataagaaatggaaacttaaaagccattctagggctgtttttcagtttatctcgctacaagcagcaacaacaccatcaacaacagtactatcagtccttggtggaacttcagcagcgagttactcacgcttcccctccatcggaagccagccaggccaaaacccagcaagatatgcagtccagtctggcagccagatatgcaactcagtctaatcacagtggaattgcaaccagtcaaaaaaagcctactaggcttccagggccctctagggtgcctgctgcaggaagcagcagcaaggtccagggagcctctaatttaaataggagaagtcagagctttaacagcattgacaaaaacaagcctccaaattatgcaaatggaaacgaaaaagattcctccaaaggacctcaatcgtcttcaggtgtaaatggtaacgtgcagcctcccagtactgctgggcagcctcctgcctctgccatcccttctccaagtgccagcaagccctggcgcagcaagtccatgaatgtcaaacacagtgccacctccaccatgttgactgtaaagcagtcaagtacagccacctcccccacaccatcttcagacagactgaagccacctgtctcagaaggggtcaaaactgctccctcaggacagaaatccatgcttgagaaattcaagctagtcaatgcccggactgctttacgccccccgcagcctcccagttcaggacctagtgatggtgggaaggatgatgatgccttttctgaatctggtgaaatggaaggttttaacagtggtctgaatagtggtggctcaacaaatagcagtcccaaagtgtcacctaagttggcccctccaaaagctggaagcaaaaatctcagcaataaaaagtctttgctacagccaaaggaaaaagaagaaaagaacagggacaaaaataaagtttgcactgaaaaaccagtcaaagaagagaaggatcaggtgacagagatggctccaaaaaagacctccaaaattgcaagcttgatccctaagggcagcaagacaacagcagctaagaaggaaagcttaattccgtcttccagtggtattccaaaaccaggctctaaagttccaacagtaaagcaaaccatttcacctggcagcacagcaagcaaagagtctgagaaattcaggactaccaaggggagcccttcccagtccttatctaagcctataaccatggagaaagcaagtgcttctagttgtcctgcccctttggaaggaagggaagctggccaagcttctccttctggttcctgtaccatgacagtggcacaaagcagtgggcagagcacaggaaatggtgctgtccaactccctcaacagcagcaacatagccacccgaataccgcgacagtggcaccattcatttacagggcacattcagaaaatgaaggtaccgctttaccatcggctgactcctgtaccagtcctacaaagatggacttatcatatagtaagactgctaagcagtgcctggaggagatatctggtgaagaccctgaaacaagaagaatgagaacagttaaaaacatagcagacttgaggcagaatttagaagagactatgtccagtcttcgtgggactcagataagccacagcaccctggagacaacatttgacagcactgtgacaacagaagttaatggaaggaccatacccaacttgacaagtcgacccacccccatgacctggaggttgggccaggcatgtccgcgacttcaggcgggagatgctccctccctgggtgctggctatcctcgcagtggtaccagtcgattcatccacacagacccctcgaggttcatgtataccacgcctctccgtcgagctgctgtctctaggctgggaaacatgtcacagattgacatgagtgagaaagcaagcagtgacctggacatgtcttctgaggtcgatgtgggtggatatatgagtgatggtgatatccttgggaaaagtctcaggactgatgacatcaacagtgggtacatgacagatggaggacttaacctatatactagaagtctgaaccgaataccagacacagcaacttcccgggacatcatccagagaggggttcacgatgtgacagtggatgcagacagctgggatgacagcagttcagtgagcagtggtctcagtgacacccttgataacatcagcactgatgacctgaacaccacatcctctgtcagctcttactccaacatcaccgtcccctctaggaagaatactcagctgaggacagattcagagaaacgctccaccacagacgagacctgggatagtcctgaggaactgaaaaaaccagaagaagattttgacagccatggggatgctggtggcaagtggaagactgtgtcctctggacttcctgaagaccccgagaaggcagggcagaaagcttccctgtctgtttcacagacaggttcctggagaagaggcatgtctgcccaaggaggggcgccatctaggcagaaagctggaacaagtgcactcaaaacacccgggaaaaccgatgatgccaaagcttctgagaaaggaaaagctcccctaaaaggatcatctctacaaagatctccttcagatgcaggaaaaagcagtggagatgaagggaaaaagcccccctcaggcattggaagatcgactgccaccagctcctttggctttaagaaaccaagtggagtagggtcatctgccatgatcaccagcagtggagcaaccataacaagtggctctgcaacactgggtaaaattccaaaatctgctgccattggcgggaagtcaaatgcagggagaaaaaccagtttggacggttcacagaatcaggatgatgttgtgctgcatgttagctcaaagactaccctacaatatcgcagcttgccccgcccttcaaaatccagcaccagtggcattcctggccgaggaggccacagatccagtaccagcagtattgattccaacgtcagcagcaagtctgctggggccaccacctcgaaactgagagaaccaactaaaattgggtcagggcgctcgagtcctgtcaccgtcaaccaaacagacaaggaaaaggaaaaagtagcagtctcagattcagaaagtgtttctttgtcaggttcccccaaatccagccccacctctgccagcgcctgtggtgcacaaggtctcaggcagccaggatccaagtatccagatattgcctcacccacatttcgaaggttgtttggtgccaaggcaggtggcaaatctgcctctgcacctaatactgagggtgtgaaatcttcctcagtaatgcccagccctagtaccacattagcgcggcaaggcagtctggagtcaccgtcgtccggtacgggcagcatgggcagtgctggtgggctaagcggcagcagcagccctctcttcaataaaccctcagacttaactacagatgttataagcttaagtcactcgttggcctccagcccagcatcggttcactctttcacatcaggtggtctcgtgtgggctgccaatatgagcagttcctctgcaggcagcaaggatactccgagctaccagtccatgactagcctccacacgagctctgagtccattgacctccccctcagccatcatggctccttgtctggactgaccacaggcactcacgaggtccagagcctgctcatgagaacgggtagtgtgagatctactctctcagaaagcatgcagcttgacagaaatacactacccaaaaagggactaagatataccccatcatctcggcaggccaaccaagaagagggcaaagagtggttgcgttctcattctactggagggcttcaggacactggcaaccagtcacctctggtttccccttctgccatgtcatcttctgcagctggaaaataccacttttctaacttggtgagcccaacaaatttgtctcagtttaaccttcccgggcccagcatgatgcgctcaaacagcatcccagcccaagactcttccttcgatctctatgatgactcccagctttgtgggagtgccacttctctggaggaaagacctcgtgccatcagtcattcgggctcattcagagacagcatggaagaagttcatggctcttcattatcactggtgtccagcacttcttctctttactctacagctgaagaaaaggctcattcagagcaaatccataaactgcggagagagctggttgcatcacaagaaaaagttgctaccctcacatctcagctttcagcaaatgctcaccttgtagcagcttttgaaaagagcttagggaatatgactggccgattgcaaagtctaactatgacagcggaacaaaaggaatctgaacttatagaactaagagaaaccattgaaatgctgaaggctcagaattctgctgcccaggcggctattcagggagcactgaatggtccagaccatcctcccaaagatcttcgcatcagaagacagcattcctctgaaagtgtttctagtatcaacagtgccacaagccattccagtattggcagtggtaatgatgccgactccaagaagaagaaaaagaaaaactgggtgaactctagaggaagtgagctgagaagttctttcaaacaagcctttgggaagaaaaagtccaccaagcctccttcatcacattctgacattgaagagcttactgattcatcccttccggcatcccccaagttaccccataatgctggtgactgtggctcagcatccatgaagccctcacaatctgcttcagcgtcaccccttgtctggccaccaaagaaacgacaaaatggccctgtgatctacaagcatagatctcggatctgtgaatgcacagaagctgaggcagagataattctgcagctgaagagcgagctcagagaaaaggaattaaaattaacggatattcggctggaggccctcagctctgctcatcatcttgatcagatccgggaagccatgaaccggatgcagaatgaaattgaaatactgaaagctgaaaatgaccggttgaaggcagaaactggtaacacagctaagcctactcggccaccgtcagaatcctcaagcagcacctcctcttcatcttccaggcagtcattaggactttctctaaacaatttgaacatcacagaggctgttagctcagatattttgctagatgatgctggtgatgcaactggacataaagatggccgcagtgtgaaaattatagtctccataagcaagggctatggtcgagcaaaggaccaaaaatctcaggcatatttgataggatccattggtgttagtggaaaaaccaagtgggatgtcttagatggtgtaataagacgtctctttaaggaatatgtattccgaattgatacatccactagccttggtctgagctctgactgcattgctagctactgtataggagacttaattagatcccataacctagaagtgcctgaattgctgccttgtggataccttgttggagataataacatcatcactgtgaacctcaaaggggtagaagaaaatagtttggacagttttgtttttgatacgctgattcctaaaccaattacccaaaggtactttaacttgttgatggagcatcacagaattatactctcaggaccgagtggtactggaaagacctatttggcaaacaaacttgctgaatatgtaataaccaaatctggaaggaaaaaaacagaggatgcaattgccacttttaatgtggaccacaagtcaagtaaggaattgcaacaatatctagctaacctggctgaacagtgcagtgctgataataatggagtggagctcccagttgtaataattcttgataatcttcatcatgtgggctctctgagtgatatcttcaatggttttctcaattgtaaatacaacaaatgtccatatattattggaacaatgaatcagggagtttcttcatcaccaaatctagagctgcatcacaatttcaggtgggtattatgtgcaaatcatacagaaccagtgaaaggctttttaggcagatatcttcgaagaaaactcatagagatagaaattgaaaggaacattcgcaataatgacctagtcaaaattatagattggattccgaagacgtggcatcatctcaacagttttttggaaacacacagttcttctgacgttaccattggtccccgactattccttccttgccccatggatgtagaaggttctagagtatggttcatggatctctggaactattctttagtaccttatattctggaggcagtgagagagggtcttcagatgtatgggaaacgcacaccatgggaagatccttcaaagtgggtgcttgacacatatccatggagctcagcaactctgcctcaggagagcccagccttacttcagctgcgaccagaagatgttgggtatgaaagctgcacatccactaaggaagccacaacctcaaagcacattccgcaaactgacacagaaggagatcccctgatgaatatgctaatgaaactccaagaagcagccaattactcgagcacacaaagctgcgacagcgaaagcaccagccaccatgaagacattttggattcatctcttgaatctaccctctagagggtgaaaaaagttaagggaaaagactttgcttttaaaaaaatgtttcaaaagaaaggtattttcactaaaccactgccagtataaaagcaccctgtcaagggccctgacccagagttgtggtctccaaggaggcagcagaactaagtctgaaccgccaagatgctaaattgcaatggaagcttaactttagtttatttctaagcattttttatatctgtggagtaatagaaagctccattactcaactggaaaggaccctaatgacagggcaactgaacagattgcacatgggatagccaaactggactttctttgtttcctctttaaaagtttacaatgcagaccattttttgtcccttccttttgtttcctctgaggggctgttcgccccaggcagggtccatctttctgatctgtccaacctcctttgtgccacacggtgctggtcacagggcttcagtagtgtttgtgttg

SEQ ID NO: 22780 - protein, 2385 aa, Homo sapiens
MPVLGVASKLRQPAVGSKPVHTALPIPNLGTTGSQHCSSRPLELTETESSMLSCQLALKSTCEFGEKKPLQGKAKEKEDSKIYTDWANHYLAKSGHKRLIKDLQQDIADGVLLAEIIQIIANEKVEDINGCPRSQSQMIENVDVCLSFLAARGVNVQGLSAEEIRNGNLKAILGLFFSLSRYKQQQHHQQQYYQSLVELQQRVTHASPPSEASQAKTQQDMQSSLAARYATQSNHSGIATSQKKPTRLPGPSRVPAAGSSSKVQGASNLNRRSQSFNSIDKNKPPNYANGNEKDSSKGPQSSSGVNGNVQPPSTAGQPPASAIPSPSASKPWRSKSMNVKHSATSTMLTVKQSSTATSPTPSSDRLKPPVSEGVKTAPSGQKSMLEKFKLVNARTALRPPQPPSSGPSDGGKDDDAFSESGEMEGFNSGLNSGGSTNSSPKVSPKLAPPKAGSKNLSNKKSLLQPKEKEEKNRDKNKVCTEKPVKEEKDQVTEMAPKKTSKIASLIPKGSKTTAAKKESLIPSSSGIPKPGSKVPTVKQTISPGSTASKESEKFRTTKGSPSQSLSKPITMEKASASSCPAPLEGREAGQASPSGSCTMTVAQSSGQSTGNGAVQLPQQQQHSHPNTATVAPFIYRAHSENEGTALPSADSCTSPTKMDLSYSKTAKQCLEEISGEDPETRRMRTVKNIADLRQNLEETMSSLRGTQISHSTLETTFDSTVTTEVNGRTIPNLTSRPTPMTWRLGQACPRLQAGDAPSLGAGYPRSGTSRFIHTDPSRFMYTTPLRRAAVSRLGNMSQIDMSEKASSDLDMSSEVDVGGYMSDGDILGKSLRTDDINSGYMTDGGLNLYTRSLNRIPDTATSRDIIQRGVHDVTVDADSWDDSSSVSSGLSDTLDNISTDDLNTTSSVSSYSNITVPSRKNTQLRTDSEKRSTTDETWDSPEELKKPEEDFDSHGDAGGKWKTVSSGLPEDPEKAGQKASLSVSQTGSWRRGMSAQGGAPSRQKAGTSALKTPGKTDDAKASEKGKAPLKGSSLQRSPSDAGKSSGDEGKKPPSGIGRSTATSSFGFKKPSGVGSSAMITSSGATITSGSATLGKIPKSAAIGGKSNAGRKTSLDGSQNQDDVVLHVSSKTTLQYRSLPRPSKSSTSGIPGRGGHRSSTSSIDSNVSSKSAGATTSKLREPTKIGSGRSSPVTVNQTDKEKEKVAVSDSESVSLSGSPKSSPTSASACGAQGLRQPGSKYPDIASPTFRRLFGAKAGGKSASAPNTEGVKSSSVMPSPSTTLARQGSLESPSSGTGSMGSAGGLSGSSSPLFNKPSDLTTDVISLSHSLASSPASVHSFTSGGLVWAANMSSSSAGSKDTPSYQSMTSLHTSSESIDLPLSHHGSLSGLTTGTHEVQSLLMRTGSVRSTLSESMQLDRNTLPKKGLRYTPSSRQANQEEGKEWLRSHSTGGLQDTGNQSPLVSPSAMSSSAAGKYHFSNLVSPTNLSQFNLPGPSMMRSNSIPAQDSSFDLYDDSQLCGSATSLEERPRAISHSGSFRDSMEEVHGSSLSLVSSTSSLYSTAEEKAHSEQIHKLRRELVASQEKVATLTSQLSANAHLVAAFEKSLGNMTGRLQSLTMTAEQKESELIELRETIEMLKAQNSAAQAAIQGALNGPDHPPKDLRIRRQHSSESVSSINSATSHSSIGSGNDADSKKKKKKNWVNSRGSELRSSFKQAFGKKKSTKPPSSHSDIEELTDSSLPASPKLPHNAGDCGSASMKPSQSASASPLVWPPKKRQNGPVIYKHRSRICECTEAEAEIILQLKSELREKELKLTDIRLEALSSAHHLDQIREAMNRMQNEIEILKAENDRLKAETGNTAKPTRPPSESSSSTSSSSSRQSLGLSLNNLNITEAVSSDILLDDAGDATGHKDGRSVKIIVSISKGYGRAKDQKSQAYLIGSIGVSGKTKWDVLDGVIRRLFKEYVFRIDTSTSLGLSSDCIASYCIGDLIRSHNLEVPELLPCGYLVGDNNIITVNLKGVEENSLDSFVFDTLIPKPITQRYFNLLMEHHRIILSGPSGTGKTYLANKLAEYVITKSGRKKTEDAIATFNVDHKSSKELQQYLANLAEQCSADNNGVELPVVIILDNLHHVGSLSDIFNGFLNCKYNKCPYIIGTMNQGVSSSPNLELHHNFRWVLCANHTEPVKGFLGRYLRRKLIEIEIERNIRNNDLVKIIDWIPKTWHHLNSFLETHSSSDVTIGPRLFLPCPMDVEGSRVWFMDLWNYSLVPYILEAVREGLQMYGKRTPWEDPSKWVLDTYPWSSATLPQESPALLQLRPEDVGYESCTSTKEATTSKHIPQTDTEGDPLMNMLMKLQEAANYSSTQSCDSESTSHHEDILDSSLESTL

SEQ ID NO: 22781 - DNA, 5460 bp, Homo sapiens
tccgccccggggctccagctgcacgcggggagctgcggctgttctggcaaaggggccgcggctgctttaagagccgcctccccctctcctcctttgacaatggtctgaaccgagctttgcttcccaaagcaaaatttgtaatatgccatttttccgatggacgcttctccttttggctgctgacggagccacgggaagatgccgagctcctgccacgccaccgggccggggcacgttccgggagggcgccggggcacgcgtgtgtctgagctgcctttctcctcccgttgctagggaaatggtccaggagtgctgggtgtgagcctcccttctcctcaagccggagactgcggttgtcattgatcaattgaagaagcaaggacccgaaatcacagacattagcaatgatgtgtgaagtgatgcccacgattaatgaggacaccccaatgagccaaagggggtcccaaagcagtggctcggactcagactcccattttgagcagctgatggtgaatatgctagatgaaagggatcgtcttctagacacccttcgggagacccaggaaagcctctcacttgcccagcaaagacttcaggatgtcatctatgaccgagactcactccagagacagctcaattcagccctgccacaggaatttgctgcactgacaaaagaattaaatgcctgcagggaacaacttctagaaaaggaagaagaaatctctgaacttaaagctgaaagaaacaacacaagactattactggagcatttggagtgccttgtgtcacgacatgaaagatcactaagaatgacggtggtaaaacggcaagcccagtctccctcaggagtatccagtgaagttgaagttctcaaggcactgaaatctttgtttgagcaccacaaggccttggatgaaaaggtaagggagcgactgagggtttctttagaaagagtctctgcactggaagaagaactagctgctgctaatcaggagattgttgccttgcgtgaacaaaatgttcatatacaaagaaaaatggcatcaagcgagggatccacagagtcagaacatcttgaagggatggaacctggacagaaagtccatgagaagcgtttgtccaatggttctatagactcaaccgatgaaactagtcaaatagttgaactacaagaattgcttgaaaagcaaaactatgaaatggcccagatgaaagaacgtttagcagccctttcttcccgagtgggagaggtggaacaggaagcagagacagcaagaaaggatctcattaaaacagaagaaatgaacaccaagtatcaaagggacattagggaggccatggcacaaaaggaagatatggaagaaagaattacaacccttgaaaagcgttacctcagtgctcagagagaatctacctccatacatgacatgaatgataaactagaaaatgagttagcaaataaagaagctatcctgcggcagatggaagagaaaaacagacagttacaagaacgtcttgagctagctgaacaaaagttgcagcagaccatgagaaaggctgaaaccttgcctgaagtagaggctgaactggctcagagaattgcagccctaaccaaggctgaagagagacatggaaatattgaagaacgtatgagacatttagagggtcaacttgaagagaagaatcaagaacttcaaagagctaggcaaagagagaaaatgaatgaggagcataacaagagattatcggatacggttgatagacttctgactgaatccaatgaacgcctacaactacacttaaaggaaagaatggctgctctagaagaaaagaatgttttaattcaagaatcagaaactttcagaaagaatcttgaagaatctttacatgataaggaaagattagcagaagaaattgaaaagctgagatctgaacttgaccaattgaaaatgagaactggctctttaattgaacccacaataccaagaactcatctagacacctcagctgagttgcggtactcagtgggatccctagtggacagccagtctgattacagaacaactaaagtaataagaagaccaaggagaggccgcatgggtgtgcgaagagatgagccaaaggtgaaatctcttggggatcacgagtggaatagaactcaacagattggagtactaagcagccacccttttgaaagtgacactgaaatgtctgatattgatgatgatgacagagaaacaatttttagctcaatggatcttctctctccaagtggtcattccgatgcccagacgctagccatgatgcttcaggaacaattggatgccatcaacaaagaaatcaggctaattcaggaagaaaaagaatctacagagttgcgtgctgaagaaattgaaaatagagtggctagtgtgagcctcgaaggcctgaatttggcaagggtccacccaggtacctccattactgcctctgttacagcttcatcgctggccagttcatctccccccagtggacactcaactccaaagctcacccctcgaagccctgccagggaaatggatcggatgggagtcatgacactgccaagtgatctgaggaaacatcggagaaagattgcagttgtggaagaagatggtcgagaggacaaagcaacaattaaatgtgaaacttctcctcctcctacccctagagccctcagaatgactcacactctcccttcttcctaccacaatgatgctcgaagtagtttatctgtctctcttgagccagaaagcctcgggcttggtagtgccaacagcagccaagactctcttcacaaagcccccaagaagaaaggaatcaagtcttcaataggacgtttgtttggtaaaaaagaaaaagctcgacttgggcagctccgaggctttatggagactgaagctgcagctcaggagtccctggggttaggcaaactcggaactcaagctgagaaggatcgaagactaaagaaaaagcatgaacttcttgaagaagctcggagaaagggattaccttttgcccagtgggatgggccaactgtggtcgcatggctagagctttggttgggaatgcctgcgtggtacgtggcagcctgccgagccaacgtgaagagtggtgccatcatgtctgctttatctgacactgagatccagagagaaattggaatcagcaatccactgcatcgcttaaaacttcgattagcaatccaggagatggtttccctaacaagtccttcagctcctccaacatctcgaactccttcaggcaacgtttgggtgactcatgaagaaatggaaaatcttgcagctccagcaaaaacgaaagaatctgaggaaggaagctgggcccagtgtccggtttttctacagaccctggcttatggagatatgaatcatgagtggattggaaatgaatggcttcccagcttggggttacctcagtacagaagttactttatggaatgcttggtagatgcaagaatgttagatcacctaacaaaaaaagatctccgtgtccatttaaaaatggtggatagtttccatcgaacaagtttacaatatggaattatgtgcttaaagaggttgaattatgacagaaaagaactagaaagaagacgggaagcaagccaacatgaaataaaagacgtgttggtgtggagcaatgaccgagttattcgctggatacaagcaattggacttcgagaatatgcaaataatatacttgagagcggtgtgcatggctcacttatagccctggatgaaaactttgactacagcagcttagctttattattacagattccaacacagaacacccaggcaaggcagattcttgaaagagaatacaataacctcttggccctgggaactgaaaggcgactggatgaaagtgatgacaagaacttcagacgtggatcaacctggagaaggcagtttcctcctcgtgaagtacatggaatcagcatgatgcctgggtcctcagaaacattaccagctggatttaggttaaccacaacctctgggcagtcaagaaaaatgacaacagatgatggcgtcttttcagtctactctacctaaagtgcactaccatctaagaagacgagcagtgaaaacctttgtgaaaactgaattctaaggaaataatgacgtcatgacttattaaaagctgaaaaatgtgatttttggggggagtcagatattacatttgattagtttactacaaattgtaataaaatgcttaagtcatttgaataataaacatcatctacatcataaactctgtacaacagatgcttttatgaaatgaagccagttgtttttcatgttttattgtaatatactaggcatttatgtattaccgtgcatttctttttaaatgtgtaagtcttatgtaaatggatataaatatgattttttaaaaaataaaatatatggttcatggagtctcgagtgcaaacatttgacaattccaagtactgtttgtattttaccattccaccatttttacagtttttggattgttaatagtcaaatcaatatgtttccttgaagcatgtttcatgcttcaacgtgtttctccttcaagtctgtcaatacttaaagctgaacaacctgcctctgatcatgtaaaaaagaatgatttaacctggaaccggagccaaaaatagagctttaaaggcaatcagggatgtcctatatctttagaaatagcactgtgatggcttgatctccttttcaatacaaaacaaagccaagctgtttacaagggtcaaaagcaattatttaaaaatttatattaaaaaaccataatcttctcttgttacctgtggaccaagaaaaaaaaaaagataaaaaaacttctttactaagaaccacatgttcattcaaatatcttgaaatgccagccagtactggacagtgaatgtcaaccaccgcagagtctgaggctcatttccactagagaaaacgaaacccaagatacctttcccttttgtcaatgtaacagggcattagccagactcatgtctaatgttataagcttttagccgagatggccttgttgcgacttccctgaagtcagttttatcagaggaaataaatgaaagacagaatgattaacatatatagtgtataaaagtatagaagagtaatctcttccctgtggctttatttggtggtgttactgttgtttattctttgtttatatgggagattcaaagtaaagcctatttaataataccatttatctaactgctgattttctgctgcttgatcttattaagcgcaagacctgtcattagtaatttcttttctgtattttaatttgctatgtttgcacgtacattacatttgttttgatgtctatttttatttaacagattcagtcaaaaggtaatgataacagaaaccctttccattgtcaataaaaaaaataataattcca

SEQ ID NO: 22782 - protein, 1229 aa, Homo sapiens
MMCEVMPTINEDTPMSQRGSQSSGSDSDSHFEQLMVNMLDERDRLLDTLRETQESLSLAQQRLQDVIYDRDSLQRQLNSALPQEFAALTKELNACREQLLEKEEEISELKAERNNTRLLLEHLECLVSRHERSLRMTVVKRQAQSPSGVSSEVEVLKALKSLFEHHKALDEKVRERLRVSLERVSALEEELAAANQEIVALREQNVHIQRKMASSEGSTESEHLEGMEPGQKVHEKRLSNGSIDSTDETSQIVELQELLEKQNYEMAQMKERLAALSSRVGEVEQEAETARKDLIKTEEMNTKYQRDIREAMAQKEDMEERITTLEKRYLSAQRESTSIHDMNDKLENELANKEAILRQMEEKNRQLQERLELAEQKLQQTMRKAETLPEVEAELAQRIAALTKAEERHGNIEERMRHLEGQLEEKNQELQRARQREKMNEEHNKRLSDTVDRLLTESNERLQLHLKERMAALEEKNVLIQESETFRKNLEESLHDKERLAEEIEKLRSELDQLKMRTGSLIEPTIPRTHLDTSAELRYSVGSLVDSQSDYRTTKVIRRPRRGRMGVRRDEPKVKSLGDHEWNRTQQIGVLSSHPFESDTEMSDIDDDDRETIFSSMDLLSPSGHSDAQTLAMMLQEQLDAINKEIRLIQEEKESTELRAEEIENRVASVSLEGLNLARVHPGTSITASVTASSLASSSPPSGHSTPKLTPRSPAREMDRMGVMTLPSDLRKHRRKIAVVEEDGREDKATIKCETSPPPTPRALRMTHTLPSSYHNDARSSLSVSLEPESLGLGSANSSQDSLHKAPKKKGIKSSIGRLFGKKEKARLGQLRGFMETEAAAQESLGLGKLGTQAEKDRRLKKKHELLEEARRKGLPFAQWDGPTVVAWLELWLGMPAWYVAACRANVKSGAIMSALSDTEIQREIGISNPLHRLKLRLAIQEMVSLTSPSAPPTSRTPSGNVWVTHEEMENLAAPAKTKESEEGSWAQCPVFLQTLAYGDMNHEWIGNEWLPSLGLPQYRSYFMECLVDARMLDHLTKKDLRVHLKMVDSFHRTSLQYGIMCLKRLNYDRKELERRREASQHEIKDVLVWSNDRVIRWIQAIGLREYANNILESGVHGSLIALDENFDYSSLALLLQIPTQNTQARQILEREYNNLLALGTERRLDESDDKNFRRGSTWRRQFPPREVHGISMMPGSSETLPAGFRLTTTSGQSRKMTTDDGVFSVYST

SEQ ID NO: 22783 - DNA, 5363 bp, Homo sapiens
gaggcaagtgaggagagaagatgctgtagcgtcctcaccggctgccagcagggaaatggtccaggagtgctgggtgtgagcctcccttctcctcaagccggagactgcggttgtcattgatcaattgaagaagcaaggacccgaaatcacagacattagcaatgatgtgtgaagtgatgcccacgattaatgaggacaccccaatgagccaaagggggtcccaaagcagtggctcggactcagactcccattttgagcagctgatggtgaatatgctagatgaaagggatcgtcttctagacacccttcgggagacccaggaaagcctctcacttgcccagcaaagacttcaggatgtcatctatgaccgagactcactccagagacagctcaattcagccctgccacaggatatcgaatccctaacaggagggctggctggttctaagggggctgatccaccggaatttgctgcactgacaaaagaattaaatgcctgcagggaacaacttctagaaaaggaagaagaaatctctgaacttaaagctgaaagaaacaacacaagactattactggagcatttggagtgccttgtgtcacgacatgaaagatcactaagaatgacggtggtaaaacggcaagcccagtctccctcaggagtatccagtgaagttgaagttctcaaggcactgaaatctttgtttgagcaccacaaggccttggatgaaaaggtaagggagcgactgagggtttctttagaaagagtctctgcactggaagaagaactagctgctgctaatcaggagattgttgccttgcgtgaacaaaatgttcatatacaaagaaaaatggcatcaagcgagggatccacagagtcagaacatcttgaagggatggaacctggacagaaagtccatgagaagcgtttgtccaatggttctatagactcaaccgatgaaactagtcaaatagttgaactacaagaattgcttgaaaagcaaaactatgaaatggcccagatgaaagaacgtttagcagccctttcttcccgagtgggagaggtggaacaggaagcagagacagcaagaaaggatctcattaaaacagaagaaatgaacaccaagtatcaaagggacattagggaggccatggcacaaaaggaagatatggaagaaagaattacaacccttgaaaagcgttacctcagtgctcagagagaatctacctccatacatgacatgaatgataaactagaaaatgagttagcaaataaagaagctatcctgcggcagatggaagagaaaaacagacagttacaagaacgtcttgagctagctgaacaaaagttgcagcagaccatgagaaaggctgaaaccttgcctgaagtagaggctgaactggctcagagaattgcagccctaaccaaggctgaagagagacatggaaatattgaagaacgtatgagacatttagagggtcaacttgaagagaagaatcaagaacttcaaagagctaggcaaagagagaaaatgaatgaggagcataacaagagattatcggatacggttgatagacttctgactgaatccaatgaacgcctacaactacacttaaaggaaagaatggctgctctagaagaaaagaatgttttaattcaagaatcagaaactttcagaaagaatcttgaagaatctttacatgataaggaaagattagcagaagaaattgaaaagctgagatctgaacttgaccaattgaaaatgagaactggctctttaattgaacccacaataccaagaactcatctagacacctcagctgagttgcggtactcagtgggatccctagtggacagccagtctgattacagaacaactaaagtaataagaagaccaaggagaggccgcatgggtgtgcgaagagatgagccaaaggtgaaatctcttggggatcacgagtggaatagaactcaacagattggagtactaagcagccacccttttgaaagtgacactgaaatgtctgatattgatgatgatgacagagaaacaatttttagctcaatggatcttctctctccaagtggtcattccgatgcccagacgctagccatgatgcttcaggaacaattggatgccatcaacaaagaaatcaggctaattcaggaagaaaaagaatctacagagttgcgtgctgaagaaattgaaaatagagtggctagtgtgagcctcgaaggcctgaatttggcaagggtccacccaggtacctccattactgcctctgttacagcttcatcgctggccagttcatctccccccagtggacactcaactccaaagctcacccctcgaagccctgccagggaaatggatcggatgggagtcatgacactgccaagtgatctgaggaaacatcggagaaagattgcagttgtggaagaagatggtcgagaggacaaagcaacaattaaatgtgaaacttctcctcctcctacccctagagccctcagaatgactcacactctcccttcttcctaccacaatgatgctcgaagtagtttatctgtctctcttgagccagaaagcctcgggcttggtagtgccaacagcagccaagactctcttcacaaagcccccaagaagaaaggaatcaagtcttcaataggacgtttgtttggtaaaaaagaaaaagctcgacttgggcagctccgaggctttatggagactgaagctgcagctcaggagtccctggggttaggcaaactcggaactcaagctgagaaggatcgaagactaaagaaaaagcatgaacttcttgaagaagctcggagaaagggattaccttttgcccagtgggatgggccaactgtggtcgcatggctagagctttggttgggaatgcctgcgtggtacgtggcagcctgccgagccaacgtgaagagtggtgccatcatgtctgctttatctgacactgagatccagagagaaattggaatcagcaatccactgcatcgcttaaaacttcgattagcaatccaggagatggtttccctaacaagtccttcagctcctccaacatctcgaactccttcaggcaacgtttgggtgactcatgaagaaatggaaaatcttgcagctccagcaaaaacgaaagaatctgaggaaggaagctgggcccagtgtccggtttttctacagaccctggcttatggagatatgaatcatgagtggattggaaatgaatggcttcccagcttggggttacctcagtacagaagttactttatggaatgcttggtagatgcaagaatgttagatcacctaacaaaaaaagatctccgtgtccatttaaaaatggtggatagtttccatcgaacaagtttacaatatggaattatgtgcttaaagaggttgaattatgacagaaaagaactagaaagaagacgggaagcaagccaacatgaaataaaagacgtgttggtgtggagcaatgaccgagttattcgctggatacaagcaattggacttcgagaatatgcaaataatatacttgagagcggtgtgcatggctcacttatagccctggatgaaaactttgactacagcagcttagctttattattacagattccaacacagaacacccaggcaaggcagattcttgaaagagaatacaataacctcttggccctgggaactgaaaggcgactggatgaaagtgatgacaagaacttcagacgtggatcaacctggagaaggcagtttcctcctcgtgaagtacatggaatcagcatgatgcctgggtcctcagaaacattaccagctggatttaggttaaccacaacctctgggcagtcaagaaaaatgacaacagatgttgcttcatcaagactgcagaggttagacaactccactgttcgcacatactcatgttgaccagccactcaaaggaggcagcactgacctgctatggcgtcttttcagtctactctacctaaagtgcactaccatctaagaagacgagcagtgaaaacctttgtgaaaactgaattctaaggaaataatgacgtcatgacttattaaaagctgaaaaatgtgatttttggggggagtcagatattacatttgattagtttactacaaattgtaataaaatgcttaagtcatttgaataataaacatcatctacatcataaactctgtacaacagatgcttttatgaaatgaagccagttgtttttcatgttttattgtaatatactaggcatttatgtattaccgtgcatttctttttaaatgtgtaagtcttatgtaaatggatataaatatgattttttaaaaaataaaatatatggttcatggagtctcgagtgcaaacatttgacaattccaagtactgtttgtattttaccattccaccatttttacagtttttggattgttaatagtcaaatcaatatgtttccttgaagcatgtttcatgcttcaacgtgtttctccttcaagtctgtcaatacttaaagctgaacaacctgcctctgatcatgtaaaaaagaatgatttaacctggaaccggagccaaaaatagagctttaaaggcaatcagggatgtcctatatctttagaaatagcactgtgatggcttgatctccttttcaatacaaaacaaagccaagctgtttacaagggtcaaaagcaattatttaaaaatttatattaaaaaaccataatcttctcttgttacctgtggaccaagaaaaaaaaaaagataaaaaaacttctttactaagaaccacatgttcattcaaatatcttgaaatgccagccagtactggacagtgaatgtcaaccaccgcagagtctgaggctcatttccactagagaaaacgaaacccaagatacctttcccttttgtcaatgtaacagggcattagccagactcatgtctaatgttataagcttttagccgagatggccttgttgcgacttccctgaagtcagttttatcagaggaaataaatgaaagacagaatgattaacatatatagtgtataaaagtatagaagagtaatctcttccctgtggctttatttggtggtgttactgttgtttattctttgtttatatgggagattcaaagtaaagcctatttaataataccatttatctaactgctgattttctgctgcttgatcttattaagcgcaagacctgtcattagtaatttcttttctgtattttaatttgctatgtttgcacgtacattacatttgttttgatgtctatttttatttaacagattcagtcaaaaggtaatgataacagaaaccctttccattgtcaataaaaaaaataataattcca

SEQ ID NO: 22784 - protein, 1257 aa, Homo sapiens; identical to SEQ ID NO: 2997

SEQ ID NO: 22785 - DNA, 281 bp, Homo sapiens
tgactacccctcaggcaaagtttcttgggacagtacctctgttgtgctagagtagaaccctcccttcggtctgagggactcaggaaagcctccccagaggagatggtgcctagactgagtttcaaaggatgaattacattcacccacaaggatatcgaatccctaacaggagggctggctggttctaagggggctgatccaccgtgcttgcccatagaattcaacttacatcagaaaagtagatctactaccttcaaaatacttccctcaactgttcactg

SEQ ID NO: 22786 - protein, 48 aa, Homo sapiens
ITFTHKDIESLTGGLAGSKGADPPCLPIEFNLHQKSRSTTFKILPSTV

SEQ ID NO: 22787 - DNA, 1368 bp, Homo sapiens
acctagattcaccatgagtcatcaagggacttaaagacagacgtatctggagaaaaagagaataaagctgaacatgcagcctccagccccagagaaagactgagagagaacaggagaatagaaccttattagacaccagatgtatttccagcaactgggttccttgaaatttctctggttcataagtgcttcacagacataatgggctagtaaattaggtccttattttggaacaaattgagagatatatttggaagtatgacagagatcaagctgtcagctttaattggagataaaagctaagttggagaagggcatactgctaataattcaccccagatttgtcagatttacctaccccatcacaagcccagtaaaaatcacagtataaaggcaaagataatgcatctctctgcagtcaggccaatttcaaagtctcctccaagatattcttatgtaactactctacttgtcacctggacatcaggactttggaaaacttcccaagtgtttccattgtgcaggctgtcatgagaatatcctctctcgggaagacttactagagaaagaagtagccatcaccaatctttcaagccttttgcactcttacctattggatttgaacaacttatgtaaggtcatcttgggttatgattgtccctctcagtgcttttggaggttatatttgtcacttcttaaactaaaggaaaagactcacttttcttataaagttggaagtagtaaatctgttcctttgaaactagagaaatatgtccctgcctatgaaaacgctgttctacttttgcagaggtagctgtatcatagagtgaatgtggcaactgatatggccatcactgtgaagagctgggtacacacatcagcctcaggacaccccctgcagtcctaacttgggaacgtaaacctcagctattgcaagtaaaccatttctgcttcattcacatgagaacatttccttcacaaaagtcacatggacaagacaaaataagaacttacctaaggaaaaaaaaatgtctttgggtaactactgtgctaagctactttctgcagaggttaggtactatagacattaggatcaggaaaaaccaagaaacaaacaattgtgactaaatttttctctaggagacacggaaaggaatttgttcagctcttgagagataaatgtatggagacaaatacagaacagcaagaaagtcagaagaaccagagagacggtgtgcaacaggaggcttttaagaagcatccaacagcaactgtctcctttctagttatttctattacttcagccttacctcctccaacttcagcacctcattataatatccttcccaatcaatcttctatggaact

SEQ ID NO: 22788 - protein, 43 aa, Homo sapiens
MHLSAVRPISKSPPRYSYVTTLLVTWTSGLWKTSQVFPLCRLS

SEQ ID NO: 22789 - DNA, 5695 bp, Homo sapiens
tcacgcaggcgcggggggccgcgtcgagaaccccacgcgggagcttctggagtctccagccaccgcttctcacttcactggagaagggagctggggctggggctggggctggggctgggagggagctaataaacattgaatgtgcagcagctgccttggcggccggagtccgcccgagcgacaccggagcagtgcgcccgggaggcggcgaggggaggcggttcgccttgtccctcccacccgcgcctctttctctctcttcctccagctggtcccagagcccggcttggtccggtccctctgcccccatcccgcacccttccacctcctccgagtcccactcctcacctaggacgccccaaactgccatgggttagggtggggatcgcgacccgcgcgaaagaccagccctgcgcttccgccgggggacgcggagcccaaacgccgctcaccgcttgcgggcgccgggcatggggagtgtggtgtgagcccgcacccggggaggacgcaggagctgcggagacgggcgcgaggaggaggagaggagtcgtggattggaaggacccgagggagggagggtggggaagcgagggaaaagtgaagctgggaggagaaggcggcggaaggtggagattgatgcttctgttttttgttgccgctgctgccctcgcgctgggagccgagccggagggaaggcggtggagagatgattgcagagttggtgagcagcgctctggggctcgccttgtatctcaacaccctgagtgcggatttctgctatgatgacagccgtgctatcaagactaatcaggaccttctcccagaaactccatggacgcacattttctacaatgatttttgggggactcttctaacccacagtggcagccacaagtcctaccggccactctgcactctttcttttcgcctgaaccatgccattggagggttgaatccctggagctaccatcttgtcaatgtcctgttgcatgcagcagtcactggtctcttcacaagcttctccaagatcctccttggtgatggatactggacattcatggctggcttgatgtttgcttctcaccccattcacacggaggcagtggcaggaatcgtgggacgagccgatgtcggggccagtctcttctttctcctctccttgctctgctacattaaacactgttctacaagaggctactcagccagaacctggggctggttcctggggtcaggactgtgcgcaggatgcagcatgttgtggaaggaacaaggagtgactgttctcgcagtttcagcagtttatgatgtctttgtctttcacaggctgaaaataaaacagatattacctaccatttacaaaaggaagaacttgtcgcttttcctaagcattagtttgttaattttctggggttcctcccttttgggtgcccggttatactggatgggaaacaaaccaccaagcttttccaactcggacaaccccgctgctgattcggacagcctcctcacccgcactctcaccttcttctacttgccaaccaagaacctctggctgttgctatgtccagataccctcagttttgattggtcaatggatgctgtgcctctgctcaaaacagtttgtgactggagaaacctacacactgtggccttctatactggactccttctccttgcctactatggtttgaagagcccgagcgtagacagagaatgcaatgggaaaactgtaacaaatggcaagcagaatgcaaatggacatagctgcctttcagatgtggagtaccagaactcagagactaagtccagctttgcatccaaagtagaaaatggcattaaaaacgatgtatcacagagaacccagcttccttctacggagaacattgttgttctgtctttatctttgttaatcataccctttgttcctgccacgaacctgtttttctatgtcggctttgtaattgcagagcgagtattatatattcctagtatgggcttctgcctactgattacagtgggtgctagagccctttatgtcaaagtccaaaagcggttcctcaagagcttgattttttatgctacagctacactaattgttttttatggactcaagactgcgatcaggaatggagactggcagaatgaggaaatgctttatagatcagggataaaagtaaacccagctaaagcatggggtaaccttggaaatgttctgaagagtcagagcaaaatttctgaagctgaaagcgcctatagaaatgctttgtactaccgcagcaacatggctgacatgctttataatttagggctacttctccaggagaacagcaggtttgcagaagcactacattattataaattggccattgggagcaggcctaccctggcttctgcatatttaaataccggtattattctaatgaaccaaggaaggacggaagaagcccgacggacattcttaaagtgttcggagatcccagatgaaaacctaaaggaccctcatgcacacaagagctctgttaccagttgtttgtacaacctaggaaagctgtatcatgagcagggacactatgaggaagcccttagtgtatacaaggaagcaattcagaaaatgccaaggcagtttgccccacagagcttgtacaacatgatgggtgaagcatatatgcgtttaagcaaactccccgaagcagagcattggtatatggaatcactgagatccaagactgaccacatccctgctcatctcacctatgggaagctgctagctctaacaggtcgtaagagtgaggctgaaaagctcttcttgaaggctattgagctggatcccaccaaaggaaactgttacatgcattatggtcagtttcttctggaagaagctcgtctcatagaagcagctgagatggcaaaaaaagcagctgaactagacagcacagagtttgatgttgtcttcaatgctgcccacatgctcagacaggctagcctcaatgaagcagctgagaagtattatgatctggcagccaggctgaggcctaattatccggctgctttgatgaacctgggagccattctgcacctcaatggcagactccagaaggccgaggccaactacctgcgggccctgcagctcaagccagacgatgtcatcacacagtccaatctccgcaaactgtggaacatcatggaaaaacaaggcttaaagacttctaagacctgacacaggaggcagaagcccatcctcctccatttttaaaagctggcttccttagcagacagaacttcccagcagtgctatgacaagagctggtgttagacttcaagaccagggcagaggtcattgaggtcactaccgcttctggaagaatccactttgctgtaggcacagctgttaacaccaaaaaggggaaagccggaaacctcctggaggatgtcattgttacccatagactgtaaaccagagcacttaaaacagaaccttttggcattcttaaaaagggaggggtgggtgtgtaagtcacagattttgttcattttctgaaagctaatttcaaaattatgttgttccttaaacactgtgagaggaagtcagagtgtccattcaggcatggcaaacaattagggttaagtgttacgagggagtgataaacacgtagtgtgagtcccagtgagccgccggttgtcctaacgctgctgtcttccctgtttgggacagcctgcttatcaatttctgaagcttagaacactttttttaatactgtgtcaagatctgtcagaatctgctatgtttcttgaccagtgcacataatgttttatgatttggatgtcagaggcttcattcttttggacatcatttgctttttatgttctgaaaaggatatggagagtagagctaaccatacttcacactcgagttgtatgagggactggggaggccttatatgtgtcaggcaggcattttttaaattttaatatcgtcaatattttcccccaaactgcccagtagaattcattgtattaattcttttgaaattacctttgaaaatagctattcctggagaatgtgcaagcttacataaggataaaggacaggggaggagtttgtaagccttgcagttccaataactaaccaacaggttattagacaaaagggaaggtgttttgtgcttctcagatgttgctggtttaggagtgtgtgatgatgcttgccagtgattttgtgttttggaaagggtaggtatcgaatgttaatcactttctaatgggtacctaaacagcaatgctgataaatgttcaaggaattattttcatcttagtttgttcttctcaaaaggcatcaaaaacaacttatttgaagctgcaatagagtgtagcattagcctgcatgtttctaggtcttctgccaagtgcttttctcagttgaaaactatttttcactagcaaaattggtattttatttcattacctgttagtaactacttcaatgatcatttcacaagaaaaagactataaattaagtagagaacaacatttttattgaacatttttggcttgcaatcaaactttgccactaaaaattaacttcataaaacactagtccgttatcaacttcttcacagagaaagtagctatactataccctacatatttatttatttattattctactatagcagaataacaaaacttgatgcattaagccagttctttgcaactgaaaattacctgtttctccttccctttcacactccatgtatatatgatcagcctctccattaaaaagaagctggacatgcaaatacatcatattatgttttctccatattttatgtttttctatgtatctgaatacagtgggataaataattgaaagtagtgttcctatggcattagtgtttttgtgagaagggtaaatgtagtgagaaaggttttttcatggcattaataagaaagcccttctgtaatatatatattattttgtaaacatttcactgaagggccaaaagttaaattataactaaatcactgtgttttcagaatgatatttaacaacaaacccgtggtcaaaccaaaatagtgggttgaagtgtattattcatcttttagtgcattggcaattgcaaaaaaaaaaaaggaatttaatataaggctatagagattaattcagtgtctaacatttgtatttatttaaatagttattgacctatgatgactttctagtcttaacattttatctttttattgttgttgttcttcctttcaaagatgtggttcttaataggttcactgaatgcacagttgaggcacttcttgtgacaccagttcccaagtagcgttaataattgggcctgtgtcataaaatgcacggatcattaataactaaatgtccctgacacttttcactacagggctggacttagtaactgaccaacttcggggggagggttggggcaagggggggtgggcgttagaacatgatcaaaaaatgtctccgctcagggatttatggtggattattgcagacagtgctaaaaatatagagcacaagacaagtttactaaattaaaattttattttttgagaaactgttatttgtataaattatcaagatttgtaggctttccttttgtagaaataattgttttatgtgccagagaatttcaattttgttttcaacaataaagcattgataagaaat

SEQ ID NO: 22790 - protein, 836 aa, Homo sapiens; identical to SEQ ID NO: 2999

SEQ ID NO: 22791 - DNA, 687 bp, Homo sapiens
tgcgatcaggaatggagactggcagaatgaggaaatgctttatagatcagggataaaagtaaacccagctaaagcatggggtaaccttggaaatgttctgaagagtcagagcaaaatttctgaagctgaaagcgcctatagaaatgctttgtactaccgcagcaacatggctgacatgctttataatttagggctacttctccaggagaacagcaggtttgcagaagcactacattattataaattggccattgggagcaggcctaccctggcttctgcatatttaaataccggtattattctaatgaaccaaggaaggacggaagaagcccgacggacattcttaaagtgttcggagatcccagatgaaaacctaaaggaccctcatgcacacaagagctctgttaccagttgtttgtacaacctaggaaagctgtatcatgagcagggacactatgaggtctggccaatgcctctctgtccttttccctcccccttgttctgatccagtctcagtggtttgtaacctacagcctcctttgagcctatgtcctttgaacaactaatatgtatacacgttaaactattgtcctttgagaaactaatacatgatgacattggaatggttttttgatcaaatttgtttagaaaaagcttctgctaaataaaaatttaatagatttcttt

SEQ ID NO: 22792 - protein, 156 aa, Homo sapiens
MLYRSGIKVNPAKAWGNLGNVLKSQSKISEAESAYRNALYYRSNMADMLYNLGLLLQENSRFAEALHYYKLAIGSRPTLASAYLNTGIILMNQGRTEEARRTFLKCSEIPDENLKDPHAHKSSVTSCLYNLGKLYHEQGHYEVWPMPLCPFPSPLF

SEQ ID NO: 22793 - DNA, 462 bp, Homo sapiens
ccacagagcttgtacaacatgatgggtgaagcatatatgcgtttaagcaaactccccgaagcagagcattggtatatggaatcactgagatccaagactgaccacatccctgctcatctcacctatgggaagctgctagctctaacagtgagtaaccgccttccttggtctttaaaacttggttttctccatgcagaccgggatagatgggtttgaggtactgttttacagccagttatctaagctattagggatgcaatggtggtgatactaactttgaaccctgtacagaaaatatagaaaaatgtgttactttgcctatgaggtttggtctagataagatgtgagatgtctgtatcttacatcttgatctagataatatgtgagatgtctgtatcttacatcttggtctagataagatgtgagatgtccgtatcatccctgtatcaaaacatctcctgt

SEQ ID NO: 22794 - protein, 65 aa, Homo sapiens [sequence omitted]

SEQ ID NO: 22795 - DNA, 325 bp, Homo sapiens
ccaatctccgcaaactgtggaacatcatggaaaaacaaggcttaaagacttctaagacctgacacaggagggttggggcaagggggggtgggcgttagaacatgatcaaaaaatgtctccgctcagggatttatggtggattattgcagacagtgctaaaaatatagagcacaagacaagtttactaaattaaaattttattttttgagaaactgttatttgtataaattatcaagatttgtaggctttccttttgtagaaataattgttttatgtgccagagaatttcaattttgttttcaacaataaagcattgataagaaat

SEQ ID NO: 22796 - protein, 49 aa, Homo sapiens
KYRAQDKFTKLKFYFLRNCYLYKLSRFVGFPFVEIIVLCAREFQFCFQQ

SEQ ID NO: 22797 - DNA, 558 bp, Homo sapiens
atggcgggtgaaaaggttgagaagccagatactaaagagaaaaaactcagagccaagaaggctgatgctggtggcaaggtgaaaaaggataacctcaaggctaaaaaacctcagaaaagaaagccccattgcagccgcaatcctgtccttgtcagaggaattggcagtacccgggtggttaaacttcacaaaatgcctagatattatcctattgaagatgtgtctggaaagctgttgagccacggcaaaaaaccctcctgtcagcacaaatttgtcattgccacctcaaccaaaattgatatcagcaatgtaaaaatcccaaaacatcttactaatgcttacttcaagaagaagctgcagaagcccagacaccaggaaggtgagatctttgacacagaaaaagagaaatatgagattatagagcatcacaagattgatcagaaagctgtggactcacaaattttaccaaaaatcaaagctattcctcagctccggggctgtctgcgatctgtgcttgccctgacgaatggaatttatcctcataaattggtgttctaa

SEQ ID NO: 22798 - protein, 185 aa, Homo sapiens
MAGEKVEKPDTKEKKLRAKKADAGGKVKKDNLKAKKPQKRKPHCSRNPVLVRGIGSTRVVKLHKMPRYYPIEDVSGKLLSHGKKPSCQHKFVIATSTKIDISNVKIPKHLTNAYFKKKLQKPRHQEGEIFDTEKEKYEIIEHHKIDQKAVDSQILPKIKAIPQLRGCLRSVLALTNGIYPHKLVF

SEQ ID NO: 22799 - DNA, 747 bp, Homo sapiens
aattcttctcttaataaatacttactgaaaaccaagcatgcgttaggcacactagtacattaaaaagtggtgaatgagaaagtaaaggcatttattttaacactagaagagttcaagaataatggcaggaaaatatatgatatctctggaggaaaccatccattgaagctcacataaaaaaagacgagaaggacagagttagctggttcacatcactttaatcatagaaccatccttaggtgatttttgggaaatattatctcgcagtgctagctctttgtggaatcacaaatgaaaaacatgaaggggagaaatttctttccttttggggaagaaagtgcagctaaggcagagaataagaaacagagatgagaaaggaaataacagacatgacgtgagacaagaaatgagactgaaagggaaagaataatttagaaagtatatacagtgtctcctgtgggtactccagacatcaaaaagaagaatataatatatttcagggcttgatattactgaatagtcagaacagccacaaactgctgtcagcaatttagcagagacgctatatcaaggacaaaatccacacccacaaccttatactcaaccaaattgcatgcaattgcctatgacaagtctttgttggaatcctcttatcatggcaaacatcctcagtactctaaatagtgtcaaaaaggaaaaaaaaaaagaaaaaactgctgagcctagagcacaaattttctgtagaaa

SEQ ID NO: 22800 - protein, 43 aa, Homo sapiens
MQLPMTSLCWNPLIMANILSTLNSVKKEKKKEKTAEPRAQIFC

SEQ ID NO: 22801 - DNA, 3909 bp, Homo sapiens
ctgttccagacttctcagggtttttacagcacaaacaactgcatacggcccgaggggaggctgaaaaggacttgtgtgtggtggttttattgcctgtcatcactttgctggcctcctcccgactggagcctggaggttcacagtggatttctttctgccgaagacaccaaggcactgaggaaggatcccttctccttctgttgactctttctatttttatggtttaagtttatctattcatggggctgaaaagcgtttgcaaatccatcaacggcgaagtgtggcaagccgcccagcgtcacgtcgtcgcctgcctgtggtcaggcattcctcactcccaccaggcagaaggtcaataaaaatggaggcaagctcttctggaatcactaatggaaaaaccaaagtcttccacccagtggccaaggatgtcaatattctttttgatgaattagaagctgtcagcagtccttgcaaagatgacgattctcttcttcaccctggaaacctgactagtacttcagatgatgccagcagattggaagccgggggagagacagtgccagaaagaaacaaatcaaatggactttactttcgagatggaaagtgtcgaattgactacatccttgtgtacagaaaatccaacccccagactgaaaagagagaagtatttgaaagaaacattagagcagaaggattgcaaatggagaaagagtcctctctaataaatagtgacattatctttgtgaagttgcatgccccatgggaagtccttggaagatatgcagaacaaatgaatgtaagaatgcctttcaggagaaaaatctattacctgccccgccgttacaagttcatgagcaggatcgataaacaaataagcaggtttcggagatggttacctaagaagccaatgaggctggacaaggagacactgccagacctggaggagaatgactgctacactgcccctttcagccagcaaaggatccatcacttcatcatacacaacaaagaaacgttcttcaacaatgccacaagaagtagaatcgtgcatcacattttacaaagaataaaatatgaagaaggaaaaaacaagattggtctgaatcgtttgcttaccaatggctcctatgaagctgcgtttcccctgcatgagggaagttatagaagtaaaaactccattcgaacccatggagcagaaaaccaccgacatctactctatgagtgctgggcctcctggggcgtgtggtataaataccaacctttggatcttgtaaggcggtactttggagagaagattgggttatattttgcctggttgggctggtacaccggcatgctcttcccagctgccttcattggattgtttgtctttttgtatggcgtcaccactctggatcacagccaagtcagtaaagaagtctgccaagctacagatatcatcatgtgtcctgtgtgtgataaatactgtccattcatgaggctgtcagacagctgtgtatatgccaaggtaacccacctttttgacaatggagccactgtcttctttgctgttttcatggcagtctgggcaacagttttcctggagttttggaaaagacggcgagcagtaattgcttatgactgggatttgatagactgggaagaagaggaggaagaaatacgaccccagtttgaagccaagtattccaagaaagagcggatgaatccaatttctggaaagccagaaccttatcaagcatttacagataaatgcagcagacttatcgtttctgcatctggaatattttttatgatctgcgtggtgattgctgccgtgttcgggatcgtcatttaccgggtggtgactgtcagcactttcgctgcctttaagtgggcgttaatcaggaataactctcaggttgcaaccacagggactgctgtgtgcatcaacttctgtatcattatgttgctgaatgtgctctatgaaaaagttgccctgcttctgacgaatttagaacagcctcgcacagagtctgagtgggagaacagcttcaccctgaaaatgtttctttttcagtttgtcaatctgaacagctccacattttacatcgcattcttcctcggaagatttacaggacacccaggtgcctacttgaggctgataaacaggtggagactagaagagtgccaccctagtggatgccttattgatctgtgtatgcaaatgggtattataatggtgctaaagcagacctggaataatttcatggaacttggctacccgttaattcagaattggtggactagaagaaaagtacgacaagaacatggacctgaaaggaaaataagtttcccacaatgggaaaaggactataaccttcagccgatgaatgcctatggactcttcgatgaatacttagaaatgattcttcagtttggattcacaactatctttgtggcagcttttcccctagcaccacttctggccttactgaataacataattgaaattcgacttgatgcttacaaatttgtcacacagtggaggagacctttagcttcaagggccaaagacataggaatttggtatggaattcttgaaggcattggaattctctctgttatcacaaatgcatttgtcatagcgataacatctgactttatccctcgcttggtgtatgcttataagtatggaccttgtgcaggccaaggagaagctgggcaaaagtgcatggttggctatgtgaatgccagcttgtctgtatttcgaatttctgactttgagaaccgatctgagcctgaatctgatggcagtgagttctcggggactcctcttaagtactgcagataccgggactaccgtgacccgcctcattcactggtgccctatggctacacactgcagttttggcatgtcctagctgctcgattagcttttatcattgtctttgagcacctcgtgttttgtataaagcacctcatttcatatctgatcccagacctcccaaaagacctaagggatcgaatgagaagagagaagtacttgattcaggagatgatgtatgaagcagaactggaacgtctccagaaggaacgaaaggagaggaagaagaatggaaaagcacaccacaacgagtggccgtgaccataaaatagtccctttccaggccaaggacctgaattctgtttacttcttctggctgtgcaaaagcacactcaagtgaatgactaaaaatgcaaccacagtgcatgttgcagataccggcggccgcaggaggggcagcatccagtagaggactggcgttggagtcacactgctgtgaaatcacgttgcagtccagcgcacaattgctatctatccatagaccattcttgaccaagcaagcatgcacattatgggcagttacattctcaagtttttaaaatcaaggggaacttgtatactgggcctgtttttcagcctgtttgctaccttttttgcattctatcccatgtgaattttacagacactgggctaaaaagggtattcagacacatggacacacattcctagaatgtcatcatatggtcctaattccatgtcaccaacaacacagacaagaccctgtttacaactttttctttccttttttttaattttagacctttctgagaagattattatatatgacatatctatagctatgtgtatggccatagatgtatttctgtgtgtacatatgtatagtcatgtattcctgcatatgtacatacaaatacagagatatataaagtacatagaaattccttacttgtaaatagccaaaaagtactgacatgagtgaattttcacatttaaatagtcatcaatatgaagccatgattaatgcttgtataatgtgatgcaataaaatttaaaataaatttctgcacatggaatattttcagctg

SEQ ID NO: 22802 - protein, 920 aa, Homo sapiens
MEASSSGITNGKTKVFHPVAKDVNILFDELEAVSSPCKDDDSLLHPGNLTSTSDDASRLEAGGETVPERNKSNGLYFRDGKCRIDYILVYRKSNPQTEKREVFERNIRAEGLQMEKESSLINSDIIFVKLHAPWEVLGRYAEQMNVRMPFRRKIYYLPRRYKFMSRIDKQISRFRRWLPKKPMRLDKETLPDLEENDCYTAPFSQQRIHHFIIHNKETFFNNATRSRIVHHILQRIKYEEGKNKIGLNRLLTNGSYEAAFPLHEGSYRSKNSIRTHGAENHRHLLYECWASWGVWYKYQPLDLVRRYFGEKIGLYFAWLGWYTGMLFPAAFIGLFVFLYGVTTLDHSQVSKEVCQATDIIMCPVCDKYCPFMRLSDSCVYAKVTHLFDNGATVFFAVFMAVWATVFLEFWKRRRAVIAYDWDLIDWEEEEEEIRPQFEAKYSKKERMNPISGKPEPYQAFTDKCSRLIVSASGIFFMICVVIAAVFGIVIYRVVTVSTFAAFKWALIRNNSQVATTGTAVCINFCIIMLLNVLYEKVALLLTNLEQPRTESEWENSFTLKMFLFQFVNLNSSTFYIAFFLGRFTGHPGAYLRLINRWRLEECHPSGCLIDLCMQMGIIMVLKQTWNNFMELGYPLIQNWWTRRKVRQEHGPERKISFPQWEKDYNLQPMNAYGLFDEYLEMILQFGFTTIFVAAFPLAPLLALLNNIIEIRLDAYKFVTQWRRPLASRAKDIGIWYGILEGIGILSVITNAFVIAITSDFIPRLVYAYKYGPCAGQGEAGQKCMVGYVNASLSVFRISDFENRSEPESDGSEFSGTPLKYCRYRDYRDPPHSLVPYGYTLQFWHVLAARLAFIIVFEHLVFCIKHLISYLIPDLPKDLRDRMRREKYLIQEMMYEAELERLQKERKERKKNGKAHHNEWP

SEQ ID NO: 22803 - DNA, 2307 bp, Homo sapiens
aacaataccttcctggtcctaaatataactatatccatacacatatgtaacccacctttttgacaatggagccactgtcttctttgctgttttcatggcagtctgggcaacagttttcctggagttttggaaaagacggcgagcagtaattgcttatgactgggatttgatagactgggaagaagaggagatctgcgtggtgattgctgccgtgttcgggatcgtcatttaccgggtggtgactgtcagcactttcgctgcctttaagtgggcgttaatcaggaataactctcaggttgcaaccacagggactgctgtgtgcatcaacttctgtatcattatgttgctgaatgtgctctatgaaaaagttgccctgcttctgacgaatttagaacagcctcgcacagagtctgagtgggagaacagcttcaccctgaaaatgtttctttttcagtttgtcaatctgaacagctccacattttacatcgcattcttcctcggaagatttacaggacacccaggtgcctacttgaggctgataaacaggtggagactagaagagtgccaccctagtggatgccttattgatctgtgtatgcaaatgggtattataatggtgctaaagcagacctggaataatttcatggaacttggctacccgttaattcagaattggtggactagaagaaaagtacgacaagaacatggacctgaaaggaaaataagtttcccacaatgggaaaaggactataaccttcagccgatgaatgcctatggactcttcgatgaatacttagaaatgattcttcagtttggattcacaactatctttgtggcagcttttcccctagcaccacttctggccttactgaataacataattgaaattcgacttgatgcttacaaatttgtcacacagtggaggagacctttagcttcaagggccaaagacataggaatttggtatggaattcttgaaggcattggaattctctctgttatcacaaatgcatttgtcatagcgataacatctgactttatccctcgcttggtgtatgcttataagtatggaccttgtgcaggccaaggagaagctgggcaaaagtgcatggttggctatgtgaatgccagcttgtctgtatttcgaatttctgactttgagaaccgatctgagcctgaatctgatggcagtgagttctcggggactcctcttaagtactgcagataccgggactaccgtgacccgcctcattcactggtgccctatggctacacactgcagttttggcatgtcctagctgctcgattagcttttatcattgtctttgagcacctcgtgttttgtataaagcacctcatttcatatctgatcccagacctcccaaaagacctaagggatcgaatgagaagagagaagtacttgattcaggagatgatgtatgaagcagaactggaacgtctccagaaggaacgaaaggagaggaagaagaatggaaaagcacaccacaacgagtggccgtgaccataaaatagtccctttccaggccaaggacctgaattctgtttacttcttctggctgtgcaaaagcacactcaagtgaatgactaaaaatgcaaccacagtgcatgttgcagataccggcggccgcaggaggggcagcatccagtagaggactggcgttggagtcacactgctgtgaaatcacgttgcagtccagcgcacaattgctatctatccatagaccattcttgaccaagcaagcatgcacattatgggcagttacattctcaagtttttaaaatcaaggggaacttgtatactgggcctgtttttcagcctgtttgctaccttttttgcattctatcccatgtgaattttacagacactgggctaaaaagggtattcagacacatggacacacattcctagaatgtcatcatatggtcctaattccatgtcaccaacaacacagacaagaccctgtttacaactttttctttccttttttttaattttagacctttctgagaagattattatatatgacatatctatagctatgtgtatggccatagatgtatttctgtgtgtacatatgtatagtcatgtattcctgcatatgtacatacaaatacagagatatataaagtacatagaaattccttacttgtaaatagccaaaaagtactgacatgagtgaattttcacatttaaatagtcatcaatatgaagccatgattaatgcttgtataatgtgatgcaataaaatttaaaataaatttctgcacatggaatattttcagctg

SEQ ID NO: 22804 - protein, 475 aa, Homo sapiens
MAVWATVFLEFWKRRRAVIAYDWDLIDWEEEEICVVIAAVFGIVIYRVVTVSTFAAFKWALIRNNSQVATTGTAVCINFCIIMLLNVLYEKVALLLTNLEQPRTESEWENSFTLKMFLFQFVNLNSSTFYIAFFLGRFTGHPGAYLRLINRWRLEECHPSGCLIDLCMQMGIIMVLKQTWNNFMELGYPLIQNWWTRRKVRQEHGPERKISFPQWEKDYNLQPMNAYGLFDEYLEMILQFGFTTIFVAAFPLAPLLALLNNIIEIRLDAYKFVTQWRRPLASRAKDIGIWYGILEGIGILSVITNAFVIAITSDFIPRLVYAYKYGPCAGQGEAGQKCMVGYVNASLSVFRISDFENRSEPESDGSEFSGTPLKYCRYRDYRDPPHSLVPYGYTLQFWHVLAARLAFIIVFEHLVFCIKHLISYLIPDLPKDLRDRMRREKYLIQEMMYEAELERLQKERKERKKNGKAHHNEWP

SEQ ID NO: 22805 - DNA, 674 bp, Homo sapiens
atcacaattcatcttgaaaagagcttttttccctcctaccacatacaccattcttagggagcaatgaggtaacaggtctgtgttgtctagatctttgctttttatccccctatcagtccagggcatatactaacctgcaaactgattctgaatcaggaaggtggtaatcaataagtattctggctgggaaagaccgtgggcccaatgatcaaagtcttcttggtgctgttcattaattcttgtgccttttggcttgttttctagagtttctgggctttggctgctgatactgcctttcttagactgtaatttttattgcattgagctatgattacaccactgcactccagcctgggtaacagagtgaaatcttgtctctgggaaaaaaaaaaaaaaaaaaaaaaaagagagagagagagggagatttatataacatttaaattaactgcataaacctgggcaatgttcaaaactccatctctacaaaaaaacacaagaattagccaggcacggtggtgtgtgtctgtagtctcagctacttaggaggctgaggtgggaagattgctagagccaggaggtcgaggctgcactgagctgtgattgcgctactgtactccaccctgggtgatgaagccctaactcaataaataaataaataaataaataatacaaat

SEQ ID NO: 22806 - protein, 41 aa, Homo sapiens
MITPLHSSLGNRVKSCLWEKKKKKKKREREREIYITFKLTA

SEQ ID NO: 22807 - DNA, 3975 bp, Homo sapiens
tgtgtagattcgctggaagcagctggaggctccagttctcatctgctcaggtgtccccggcgccttggcgaactcggccactccagttcctcacgtggtgagcactcagggcagcgggtcgattttccgaggtcccatacctgggtttgaggggcgcggctcgcagcggcgggtgcaggggcgactgccagccctcaccccgcctcggggtgcgttcggaggccgacacctggaggacgcctccagtccccgcgggacgccacgcctgcgcgccagggatccgggataagaagtgcgcgccgggctccggctgcgcgccgcggggccaccagtttgcgcgcagggctcaggcgaccgtgcggccatggacacgccacggggcatcggcaccttcgtggtgtgggactacgtggtgttcgcgggcatgctggtcatctcggccgccatcggcatctactacgccttcgctgggggcggccagcagacctccaaggacttcctgatgggcggccgcagaatgaccgcagtgcccgtggcgctgtccctcaccgctagcttcatgtcagccgtcactgtcctgggcaccccctccgaggtctaccgttttggggccatttttagcatctttgccttcacctacttctttgtggtggtcatcagcgcggaggtcttcctcccggtgttctacaaactgggaattaccagcacctacgagtatttagaacttcgatttaacaaatgtgttcgtctctgtggaacagtcctcttcattgttcaaacaattctgtatactggaattgttatttatgcccctgccctggctttgaatcaagtcacaggatttgatctgtggggcgcggtagtggcaacgggggtggtctgcacattctactgcacactgggtggtcttaaagcagttatctggacagatgtttttcaagttgggatcatggtggctggatttgcatccgtgattatacaggctgtggtgatgcaaggtggaatcagcactattttaaatgatgcctatgatggtggaagattaaatttctggaattttaatcctaaccctttgcaaagacacaccttctggacaattattataggagggaccttcacatggaccagcatctacggtgtcaaccaatcccaggtgcagagatatatttcttgtaaaagcagattccaggcaaaactgtctctctacatcaatcttgtgggactctgggcaatcctcacatgctcagtgttttgtgggctcgccctatattccaggtaccatgactgtgatccttggacagccaagaaagtgtctgcaccagaccagctcatgccttatttggtactggacattctgcaagattatccaggacttcctggactttttgtggcctgtgcttacagtgggacattaagcacagtgtcctccagtattaatgccttagcagcagtaactgtggaagatctaatcaaaccttacttcagatcgctctcagaaaggtctctgtcttggatttcccaaggaatgagtgtggtgtatggagccctgtgtattggaatggctgcgctggcgtcacttatgggagctttgttgcaggcagcactcagcgtatttggtatggttggtggaccacttatgggcctgttcgctttgggcattttggttccctttgccaactcaattggagcacttgttggtctgatggctggatttgccatttctctatgggttggaattggagctcaaatatatcctccacttcctgagagaacattgccattgcaccttgatatccaaggctgtaacagcacctacaatgagacaaatttgatgacaaccacagaaatgccatttactactagtgtttttcaaatatacaatgttcaaaggactccactgatggataactggtattctttatcatatctgtacttcagcactgttggaactttggtaacattattagtggggatacttgtcagtttatcaacaggaggaagaaaacagaacttagaccccagatacatactaaccaaagaggactttttatccaattttgatatttttaagaaaaagaagcatgttttgagctataaatcacatccagtggaagatggtggaactgataatcctgctttcaaccacattgaattgaactcagatcagagtggcaagagcaatgggactcgtttgtgaagctgctctgatactagatatccttaaatgatgtttcaattttatatgttttctaagataattggatcaggttttctttgtgtgtgtgtgtgtgttgtatcatgagtgtttgggggataagtttttgttaaaacaaagtctggactatcttcatttactacatcattaattgatgttactctggagtttagaattctggcattgacatttccctctctttcctttatttcgatgaagctataattgtgaaaattgtaactacatagatgctgaaaggctaatacacacatatgcacatgtatttgattgtcaaaggtatattcttaaatttgggtattattgaaaatattttccatgccttggtgctagcatataagtttggaagtttgccaacatcacaattcatcttgaaaagagcttttttccctcctaccacatacaccattcttagggagcaatgaggtaacaggtctgtgttgtctagatctttgctttttatccccctatcagtccagggcatatactaacctgcaaactgattctgaatcaggaaggtggtaatcaataagtattctggctgggaaagaccgtgggcccaatgatcaaagtcttcttggtgctgttcattaattcttgtgccttttggcttgttttctagagtttctgggctttggctgctgatactgcctttcttagactgtaatttttatctgcatgcccagtttctgacctatcaacttgggttttattgtgcactctaactgagcttgtcttcataattttctgtttattgccctgggcttggatatgtctcaagacactcatgtgaatcatgccaccccaaatcctggcttatcaagtcccagactataaattatgaactcccattagcttggtactaacatatacttgatgtaggtatttatggacttgatgatccaagaatattatattcttcaaaatggttaagctccatggagttagatgactacacttaatgctattaagttgaacttttgaatgtcaactaatttgcaatcaattaaagatacatatgcctagaaattttgaaatttcggtatatttatccagttaaagggctaaattatataagcaaacactactttttttaaaacgtctggactcaaaaaatgctttgttccatgttttaaaatttttaagtagcagtctcaaagttgcttagctgtttattttgctatgttcctagctaagagtttggttataggagttcatcaataacttattttttgtacagttcccacattagatactgtttaaaagttcttttttaaactcaattttttttagaaacataagagaaatatttagatacatacaaatgtttttatgattaaataattttatgcttattttctgatacgtgttatttaggtaatcatgccctgtacatttagaggttgctaactgacaatgttaagaaatttaaaaaaaaaaaaaagcctgggcatgatggctcatgcttgtaatctgaacatttgggaggctgaggcaggaagatcgcttgaggtccagagtttaagtccagcctggaaacatagttagacctcatctctacaaaaataaaaaataaaaataaaaaaaacttagctaggcatgttgccacatacttgtagtcccagttattagggaagctgaggtgggaggatagcttaagcccaggatttcaaggctgcattgagctatgattacaccactgcactccagcctgggtaacagagtgaaatcttgtctctggg

SEQ ID NO: 22808 - protein, 610 aa, Homo sapiens
MDTPRGIGTFVVWDYVVFAGMLVISAAIGIYYAFAGGGQQTSKDFLMGGRRMTAVPVALSLTASFMSAVTVLGTPSEVYRFGAIFSIFAFTYFFVVVISAEVFLPVFYKLGITSTYEYLELRFNKCVRLCGTVLFIVQTILYTGIVIYAPALALNQVTGFDLWGAVVATGVVCTFYCTLGGLKAVIWTDVFQVGIMVAGFASVIIQAVVMQGGISTILNDAYDGGRLNFWNFNPNPLQRHTFWTIIIGGTFTWTSIYGVNQSQVQRYISCKSRFQAKLSLYINLVGLWAILTCSVFCGLALYSRYHDCDPWTAKKVSAPDQLMPYLVLDILQDYPGLPGLFVACAYSGTLSTVSSSINALAAVTVEDLIKPYFRSLSERSLSWISQGMSVVYGALCIGMAALASLMGALLQAALSVFGMVGGPLMGLFALGILVPFANSIGALVGLMAGFAISLWVGIGAQIYPPLPERTLPLHLDIQGCNSTYNETNLMTTTEMPFTTSVFQIYNVQRTPLMDNWYSLSYLYFSTVGTLVTLLVGILVSLSTGGRKQNLDPRYILTKEDFLSNFDIFKKKKHVLSYKSHPVEDGGTDNPAFNHIELNSDQSGKSNGTRL

SEQ ID NO: 22809 - DNA, 8192 bp, Homo sapiens
aggctcctccttgtctccaacatggcggcgcccaggggctcaagccgcacgtgagaaagtctgggcatctgggaatcggagagtatagcctgtgagccgctttcccctccttactgtcggttgcatcccttcgacactcccgaggccgtcgcgggccactggccctctgcagccatgaagacaaagcccgtttcccacaagaccgagaacacctaccggtttcttacatttgctgaacgactggggaatgttaatattgatattattcaccggattgatagaactgcaagctatgaggaggaggttgaaacctacttttttgagggtctgctgaaatggagagaattaaacctcacagaacacttcggaaaattttacaaagaagttattgacaaatgccaatcattcaatcagttggtgtatcaccaaaacgagatagttcagagtttgaagactcacctgcaagttaagaacagttttgcctatcaaccccttttggatttggttgtacagttggcacgagatctgcagatggatttctacccacactttccagagttttttttgactatcacctcgatcctggagactcaggacacagagttgttagaatgggctttcacctcgttatcatatctttataagtacctgtggagactgatggtgaaggacatgtccagtatatacagcatgtacagcacactcctggctcataaaaaactacatataagaaattttgctgctgaaagttttacttttttgatgagaaaggtctctgataaaaacgcacttttcaatttaatgtttcttgatcttgataaacatccagaaaaagttgaaggtgttggacagttgctctttgaaatgtgcaaaggagttagaaatatgtttcactcctgtacaggccaggcagtgaagctaattttgcgaaagctaggaccagtcactgaaacagaaactcaactaccatggatgttaattggagaaacactcaaaaacatggtcaaatccactgtatcctacatctccaaggaacattttggtacattttttgaatgtttgcaagaatcgctcttggatctacacacaaaagtaacaaaaactaactgttgtgaaagttctgaacagattaaaaggttgttggaaacataccttatacttgtaaaacatggaagtgggacaaagatacccacgcctgctgatgtctgtaaggtgttatctcaaacactgcaagtagccagtctctccacatcttgctgggagaccctcttggatgtaatttctgctttgatcctgggtgaaaatgtttccttgccggagaccctcatcaaagaaaccatagaaaaaatatttgagagcagatttgaaaaacgtttaattttcagtttttctgaagtcatgtttgccatgaagcagtttgagcagctttttctaccaagctttctgtcatatattgtgaattgcttcttaattgatgatgctgtagtcaaagatgaagctctggccattctggccaagctcattctgaacaaagcagcacctcccactgctggctcgatggcaattgaaaagtaccctctggttttctcaccgcagatggtgggattctatataaagcagaagaagactagatccaagggaagaaacgaacagtttccagtattggaccatcttttatctataattaagttacccccaaataaagatactacttacctttcacaatcttgggcagccctcgtggtgttacctcatattagacctcttgagaaagagaaggtgataccactcgtcaccggcttcatagaggcactcttcatgactgttgacaaaggaagctttgggaaaggaaacttatttgttctttgtcaagctgtaaatactctactaagtttggaagaatcttctgaacttcttcatttggttcctgtggaacgtgtgaagaatttagtattaacctttcccctggagccatctgtgttgctgttgactgatctctattatcagagattagccttgtgtggctgcaaagggccactttcccaggaggctttaatggaattatttcccaagttacaagcaaacatttcaactggtgtatccaagattcggcttttgacaataaggatcctaaaccattttgatgtccagcttccagaatcaatggaggatgatgggctctcagagcggcagtctgtctttgctatattacgccaggcagaacttgttccagcaactgtgaatgattatagagagaagcttcttcatttgagaaaactaagacatgatgtggtacagactgctgtccctgatgggccgttacaggaggtgccgcttcgttatttgttaggcatgctatatattaatttcagtgcactctgggatcctgttattgaactcataagttctcatgcacacgaaatggaaaataagcaattttggaaagtctactatgagcatctagaaaaagcagctacgcatgctgagaaggaactacagaatgatatgacagatgagaagtccgttggagatgaaagttgggagcagacccaggaaggagatgttggagctctttatcatgagcagttagcattgaaaactgactgtcaggaaagacttgaccacaccaacttcagattcctgctctggagagctctgaccaaattcccagaaagagtagagccacggtccagggagctttccccgcttttcttgagatttatcaacaatgagtattacccagcagatctgcaagttgctccaacccaggatctacggagaaaaggcaaagggatggtggcagaggaaatcgaagaggaacctgccgcaggagatgatgaagagttggaggaagaggcagtgccccaagatgaatcctcacagaagaaaaagacgaggagagctgcagcaaagcaattaattgctcatttgcaagttttctctaaattttcaaatccacgggccttatatctggaatccaaactatatgagttatatcttcagttgttgctacaccaagatcaaatggtgcaaaaaataaccttggattgcataatgacatataaacatcctcatgtcctcccttacagggaaaacttacaaaggttgcttgaagacagaagctttaaggaagagatagtgcattttagcatttcagaagataatgctgtagtgaaaacagcccaccgagcagatctatttcctattctgatgagaattttgtatgggcgaatgaagaataagactgggagtaaaactcaggggaaatctgcttcaggcacccgcatggccattgtcctgcggttcctggccgggacccaacctgaggagatccagatattcttagacctgctgtttgaacctgtgaggcatttcaagaatggagagtgccattctgcagtcattcaagcagtagaagacttggatttgtctaaagttcttcctttaggtcgtcagcacggtatcttaaacagccttgagatagtattgaaaaacattagtcatctgatcagcgcatacctgccgaagattttgcagatactgctctgtatgacagcaaccgtatcacacatccttgaccaacgagaaaagatacagctgagatttattaatccattgaaaaatttaagacgtcttggaatcaaaatggtaactgatatctttttggactgggaatcatatcagtttagaacagaagaaattgatgctgtgtttcatggtgcagtttggccccagatcagcaggcttggatctgagagtcaatattctcctactcctctgctgaaactgatcagtatctggagcagaaacgcaagatatttccctttgctggctaaacagaagcctgggcacccagaatgtgatatcctgaccaatgtttttgcaattctctcagcgaagaatctttctgatgccacagccagtattgtaatggacatagttgatgaccttcttaaccttccagatttcgagcctacagaaacagttttgaacttgctggtaactggatgtgtataccctggcatagcagaaaacatcggtgagtctatcacaataggaggaagattaattctacctcatgtacctgcaattcttcagtatctcagcaaaaccacaataagcgcagaaaaggtgaaaaagaaaaagaatagagcacaagtcagtaaagagcttggcattctttcaaagatcagcaagtttatgaaagacaaagaacaaagttctgtactcattacgcttctccttccattcctccaccgtggcaatattgctgaggatacagaggttgatattctggtgacagtacaaaacttgttaaagcattgtgtggaccctacaagcttcctcaagcctatagcaaaacttttctcagttattaagaacaaattgtcaagaaaattgctttgtacggtttttgagactctttctgattttgagagtgggttaaaatatattactgatgttgtcaagcttaacgccttcgatcaaagacatcttgatgatatcaacttcgacgttcgctttgagactttccagaccatcacctcttacattaaagaaatgcaaattgtggatgttaactacctaattccagttatgcataattgtttctataatctagagttaggagatatgagtttaagtgataatgccagcatgtgcctgatgagtatcatcaaaaagctagctgccttgaatgtcacagagaaagactatagagaaatcatccaccgttcactcctggagaaattgagaaaaggtctgaagagccagacagagagtattcagcaggattataccacaatactttcctgtttaattcaaacctttccaaaccaactggaattcaaagacttggtacaacttactcattaccatgacccagaaatggacttctttgagaacatgaagcacattcagatccacagaagagcaagagccttgaagaaacttgcaaaacaactaatggaaggcaaagttgttctgtcttctaaatctcttcagaattacatcatgccttatgccatgactccaatttttgatgagaaaatgctcaagcatgaaaatataaccactgctgccacagagattattggagccatttgcaaacatctctcttggtcagcgtatatgtattacttgaaacatttcattcatgtcttacaaacgggacagatcaatcaaaaactgggtgtcagtttgctagtaatagtgttagaagcattccactttgaccacaaaactcttgaagaacaaatgggaaaaattgagaatgaagaaaacgcaattgaagcaattgagttaccagagcctgaggccatggaattagagcgtgtggatgaggaagagaaggaatatacatgcaagagtttgtcagacaacggacaaccgggaacccctgatccagctgactctggaggaacatcagctaaagaatccgagtgtatcacaaagcctgtctctttccttcctcaaaacaaggaagaaatagagagaacaattaaaaatatccaaggaaccataaccggggatattctccccaggctacataaatgccttgcatctacgactaaaagggaagaagaacacaagcttgtcaagtcaaaggttgtgaatgatgaggaagtcgttcgagttccattagcttttgccatggttaaactaatgcagtcccttccacaagaagttatggaagctaatctgccaagtattttgctgaaagtgtgtgccctactcaagaacagagcccaagaaatcagagacattgcacgcagcactcttgcgaaaataatagaggatcttggtgtgcacttcctcctatatgttttaaaagaattacagactactcttgtccgtggataccaggtccatgtgctgactttcaccgttcacatgctgctgcaaggcctcaccaataagctgcaggtcggagatttggactcttgtttagatataatgattgagatttttaaccatgagttgtttggtgctgttgctgaagagaaggaagtaaagcagatcctctccaaagtcatggaagcacgaagaagcaaaagttacgactcttatgaaatcctcggcaagtttgtaggaaaagatcaggttacaaaactcatccttccattaaaagagatcttacaaaataccacgagtttgaaactggcccggaaagttcatgaaactttacgccgaatcacagtgggattaattgtaaatcaggaaatgacagctgaatccattctattactcagttatggtttgatcagtgaaaatcttcccctgttaacagagaaagaaaaaaatccagtagccccagcaccagatccacgtctaccaccccagagctgccttctgcttcccccaactccagttcgaggtggacagaaagctgttgtgagcaggaaaaccaacatgcacatatttattgagtccgggcttcggctgctgcatctgagtctgaagacttccaagatcaagtcttcaggtgaatgtgtcctggaaatgctggatccttttgtgtctctcctcatagactgcctgggctccatggatgtgaaggtgatcacaggtgctttacagtgcctcatctgggtcttgaggttcccgctaccttccatagaaacaaaagcagagcagctgacaaaacacctcttccttctgctgaaggactatgcaaagctcggggccgccaggggccagaacttccaccttgtggtcaattgtttcaagtgtgtgaccatacttgtcaagaaagtcaagtcttaccagataactgaaaaacagctccaagttctactggcctatgctgaggaggacatttatgatacttcaagacaagccactgcctttggtcttctgaaggcaattttatcaagaaagctgttggtcccagaaatcgatgaggtcatgcggaaagtatccaagttggcagtctctgcacaaagcgaacctgccagggtccagtgtagacaggtttttctgaaatatattcttgactatcccctgggtgacaaattgagaccaaacttggaattcatgctcgctcaactgaattacgaacatgagaccgggagagagtccaccttggaaatgatcgcctatctctttgacacgttccctcaggggctgctccatgagaactgcggaatgttctttatccctctttgtctaatgacgatcaatgatgactctgccacgtgcaaaaagatggcatccatgacaatcaagtccctacttggtaaaatcagcctcgagaaaaaagattggctgtttgatatggttaccacttggtttggagcaaaaaagcgcttaaatagacaacttgctgccctgatctgtggcttgtttgtggaaagtgaaggagttgattttgagaaaagacttggaactgtccttcctgtgattgaaaaggaaattgatcctgaaaactttaaagatatcatggaagaaactgaagaaaaagctgcagatcgccttctgtttagttttcttacactgataactaaacttatcaaggaatgtaatattattcagtttaccaaacccgctgagactttgagtaaaatctggagtcatgtgcattctcacctgagacatccacacaactgggtgtggctcacagcagcccagatttttggattactctttgcctcttgccagccagaggagcttattcaaaaatggaataccaaaaagaccaaaaaacacctcccagaacctgtagcaatcaagttcctagccagtgaccttgaccaaaagatgaaaagtatctctctcgcctcttgccatcaattgcattccaaattcttggatcagtctctaggagaacaggttgttaagaatttgttgttcgcagccaaagtcttgtatttactggaactttattgtgaggataagcaaagtaagataaaagaagacctggaagaacaagaagctttagaagatggtgtggcctgtgcagatgagaaggcggagtctgacggagaagagaaggaagaggtgaaggaagagctcggcaggccggccacgctgctgtggttgatccagaagctgtcccggattgcaaaactggaagctgcttattcgccgagaaaccccttaaagagaacatgcatctttaagttcctcggcgccgtagcaatggatcttgggatagacaaggtaaagccgtatctcccaatgatcatagctcc

SEQ ID NO: 22810 - protein, 2785 aa, Homo sapiens
MKTKPVSHKTENTYRFLTFAERLGNVNIDIIHRIDRTASYEEEVETYFFEGLLKWRELNLTEHFGKFYKEVIDKCQSFNQLVYHQNEIVQSLKTHLQVKNSFAYQPLLDLVVQLARDLQMDFYPHFPEFFLTITSILETQDTELLEWAFTSLSYLYKYLWRLMVKDMSSIYSMYSTLLAHKKLHIRNFAAESFTFLMRKVSDKNALFNLMFLDLDKHPEKVEGVGQLLFEMCKGVRNMFHSCTGQAVKLILRKLGPVTETETQLPWMLIGETLKNMVKSTVSYISKEHFGTFFECLQESLLDLHTKVTKTNCCESSEQIKRLLETYLILVKHGSGTKIPTPADVCKVLSQTLQVASLSTSCWETLLDVISALILGENVSLPETLIKETIEKIFESRFEKRLIFSFSEVMFAMKQFEQLFLPSFLSYIVNCFLIDDAVVKDEALAILAKLILNKAAPPTAGSMAIEKYPLVFSPQMVGFYIKQKKTRSKGRNEQFPVLDHLLSIIKLPPNKDTTYLSQSWAALVVLPHIRPLEKEKVIPLVTGFIEALFMTVDKGSFGKGNLFVLCQAVNTLLSLEESSELLHLVPVERVKNLVLTFPLEPSVLLLTDLYYQRLALCGCKGPLSQEALMELFPKLQANISTGVSKIRLLTIRILNHFDVQLPESMEDDGLSERQSVFAILRQAELVPATVNDYREKLLHLRKLRHDVVQTAVPDGPLQEVPLRYLLGMLYINFSALWDPVIELISSHAHEMENKQFWKVYYEHLEKAATHAEKELQNDMTDEKSVGDESWEQTQEGDVGALYHEQLALKTDCQERLDHTNFRFLLWRALTKFPERVEPRSRELSPLFLRFINNEYYPADLQVAPTQDLRRKGKGMVAEEIEEEPAAGDDEELEEEAVPQDESSQKKKTRRAAAKQLIAHLQVFSKFSNPRALYLESKLYELYLQLLLHQDQMVQKITLDCIMTYKHPHVLPYRENLQRLLEDRSFKEEIVHFSISEDNAVVKTAHRADLFPILMRILYGRMKNKTGSKTQGKSASGTRMAIVLRFLAGTQPEEIQIFLDLLFEPVRHFKNGECHSAVIQAVEDLDLSKVLPLGRQHGILNSLEIVLKNISHLISAYLPKILQILLCMTATVSHILDQREKIQLRFINPLKNLRRLGIKMVTDIFLDWESYQFRTEEIDAVFHGAVWPQISRLGSESQYSPTPLLKLISIWSRNARYFPLLAKQKPGHPECDILTNVFAILSAKNLSDATASIVMDIVDDLLNLPDFEPTETVLNLLVTGCVYPGIAENIGESITIGGRLILPHVPAILQYLSKTTISAEKVKKKKNRAQVSKELGILSKISKFMKDKEQSSVLITLLLPFLHRGNIAEDTEVDILVTVQNLLKHCVDPTSFLKPIAKLFSVIKNKLSRKLLCTVFETLSDFESGLKYITDVVKLNAFDQRHLDDINFDVRFETFQTITSYIKEMQIVDVNYLIPVMHNCFYNLELGDMSLSDNASMCLMSIIKKLAALNVTEKDYREIIHRSLLEKLRKGLKSQTESIQQDYTTILSCLIQTFPNQLEFKDLVQLTHYHDPEMDFFENMKHIQIHRRARALKKLAKQLMEGKVVLSSKSLQNYIMPYAMTPIFDEKMLKHENITTAATEIIGAICKHLSWSAYMYYLKHFIHVLQTGQINQKLGVSLLVIVLEAFHFDHKTLEEQMGKIENEENAIEAIELPEPEAMELERVDEEEKEYTCKSLSDNGQPGTPDPADSGGTSAKESECITKPVSFLPQNKEEIERTIKNIQGTITGDILPRLHKCLASTTKREEEHKLVKSKVVNDEEVVRVPLAFAMVKLMQSLPQEVMEANLPSILLKVCALLKNRAQEIRDIARSTLAKIIEDLGVHFLLYVLKELQTTLVRGYQVHVLTFTVHMLLQGLTNKLQVGDLDSCLDIMIEIFNHELFGAVAEEKEVKQILSKVMEARRSKSYDSYEILGKFVGKDQVTKLILPLKEILQNTTSLKLARKVHETLRRITVGLIVNQEMTAESILLLSYGLISENLPLLTEKEKNPVAPAPDPRLPPQSCLLLPPTPVRGGQKAVVSRKTNMHIFIESGLRLLHLSLKTSKIKSSGECVLEMLDPFVSLLIDCLGSMDVKVITGALQCLIWVLRFPLPSIETKAEQLTKHLFLLLKDYAKLGAARGQNFHLVVNCFKCVTILVKKVKSYQITEKQLQVLLAYAEEDIYDTSRQATAFGLLKAILSRKLLVPEIDEVMRKVSKLAVSAQSEPARVQCRQVFLKYILDYPLGDKLRPNLEFMLAQLNYEHETGRESTLEMIAYLFDTFPQGLLHENCGMFFIPLCLMTINDDSATCKKMASMTIKSLLGKISLEKKDWLFDMVTTWFGAKKRLNRQLAALICGLFVESEGVDFEKRLGTVLPVIEKEIDPENFKDIMEETEEKAADRLLFSFLTLITKLIKECNIIQFTKPAETLSKIWSHVHSHLRHPHNWVWLTAAQIFGLLFASCQPEELIQKWNTKKTKKHLPEPVAIKFLASDLDQKMKSISLASCHQLHSKFLDQSLGEQVVKNLLFAAKVLYLLELYCEDKQSKIKEDLEEQEALEDGVACADEKAESDGEEKEEVKEELGRPATLLWLIQKLSRIAKLEAAYSPRNPLKRTCIFKFLGAVAMDLGIDKVKPYLPMIIAPLFRELNSTYSEQDPLLKNLSQEIIELLKKLVGLESFSLAFASVQKQANEKRALRKKRKALEFVTNPDIAAKKKMKKHKNKSEAKKRKIEFLRPGYKAKRQKSHSLKDLAMVE

SEQ ID NO: 22811 - DNA, 593 bp, Homo sapiens
gtagtacatatcttcctgtaataccaatgaattcactcttttgtgtgacattccaagtgagaacacactattagagtagtttgaaatcattacaaatgtctgttcttttcacaattttttcctaagtatatttaaataacaatatatagaatagcaaatgagagttcttcatttggatatgtttatgtttgtgaatataattttccatttctactttatattttaggtctctgataaaaacgcacttttcaatttaatgtttcttgatcttgataaacatccagaaaaagttgaaggtgttggacagttgctctttgaaatgtgcaaaggagttagaaatatgtttcactcctgtacaggccaggcagtgaagctaattttgcgaaagctaggaccagtcactgaaacagaaactcaactaccatggatgttaattggagaaacactcaaaaacatggtcaaatccactgtatcctacatctccaaggaacattttggtacattttttgaatgtttgcaagtgagttctaatctttaaggatgggtttttgataaggagtctaagaatttactgtttctgctctcagttttgc

SEQ ID NO: 22812 - protein, 93 aa, Homo sapiens
MFLDLDKHPEKVEGVGQLLFEMCKGVRNMFHSCTGQAVKLILRKLGPVTETETQLPWMLIGETLKNMVKSTVSYISKEHFGTFFECLQVSSNL

SEQ ID NO: 22813 - DNA, 557 bp, Homo sapiens
ccaggctggctttaaactcctgagctcaagtgatcctctggcctcagcccctcaggtagctgggactacaggcacgtagcactgcacccagctctcttagccttattttgttgttgacttttttcattgtctgtgttaaatatctaatttctattttcatgtttctgtgttttataatatatccatttaaatctattgagttgctcttctagccttttaggcaaataaaacaactcatattttagaattaatgtgcaaacaaataatgtgcttttgccttttcagaattttgtatgggcgaatgaagaataagactgggagtaaaactcaggggaaatctgcttcaggcacccgcatggccattgtcctgcggttcctggccgggacccaacctgaggagatccagatattcttagacctgctgtttgaacctgtgaggcatttcaagaatggagagtgccattctgcagtcattcaagcagtagaagacttggatttgtctaaagttcttcctttaggtcgtcagcacggtatcttaaacagccttgagatagtat

SEQ ID NO: 22814 - protein, 101 aa, Homo sapiens
MCKQIMCFCLFRILYGRMKNKTGSKTQGKSASGTRMAIVLRFLAGTQPEEIQIFLDLLFEPVRHFKNGECHSAVIQAVEDLDLSKVLPLGRQHGILNSLEI

SEQ ID NO: 22815 - DNA, 790 bp, Homo sapiens
gcatttccagagcagagttcagagaaaggctgggctgcttgttgctggctaaaggacaaagggtaagtttcaggaagcagaagagtgagcagatgaaattcagcactgggatcaggggagtgtctgatttgcaaaaggaaagtgcaaagacagctcctcccttctgaggaaacgaaaccaacagcagtccaagctcagtcagcagaagagataaaagcaaacaggtctgggaggcagttctgttgccactctctctcctgtcaatgatggatctcagaaataccccagccaaatctctggacaagttcattgaagactatctcttgccagacacgtgtttccgcatgcaaatcaaccatgccattgacatcatctgtgggttcctgaaggaaaggtgcttccgaggtagctcctaccctgtgtgtgtgtccaaggtggtaaagggtggctcctcaggcaagggcaccaccctcagaggccgatctgacgctgacctggttgtcttcctcagtcctctcaccacttttcaggatcagttaaatcgccggggagagttcatccaggaaattaggagacagctggaagcctgtcaaagagagagagcattttccgtgaagtttgaggtccaggctccacgctggggcaacccccgtgcgctcagcttcgtactgagttcgctccagctcggggagggggtggagttcgatgtgctgcctgcctttgatgccctggctcatcgaggagtgcaccgacctgcagaaagagggcgagttctccacctgcttcacag

SEQ ID NO: 22816 - protein, 174 aa, Homo sapiens
MMDLRNTPAKSLDKFIEDYLLPDTCFRMQINHAIDIICGFLKERCFRGSSYPVCVSKVVKGGSSGKGTTLRGRSDADLVVFLSPLTTFQDQLNRRGEFIQEIRRQLEACQRERAFSVKFEVQAPRWGNPRALSFVLSSLQLGEGVEFDVLPAFDALAHRGVHRPAERGRVLHLL

SEQ ID NO: 22817 - DNA, 1550 bp, Homo sapiens
gcatttccagagcagagttcagagaaaggctgggctgcttgttgctggctaaaggacaaagggtaagtttcaggaagcagaagagtgagcagatgaaattcagcactgggatcaggggagtgtctgatttgcaaaaggaaagtgcaaagacagctcctcccttctgaggaaacgaaaccaacagcagtccaagctcagtcagcagaagagataaaagcaaacaggtctgggaggcagttctgttgccactctctctcctgtcaatgatggatctcagaaataccccagccaaatctctggacaagttcattgaagactatctcttgccagacacgtgtttccgcatgcaaatcaaccatgccattgacatcatctgtgggttcctgaaggaaaggtgcttccgaggtagctcctaccctgtgtgtgtgtccaaggtggtaaagggtggctcctcaggcaagggcaccaccctcagaggccgatctgacgctgacctggttgtcttcctcagtcctctcaccacttttcaggatcagttaaatcgccggggagagttcatccaggaaattaggagacagctggaagcctgtcaaagagagagagcattttccgtgaagtttgaggtccaggctccacgctggggcaacccccgtgcgctcagcttcgtactgagttcgctccagctcggggagggggtggagttcgatgtgctgcctgcctttgatgccctgggtcagttgactggcggctataaacctaacccccaaatctatgtcaagctcatcgaggagtgcaccgacctgcagaaagagggcgagttctccacctgcttcacagaactacagagagacttcctgaagcagcgccccaccaagctcaagagcctcatccgcctagtcaagcactggtaccaaaattgtaagaagaagcttgggaagctgccacctcagtatgccctggagctcctgacggtctatgcttgggagcgagggagcatgaaaacacatttcaacacagcccagggatttcggacggtcttggaattagtcataaactaccagcaactctgcatctactggacaaagtattatgactttaaaaaccccattattgaaaagtacctgagaaggcagctcacgaaacccaggcctgtgatcctggacccggcggaccctacaggaaacttgggtggtggagacccaaagggttggaggcagctggcacaagaggctgaggcctggctgaattacccatgctttaagaattgggatgggtccccagtgagctcctggattctgctggtgagacctcctgcttcctccctgccattcatccctgcccctctccatgaagcttgagacatatagctggagaccattctttccaaagaacttacctcttgccaaaggccatttatattcatatagtgacaggctgtgctccatattttacagtcattttggtcacaatcgagggtttctggaattttcacatcccttgtccagaattcattcccctaagagtaataataaataatctctaacaccatt

SEQ ID NO: 22818 - protein, 364 aa, Homo sapiens; identical to SEQ ID NO: 3009

SEQ ID NO: 22819 - DNA, 1635 bp, Homo sapiens
gcatttccagagcagagttcagagaaaggctgggctgcttgttgctggctaaaggacaaagggtaagtttcaggaagcagaagagtgagcagatgaaattcagcactgggatcaggggagtgtctgatttgcaaaaggaaagtgcaaagacagctcctcccttctgaggaaacgaaaccaacagcagtccaagctcagtcagcagaagagataaaagcaaacaggtctgggaggcagttctgttgccactctctctcctgtcaatgatggatctcagaaataccccagccaaatctctggacaagttcattgaagactatctcttgccagacacgtgtttccgcatgcaaatcaaccatgccattgacatcatctgtgggttcctgaaggaaaggtgcttccgaggtagctcctaccctgtgtgtgtgtccaaggtggtaaagggtggctcctcaggcaagggcaccaccctcagaggccgatctgacgctgacctggttgtcttcctcagtcctctcaccacttttcaggatcagttaaatcgccggggagagttcatccaggaaattaggagacagctggaagcctgtcaaagagagagagcattttccgtgaagtttgaggtccaggctccacgctggggcaacccccgtgcgctcagcttcgtactgagttcgctccagctcggggagggggtggagttcgatgtgctgcctgcctttgatgccctgggtcagttgactggcggctataaacctaacccccaaatctatgtcaagctcatcgaggagtgcaccgacctgcagaaagagggcgagttctccacctgcttcacagaactacagagagacttcctgaagcagcgccccaccaagctcaagagcctcatccgcctagtcaagcactggtaccaaaattgtaagaagaagcttgggaagctgccacctcagtatgccctggagctcctgacggtctatgcttgggagcgagggagcatgaaaacacatttcaacacagcccagggatttcggacggtcttggaattagtcataaactaccagcaactctgcatctactggacaaagtattatgactttaaaaaccccattattgaaaagtacctgagaaggcagctcacgaaacccaggcctgtgatcctggacccggcggaccctacaggaaacttgggtggtggagacccaaagggttggaggcagctggcacaagaggctgaggcctggctgaattacccatgctttaagaattgggatgggtccccagtgagctcctggattctgctggtgagacctcctgcttcctccctgccattcatccctgcccctctccatgaagcttgagacatatagctggagaccattctttccaaagaacttacctcttgccaaaggccatttatattcatatagtgacaggctgtgctccatattttacagtcattttggtcacaatcgagggtttctggaattttcacatcccttgtccagaattcattcccctaagagtaataataaataatctctaacaccatttattgactgtctgcttcgggctcaggttctgtcctaagccctttaatatgcactctctcattaaatagtcacaacaatcccatga

SEQ ID NO: 22820 - protein, 364 aa, Homo sapiens; identical to SEQ ID NO: 3009

SEQ ID NO: 22821 - DNA, 1820 bp, Homo sapiens
gcatttccagagcagagttcagagaaaggctgggctgcttgttgctggctaaaggacaaagggtaagtttcaggaagcagaagagtgagcagatgaaattcagcactgggatcaggggagtgtctgatttgcaaaaggaaagtgcaaagacagctcctcccttctgaggaaacgaaaccaacagcagtccaagctcagtcagcagaagagataaaagcaaacaggtctgggaggcagttctgttgccactctctctcctgtcaatgatggatctcagaaataccccagccaaatctctggacaagttcattgaagactatctcttgccagacacgtgtttccgcatgcaaatcaaccatgccattgacatcatctgtgggttcctgaaggaaaggtgcttccgaggtagctcctaccctgtgtgtgtgtccaaggtggtaaagggtggctcctcaggcaagggcaccaccctcagaggccgatctgacgctgacctggttgtcttcctcagtcctctcaccacttttcaggatcagttaaatcgccggggagagttcatccaggaaattaggagacagctggaagcctgtcaaagagagagagcattttccgtgaagtttgaggtccaggctccacgctggggcaacccccgtgcgctcagcttcgtactgagttcgctccagctcggggagggggtggagttcgatgtgctgcctgcctttgatgccctgggtcagttgactggcggctataaacctaacccccaaatctatgtcaagctcatcgaggagtgcaccgacctgcagaaagagggcgagttctccacctgcttcacagaactacagagagacttcctgaagcagcgccccaccaagctcaagagcctcatccgcctagtcaagcactggtaccaaaattgtaagaagaagcttgggaagctgccacctcagtatgccctggagctcctgacggtctatgcttgggagcgagggagcatgaaaacacatttcaacacagcccagggatttcggacggtcttggaattagtcataaactaccagcaactctgcatctactggacaaagtattatgactttaaaaaccccattattgaaaagtacctgagaaggcagctcacgaaacccaggcctgtgatcctggacccggcggaccctacaggaaacttgggtggtggagacccaaagggttggaggcagctggcacaagaggctgaggcctggctgaattacccatgctttaagaattgggatgggtccccagtgagctcctggattctgctggctgaaagcaacagtgcagacgatgagaccgacgatcccaggaggtatcagaaatatggttacattggaacacatgagtaccctcatttctctcatagacccagcacactccaggcagcatccaccccacaggcagaagaggactggacctgcaccatcctctgaatgccagtgcatcttgggggaaagggctccagtgttatctggaccagttccttcattttcaggtgggactcttgatccagagaggacaaagctcctcagtgagctggtgtataatccaggacagaacccaggtctcctgactcctggccttctatgccctctatcctatcatagataacattctccacagcctcacttcattccacctattctctgaaaatattccctgagagagaacagagagatttagataagagaatgaaattccagccttgactttcttctgtgcacctgatgggagggtaatgtctaatgtattatcaataacaataaaaataaagcaaataccattta

SEQ ID NO: 22822 - protein, 400 aa, Homo sapiens; identical to SEQ ID NO: 3011

SEQ ID NO: 22823 - DNA, 866 bp, Homo sapiens
agtccaagctcagtcagcagaagagataaaagcaaacaggtctgggaggcagttctgttgccactctctctcctgtcaatgatggatctcagaaataccccagccaaatctctggacaagttcattgaagactatctcttgccagacacgtgtttccgcatgcaaatcaaccatgccattgacatcatctgtgggttcctgaaggaaaggtgcttccgaggtagctcctaccctgtgtgtgtgtccaaggtggtaaagtgtaagaagaagcttgggaagctgccacctcagtatgccctggagctcctgacggtctatgcttgggagcgagggagcatgaaaacacatttcaacacagcccagggatttcggacggtcttggaattagtcataaactaccagcaactctgcatctactggacaaagtattatgactttaaaaaccccattattgaaaagtacctgagaaggcagctcacgaaacccaggtatgctatccccacatggcttagctcccctatgtaaatgaacacctggatacaggtacagtgccttggaaatggaggaggtgggagggctccccacttagtgagaatctcctgttgcccatcattgtactgggcattttactactgccatctgttttaaacacctacctccaaccctgtgaggcaggcactatgccaattattttacaggtgagtaaactgaggttctgagaggtaaggagcttgtccaacccttaacagaaaatgagtaaaatagctgcagtttgaactgaaataagaacagcagcaacaacaatgatagtaattgctcccaggtattgaaagcttgttgtaagactaacacatgctaatataata

SEQ ID NO: 22824 - protein, 148 aa, Homo sapiens
MMDLRNTPAKSLDKFIEDYLLPDTCFRMQINHAIDIICGFLKERCFRGSSYPVCVSKVVKCKKKLGKLPPQYALELLTVYAWERGSMKTHFNTAQGFRTVLELVINYQQLCIYWTKYYDFKNPIIEKYLRRQLTKPRYAIPTWLSSPM

SEQ ID NO: 22825 - DNA, 510 bp, Homo sapiens
agtccaagctcagtcagcagaagagataaaagcaaacaggtctgggaggcagttctgttgccactctctctcctgtcaatgatggatctcagaaataccccagccaaatctctggacaagttcattgaagactatctcttgccagacacgtgtttccgcatgcaaatcaaccatgccattgacatcatctgtgggttcctgaaggaaaggtgcttccgaggtagctcctaccctgtgtgtgtgtccaaggtggtaaagggtggctcctcaggcaagggcaccaccctcagaggccgatctgatcctggccttctatgccctctatcctatcatagataacattctccacagcctcacttcattccacctattctctgaaaatattccctgagagagaacagagagatttagataagagaatgaaattccagccttgactttcttctgtgcacctgatgggagggtaatgtctaatgtattatcaataacaataaaaataaagcaaatacc

SEQ ID NO: 22826 - protein, 86 aa, Homo sapiens
MMDLRNTPAKSLDKFIEDYLLPDTCFRMQINHAIDIICGFLKERCFRGSSYPVCVSKVVKGGSSGKGTTLRGRSDPGLLCPLSYHR

SEQ ID NO: 22827 - DNA, 402 bp, Homo sapiens
ggaggtatcagaaatatggttacattggaacacatgagtacccatcctctgaatgccagtgcatcttgggggaaagggctccagtgttatctggaccagttccttcattttcaggtgggactcttgatccagagaggacaaagctcctcagtgagctggtgtataatccaggacagaacccaggtctcctgactcctggccttctatgccctctatcctatcatagataacattctccacagcctcacttcattccacctattctctgaaaatattccctgagagagaacagagagatttagataagagaatgaaattccagccttgactttcttctgtgcacctgatgggagggtaatgtctaatgtattatcaataacaataaaaataaagcaaatacca

SEQ ID NO: 22828 - protein, 58 aa, Homo sapiens
MVTLEHMSTHPLNASASWGKGLQCYLDQFLHFQVGLLIQRGQSSSVSWCIIQDRTQVS

SEQ ID NO: 22829 - DNA, 6717 bp, Homo sapiens
cccaagtttggggaagacaggaactgcagcgcccctccccgtttcacgccacgcgcgggaccgaggacctaggacctggccagctgggcgtggttcggagagccgggcgggaaaacgaaaccagaaatccgaaggccgcgccagagccctgcttccccttgcacctgcgccgggcggccatggacttgtacagcaccccggccgctgcgctggacaggttcgtggccagaaggctgcagccgcggaaggagttcgtagagaaggcgcggcgcgctctgggcgccctggccgctgccctgagggagcgcgggggccgcctcggtgctgctgccccgcgggtgctgaaaactgtcaagggaggctcctcgggccggggcacagctctcaagggtggctgtgattctgaacttgtcatcttcctcgactgcttcaagagctatgtggaccagagggcccgccgtgcagagatcctcagtgagatgcgggcatcgctggaatcctggtggcagaacccagtccctggtctgagactcacgtttcctgagcagagcgtgcctggggccctgcagttccgcctgacatccgtagatcttgaggactggatggatgttagcctggtgcctgccttcaatgtcctgggtcaggccggctccggcgtcaaacccaagccacaagtctactctaccctcctcaacagtggctgccaagggggcgagcatgcggcctgcttcacagagctgcggaggaactttgtgaacattcgcccagccaagttgaagaacctaatcttgctggtgaagcactggtaccaccaggtgtgcctacaggggttgtggaaggagacgctgcccccggtctatgccctggaattgctgaccatcttcgcctgggagcagggctgtaagaaggatgctttcagcctagccgaaggcctccgaactgtcctgggcctgatccaacagcatcagcacctgtgtgttttctggactgtcaactatggcttcgaggaccctgcagttgggcagttcttgcagcggcagcttaagagacccaggcctgtgatcctggacccagctgaccccacatgggacctggggaatggggcagcctggcactgggatttgctagcccaggaggcagcatcctgctatgaccacccatgctttctgagggggatgggggacccagtgcagtcttggaaggggccgggccttccacgtgctggatgctcaggtttgggccaccccatccagctagaccctaaccagaagacccctgaaaacagcaagagcctcaatgctgtgtacccaagagcagggagcaaacctccctcatgcccagctcctggccccactggggcagccagcatcgtcccctctgtgccgggaatggccttggacctgtctcagatccccaccaaggagctggaccgcttcatccaggaccacctgaagccgagcccccagttccaggagcaggtgaaaaaggccattgacatcatcttgcgctgcctccatgagaactgtgttcacaaggcctcaagagtcagtaaagggggctcatttggccggggcacagacctaagggatggctgtgatgttgaactcatcatcttcctcaactgcttcacggactacaaggaccaggggccccgccgcgcagagatccttgatgagatgcgagcgcagctagaatcctggtggcaggaccaggtgcccagcctgagccttcagtttcctgagcagaatgtgcctgaggctctgcagttccagctggtgtccacagccctgaagagctggacggatgttagcctgctgcctgccttcgatgctgtggggcagctcagttctggcaccaaaccaaatccccaggtctactcgaggctcctcaccagtggctgccaggagggcgagcataaggcctgcttcgcagagctgcggaggaacttcatgaacattcgccctgtcaagctgaagaacctgattctgctggtgaagcactggtaccgccaggttgcggctcagaacaaaggaaaaggaccagcccctgcctctctgcccccagcctatgccctggagctcctcaccatctttgcctgggagcagggctgcaggcaggattgtttcaacatggcccaaggcttccggacggtgctggggctcgtgcaacagcatcagcagctctgtgtctactggacggtcaactatagcactgaggacccagccatgagaatgcaccttcttggccagcttcgaaaacccagacccctggtcctggaccccgctgatcccacctggaacgtgggccacggtagctgggagctgttggcccaggaagcagcagcgctggggatgcaggcctgctttctgagtagagacgggacatctgtgcagccctgggatgtgatgccagccctcctttaccaaaccccagctggggaccttgacaagttcatcagtgaatttctccagcccaaccgccagttcctggcccaggtgaacaaggccgttgataccatctgttcatttttgaaggaaaactgcttccggaattctcccatcaaagtgatcaaggtggtcaagggtggctcttcagccaaaggcacagctctgcgaggccgctcagatgccgacctcgtggtgttcctcagctgcttcagccagttcactgagcagggcaacaagcgggccgagatcatctccgagatccgagcccagctggaggcatgtcaacaggagcggcagttcgaggtcaagtttgaagtctccaaatgggagaatccccgcgtgctgagcttctcactgacatcccagacgatgctggaccagagtgtggactttgatgtgctgccagcctttgacgccctaggccagctggtctctggctccaggcccagctctcaagtctacgtcgacctcatccacagctacagcaatgcgggcgagtactccacctgcttcacagagctacaacgggacttcatcatctctcgccctaccaagctgaagagcctgatccggctggtgaagcactggtaccagcagtgtaccaagatctccaaggggagaggctccctacccccacagcacgggctggaactcctgactgtgtatgcctgggagcagggcgggaaggactcccagttcaacatggctgagggcttccgcacggtcctggagctggtcacccagtaccgccagctctgtatctactggaccatcaactacaacgccaaggacaagactgttggagacttcctgaaacagcagcttcagaagcccaggcctatcatcctggatccggctgacccgacaggcaacctgggccacaatgcccgctgggacctgctggccaaggaagctgcagcctgcacatctgccctgtgctgcatgggacggaatggcatccccatccagccatggccagtgaaggctgctgtgtgaagttgagaaaatcagcggtcctactggatgaagagaagatggacaccagccctcagcatgaggaaattcagggtcccctaccagatgagagagattgtgtacatgtgtgtgtgagcacatgtgtgcatgtgtgtgcacacgtgtgcatgtgtgtgttttagtgaatctgctctcccagctcacacactcccctgcctcccatggcttacacactaggatccagactccatggtttgacaccagcctgcgtttgcagcttctctgtcacttccatgactctatcctcataccaccactgctgcttcccacccagctgagaatgccccctcctccctgactcctctctgcccatgcaaattagctcacatctttcctcctgctgcaatccatcccttcctcccattggcctctccttgccaaatctaaatagtttatatagggatggcagagagttcccatctcatctgtcagccacagtcatttggtactggctacctggagccttatcttctgaagggttttaaagaatggccaattagctgagaagaattatctaatcaattagtgatgtctgccatggatgcagtagaggaaagtggtggtacaagtgccatgattgattagcaatgtctgcactggatacggaaaaaagaaggtgcttgcaggtttacagtgtatatgtgggctattgaagagccctctgagctcggttgctagcaggagagcatgcccatattggcttactttgtctgccacagacacagacagagggagttgggacatgcatgctatggggaccctcttgttggacacctaattggatgcctcttcatgagaggcctccttttcttcaccttttatgctgcactcctcccctagtttacacatcttgatgctgtggctcagtttgccttcctgaatttttattgggtccctgttttctctcctaacatgctgagattctgcatccccacagcctaaactgagccagtggccaaacaaccgtgctcagcctgtttctctctgccctctagagcaaggcccaccaggtccatccaggaggctctcctgacctcaagtccaacaacagtgtccacactagtcaaggttcagcccagaaaacagaaagcactctaggaatcttaggcagaaagggattttatctaaatcactggaaaggctggaggagcagaaggcagaggccaccactggactattggtttcaatattagaccactgtagccgaatcagaggccagagagcagccactgctactgctaatgccaccactacccctgccatcactgccccacatggacaaaactggagtcgagacctaggttagattcctgcaaccacaaacatccatcagggatggccagctgccagagctgcgggaagacggatcccacctccctttcttagcagaatctaaattacagccagacctctggctgcagaggagtctgagacatgtatgattgaatgggtgccaagtgccagggggcggagtccccagcagatgcatcctggccatctgttgcgtggatgagggagtgggtctatctcagaggaaggaacaggaaacaaagaaaggaagccactgaacatcccttctctgctccacaggagtgccttagacagcctgactctccacaaaccactgttaaaacttacctgctaggaatgctagattgaatgggatgggaagagccttccctcattattgtcattcttggagagaggtgagcaaccaagggaagctcctctgattcacctagaacctgttctctgccgtctttggctcagcctacagagactagagtaggtgaagggacagaggacagggcttctaatacctgtgccatattgacagcctccatccctgtcccccatcttggtgctgaaccaacgctaagggcaccttcttagactcacctcatcgatactgcctggtaatccaaagctagaactctcaggaccccaaactccacctcttggattggccctggctgctgccacacacatatccaagagctcagggccagttctggtgggcagcagagacctgctctgccaagttgtccagcagcagagtggccctggcctgggcatcacaagccagtgatgctcctgggaagaccaggtggcaggtcgcagttgggtaccttccattcccaccacacagactctgggcctccccgcaaaatggctccagaattagagtaattatgagatggtgggaaccagagcaactcaggtgcatgatacaaggagaggttgtcatctgggtagggcagagaggagggcttgctcatctgaacaggggtgtatttcattccaggccctcagtctttggcaatggccaccctggtgttggcatattggccccactgtaacttttgggggcttcccggtctagccacaccctcggatggaaagacttgactgcataaagatgtcagttctccctgagttgattgataggcttaatggtcaccctaaaaacacccacatatgcttttcgatggaaccaggtaagttgacgctaaagttcttatggaaaaatacacacgcaatagctaggaaaacacagggaaagaagagttctgagcagggcctagtcttagccaatattaaaacatactatgaagcctctgatacttaaacagcatggcgctggtacgtaaatagaccaatgcagttaggtggctctttccaagactctggggaaaaaagtagtaaaaagctaaatgcaatcaatcagcaattgaaagctaagtgagagagccagagggcctccttggtggtaaaagagggttgcatttcttgcagccagaaggcagagaaagtgaagaccaagtccagaactgaatcctaagaaatgcaggactgcaaagaaattggtgtgtgtgtgtgtgtgtgtgtgtgtgtgtgtgtttaatttttaaaaagtttttattgagatacaagtcaataccataaagctctcacccttctaaagtgtacaattcagtggtgtgagtatattcataagatttatacttggtgtctattcataagacttatatccagcatattcataactagagccatatcacagatgcattcatcataataattccagacattttcatcaccctaaaaggaaaccctgaaacccattagcagtcattccccattcctccaacccattctctccctaatccctagaaaccaccaatctgctgtgtatttcatctattgccaacatttcatataaatggcatcatac

SEQ ID NO: 22830 - protein, 1087 aa, Homo sapiens; identical to SEQ ID NO: 3013

SEQ ID NO: 22831 - DNA, 993 bp, Homo sapiens
gttcggagagccgggcgggaaaacgaaaccagaaatccgaaggccgcgccagagccctgcttccccttgcacctgcgccgggcggccatggacttgtacagcaccccggccgctgcgctggacaggttcgtggccagaaggctgcagccgcggaaggagttcgtagagaaggcgcggcgcgctctgggcgccctggccgctgccctgagggagcgcgggggccgcctcggtgctgctgccccgcgggtgctgaaaactgtcaagggaggctcctcgggccggggcacagctctcaagggtggctgtgattctgaacttgtcatcttcctcgactgcttcaagagctatgtggaccagagggcccgccgtgcagagatcctcagtgagatgcgggcatcgctggaatcctggtggcagaacccagtccctggtctgagactcacgtttcctgagcagagcgtgcctggggccctgcagttccgcctgacatccgtagatcttgaggactggatggatgttagcctggtgcctgccttcaatgtcctgggtgaggggttcctagaccattccagggttgggggcaaaagatcattgggaacaacacaggacttccaattctagcccagccaccaacttgctgtttgacctgggccagcctctacccctctctcagcctcagtctggggactaaacatattggacttgtgccagacaaaggcagagaaaccccagttcctcctggatctgtggtcctgctgtcaagatgcttggccctcccacaggcatctgggagtttccctcagccactgcctggagcggttactgctcagcccttccacaaatactcccgaaagctaagccaagtggacatgtggctagcagtaggggcctggggacgaaaccagaattctgcaaaatcttgtattttatgttgaaaacatcaatgtgatttttgtgttctccttcgtaatacacgtatgcttgagttaagat

SEQ ID NO: 22832 - protein, 177 aa, Homo sapiens
MDLYSTPAAALDRFVARRLQPRKEFVEKARRALGALAAALRERGGRLGAAAPRVLKTVKGGSSGRGTALKGGCDSELVIFLDCFKSYVDQRARRAEILSEMRASLESWWQNPVPGLRLTFPEQSVPGALQFRLTSVDLEDWMDVSLVPAFNVLGEGFLDHSRVGGKRSLGTTQDFQF

SEQ ID NO: 22833 - DNA, 1387 bp, Homo sapiens
gttcggagagccgggcgggaaaacgaaaccagaaatccgaaggccgcgccagagccctgcttccccttgcacctgcgccgggcggccatggacttgtacagcaccccggccgctgcgctggacaggttcgtggccagaaggctgcagccgcggaaggagttcgtagagaaggcgcggcgcgctctgggcgccctggccgctgccctgagggagcgcgggggccgcctcggtgctgctgccccgcgggtgctgaaaactgtcaagggaggctcctcgggccggggcacagctctcaagggtggctgtgattctgaacttgtcatcttcctcgactgcttcaagagctatgtggaccagagggcccgccgtgcagagatcctcagtgagatgcgggcatcgctggaatcctggtggcagaacccagtccctggtctgagactcacgtttcctgagcagagcgtgcctggggccctgcagttccgcctgacatccgtagatcttgaggactggatggatgttagcctggtgcctgccttcaatgtcctgggtcaggccggctccggcgtcaaacccaagccacaagtctactctaccctcctcaacagtggctgccaagggggcgagcatgcggcctgcttcacagagctgcggaggaactttgtgaacattcgcccagccaagttgaagaacctaatcttgctggtgaagcactggtaccaccaggtgaagccacttggaagggtttctccagacatgtgactgtttgctttgtgctttcatagtcgtgaaactgttgtcttacatttagtggccattcatgttctctctctgggaattgtctgtttatgtcccttgtgcattattttctcttgggttagctgtcttgttactgatttgttgaagctctttatatattgtggatactgatccttatttagttaatataatgcattcttccaatagtcttccagtctgtgtcttgggcttttgctttgtttaaaggttatttgtaggacaaaatatctacagtttaatgtactcagatatatcctttgaaaaatgagttattctttgtgtgtcttaagaagtctttccctatcctgccaggtgcagtggctcatggctggaatcccagcactttgagtggccgaggcaggtggatcacttgaggtcaggagttcaagaccagcctggccaacatggtgaaaccctgtctctactaaaaatacaaaatgtagccgggcgtggtggtacacacctgtaattccagttactcgggaggctgaggcaggagaatctcttgaacccaggaggcagaggttgcagtaagccaagattgcaccactgcactccagcctgggtgacagagccagactccatctcaagg

SEQ ID NO: 22834 - protein, 223 aa, Homo sapiens
MDLYSTPAAALDRFVARRLQPRKEFVEKARRALGALAAALRERGGRLGAAAPRVLKTVKGGSSGRGTALKGGCDSELVIFLDCFKSYVDQRARRAEILSEMRASLESWWQNPVPGLRLTFPEQSVPGALQFRLTSVDLEDWMDVSLVPAFNVLGQAGSGVKPKPQVYSTLLNSGCQGGEHAACFTELRRNFVNIRPAKLKNLILLVKHWYHQVKPLGRVSPDM

SEQ ID NO: 22835 - DNA, 547 bp, Homo sapiens
accccggccgctgcgctggacaggttcgtggccagaaggctgcagccgcggaaggagttcgtagagaaggcgcggcgcgctctgggcgccctggccgctgccctgagggagcgcgggggccgcctcggtgctgctgccccgcgggtgctgaaaactgtcaaggtcaggccggctccggcgtcaaacccaagccacaagtctactctaccctcctcaacagtggctgccaagggggcgagcatgcggcctgcttcacagagctgcggaggaactttgtgaacattcgcccagccaagttgaagaacctaatcttgctggtgaagcactggtaccaccaggtgtgcctacaggggttgtggaaggagacgctgcccccggtctatgccctggaattgctgaccatcttcgcctgggagcagggctgtaagaaggatgctttcagcctagccgaaggcctccgaactgtcctgggcctgatccaacagcatcagcacctgtgtgttttctggactgtcaactatggcttcgaggaccctgcagttgggca

SEQ ID NO: 22836 - protein, 180 aa, Homo sapiens
PGRCAGQVRGQKAAAAEGVRREGAARSGRPGRCPEGARGPPRCCCPAGAENCQGQAGSGVKPKPQVYSTLLNSGCQGGEHAACFTELRRNFVNIRPAKLKNLILLVKHWYHQVCLQGLWKETLPPVYALELLTIFAWEQGCKKDAFSLAEGLRTVLGLIQQHQHLCVFWTVNYGFEDPAV

SEQ ID NO: 22837 - DNA, 1032 bp, Homo sapiens
cggccgctgcgctggacaggttcgtggccagaaggctgcagccgcggaaggagttcgtagagaaggcgcggcgcgctctgggcgccctggccgctgccctgagggagcgcgggggccgcctcggtgctgctgccccgcgggtgctgaaaactgtcaagggaggctcctcgggccggggcacagctctcaagggtggctgtgattctgaacttgtcatcttcctcgactgcttcaagagctatgtggaccagagggcccgccgtgcagagatcctcagtgagatgcgggcatcgctggaatcctggtggcagaacccagtccctggtctgagactcacgtttcctgagcagagcgtgcctggggccctgcagttccgcctgacatccgtagatcttgaggactggatggatgttagcctggtgcctgccttcaatgtcctgggtgaggggttcctagaccattccagggttgggggcaaaagatcattgggaacaacacaggacttccaattctagcccagccaccaacttgctgtttgacctgggccagcctctacccctctctcagcctcagtctggggactaaacatattggacttgtgccagacaaaggcagagaaaccccagttcctcctggatctgtggtcctgctgtcaagatgcttggccctcccacaggcatctgggagtttccctcagccactgcctggagcggttactgctcagcccttccacaaatactcccgaaagctaagccaagtggacatgtggctagcagtaggggcctggggacgaaaccagaattctgcaaaatcttgtattttatgttgaaaacatcaatgtgatttttgtgttctccttcgtaatacacgtatgcttgagttaagataaaaataggcctctgtgtcctcatctgtaaaatgaggataatactaatggggataatagtaatcttatagagttgtcagaagaattaaatgcattaatatatgtaatcaagcttagaagtgtgtctagtgggccaggcgcagtgg

SEQ ID NO: 22838 - protein, 77 aa, Homo sapiens
MRASLESWWQNPVPGLRLTFPEQSVPGALQFRLTSVDLEDWMDVSLVPAFNVLGEGFLDHSRVGGKRSLGTTQDFQF

SEQ ID NO: 22839 - DNA, 440 bp, Homo sapiens
tgattgattaacaatgcctcccctgaataaggaaggggtaagcggtagcaccgtggttgattagtaatgtttgcctgaatgcagaatggcaaagtggccatgtgtgtcttattttctatacctgccctgtagtgtataggagcactgaggaatctctgagccctggctctagcccctgcaaagtgttagataaaaggggaaaatagtccaaccagtgccacaggtggacacctagatgttgccaggaataagactgtccctgggtgggaattgcaggcctatcatcctggatccggctgacccgacaggcaacctgggccacaatgcccgctgggacctgctggccaaggaagctgcagcctgcacatctgccctgtgctgcatgggacggaatggcatccccatccagccatggccagtgaaggctgctgtgtgaagtt

SEQ ID NO: 22840 - protein, 66 aa, Homo sapiens
MLPGIRLSLGGNCRPIILDPADPTGNLGHNARWDLLAKEAAACTSALCCMGRNGIPIQPWPVKAAV

SEQ ID NO: 22841 - DNA, 3111 bp, Homo sapiens
gcaaggggcagggcagagcctctgagcttaagttagttttgtttccctgtcccggatacaagagttggtaagctcgctgcagtgggtggagagaggcctctagacttcagtttcagtttcctggctctgggcagcagcaagaattcctctgcctcccatcctaccattcactgtcttgccggcagccagctgagagcaatgggaaatggggagtcccagctgtcctcggtgcctgctcagaagctgggttggtttatccaggaatacctgaagccctacgaagaatgtcagacactgatcgacgagatggtgaacaccatctgtgacgtcctgcaggaacccgaacagttccccctggtgcagggagtggccataggtggctcctatggacggaaaacagtcttaagaggcaactccgatggtacccttgtcctcttcttcagtgacttaaaacaattccaggatcagaagagaagccaacgtgacatcctcgataaaactggggataagctgaagttctgtctgttcacgaagtggttgaaaaacaatttcgagatccagaagtcccttgatgggttcaccatccaggtgttcacaaaaaatcagagaatctctttcgaggtgctggccgccttcaacgctctgagcttaaatgataatcccagcccctggatctatcgagagctcaaaagatccttggataagacaaatgccagtcctggtgagtttgcagtctgcttcactgaactccagcagaagttttttgacaaccgtcctggaaaactaaaggatttgatcctcttgataaagcactggcatcaacagtgccagaaaaaaatcaaggatttaccctcgctgtctccgtatgccctggagctgcttacggtgtatgcctgggaacaggggtgcagaaaagacaactttgacattgctgaaggcgtcagaaccgtactggagctgatcaaatgccaggagaagctgtgtatctattggatggtcaactacaactttgaagatgagaccatcaggaacatcctgctgcaccagctccaatcagcgaggccagtaatcttggatccagttgacccaaccaataatgtgagtggagataaaatatgctggcaatggctgaaaaaagaagctcaaacctggttgacttctcccaacctggataatgagttacctgcaccatcttggaatgttctgcctgcaccactcttcacgaccccaggccaccttctggataagttcatcaaggagtttctccagcccaacaaatgcttcctagagcagattgacagtgctgttaacatcatccgtacattccttaaagaaaactgcttccgacaatcaacagccaagatccagattgtccggggaggatcaaccgccaaaggcacagctctgaagactggctctgatgccgatctcgtcgtgttccataactcacttaaaagctacacctcccaaaaaaacgagcggcacaaaatcgtcaaggaaatccatgaacagctgaaagccttttggagggagaaggaggaggagcttgaagtcagctttgagcctcccaagtggaaggctcccagggtgctgagcttctctctgaaatccaaagtcctcaacgaaagtgtcagctttgatgtgcttcctgcctttaatgcactgggtcagctgagttctggctccacacccagccccgaggtttatgcagggctcattgatctgtataaatcctcggacctcccgggaggagagttttctacctgtttcacagtcctgcagcgaaacttcattcgctcccggcccaccaaactaaaggatttaattcgcctggtgaagcactggtacaaagagtgtgaaaggaaactgaagccaaaggggtctttgcccccaaagtatgccttggagctgctcaccatctatgcctgggagcaggggagtggagtgccggattttgacactgcagaaggtttccggacagtcctggagctggtcacacaatatcagcagctctgcatcttctggaaggtcaattacaactttgaagatgagaccgtgaggaagtttctactgagccagttgcagaaaaccaggcctgtgatcttggacccagccgaacccacaggtgacgtgggtggaggggaccgttggtgttggcatcttctggcaaaagaagcaaaggaatggttatcctctccctgcttcaaggatgggactggaaacccaataccaccttggaaagtgccggtaaaagtcatctaaaggaggcgttgtctggaaatagccctgtaacaggcttgaatcaaagaacttctcctactgtagcaacctgaaattaactcagacacaaataaaggaaacccagctcacaggagcttaaacagctggtcagccccctaagcccccactacaagtgatcctcaggcaggtaaccccagattcatgcactgtagggtgctgcgcagcatccctagtctctacccagtagatgccactagccctcctctcccagtgacaaccaaaagtcttcagacattgtcaaacgttcccctgggttcacagatctttctgcctttggcttttggctccaccctctttagctgttaatttgagtacttatggccctgaaagcggccacggtgcctccagatggcaggtttgcaatccaagcaggaagaaggaaaagatacccaaaggtcaagaacacagtgattttattagaagtttcatccgcaaattttcttccatttcattgctcagaaatgtcatgtggctacctgtaacttgaaggtggctacaaagatgactgtggacgtgggttgcactggccacccaaggatgtctgccacacctctccaaagccctccctacctaccaagatatacctgatatattccaccaggatatcctccctccagatatacttggttctctccaccaggttctttctttaaagcaggatttctcaactttgatacttactcacatttggggctagacagttctttgtttggaggctctcttgtgcattgtaggatgttgagcagcatctctggcctgtacccagtagatgccacccagttgtgacaattaaaagtgtcttgagacttt

SEQ ID NO: 22842 - protein, 687 aa, Homo sapiens; identical to SEQ ID NO: 3017

SEQ ID NO: 22843 - DNA, 4223 bp, Homo sapiens
gcaaggggcagggcagagcctctgagcttaagttagttttgtttccctgtcccggatacaagagttggtaagctcgctgcagtgggtggagagaggcctctagacttcagtttcagtttcctggctctgggcagcagcaagaattcctctgcctcccatcctaccattcactgtcttgccggcagccagctgagagcaatgggaaatggggagtcccagctgtcctcggtgcctgctcagaagctgggttggtttatccaggaatacctgaagccctacgaagaatgtcagacactgatcgacgagatggtgaacaccatctgtgacgtcctgcaggaacccgaacagttccccctggtgcagggagtggccataggtggctcctatggacggaaaacagtcttaagaggcaactccgatggtacccttgtcctcttcttcagtgacttaaaacaattccaggatcagaagagaagccaacgtgacatcctcgataaaactggggataagctgaagttctgtctgttcacgaagtggttgaaaaacaatttcgagatccagaagtcccttgatgggttcaccatccaggtgttcacaaaaaatcagagaatctctttcgaggtgctggccgccttcaacgctctgagcttaaatgataatcccagcccctggatctatcgagagctcaaaagatccttggataagacaaatgccagtcctggtgagtttgcagtctgcttcactgaactccagcagaagttttttgacaaccgtcctggaaaactaaaggatttgatcctcttgataaagcactggcatcaacagtgccagaaaaaaatcaaggatttaccctcgctgtctccgtatgccctggagctgcttacggtgtatgcctgggaacaggggtgcagaaaagacaactttgacattgctgaaggcgtcagaaccgtactggagctgatcaaatgccaggagaagctgtgtatctattggatggtcaactacaactttgaagatgagaccatcaggaacatcctgctgcaccagctccaatcagcgaggccagtaatcttggatccagttgacccaaccaataatgtgagtggagataaaatatgctggcaatggctgaaaaaagaagctcaaacctggttgacttctcccaacctggataatgagttacctgcaccatcttggaatgttctgcctgcaccactcttcacgaccccaggccaccttctggataagttcatcaaggagtttctccagcccaacaaatgcttcctagagcagattgacagtgctgttaacatcatccgtacattccttaaagaaaactgcttccgacaatcaacagccaagatccagattgtccggggaggatcaaccgccaaaggcacagctctgaagactggctctgatgccgatctcgtcgtgttccataactcacttaaaagctacacctcccaaaaaaacgagcggcacaaaatcgtcaaggaaatccatgaacagctgaaagccttttggagggagaaggaggaggagcttgaagtcagctttgagcctcccaagtggaaggctcccagggtgctgagcttctctctgaaatccaaagtcctcaacgaaagtgtcagctttgatgtgcttcctgcctttaatgcactgggtcagctgagttctggctccacacccagccccgaggtttatgcagggctcattgatctgtataaatcctcggacctcccgggaggagagttttctacctgtttcacagtcctgcagcgaaacttcattcgctcccggcccaccaaactaaaggatttaattcgcctggtgaagcactggtacaaagagtgtgaaaggaaactgaagccaaaggggtctttgcccccaaagtatgccttggagctgctcaccatctatgcctgggagcaggggagtggagtgccggattttgacactgcagaaggtttccggacagtcctggagctggtcacacaatatcagcagctctgcatcttctggaaggtcaattacaactttgaagatgagaccgtgaggaagtttctactgagccagttgcagaaaaccaggcctgtgatcttggacccagccgaacccacaggtgacgtgggtggaggggaccgttggtgttggcatcttctggcaaaagaagcaaaggaatggttatcctctccctgcttcaaggatgggactggaaacccaataccaccttggaaagtgccggtaaaagtcatctaaaggaggcgttgtctggaaatagccctgtaacaggcttgaatcaaagaacttctcctactgtagcaacctgaaattaactcagacacaaataaaggaaacccagctcacaggagcttaaacagctggtcagccccctaagcccccactacaagtgatcctcaggcaggtaaccccagattcatgcactgtagggtgctgcgcagcatccctagtctctacccagtagatgccactagccctcctctcccagtgacaaccaaaagtcttcagacattgtcaaacgttcccctgggttcacagatctttctgcctttggcttttggctccaccctctttagctgttaatttgagtacttatggccctgaaagcggccacggtgcctccagatggcaggtttgcaatccaagcaggaagaaggaaaagatacccaaaggtcaagaacacagtgattttattagaagtttcatccgcaaattttcttccatttcattgctcagaaatgtcatgtggctacctgtaacttgaaggtggctacaaagatgactgtggacgtgggttgcactggccacccaaggatgtctgccacacctctccaaagccctccctacctaccaagatatacctgatatattccaccaggatatcctccctccagatatacttggttctctccaccaggttctttctttaaagcaggatttctcaactttgatacttactcacatttggggctagacagttctttgtttggaggctctcttgtgcattgtaggatgttgagcagcatctctggcctgtacccagtagatgccacccagttgtgacaattaaaagtgtcttgagactttatcatgtgtcttctgccctaggtgagaacccttgcactagaggaaccctacaccccaaccctggggggaatgtagggaagaggtggccaagccaaccgtggggttagctctaattattaagatatgcattataaataaataccaaaaaattgtctctggcaatagttaccttcccagatacaggtccccccttttttcccctaactcttttaagcaatgattgtaactattaggagacattgctctcccacgtatgtttttctttttagacaatgcagacaccaggaagttgtggagctaggatccatcctattgtcaatgagatgttctcatccagaagccatagaatcctgaataataattctaaaagaaacttctagagatcatctggcaatcgcttttaaagactcggctcaccgtgagaaagagtcactcacatccattcttcccttgatggtccctattcctccttcccttgcttcttggacttcttgaaatcaatcaagactgcaaaccctttcataaagtcttgccttgctgaactccctctctgcaggcagcctgcctttaaaaatagttgctgtcatccactttatgtgcatcttatttctgtcaacttgtattttttttcttgtatttttccaattagctcctcctttttccttccagtctaaaaaaggaatcctctgtgtcttcaaagcaaagctctttactttccccttggttctcataactctgtgatcttgctctcggtgcttccaactcatccacgtcctgtctgtttcctctgtatacaaaaccctttctgcccctgctgacacagacatcctctatgccagcagccagccaaccctttcattagaacttcaagctctccaaaggctcagattataactgttgtcatatttatatgaggctgttgtcttttccttctgagcctgcctttctcccccccacccaggagtatcctcttgccaaatcaaaagactttttccttgggctttagccttaaagatacttgaaggtctaggtgctttaacctcacataccctcacttaaacttttatcactgttgcatataccagttgtgatacaataaagaatgtatctgg

SEQ ID NO: 22844 - protein, 687 aa, Homo sapiens; identical to SEQ ID NO: 3017

SEQ ID NO: 22845 - DNA, 3090 bp, Homo sapiens
gcaaggggcagggcagagcctctgagcttaagttagttttgtttccctgtcccggatacaagagttggtaagctcgctgcagtgggtggagagaggcctctagacttcagtttcagtttcctggctctgggcagcagcaagaattcctctgcctcccatcctaccattcactgtcttgccggcagccagctgagagcaatgggaaatggggagtcccagctgtcctcggtgcctgctcagaagctgggttggtttatccaggaatacctgaagccctacgaagaatgtcagacactgatcgacgagatggtgaacaccatctgtgacgtcctgcaggaacccgaacagttccccctggtgcagggagtggccataggtggctcctatggacggaaaacagtcttaagaggcaactccgatggtacccttgtcctcttcttcagtgacttaaaacaattccaggatcagaagagaagccaacgtgacatcctcgataaaactggggataagctgaagttctgtctgttcacgaagtggttgaaaaacaatttcgagatccagaagtcccttgatgggttcaccatccaggtgttcacaaaaaatcagagaatctctttcgaggtgctggccgccttcaacgctctgagcttaaatgataatcccagcccctggatctatcgagagctcaaaagatccttggataagacaaatgccagtcctggtgagtttgcagtctgcttcactgaactccagcagaagttttttgacaaccgtcctggaaaactaaaggatttgatcctcttgataaagcactggcatcaacagtgccagaaaaaaatcaaggatttaccctcgctgtctccgtatgccctggagctgcttacggtgtatgcctgggaacaggggtgcagaaaagacaactttgacattgctgaaggcgtcagaaccgtactggagctgatcaaatgccaggagaagctgtgtatctattggatggtcaactacaactttgaagatgagaccatcaggaacatcctgctgcaccagctccaatcagcgaggccagtaatcttggatccagttgacccaaccaataatgtgagtggagataaaatatgctggcaatggctgaaaaaagaagctcaaacctggttgacttctcccaacctggataatgagttacctgcaccatcttggaatgttctgcctgcaccactcttcacgaccccaggccaccttctggataagttcatcaaggagtttctccagcccaacaaatgcttcctagagcagattgacagtgctgttaacatcatccgtacattccttaaagaaaactgcttccgacaatcaacagccaagatccagattgtccggggaggatcaaccgccaaaggcacagctctgaagactggctctgatgccgatctcgtcgtgttccataactcacttaaaagctacacctcccaaaaaaacgagcggcacaaaatcgtcaaggaaatccatgaacagctgaaagccttttggagggagaaggaggaggagcttgaagtcagctttgagcctcccaagtggaaggctcccagggtgctgagcttctctctgaaatccaaagtcctcaacgaaagtgtcagctttgatgtgcttcctgcctttaatgcactgggtcagctgagttctggctccacacccagccccgaggtttatgcagggctcattgatctgtataaatcctcggacctcccgggaggagagttttctacctgtttcacagtcctgcagcgaaacttcattcgctcccggcccaccaaactaaaggatttaattcgcctggtgaagcactggtacaaagagtgtgaaaggaaactgaagccaaaggggtctttgcccccaaagtatgccttggagctgctcaccatctatgcctgggagcaggggagtggagtgccggattttgacactgcagaaggtttccggacagtcctggagctggtcacacaatatcagcagctctgcatcttctggaaggtcaattacaactttgaagatgagaccgtgaggaagtttctactgagccagttgcagaaaaccaggcctgtgatcttggacccagccgaacccacaggtgacgtgggtggaggggaccgttggtgttggcatcttctggcaaaagaagcaaaggaatggttatcctctccctgcttcaaggatgggactggaaacccaataccaccttggaaagtgccgacaatgcagacaccaggaagttgtggagctaggatccatcctattgtcaatgagatgttctcatccagaagccatagaatcctgaataataattctaaaagaaacttctagagatcatctggcaatcgcttttaaagactcggctcaccgtgagaaagagtcactcacatccattcttcccttgatggtccctattcctccttcccttgcttcttggacttcttgaaatcaatcaagactgcaaaccctttcataaagtcttgccttgctgaactccctctctgcaggcagcctgcctttaaaaatagttgctgtcatccactttatgtgcatcttatttctgtcaacttgtattttttttcttgtatttttccaattagctcctcctttttccttccagtctaaaaaaggaatcctctgtgtcttcaaagcaaagctctttactttccccttggttctcataactctgtgatcttgctctcggtgcttccaactcatccacgtcctgtctgtttcctctgtatacaaaaccctttctgcccctgctgacacagacatcctctatgccagcagccagccaaccctttcattagaacttcaagctctccaaaggctcagattataactgttgtcatatttatatgaggctgttgtcttttccttctgagcctgcctttctcccccccacccaggagtatcctcttgccaaatcaaaagactttttccttgggctttagccttaaagatacttgaaggtctaggtgctttaacctcacataccctcacttaaacttttatcactgttgcatataccagttgtgatacaataaagaatgtatctgg

SEQ ID NO: 22846 - protein, 719 aa, Homo sapiens; identical to SEQ ID NO: 3019

SEQ ID NO: 22847 - DNA, 4729 bp, Homo sapiens
gcaaggggcagggcagagcctctgagcttaagttagttttgtttccctgtcccggatacaagagttggtaagctcgctgcagtgggtggagagaggcctctagacttcagtttcagtttcctggctctgggcagcagcaagaattcctctgcctcccatcctaccattcactgtcttgccggcagccagctgagagcaatgggaaatggggagtcccagctgtcctcggtgcctgctcagaagctgggttggtttatccaggaatacctgaagccctacgaagaatgtcagacactgatcgacgagatggtgaacaccatctgtgacgtcctgcaggaacccgaacagttccccctggtgcagggagtggccataggtggctcctatggacggaaaacagtcttaagaggcaactccgatggtacccttgtcctcttcttcagtgacttaaaacaattccaggatcagaagagaagccaacgtgacatcctcgataaaactggggataagctgaagttctgtctgttcacgaagtggttgaaaaacaatttcgagatccagaagtcccttgatgggttcaccatccaggtgttcacaaaaaatcagagaatctctttcgaggtgctggccgccttcaacgctctgagcttaaatgataatcccagcccctggatctatcgagagctcaaaagatccttggataagacaaatgccagtcctggtgagtttgcagtctgcttcactgaactccagcagaagttttttgacaaccgtcctggaaaactaaaggatttgatcctcttgataaagcactggcatcaacagtgccagaaaaaaatcaaggatttaccctcgctgtctccgtatgccctggagctgcttacggtgtatgcctgggaacaggggtgcagaaaagacaactttgacattgctgaaggcgtcagaaccgtactggagctgatcaaatgccaggagaagctgtgtatctattggatggtcaactacaactttgaagatgagaccatcaggaacatcctgctgcaccagctccaatcagcgaggccagtaatcttggatccagttgacccaaccaataatgtgagtggagataaaatatgctggcaatggctgaaaaaagaagctcaaacctggttgacttctcccaacctggataatgagttacctgcaccatcttggaatgttctgcctgcaccactcttcacgaccccaggccaccttctggataagttcatcaaggagtttctccagcccaacaaatgcttcctagagcagattgacagtgctgttaacatcatccgtacattccttaaagaaaactgcttccgacaatcaacagccaagatccagattgtccggggaggatcaaccgccaaaggcacagctctgaagactggctctgatgccgatctcgtcgtgttccataactcacttaaaagctacacctcccaaaaaaacgagcggcacaaaatcgtcaaggaaatccatgaacagctgaaagccttttggagggagaaggaggaggagcttgaagtcagctttgagcctcccaagtggaaggctcccagggtgctgagcttctctctgaaatccaaagtcctcaacgaaagtgtcagctttgatgtgcttcctgcctttaatgcactgggtcagctgagttctggctccacacccagccccgaggtttatgcagggctcattgatctgtataaatcctcggacctcccgggaggagagttttctacctgtttcacagtcctgcagcgaaacttcattcgctcccggcccaccaaactaaaggatttaattcgcctggtgaagcactggtacaaagagtgtgaaaggaaactgaagccaaaggggtctttgcccccaaagtatgccttggagctgctcaccatctatgcctgggagcaggggagtggagtgccggattttgacactgcagaaggtttccggacagtcctggagctggtcacacaatatcagcagctctgcatcttctggaaggtcaattacaactttgaagatgagaccgtgaggaagtttctactgagccagttgcagaaaaccaggcctgtgatcttggacccagccgaacccacaggtgacgtgggtggaggggaccgttggtgttggcatcttctggcaaaagaagcaaaggaatggttatcctctccctgcttcaaggatgggactggaaacccaataccaccttggaaagtgccggtaaaagtcatctaaaggaggcgttgtctggaaatagccctgtaacaggcttgaatcaaagaacttctcctactgtagcaacctgaaattaactcagacacaaataaaggaaacccagctcacaggagcttaaacagctggtcagccccctaagcccccactacaagtgatcctcaggcaggtaaccccagattcatgcactgtagggtgctgcgcagcatccctagtctctacccagtagatgccactagccctcctctcccagtgacaaccaaaagtcttcagacattgtcaaacgttcccctgggttcacagatctttctgcctttggcttttggctccaccctctttagctgttaatttgagtacttatggccctgaaagcggccacggtgcctccagatggcaggtttgcaatccaagcaggaagaaggaaaagatacccaaaggtcaagaacacagtgattttattagaagtttcatccgcaaattttcttccatttcattgctcagaaatgtcatgtggctacctgtaacttgaaggtggctacaaagatgactgtggacgtgggttgcactggccacccaaggatgtctgccacacctctccaaagccctccctacctaccaagatatacctgatatattccaccaggatatcctccctccagatatacttggttctctccaccaggttctttctttaaagcaggatttctcaactttgatacttactcacatttggggctagacagttctttgtttggaggctctcttgtgcattgtaggatgttgagcagcatctctggcctgtacccagtagatgccacccagttgtgacaattaaaagtgtcttgagactttatcatgtgtcttctgccctaggtgagaacccttgcactagaggaaccctacaccccaaccctggggggaatgtagggaagaggtggccaagccaaccgtggggttagctctaattattaagatatgcattataaataaataccaaaaaattgtctctggcaatagttaccttcccagatacaggtccccccttttttcccctaactcttttaagcaatgattgtaactattaggagacattgctctcccacgtatgtttttctttttagacaatgcagacaccaggaagttgtggagctaggatccatcctattgtcaatgagatgttctcatccagaagccatagaatcctgaataataattctaaaagaaacttctagagatcatctggcaatcgcttttaaagactcggctcaccgtgagaaagagtcactcacatccattcttcccttgatggtccctattcctccttcccttgcttcttggacttcttgaaatcaatcaagactgcaaaccctttcataaagtcttgccttgctgaactccctctctgcaggcagcctgcctttaaaaatagttgctgtcatccactttatgtgcatcttatttctgtcaacttgtattttttttcttgtatttttccaattagctcctcctttttccttccagtctaaaaaaggaatcctctgtgtcttcaaagcaaagctctttactttccccttggttctcataactctgtgatcttgctctcggtgcttccaactcatccacgtcctgtctgtttcctctgtatacaaaaccctttctgcccctgctgacacagacatcctctatgccagcagccagccaaccctttcattagaacttcaagctctccaaaggctcagattataactgttgtcatatttatatgaggctgttgtcttttccttctgagcctgcctttctcccccccacccaggagtatcctcttgccaaatcaaaagactttttccttgggctttagccttaaagatacttgaaggtctaggtgctttaacctcacataccctcacttaaacttttatcactgttgcatataccagttgtgatacaataaagaatgtatctggattttgtgcctagttcctagcacacagcttcaaaaattctagagtttcctgataggagtgtcttttgtattcataacaagcccttttcacccatgcctgggtttatgctaacaaggttacccatggtgggcccttagtttcaaggaaggagttggccaagccagaaagaccaagcatgtggttaaagcattggaattttcagccccatcccacccccaatctccaaggaggtgatggggctggaaattgagttcaattttaacatggccagtgatttaagcaatgctgcctatgtaaagaaaccccaataaaaactctggacagtgaggcttggggagcttcctgattggcagacattccaatgtactaggaaggtagcgcatcttgattccacagggacaaaggctcctgagctctgggcccttccagtgcttgccaccctacatactctttgtctggctcttcatttgtattctttataataaaatggtgattgtaagtagagc

SEQ ID NO: 22848 - protein, 687 aa, Homo sapiens; identical to SEQ ID NO: 3017

SEQ ID NO: 22849 - DNA, 3596 bp, Homo sapiens
gcaaggggcagggcagagcctctgagcttaagttagttttgtttccctgtcccggatacaagagttggtaagctcgctgcagtgggtggagagaggcctctagacttcagtttcagtttcctggctctgggcagcagcaagaattcctctgcctcccatcctaccattcactgtcttgccggcagccagctgagagcaatgggaaatggggagtcccagctgtcctcggtgcctgctcagaagctgggttggtttatccaggaatacctgaagccctacgaagaatgtcagacactgatcgacgagatggtgaacaccatctgtgacgtcctgcaggaacccgaacagttccccctggtgcagggagtggccataggtggctcctatggacggaaaacagtcttaagaggcaactccgatggtacccttgtcctcttcttcagtgacttaaaacaattccaggatcagaagagaagccaacgtgacatcctcgataaaactggggataagctgaagttctgtctgttcacgaagtggttgaaaaacaatttcgagatccagaagtcccttgatgggttcaccatccaggtgttcacaaaaaatcagagaatctctttcgaggtgctggccgccttcaacgctctgagcttaaatgataatcccagcccctggatctatcgagagctcaaaagatccttggataagacaaatgccagtcctggtgagtttgcagtctgcttcactgaactccagcagaagttttttgacaaccgtcctggaaaactaaaggatttgatcctcttgataaagcactggcatcaacagtgccagaaaaaaatcaaggatttaccctcgctgtctccgtatgccctggagctgcttacggtgtatgcctgggaacaggggtgcagaaaagacaactttgacattgctgaaggcgtcagaaccgtactggagctgatcaaatgccaggagaagctgtgtatctattggatggtcaactacaactttgaagatgagaccatcaggaacatcctgctgcaccagctccaatcagcgaggccagtaatcttggatccagttgacccaaccaataatgtgagtggagataaaatatgctggcaatggctgaaaaaagaagctcaaacctggttgacttctcccaacctggataatgagttacctgcaccatcttggaatgttctgcctgcaccactcttcacgaccccaggccaccttctggataagttcatcaaggagtttctccagcccaacaaatgcttcctagagcagattgacagtgctgttaacatcatccgtacattccttaaagaaaactgcttccgacaatcaacagccaagatccagattgtccggggaggatcaaccgccaaaggcacagctctgaagactggctctgatgccgatctcgtcgtgttccataactcacttaaaagctacacctcccaaaaaaacgagcggcacaaaatcgtcaaggaaatccatgaacagctgaaagccttttggagggagaaggaggaggagcttgaagtcagctttgagcctcccaagtggaaggctcccagggtgctgagcttctctctgaaatccaaagtcctcaacgaaagtgtcagctttgatgtgcttcctgcctttaatgcactgggtcagctgagttctggctccacacccagccccgaggtttatgcagggctcattgatctgtataaatcctcggacctcccgggaggagagttttctacctgtttcacagtcctgcagcgaaacttcattcgctcccggcccaccaaactaaaggatttaattcgcctggtgaagcactggtacaaagagtgtgaaaggaaactgaagccaaaggggtctttgcccccaaagtatgccttggagctgctcaccatctatgcctgggagcaggggagtggagtgccggattttgacactgcagaaggtttccggacagtcctggagctggtcacacaatatcagcagctctgcatcttctggaaggtcaattacaactttgaagatgagaccgtgaggaagtttctactgagccagttgcagaaaaccaggcctgtgatcttggacccagccgaacccacaggtgacgtgggtggaggggaccgttggtgttggcatcttctggcaaaagaagcaaaggaatggttatcctctccctgcttcaaggatgggactggaaacccaataccaccttggaaagtgccgacaatgcagacaccaggaagttgtggagctaggatccatcctattgtcaatgagatgttctcatccagaagccatagaatcctgaataataattctaaaagaaacttctagagatcatctggcaatcgcttttaaagactcggctcaccgtgagaaagagtcactcacatccattcttcccttgatggtccctattcctccttcccttgcttcttggacttcttgaaatcaatcaagactgcaaaccctttcataaagtcttgccttgctgaactccctctctgcaggcagcctgcctttaaaaatagttgctgtcatccactttatgtgcatcttatttctgtcaacttgtattttttttcttgtatttttccaattagctcctcctttttccttccagtctaaaaaaggaatcctctgtgtcttcaaagcaaagctctttactttccccttggttctcataactctgtgatcttgctctcggtgcttccaactcatccacgtcctgtctgtttcctctgtatacaaaaccctttctgcccctgctgacacagacatcctctatgccagcagccagccaaccctttcattagaacttcaagctctccaaaggctcagattataactgttgtcatatttatatgaggctgttgtcttttccttctgagcctgcctttctcccccccacccaggagtatcctcttgccaaatcaaaagactttttccttgggctttagccttaaagatacttgaaggtctaggtgctttaacctcacataccctcacttaaacttttatcactgttgcatataccagttgtgatacaataaagaatgtatctggattttgtgcctagttcctagcacacagcttcaaaaattctagagtttcctgataggagtgtcttttgtattcataacaagcccttttcacccatgcctgggtttatgctaacaaggttacccatggtgggcccttagtttcaaggaaggagttggccaagccagaaagaccaagcatgtggttaaagcattggaattttcagccccatcccacccccaatctccaaggaggtgatggggctggaaattgagttcaattttaacatggccagtgatttaagcaatgctgcctatgtaaagaaaccccaataaaaactctggacagtgaggcttggggagcttcctgattggcagacattccaatgtactaggaaggtagcgcatcttgattccacagggacaaaggctcctgagctctgggcccttccagtgcttgccaccctacatactctttgtctggctcttcatttgtattctttataataaaatggtgattgtaagtagagc

SEQ ID NO: 22850 - protein, 719 aa, Homo sapiens; identical to SEQ ID NO: 3019

SEQ ID NO: 22851 - DNA, 2071 bp, Homo sapiens
gctcgctgcagtgggtggagagaggcctctagacttcagtttcagtttcctggctctgggcagcagcaagaattcctctgcctcccatcctaccattcactgtcttgccggcagccagctgagagcaatgggaaatggggagtcccagctgtcctcggtgcctgctcagaagctgggttggtttatccaggaatacctgaagccctacgaagaatgtcagacactgatcgacgagatggtgaacaccatctgtgacgtcctgcaggaacccgaacagttccccctggtgcagggagtggccataggtggctcctatggacggaaaacagtcttaagaggcaactccgatggtacccttgtcctcttcttcagtgacttaaaacaattccaggatcagaagagaagccaacgtgacatcctcgataaaactggggataagctgaagttctgtctgttcacgaagtggttgaaaaacaatttcgagatccagaagtcccttgatgggttcaccatccaggtgttcacaaaaaatcagagaatctctttcgaggtgctggccgccttcaacgctctgagtaagcattgctgggtgtcaggagagaaaagccaaagaagcgggtgccagacagctctgtgcaacctctaggccatgagtgggatagataccactgctgctttaaaaaatgggagaccatagaccctcaggagagaagaatcccttctaccctggactcgctctcttctctggaactaacttctcccccataccctgattgtctttggagaaaatgttctggattctagaatctaaggcagagccttttaagccatactgtacacataaatcacctggaaccttgttaaaatgcagatcctgactcaggaggtctgagttagagcccaggatttcatatttctagccagctccatgatgagctgctggtccgcagatcatgcttgcaggttttgaccagagtcagtgttggttagagtaagaggatgaggcagacatctgggaaaagtccagctggggcaagcatttgaagtctgccttcctaccaggtcaaaatcaaggcaacgaccttccatagataactatcaaagcttgagggggtgccttgaacccaactcctaaatccctaagacctgcccacctcttgtgtctcctgtctcagcaaacattcccacactcttgcatattgttaaagtaacctctgcttaccaggcttctggtttaataaaagatggctagagtgactccatcttaaagcaagtagctaggcactcaaaaggaacctacaggcttaatacttgggtctgaaaatagccacagtctaagctgaccaccaattataattgcagaatatttaaggccatacaaaacatctcccactaagcctacaaaatgtccaggtgtcctaaaagttcagcccacttaaaggcagcattaatgagcaggtttaggttgaaggattaatggtcatcaataccactgttaagaagaaaattcttggccaaattgaatttaatggagtttaactgagcagacaattcacaaatctagaagcctcctgagccagagtaggttcagagagtcttgaacacagccacgtggtggaagaagatttatggacaggaaaaggaaaatgatgtactgaaaatgaaagtgaggtacagaaacagccagactggttatagctcagcattggccttatttgaacgagatttgaacagttggccacctttgattggccgaaactcagtgattggcacaagagtaggttgcagtctgtttacacatccttttaggttatagttcaccatgtacagagaaattttaggccaaacttaaaatatgtaaggaggcagctttaggctaaacttgatttaacagcaccaataccccctacctttagtgagcacatctgcacattccaattttaatgacagctccttagaatttcttatcaacgaagacactaacaaagaatggcgcattcctccttctcctttctgaggatgccctaccctgtaacaaagtcgtttctaataaatttgcttctttcaccat

SEQ ID NO: 22852 - protein, 172 aa, Homo sapiens; identical to SEQ ID NO: 3015

SEQ ID NO: 22853 - DNA, 1619 bp, Homo sapiens
agcccccactacaagtgatcctcaggcaggtaaccccagattcatgcactgtagggtgctgcgcagcatccctagtctctacccagtagatgccactagccctcctctcccagtgacaaccaaaagtcttcagacattgtcaaacgttcccctgggttcacagatctttctgcctgtaacttgaaggtggctacaaagatgactgtggacgtgggttgcactggccacccaaggatgtctgccacacctctccaaagccctccctacctaccaagatatacctgatatattccaccaggatatcctccctccagatatacttggttctctccaccaggttctttctttaaagcaggatttctcaactttgatacttactcacatttggggctagacagttctttgtttggaggctctcttgtgcattgtaggatgttgagcagcatctctggcctgtacccagtagatgccacccagttgtgacaattaaaagtgtcttgagactttatcatgtgtcttctgccctaggtgagaacccttgcactagaggaaccctacaccccaaccctggggggaatgtagggaagaggtggccaagccaaccgtggggttagctctaattattaagatatgcattataaataaataccaaaaaattgtctctggcaatagttaccttcccagatacaggtccccccttttttcccctaactcttttaagcaatgattgtaactattaggagacattgctctcccacgtatgtttttctttttagacaatgcagacaccaggaagttgtggagctaggatccatcctattgtcaatgagatgttctcatccagaagccatagaatcctgaataataattctaaaagaaacttctagagatcatctggcaatcgcttttaaagactcggctcaccgtgagaaagagtcactcacatccattcttcccttgatggtccctattcctccttcccttgcttcttggacttcttgaaatcaatcaagactgcaaaccctttcataaagtcttgccttgctgaactccctctctgcaggcagcctgcctttaaaaatagttgctgtcatccactttatgtgcatcttatttctgtcaacttgtattttttttcttgtatttttccaattagctcctcctttttccttccagtctaaaaaaggaatcctctgtgtcttcaaagcaaagctctttactttccccttggttctcataactctgtgatcttgctctcggtgcttccaactcatccacgtcctgtctgtttcctctgtatacaaaaccctttctgcccctgctgacacagacatcctctatgccagcagccagccaaccctttcattagaacttcaagctctccaaaggctcagattataactgttgtcatatttatatgaggctgttgtcttttccttctgagcctgcctttctcccccccacccaggagtatcctcttgccaaatcaaaagactttttccttgggctttagccttaaagatacttgaaggtctaggtgctttaacctcacataccctcacttaaacttttatcactgttgcatataccagttgtgatacaataaagaatgtatctgg

SEQ ID NO: 22854 - protein, 46 aa, Homo sapiens [sequence omitted]

SEQ ID NO: 22855 - DNA, 2125 bp, Homo sapiens
agcccccactacaagtgatcctcaggcaggtaaccccagattcatgcactgtagggtgctgcgcagcatccctagtctctacccagtagatgccactagccctcctctcccagtgacaaccaaaagtcttcagacattgtcaaacgttcccctgggttcacagatctttctgcctgtaacttgaaggtggctacaaagatgactgtggacgtgggttgcactggccacccaaggatgtctgccacacctctccaaagccctccctacctaccaagatatacctgatatattccaccaggatatcctccctccagatatacttggttctctccaccaggttctttctttaaagcaggatttctcaactttgatacttactcacatttggggctagacagttctttgtttggaggctctcttgtgcattgtaggatgttgagcagcatctctggcctgtacccagtagatgccacccagttgtgacaattaaaagtgtcttgagactttatcatgtgtcttctgccctaggtgagaacccttgcactagaggaaccctacaccccaaccctggggggaatgtagggaagaggtggccaagccaaccgtggggttagctctaattattaagatatgcattataaataaataccaaaaaattgtctctggcaatagttaccttcccagatacaggtccccccttttttcccctaactcttttaagcaatgattgtaactattaggagacattgctctcccacgtatgtttttctttttagacaatgcagacaccaggaagttgtggagctaggatccatcctattgtcaatgagatgttctcatccagaagccatagaatcctgaataataattctaaaagaaacttctagagatcatctggcaatcgcttttaaagactcggctcaccgtgagaaagagtcactcacatccattcttcccttgatggtccctattcctccttcccttgcttcttggacttcttgaaatcaatcaagactgcaaaccctttcataaagtcttgccttgctgaactccctctctgcaggcagcctgcctttaaaaatagttgctgtcatccactttatgtgcatcttatttctgtcaacttgtattttttttcttgtatttttccaattagctcctcctttttccttccagtctaaaaaaggaatcctctgtgtcttcaaagcaaagctctttactttccccttggttctcataactctgtgatcttgctctcggtgcttccaactcatccacgtcctgtctgtttcctctgtatacaaaaccctttctgcccctgctgacacagacatcctctatgccagcagccagccaaccctttcattagaacttcaagctctccaaaggctcagattataactgttgtcatatttatatgaggctgttgtcttttccttctgagcctgcctttctcccccccacccaggagtatcctcttgccaaatcaaaagactttttccttgggctttagccttaaagatacttgaaggtctaggtgctttaacctcacataccctcacttaaacttttatcactgttgcatataccagttgtgatacaataaagaatgtatctggattttgtgcctagttcctagcacacagcttcaaaaattctagagtttcctgataggagtgtcttttgtattcataacaagcccttttcacccatgcctgggtttatgctaacaaggttacccatggtgggcccttagtttcaaggaaggagttggccaagccagaaagaccaagcatgtggttaaagcattggaattttcagccccatcccacccccaatctccaaggaggtgatggggctggaaattgagttcaattttaacatggccagtgatttaagcaatgctgcctatgtaaagaaaccccaataaaaactctggacagtgaggcttggggagcttcctgattggcagacattccaatgtactaggaaggtagcgcatcttgattccacagggacaaaggctcctgagctctgggcccttccagtgcttgccaccctacatactctttgtctggctcttcatttgtattctttataataaaatggtgattgtaagtagagc

SEQ ID NO: 22856 - protein, 46 aa, Homo sapiens [sequence omitted]

SEQ ID NO: 22857 - DNA, 842 bp, Homo sapiens
ctcggcgcggcggccgaggggcctgggagggaacgggcgcggaggcgggaccgcggctccctcccactccggggggagcccaggaggcggcggtgctggagcgcgagccggagccggagccggagacgaagagaggcggtcgcgagcacgagtggggtggggcgtgcccacgggcccccgcccccctcgtccccctcgtcccccagcccagctccggagccgcagtccaggcgcgccgcccgagggtccacgccgcacccctcccccgtgcgttctgcggccacccaggccttccaggacaccgtggagagggaacaagggggcagggacgcccccttcggcaggagccgtcggagaagggggcccagaccggagggaggcgagaagccccactgaagccgggcgcagggtctgggacgcagttgggagtgcaaagggctggctgagagccgcaggagcagcaggctgtggcccaggcctcctgggtgacaggccctgtctggcggggaagagggaccaagagacaacacggaagaggctggacctcgaacaggggcggctgcctcactccctacctgagccagccgagggggccaaggactttagagctgtttcctccggcataagagagacacttgctttccagggcagcaccctttatcggagaaggctctacagggaaggggtctttgcagcctggatggccatcccacattcctttaacggaggtctctaggcctcagagagaacccagagttagaaaggaggccagacggtccttgctgtccccctggggagagaggaagttgccgcctgctgccaggcccaggaggagctgggcc

SEQ ID NO: 22858 - protein, 147 aa, Homo sapiens
RRGGRGAWEGTGAEAGPRLPPTPGGAQEAAVLEREPEPEPETKRGGREHEWGGACPRAPAPLVPLVPQPSSGAAVQARRPRVHAAPLPRAFCGHPGLPGHRGEGTRGQGRPLRQEPSEKGAQTGGRREAPLKPGAGSGTQLGVQRAG

SEQ ID NO: 22859 - DNA, 3455 bp, Homo sapiens
gcgagaagccccactgaagccgggcgcagggtctgggacgcagttgggagtgcaaagggctggctgagagccgcaggagcagcaggctgtggcccaggcctcctgggtgacaggccctgtctggcggggaagagggaccaagagacaacacggaagaggctggacctcgaacaggggcggctgcctcactccctacctgagccagccgagggggccaaggactttagagctgtttcctccggcataagagagacacttgctttccagggcagcaccctttatcggagaaggctctacagggaaggggtctttgcagcctggatggccatcccacattcctttaacggaggtctctaggcctcagagagaacccagagttagaaaggaggccagacggtccttgctgtccccctggggagagaggaagttgccgcctgctgccaggcccaggaggagctgggcctgcaatagtgggggacctggcccctgaggcagtggcggccatgtcacggccaggccacggtgggctgatgcctgtgaatggtctgggcttcccaccgcagaacgtggcccgggtggtggtgtgggagtggctgaatgagcacagccgctggcggccctacacggccaccgtgtgccaccacattgagaacgtgctgaaggaggacgctcgcggttccgtggtcctggggcaggtggacgcccagcttgtgccctacatcatcgacctgcagtccatgcaccagtttcgccaggacacaggcaccatgcggcccgtgcggcgcaacttctacgacccgtcgtcggcgccgggcaagggcatcgtgtgggagtgggagaacgacggcggcgcatggacggcctacgatatggacatctgcatcaccatccagaacgcctacgagaagcagcacccgtggctcgacctctcatcgctaggcttctgctacctcatctacttcaacagcatgtcgcagatgaaccgccagacgcgccggcgccgccgcctgcgccgccgcctggacctcgcctacccgctcaccgtgggctccatccctaagtcgcagtcgtggcccgtgggcgccagctcgggccagccctgctcctgccagcagtgcctgctggtcaacagcacgcgcgccgcctccaacgccatcctggcctcgcagcgccgcaaggcgccccccgcgcccccgctgccgccgccgccgccacctggagggcctccaggcgcgcttgccgtgcgccccagcgccaccttcacaggcgccgcgctctgggcagcgcccgccgccggccccgccgagcccgcgccgcctcccggggcgcccccacggagcccgggcgcccccggcggagcgcgcaccccggggcagaacaacctcaaccggcccgggccccagcgcaccaccagcgtgagcgcgcgcgcctccatcccgccgggggtccccgcactcccggtgaagaacttgaatggtactgggccggtccatccggccctggcagggatgaccgggatactgctgtgcgcggccgggctgcccgtgtgcctgacgcgggcccccaagcccatcctgcacccgccgcccgtgagcaagagcgacgtgaagcccgtgcctggcgtgcccggggtgtgccgcaagaccaagaagaagcaccttaaaaagagtaagaatcccgaggatgtggttcgaagatacatgcagaaggtgaaaaacccacctgatgaggactgcaccatctgcatggagcgactggtcacagcatcaggctacgagggcgtgcttcggcacaagggcgtgcggcctgagctcgtgggccgcctgggccgctgtggccacatgtaccacctgctgtgcctcgtggccatgtactccaatggcaacaaggatggcagcctgcagtgccccacctgcaaggccatctacggggagaagacgggtacgcagccgcctgggaagatggagttccacctcatcccccactcgctgcccggcttccctgatacccagaccatccgcatcgtctatgacatccccacaggcatccagggccctgagcaccccaaccccgggaagaagttcaccgcaagaggattccctcgccactgctatctacccaacaacgagaaaggccggaaggtgctgcggctgctcatcacggcctgggagagaagactcatcttcactatcggcacgtccaacaccacgggcgagtcggacaccgtggtgtggaacgagatccaccacaagaccgagtttggatccaacctcacgggccacggctacccggacgctagctacctagacaacgtgctggctgagctcacagcccagggcgtatccgaggctgcagccaaggcttgaggcccaaggctgcccaccttccctcctgctttgcccctggtccggcaaatgcctccttcgccaggtgtgtcctggtagcccaggttcagggctggggaggagcctgcggaaggggccgcagccattcaggggacctgcctggtggcagctgggatgaagagagatggcatgtcaggctggccccgaatcatagctccctgagagggccaagcagagagtactggaaacctccctaccaaaaagacagagacccgccccctcacacacaaacacacatgtcctgttgaactcatgcacgcacacccacgtgcctgtacttgcccccaggctggaagagaagagacagaaagaccccatgacccccccatgtggatccccatctgtgtctcagttgcatctgtacagccttgtctgcaaactggaggatgcggggcaagcccttaggggcctgccagggctcggggggcaaagagggactcgggaaactcagtgtaccccagatgcctcacccattccgtgtcatcacccatgtctgccacccactgattgggcaattgtgggcccatggggtggaagcccccagatgactgagcagttctacaaaagaatggccagcacgagcggggactagagggtcctgattttgtgtctgtgcctcttcatctctctggactctgatctccttctcccttcccatctccaggccttctgtctgtcccagataaaggcgctgttctcccatcctccctaccccatcctctccaccaaatcgctcccaattttgagagccaaaggctggcgcttctgacttcaggagcgaaaggaggaggcctagtttgggccgatgtattttaaagcagagtggacagcagagagtcaatttccctttcgttgggagtgggcagtggggtggctaattgtcttcggccaaccaggggcctgttgcccaggcaactcaccagctccgcctctgctgattggctgccacggtgggagtcagccaagatttaaagggatgccagcgattgctcttttcaaaacctaccagtcccactgtgggtggagaaataaatggtctttctcctcctc

SEQ ID NO: 22860 - protein, 620 aa, Homo sapiens; identical to SEQ ID NO: 3021

SEQ ID NO: 22861 - DNA, 416 bp, Homo sapiens
cctcagggaagcctgggcttggtgctgccatcagtggggagctatagagtgtgcttgagctctagagggctgtagtgaaaaggaagttttctctttgggggtgcggatcattaaacatgtcctcctctgacctgccagagctctgttgtctccagccacatgccgctcccccacagccgacatcatttctcctcccctctaactgatcctccccagccagacaagcccggctcaaagtccccaacgctccatctccaagaaaccccccggggaaaatccctctggctctcaagacccgtggagcctgttgctggggaaggggagtaggaggaaggaagataggggtggcagaccctggcttcttccgcctaaagctttccattgctgagacagctgaggcccaagtgcagcctatg

SEQ ID NO: 22862 - protein, 55 aa, Homo sapiens [sequence omitted]

SEQ ID NO: 22863 - DNA, 424 bp, Homo sapiens
gcagaccctggcttcttccgcctaaagctttccattgctgagacagctgaggcccaagtgcagcctatgaggggaaagggatggaggtggggggtctttgaggagccaggcagacaggtctacccactgtcactctcgtccccaaaccacctcccagccctcccaaccctggtctctttgtttctgtgtctttgttttttgtttttagagacagagcctcgctcttattgcccaggctggagtacagtggcgcaatcacagctcctggcagcctgaaacttctgggctcaagaaatcctcctgattcagcctcccaactacacaggaggctgaggtgggaggatcccttgagcccaggttgcagtgagccaagatcgagccactgcactccagcctgggtggcagagcaaaaccctgtatcaag

SEQ ID NO: 22864 - protein, 69 aa, Homo sapiens
MRGKGWRWGVFEEPGRQVYPLSLSSPNHLPALPTLVSLFLCLCFLFLETEPRSYCPGWSTVAQSQLLAA

SEQ ID NO: 22865 - DNA, 1128 bp, Homo sapiens
gttataagtgccaagatgagacgtttgagattccagtggatgcctctgacccagcctcaggatggggactcaaggagggcttcctggaggaggtgctgcttaaatgtgacctgagtagagcagaagttaagcagcggcattggagacagaactgggagatggggccgccggctgcagccgtacacactcagctgtcaccctgggggactggagtgacccactggatcctgatgctgaggcccagacagtgtatcggcagctgctcctggggcgggaccagctcaggctgaaattactggaggattctaacatggatacaactctggaggcagacacaggggcctgtcctgaggtcctggcccggcaaagagcagcaactgcccgcctgctggaggtgctcgcagacctggatcgtgcccacgaggagttccagcagcaggagcgagggaaggcggccctgggcccccttggcccctaaggaaatgccagagctagcccggaaggaggagcaagagccagggggccctcttcagcgcatcctgccccgggagtctcctgtctccttggacctctttgattctgtggtttggaggctcccagagacgtgcctagtcctgtgtgccttgagtccagaactcagggcatggaagccctttggcaggggccagccttgcactgagtgaaacttgccctctggcttgattcagactggagtggataggataaggaacctgacttatttgactgagactggggtctctacttcaccaaactggcctctatccataccaaggaggccagcctggccctgagctgctggatacagctggacctgaattcctgatgcccatgtgatgttgttgccccagatgggcactaaatggcctcactccttcctgttttcatgtctgctaatccctataacctcactgattcttctgtaccctgcccttggcctaggactccaaccacaagcttccagaatcaggtgccctcaggaagaaccaaggctgggtgggggtccagtgtgccaaactcagacccttggagcctgggagaccttgggccaggctgtttatctctctctgggtctcagattaccctgtataaaaagaggagggaaagtct

SEQ ID NO: 22866 - protein, 55 aa, Homo sapiens [sequence omitted]

SEQ ID NO: 22867 - DNA, 1180 bp, Homo sapiens
ggtgagaccccaccgcgatggggagcggggggcgtccctctgttcccacccgccccctgatcgcctcccacccgctgcagaatgtgaatgagctcaaccagtggctctcggccttgcgcaaggccagcgcccccaacccgaacaagctggccgcctgccaccccggtgccttccgcagcgcgcgctggacctgctgcctccaggctgagcgctcagccgccggctgcagccgtacacactcagctgtcaccctgggggactggagtgacccactggatcctgatgctgaggcccagacagtgtatcggcagctgctcctggggcgggaccagctcaggctgaaattactggaggattctaacatggatacaactctggaggcagacacaggggcctgtcctgaggtcctggcccggcaaagagcagcaactgcccgcctgctggaggtgctcgcagacctggatcgtgcccacgaggagttccagcagcaggagcgagggaaggcggccctgggcccccttggcccctaaggaaatgccagagctagcccggaaggaggagcaagagccagggggccctcttcagcgcatcctgccccgggagtctcctgtctccttggacctctttgattctgtggtttggaggctcccagagacgtgcctagtcctgtgtgccttgagtccagaactcagggcatggaagccctttggcaggggccagccttgcactgagtgaaacttgccctctggcttgattcagactggagtggataggataaggaacctgacttatttgactgagactggggtctctacttcaccaaactggcctctatccataccaaggaggccagcctggccctgagctgctggatacagctggacctgaattcctgatgcccatgtgatgttgttgccccagatgggcactaaatggcctcactccttcctgttttcatgtctgctaatccctataacctcactgattcttctgtaccctgcccttggcctaggactccaaccacaagcttccagaatcaggtgccctcaggaagaaccaaggctgggtgggggtccagtgtgccaaactcagacccttggagcctgggagaccttgggccaggctgtttatctctctctgggtctcagattaccctgtataaaaagaggagggaaagtct

SEQ ID NO: 22868 - protein, 170 aa, Homo sapiens
MGSGGRPSVPTRPLIASHPLQNVNELNQWLSALRKASAPNPNKLAACHPGAFRSARWTCCLQAERSAAGCSRTHSAVTLGDWSDPLDPDAEAQTVYRQLLLGRDQLRLKLLEDSNMDTTLEADTGACPEVLARQRAATARLLEVLADLDRAHEEFQQQERGKAALGPLGP

SEQ ID NO: 22869 - DNA, 913 bp, Homo sapiens
gttataagtgccaagatgagacgtttgagattccagtggatgcctctgacccagcctcaggatggggactcaaggagggcttcctggaggaggtgctgcttaaatgtgacctgagtagagcagaagttaagcagcggcattggagacagaactgggagatggggccgccggctgcagccgtacacactcagctgtcaccctgggggactggagtgacccactggatcctgatgctgaggcccagacagtgtatcggcagctgctcctggggcgggaccagctcaggctgaaattactggaggattctaacatggatacaactctggaggcagacacaggggcctgtcctgaggtcctggcccggcaaagagcagcaactgcccgcctgctggaggtgctcgcagacctggatcgtgcccacgaggagttccagcagcaggagcgagggaaggcggccctgggcccccttggcccctaaggaaatgccagagctagcccggaaggaggagcaagagccagggggccctcttcagcgcatcctgccccgggagtctcctgtctccttggacctctttgattctgtggtttggaggctcccagagacgtgcctagtcctgtgtgccttgagtccagaactcagggcatggaagccctttggcaggggccagccttgcactgagtgaaacttgccctctggcttgattcagactggagtggataggataaggaacctgacttatttgactgagactggggtctctacttcaccaaactggcctctatccataccaaggaggccagcctggccctgagctgctggatacagctggacctgaattcctgatgcccatgtgatgttgttgccccagatgggcactaaatggcctcactccttcctgttttcatgtctgct

SEQ ID NO: 22870 - protein, 55 aa, Homo sapiens [sequence omitted]

SEQ ID NO: 22871 - DNA, 965 bp, Homo sapiens
ggtgagaccccaccgcgatggggagcggggggcgtccctctgttcccacccgccccctgatcgcctcccacccgctgcagaatgtgaatgagctcaaccagtggctctcggccttgcgcaaggccagcgcccccaacccgaacaagctggccgcctgccaccccggtgccttccgcagcgcgcgctggacctgctgcctccaggctgagcgctcagccgccggctgcagccgtacacactcagctgtcaccctgggggactggagtgacccactggatcctgatgctgaggcccagacagtgtatcggcagctgctcctggggcgggaccagctcaggctgaaattactggaggattctaacatggatacaactctggaggcagacacaggggcctgtcctgaggtcctggcccggcaaagagcagcaactgcccgcctgctggaggtgctcgcagacctggatcgtgcccacgaggagttccagcagcaggagcgagggaaggcggccctgggcccccttggcccctaaggaaatgccagagctagcccggaaggaggagcaagagccagggggccctcttcagcgcatcctgccccgggagtctcctgtctccttggacctctttgattctgtggtttggaggctcccagagacgtgcctagtcctgtgtgccttgagtccagaactcagggcatggaagccctttggcaggggccagccttgcactgagtgaaacttgccctctggcttgattcagactggagtggataggataaggaacctgacttatttgactgagactggggtctctacttcaccaaactggcctctatccataccaaggaggccagcctggccctgagctgctggatacagctggacctgaattcctgatgcccatgtgatgttgttgccccagatgggcactaaatggcctcactccttcctgttttcatgtctgct

SEQ ID NO: 22872 - protein, 170 aa, Homo sapiens; identical to SEQ ID NO: 22868

SEQ ID NO: 22873 - DNA, 3043 bp, Homo sapiens
agacgcctcggcaagagcccgctgcgccccctgcgcgctcctcctgctcggagcacggctcctacctgtagagtccggacgggcgctccctccccgggcacctacaccttctcctctttcggaaatctcccatccagctacccgggtctcggacaggcggcactgggaccacgaggcagggagccaggcttgaagcaggtgacatgtagacgtcccctggtccagcctcggaacctgagcgcccttctgcctggaaagtttgtggctaggcgccatggccaagagcagctccctgaatgttcgcgtggtggagggccgcgcgctgcctgccaaggacgtgtctgggagcagcgacccctactgcctagtgaaagtggacgacgaggtggtggccaggacagctactgtctggaggagcctgggccccttctggggggaggagtacacggtgcacctgcctctggatttccaccagctggccttctacgtgctggatgaggacactgtcgggcacgacgacatcatcggcaagatctcgctgagcagggaggcgattacagccgacccccgagggattgacagctggattaacttgagccgagtggacccagatgcagaagtgcagggtgagatctgcctgtcagtgcagatgctggaggatgggcagggccgctgccttcgctgccatgtgcttcaggccagggacctggctcccagagacatctctggcacatctgacccatttgcacgtgtgttttggggcagccagagcttggagacctcaaccatcaagaagactcgcttcccgcactgggatgaagtgctggagctgcgggagatgccaggtgccccgtccccactgcgggtggagctctgggactgggacatggtgggcaagaatgacttcttgggcatggtggagttctctccaaagaccctccagcagaagccacctaaaggctggttccgcctcctgccctttcccagagccgaggaggattctggggggaacctgggtgccctgcgagtgaaggtacgcctgattgaggaccgcgtcctgccctcccagtgctaccagcctctcatggagctgctcatggagtctgtgcaggggccagcagaggaggacactgctagccccttggctttgctggaagagctgaccttgggggactgccgccaggaccttgccaccaagctggtgaaactctttcttggccggggactggctgggcgctttctggactatctcacccggcgtgaggtggctcggaccatggaccccaacaccctcttccgttctaactccctggcatccaagtcgatggaacagtttatgaagctcgtgggcatgccctacctgcacgaggtcctgaagcctgtgattagccgtgtctttgaggagaagaagtacatggagctggatccctgcaagatggacctgggccgcacccggaggatctccttcaaaggcgcactctcggaggagcagatgcgggagaccagcctggggctgctgacgggctacctggggcccatcgtggacgccatcgtgggctccgtggggcgctgcccgcccgccatgcgcctcgccttcaagcagctgcaccggcgagtggaggagcgcttcccccaggccgagcaccaggatgtgaagtacctggccatcagtggatttctcttcttgcgattcttcgcacctgccatccttaccccaaagctgtttgaccttcgggaccaacacgcggacccccagactagccgctcactgctgttgcttgccaaggctgtgcagagcattggaaacctgggccagcagctgggccaaggcaaggaactgtggatggcccccctgcaccccttcctgctgcagtgtgtctcacgtgtgagagacttcctggaccggctggtggatgtggatggggatgaagaagctggtgtcccagccagggccctgttcccgccctcggccattgttcgagaaggctatctgctgaagcgcaaggaggagcctgccggcctggccacgcgctttgccttcaagaagcgctacgtctggctcagcggggagaccctctccttctccaagagtcctgagtggcaggtggtgacgcaggacggcacgggggcgctgcacaccacctacctccagtgcaagaatgtgaatgagctcaaccagtggctctcggccttgcgcaaggccagcgcccccaacccgaacaagctggccgcctgccaccccggtgccttccgcagcgcgcgctggacctgctgcctccaggctgagcgctcagccgccggctgcagccgtacacactcagctgtcaccctgggggactggagtgacccactggatcctgatgctgaggcccagacagtgtatcggcagctgctcctggggcgggaccagctcaggctgaaattactggaggattctaacatggatacaactctggaggcagacacaggggcctgtcctgaggtcctggcccggcaaagagcagcaactgcccgcctgctggaggtgctcgcagacctggatcgtgcccacgaggagttccagcagcaggagcgagggaaggcggccctgggcccccttggcccctaaggaaatgccagagctagcccggaaggaggagcaagagccagggggccctcttcagcgcatcctgccccgggagtctcctgtctccttggacctctttgattctgtggtttggaggctcccagagacgtgcctagtcctgtgtgccttgagtccagaactcagggcatggaagccctttggcaggggccagccttgcactgagtgaaacttgccctctggcttgattcagactggagtggataggataaggaacctgacttatttgactgagactggggtctctacttcaccaaactggcctctatccataccaaggaggccagcctggccctgagctgctggatacagctggacctgaattcctgatgcccatgtgatgttgttgccccagatgggcactaaatggcctcactccttcctgttttcatgtctgct

SEQ ID NO: 22874 - protein, 777 aa, Homo sapiens
MAKSSSLNVRVVEGRALPAKDVSGSSDPYCLVKVDDEVVARTATVWRSLGPFWGEEYTVHLPLDFHQLAFYVLDEDTVGHDDIIGKISLSREAITADPRGIDSWINLSRVDPDAEVQGEICLSVQMLEDGQGRCLRCHVLQARDLAPRDISGTSDPFARVFWGSQSLETSTIKKTRFPHWDEVLELREMPGAPSPLRVELWDWDMVGKNDFLGMVEFSPKTLQQKPPKGWFRLLPFPRAEEDSGGNLGALRVKVRLIEDRVLPSQCYQPLMELLMESVQGPAEEDTASPLALLEELTLGDCRQDLATKLVKLFLGRGLAGRFLDYLTRREVARTMDPNTLFRSNSLASKSMEQFMKLVGMPYLHEVLKPVISRVFEEKKYMELDPCKMDLGRTRRISFKGALSEEQMRETSLGLLTGYLGPIVDAIVGSVGRCPPAMRLAFKQLHRRVEERFPQAEHQDVKYLAISGFLFLRFFAPAILTPKLFDLRDQHADPQTSRSLLLLAKAVQSIGNLGQQLGQGKELWMAPLHPFLLQCVSRVRDFLDRLVDVDGDEEAGVPARALFPPSAIVREGYLLKRKEEPAGLATRFAFKKRYVWLSGETLSFSKSPEWQVVTQDGTGALHTTYLQCKNVNELNQWLSALRKASAPNPNKLAACHPGAFRSARWTCCLQAERSAAGCSRTHSAVTLGDWSDPLDPDAEAQTVYRQLLLGRDQLRLKLLEDSNMDTTLEADTGACPEVLARQRAATARLLEVLADLDRAHEEFQQQERGKAALGPLGP

SEQ ID NO: 22875 - DNA, 3149 bp, Homo sapiens
acgagatggaaggggatgttcaaggcccctcccttgactctgaacggacccccagggaacatgcgaccctctctctggcgacgcctcccacccaccactaatacttgctcctggaccggggggcgcggaggttggagagaggaggcaggtgtctgcatgctacccgggtctcggacaggcggcactgggaccacgaggcagggagccaggcttgaagcaggtgacatgtagacgtcccctggtccagcctcggaacctgagcgcccttctgcctggaaagtttgtggctaggcgccatggccaagagcagctccctgaatgttcgcgtggtggagggccgcgcgctgcctgccaaggacgtgtctgggagcagcgacccctactgcctagtgaaagtggacgacgaggtggtggccaggacagctactgtctggaggagcctgggccccttctggggggaggagtacacggtgcacctgcctctggatttccaccagctggccttctacgtgctggatgaggacactgtcgggcacgacgacatcatcggcaagatctcgctgagcagggaggcgattacagccgacccccgagggattgacagctggattaacttgagccgagtggacccagatgcagaagtgcagggtgagatctgcctgtcagtgcagatgctggaggatgggcagggccgctgccttcgctgccatgtgcttcaggccagggacctggctcccagagacatctctggcacatctgacccatttgcacgtgtgttttggggcagccagagcttggagacctcaaccatcaagaagactcgcttcccgcactgggatgaagtgctggagctgcgggagatgccaggtgccccgtccccactgcgggtggagctctgggactgggacatggtgggcaagaatgacttcttgggcatggtggagttctctccaaagaccctccagcagaagccacctaaaggctggttccgcctcctgccctttcccagagccgaggaggattctggggggaacctgggtgccctgcgagtgaaggtacgcctgattgaggaccgcgtcctgccctcccagtgctaccagcctctcatggagctgctcatggagtctgtgcaggggccagcagaggaggacactgctagccccttggctttgctggaagagctgaccttgggggactgccgccaggaccttgccaccaagctggtgaaactctttcttggccggggactggctgggcgctttctggactatctcacccggcgtgaggtggctcggaccatggaccccaacaccctcttccgttctaactccctggcatccaagtcgatggaacagtttatgaagctcgtgggcatgccctacctgcacgaggtcctgaagcctgtgattagccgtgtctttgaggagaagaagtacatggagctggatccctgcaagatggacctgggccgcacccggaggatctccttcaaaggcgcactctcggaggagcagatgcgggagaccagcctggggctgctgacgggctacctggggcccatcgtggacgccatcgtgggctccgtggggcgctgcccgcccgccatgcgcctcgccttcaagcagctgcaccggcgagtggaggagcgcttcccccaggccgagcaccaggatgtgaagtacctggccatcagtggatttctcttcttgcgattcttcgcacctgccatccttaccccaaagctgtttgaccttcgggaccaacacgcggacccccagactagccgctcactgctgttgcttgccaaggctgtgcagagcattggaaacctgggccagcagctgggccaaggcaaggaactgtggatggcccccctgcaccccttcctgctgcagtgtgtctcacgtgtgagagacttcctggaccggctggtggatgtggatggggatgaagaagctggtgtcccagccagggccctgttcccgccctcggccattgttcgagaaggctatctgctgaagcgcaaggaggagcctgccggcctggccacgcgctttgccttcaagaagcgctacgtctggctcagcggggagaccctctccttctccaagagtcctgagtggcagatgtgtcactccatccccgtgtctcacatccgcgccgtggagcgcgtagacgagggcgccttccaactgccccacgtgatgcaggtggtgacgcaggacggcacgggggcgctgcacaccacctacctccagtgcaagaatgtgaatgagctcaaccagtggctctcggccttgcgcaaggccagcgcccccaacccgaacaagctggccgcctgccaccccggtgccttccgcagcgcgcgctggacctgctgcctccaggctgagcgctcagccgccggctgcagccgtacacactcagctgtcaccctgggggactggagtgacccactggatcctgatgctgaggcccagacagtgtatcggcagctgctcctggggcgggaccagctcaggctgaaattactggaggattctaacatggatacaactctggaggcagacacaggggcctgtcctgaggtcctggcccggcaaagagcagcaactgcccgcctgctggaggtgctcgcagacctggatcgtgcccacgaggagttccagcagcaggagcgagggaaggcggccctgggcccccttggcccctaaggaaatgccagagctagcccggaaggaggagcaagagccagggggccctcttcagcgcatcctgccccgggagtctcctgtctccttggacctctttgattctgtggtttggaggctcccagagacgtgcctagtcctgtgtgccttgagtccagaactcagggcatggaagccctttggcaggggccagccttgcactgagtgaaacttgccctctggcttgattcagactggagtggataggataaggaacctgacttatttgactgagactggggtctctacttcaccaaactggcctctatccataccaaggaggccagcctggccctgagctgctggatacagctggacctgaattcctgatgcccatgtgatgttgttgccccagatgggcactaaatggcctcactccttcctgttttcatgtctgct

SEQ ID NO: 22876 - protein, 805 aa, Homo sapiens
MAKSSSLNVRVVEGRALPAKDVSGSSDPYCLVKVDDEVVARTATVWRSLGPFWGEEYTVHLPLDFHQLAFYVLDEDTVGHDDIIGKISLSREAITADPRGIDSWINLSRVDPDAEVQGEICLSVQMLEDGQGRCLRCHVLQARDLAPRDISGTSDPFARVFWGSQSLETSTIKKTRFPHWDEVLELREMPGAPSPLRVELWDWDMVGKNDFLGMVEFSPKTLQQKPPKGWFRLLPFPRAEEDSGGNLGALRVKVRLIEDRVLPSQCYQPLMELLMESVQGPAEEDTASPLALLEELTLGDCRQDLATKLVKLFLGRGLAGRFLDYLTRREVARTMDPNTLFRSNSLASKSMEQFMKLVGMPYLHEVLKPVISRVFEEKKYMELDPCKMDLGRTRRISFKGALSEEQMRETSLGLLTGYLGPIVDAIVGSVGRCPPAMRLAFKQLHRRVEERFPQAEHQDVKYLAISGFLFLRFFAPAILTPKLFDLRDQHADPQTSRSLLLLAKAVQSIGNLGQQLGQGKELWMAPLHPFLLQCVSRVRDFLDRLVDVDGDEEAGVPARALFPPSAIVREGYLLKRKEEPAGLATRFAFKKRYVWLSGETLSFSKSPEWQMCHSIPVSHIRAVERVDEGAFQLPHVMQVVTQDGTGALHTTYLQCKNVNELNQWLSALRKASAPNPNKLAACHPGAFRSARWTCCLQAERSAAGCSRTHSAVTLGDWSDPLDPDAEAQTVYRQLLLGRDQLRLKLLEDSNMDTTLEADTGACPEVLARQRAATARLLEVLADLDRAHEEFQQQERGKAALGPLGP

SEQ ID NO: 22877 - DNA, 2576 bp, Homo sapiens
agacgcctcggcaagagcccgctgcgccccctgcgcgctcctcctgctcggagcacggctcctacctgtagagtccggacgggcgctccctccccgggcacctacaccttctcctctttcggaaatctcccatccagctacccgggtctcggacaggcggcactgggaccacgaggcagggagccaggcttgaagcaggtgacatgtagacgtcccctggtccagcctcggaacctgagcgcccttctgcctggaaagtttgtggctaggcgccatggccaagagcagctccctgaatgttcgcgtggtggagggccgcgcgctgcctgccaaggacgtgtctgggagcagcgacccctactgcctagtgaaagtggacgacgaggtggtggccaggacagctactgtctggaggagcctgggccccttctggggggaggagtacacggtgcacctgcctctggatttccaccagctggccttctacgtgctggatgaggacactgtcgggcacgacgacatcatcggcaagatctcgctgagcagggaggcgattacagccgacccccgagggattgacagctggattaacttgagccgagtggacccagatgcagaagtgcagggtgagatctgcctgtcagtgcagatgctggaggatgggcagggccgctgccttcgctgccatgtgcttcaggccagggacctggctcccagagacatctctggcacatctgacccatttgcacgtgtgttttggggcagccagagcttggagacctcaaccatcaagaagactcgcttcccgcactgggatgaagtgctggagctgcgggagatgccaggtgccccgtccccactgcgggtggagctctgggactgggacatggtgggcaagaatgacttcttgggcatggtggagttctctccaaagaccctccagcagaagccacctaaaggctggttccgcctcctgccctttcccagagccgaggaggattctggggggaacctgggtgccctgcgagtgaaggtacgcctgattgaggaccgcgtcctgccctcccagtgctaccagcctctcatggagctgctcatggagtctgtgcaggggccagcagaggaggacactgctagccccttggctttgctggaagagctgaccttgggggactgccgccaggaccttgccaccaagctggtgaaactctttcttggccggggactggctgggcgctttctggactatctcacccggcgtgaggtggctcggaccatggaccccaacaccctcttccgttctaactccctggcatccaagtcgatggaacagtttatgaagctcgtgggcatgccctacctgcacgaggtcctgaagcctgtgattagccgtgtctttgaggagaagaagtacatggagctggatccctgcaagatggacctgggccgcacccggaggatctccttcaaaggcgcactctcggaggagcagatgcgggagaccagcctggggctgctgacgggctacctggggcccatcgtggacgccatcgtgggctccgtggggcgctgcccgcccgccatgcgcctcgccttcaagcagctgcaccggcgagtggaggagcgcttcccccaggccgagcaccaggatgtgaagtacctggccatcagtggatttctcttcttgcgattcttcgcacctgccatccttaccccaaagctgtttgaccttcgggaccaacacgcggacccccagactagccgctcactgctgttgcttgccaaggctgtgcagagcattggaaacctgggccagcagctgggccaaggcaaggaactgtggatggcccccctgcaccccttcctgctgcagtgtgtctcacgtgtgagagacttcctggaccggctggtggatgtggatggggatgaagaagctggtgtcccagccagggccctgttcccgccctcggccattgttcgagaaggctatctgctgaagcgcaaggaggagcctgccggcctggccacgcgctttgccttcaagaagcgctacgtctggctcagcggggagaccctctccttctccaagagtcctgagtggcagatgtgtcactccatccccgtgtctcacatccgcgccgtggagcgcgtagacgagggcgccttccaactgccccacgtgatgcaggtggtgacgcaggacggcacgggggcgctgcacaccacctacctccagtgcaagaatgtgaatgagctcaaccagtggctctcggccttgcgcaaggccagcgcccccaacccgaacaagctggccgcctgccaccccggtgccttccgcagcgcgcgctggacctgctgcctccaggctgagcgctcaggtgagggggcagggcggactgcaggctccgccctccccacccgtcaatcagcgggtgtcccacttccgcctgggctggctgtgcaaccttgggcaagttactcaacctctctatgcctcagtctcctcaactgtgaaatgaggttgataacagtgcctatctcgtggagttgtgataattaaatgacttgatttacac

SEQ ID NO: 22878 - protein, 761 aa, Homo sapiens
MAKSSSLNVRVVEGRALPAKDVSGSSDPYCLVKVDDEVVARTATVWRSLGPFWGEEYTVHLPLDFHQLAFYVLDEDTVGHDDIIGKISLSREAITADPRGIDSWINLSRVDPDAEVQGEICLSVQMLEDGQGRCLRCHVLQARDLAPRDISGTSDPFARVFWGSQSLETSTIKKTRFPHWDEVLELREMPGAPSPLRVELWDWDMVGKNDFLGMVEFSPKTLQQKPPKGWFRLLPFPRAEEDSGGNLGALRVKVRLIEDRVLPSQCYQPLMELLMESVQGPAEEDTASPLALLEELTLGDCRQDLATKLVKLFLGRGLAGRFLDYLTRREVARTMDPNTLFRSNSLASKSMEQFMKLVGMPYLHEVLKPVISRVFEEKKYMELDPCKMDLGRTRRISFKGALSEEQMRETSLGLLTGYLGPIVDAIVGSVGRCPPAMRLAFKQLHRRVEERFPQAEHQDVKYLAISGFLFLRFFAPAILTPKLFDLRDQHADPQTSRSLLLLAKAVQSIGNLGQQLGQGKELWMAPLHPFLLQCVSRVRDFLDRLVDVDGDEEAGVPARALFPPSAIVREGYLLKRKEEPAGLATRFAFKKRYVWLSGETLSFSKSPEWQMCHSIPVSHIRAVERVDEGAFQLPHVMQVVTQDGTGALHTTYLQCKNVNELNQWLSALRKASAPNPNKLAACHPGAFRSARWTCCLQAERSGEGAGRTAGSALPTRQSAGVPLPPGLAVQPWASYSTSLCLSLLNCEMRLITVPISWSCDN

SEQ ID NO: 22879 - DNA, 654 bp, Homo sapiens
ccagacgcctcggcaagagcccgctgcgccccctgcgcgctcctcctgctcggagcacggctcctacctgtagagtccggacgggcgctccctccccgggcacctacaccttctcctctttcggaaatctcccatccagctacccgggtctcggacaggcggcactgggaccacgaggcagggagccaggcttgaagcaggtgacatgtagacgtcccctggtccagcctcggaacctgagcgcccttctgcctggaaagtttgtggctaggcgccatggccaagagcagctccctgaatgttcgcgtggtggagggccgcgcgctgcctgccaaggacgtgtctgggagcagcgacccctactgcctagtgaaagtggacgacgaggtggtggccaggacagctactgtctggaggagcctgggccccttctggggggaggagtacacggtgcacctgcctctggatttccaccagctggccttctacgtgctggatgaggacactgtcgggtttgtggttggggaaagtggaatgtgtgggttagggacccaagcctgggcacctgaggggagaggggatgtgggtccacagcccacgagggtgtgccctcccacccagaccttgacacctgcccccacttctcttggggcg

SEQ ID NO: 22880 - protein, 125 aa, Homo sapiens
MAKSSSLNVRVVEGRALPAKDVSGSSDPYCLVKVDDEVVARTATVWRSLGPFWGEEYTVHLPLDFHQLAFYVLDEDTVGFVVGESGMCGLGTQAWAPEGRGDVGPQPTRVCPPTQTLTPAPTSLG

SEQ ID NO: 22881 - DNA, 1089 bp, Homo sapiens
atggcggtgccctgggaggaatatttccgactggctttgcaagagaaactgtctacaaagctgccagagcaggctgaggatcatgtcccaccagtactgcgtctcctggagaagaggcaagagctggtagatgcagaccaggccctgcaggcccagaaggaggtgagcccccactactgtaacgaggtggtgttccgcaccaagacggcagccctgaaacagcgttgggaacagctggaacaaaaggagcgggagctaaagggatcgttcatccgctttgacaagtttttgcagcaaccgattaaaaaaaaaaaaagcgggcgggggagttgggtgaagagccagcttccgagccaggcctgctggccgcccctggttttgcgagcgaatgtcagggcaggatggaggtgccgaactccccgccagctcctgagtcctgaaggtcgtcttctccccaccgtactccccaggactccgaggcccggcgcaatcgcgcgctgcggagggcggcggaggagaggcaccaggcgggccgtcgggaggtggaggcgctgcgtctgtggacccagctccaggagctacggcgggaacacgcgcggctgcagcgccggcttaagcgcctggagccctgcgcgcgcctgctggagcaagcgctggagctgctgcccgggttccaagaggttccggagctggtggcgcgcttcgacggcctggccgagacgcaggcggcgctgaggctcagggagcgcgagcagctcgcggagctggaggcggcgcgagcgcggctgcagcagctgcgggacgcctggccggacgaggtgctcgcacagggccagcggcgggcacagctgcaggagcgcctggaggctgccagggagcgtacgctgcagtgggaatccaagtggattcagattcagaacacagcagcggagaagactctgctcctgggacgcagcaggatggctgtgctcaacctgttccagctagtgtgccagcatcaggggcagcctcccaccctggacatcgaggacacggagggacagctagagcacgaccagaccatctcttttcaaaatcaactctctgccc

SEQ ID NO: 22882 - protein, 244 aa, Homo sapiens
MAVPWEEYFRLALQEKLSTKLPEQAEDHVPPVLRLLEKRQELVDADQALQAQKEVSPHYCNEVVFRTKTAALKQRWEQLEQKERELKGSFIRFDKFLQQPIKKKKSGRGSWVKSQLPSQACWPPLVLRANVRAGWRCRTPRQLLSPEGRLLPTVLPRTPRPGAIARCGGRRRRGTRRAVGRWRRCVCGPSSRSYGGNTRGCSAGLSAWSPARACWSKRWSCCPGSKRFRSWWRASTAWPRRRRR

SEQ ID NO: 22883 - DNA, 689 bp, Homo sapiens
gacacggagggacagctagagcacgtgaagctgttcatgcaggacctctctgccatgctggccggcctgggtcaggctgagcctgcagcccctgcctcctagccctgacacaggctgacgcagctgctgcccttctgtggccatacagtgctccttttcacagatgatggctcctgcagggagtgcccccagtgcccagcacagggccaggcacacagtggtgcacgggaacgtctgctgatgcccaccctaaggccaatcaaggagccacggggctgggtcctggtcctcacatcctcttccgcatcttgcccttcttggagcgggcaccccggccgaaggcgccctgctgcagctcctggacgcggcggcggttgcgggcagagagctgcttgaggccaccacgctgcaggaagtgcagcttctgggcccggcgccgctgcttcaggatctgctgcttggtcttgagttccgggcggactcggcctgcaggggtgcctggggcgtggggccgggatgcacctgctgggacagggattcagggagctcagctgttgggatcactcccaagatcccctcctcccagaagcttgcagactcctcccctgcccctactcctgttctgtgcttattgctgtggcccagtgtctgtacacagtaggtggctaataaagttttaggcagcctca

SEQ ID NO: 22884 - protein, 51 aa, Homo sapiens
MPTLRPIKEPRGWVLVLTSSSASCPSWSGHPGRRRPAAAPGRGGGCGQRAA

SEQ ID NO: 22885 - DNA, 4472 bp, Homo sapiens
ccttctgcgttcccagcgcgcggcccgaatggcggccgacaagggcccggcggctggacctcggtcgcgagctgccatggcccagtggaggaagaagaaagggctccggaagcgccgaggcgcggcctcccaggcccgcggcagcgactcggaggacggcgagtttgagatccaggcggaagatgacgcccgggcccggaagctgggacctggaagacccctgcccaccttccccacctcggaatgcacctcggatgtggagccggacacccgggagatggtgcgtgcccagaacaagaagaagaagaagtctggaggcttccagtccatgggcctgagctacccggtgttcaaaggcatcatgaagaaggggtacaaggtgccaacacccatccagaggaagaccatcccggtgatcttggatggcaaggacgtggtggccatggcccggacgggcagtggcaagacagcctgcttcctcctcccaatgttcgagcggctcaagacccacagtgcccagaccggggcccgcgccctcatcctctcgccgacccgagagctggccctgcagaccctgaagttcactaaggagctaggcaagttcactggcctcaagactgccctgatcctgggtggagacaggatggaagaccagtttgcagccctgcacgaaaatcccgacataattattgccacgcccggacggttggtgcatgtggctgtggaaatgagcctgaagctgcagagtgtggaatacgtggtgttcgatgaagctgaccggctttttgaaatgggtttcgcagagcagctgcaggagatcatcgcccgcctccccgggggccaccagacggtgctgttctccgccacgctgcccaaactgctggtggaatttgcccgggctggcctcacggagcccgtgctcatccggcttgacgtggataccaagctcaacgagcagctgaagacctccttcttcctcgtgcgggaggacaccaaggctgccgtgctgctccacctgctgcacaacgtggtgcggccccaggaccagaccgtggtgtttgtggccacgaagcaccacgccgagtacctcactgagctgctgacgacccagcgggtgagctgcgcccacatctacagtgccctagacccgacagcccgcaagatcaatctcgccaaattcacgcttggcaagtgctccactctcattgtgactgacctggccgcccgaggcctggacatcccgctgctggacaatgtcatcaactacagcttccccgccaagggcaaactcttcctgcaccgcgtgggccgtgtggctcgggctggccgaagtggcacagcctactccttggtggcccctgatgaaatcccctacctgctggatctgcacctgttcctgggccgctccctcaccctcgcccgacccctcaaggagccctcaggtgtggccggtgtggatggcatgctgggtcgggtgccacagagtgtggtggacgaggaggacagtggtctgcagagcaccctggaggcatcgctggagctacggggcctggcccgcgttgctgataacgcccagcagcagtatgtgcgctcacgcccggcgccctcgcctgagtccatcaagagggccaaggagatggaccttgtggggctgggcctgcaccccctcttcagctcgcgttttgaggaggaggagctgcagcggctgaggctggtggacagcataaagaactaccgctcccgggcgactatctttgagatcaacgcctccagccgagacctgtgcagccaggtgatgcgcgccaagcggcagaaggaccgcaaggccatcgcccgcttccagcagggacagcaggggcggcaggagcagcaggagggcccagtgggcccagccccgagccgcccagcactgcaggagaagcagcctgagaaggaggaggaggaggaggcgggagagagtgtggaggacattttctcagaggtcgtgggccggaagcggcagcggtcaggacccaacaggggagccaagaggcggagggaggaggcccggcagcgggaccaggaattctacatcccctaccggcccaaggactttgacagcgagcggggcctgagcatcagcggggaagggggagcctttgagcagcaggcagctggcgctgtcctggacttgatgggggatgaagcccagaacctgacgaggggccggcagcagctcaagtgggaccgtaagaagaagcggtttgtgggacagtcaggacaggaagacaagaagaagattaagacagagagcggccgctacatcagcagctcctacaagcgagacctctatcagaagtggaaacagaaacagaaaattgatgatcgtgactcggacgaagaaggggcatctgaccggcgaggcccagagcgaagaggtgggaagcgagaccgtggccaagcaggtgcatcccggccccacgccccaggcacccctgcaggccgagtccgcccggaactcaagaccaagcagcagatcctgaagcagcggcgccgggcccagaagctgcacttcctgcagcgtggtggcctcaagcagctctctgcccgcaaccgccgccgcgtccaggagctgcagcagggcgccttcggccggggtgcccgctccaagaagggcaagatgcggaagaggatgtgaggaccaggacccagccccgtggctccttgattggccttagggtgggcatcagcagacgttcccgtgcaccactgtgtgcctggccctgtgctgggcactgggggcactccctgcaggagccatcatctgtgaaaaggagcactgtatggccacagaagggcagcagctgcgtcagcctaagacagagacatttgaacagggccttgaagggtgtgcaggagttcgccagcaaagccaggcaggccaagacttgagttggcaactcagctgctgctgcttccatgtgttctgggttcagaggtcatggctgcaccggtcagagccctgagtgcctcagggtttggcaatggaatttttaatgtaataaatctttattgagcactgctggtggccaggagtgcggtctacttggggaactggaatggagagacccaggtactaaaatcccagctaacgtggcagaggagttgcgggtctcctgagggtgagttctgctgccttgtccatttagcgatgaggaaagtgaagctcagagcacaaaccaggtgccagaggcgggagttggtcccccttcctcccactggacatggttgcagctgggagtgggctgggggaggggaacaggatgcccagcccagggggcaaggacacagctgctcccctctggctatgaagaggttaacgcggcccctccacacctggaggtcagaacctggcctgtcctctgtcttcttgccacccaccccctgtttgaggttctgagaaggtcaagggcagccccagcagctggattctcaggctgggcccctcacctggcagagtccatagtggagggggccttggtgatctctcatctagcatggaccctgttctgagacctgacaaagagttttttttcatgccccaaccaccctggcagggagggcctggtctgatctcattttagaggcagttgccccacacatagccccttgaccttcccatcacctcctcatcagggcctgcatttatggagtgcttgctatgtgcccctcatggcaggcccacagcactctgaacaggcacagccctcccatcttcccaatgaggaaacggattcaggaagagccactcagtccacaccccattggaaatgtgggccctcctatctcagggtctctcaggggttccctctcccgctgctcacctgtgtcagggctaggaggcaggggctgcaggctcagcctgacccaggccggccagcatggcagagaggtcctgcatgaacagcttcacctgggggggcccagcacgaagtcacatcccagccccagagtcactgtccagcccccacccctcaacacgcgggggaggccgaaaggtagggcggggactggagatcccctcattaaaagaacagtgatgatggtggttcccagaggtggtgactgagatcctaaaccgttctgggttttgaaagcctcaggccaaccttcccaactgctgcgtgagcagacaccttcacagcttcctcgctgctgtcacctgcactatccaattagtattttcatttacatcaatcagctttattttcttgtaactggatcagtcatattcattggtttgtgacctactcttatctccgtgggtggctctccttttgttttaattaacttctttatgaatatgaacttaataaataccatggatccattgtaaaaactagaacttgagggtgaacttacaaccatctgtgggctccccctcatattcatcaccgtatcaacagctgagaaggaaactttttatctccacc

SEQ ID NO: 22886 - protein, 882 aa, Homo sapiens
MAADKGPAAGPRSRAAMAQWRKKKGLRKRRGAASQARGSDSEDGEFEIQAEDDARARKLGPGRPLPTFPTSECTSDVEPDTREMVRAQNKKKKKSGGFQSMGLSYPVFKGIMKKGYKVPTPIQRKTIPVILDGKDVVAMARTGSGKTACFLLPMFERLKTHSAQTGARALILSPTRELALQTLKFTKELGKFTGLKTALILGGDRMEDQFAALHENPDIIIATPGRLVHVAVEMSLKLQSVEYVVFDEADRLFEMGFAEQLQEIIARLPGGHQTVLFSATLPKLLVEFARAGLTEPVLIRLDVDTKLNEQLKTSFFLVREDTKAAVLLHLLHNVVRPQDQTVVFVATKHHAEYLTELLTTQRVSCAHIYSALDPTARKINLAKFTLGKCSTLIVTDLAARGLDIPLLDNVINYSFPAKGKLFLHRVGRVARAGRSGTAYSLVAPDEIPYLLDLHLFLGRSLTLARPLKEPSGVAGVDGMLGRVPQSVVDEEDSGLQSTLEASLELRGLARVADNAQQQYVRSRPAPSPESIKRAKEMDLVGLGLHPLFSSRFEEEELQRLRLVDSIKNYRSRATIFEINASSRDLCSQVMRAKRQKDRKAIARFQQGQQGRQEQQEGPVGPAPSRPALQEKQPEKEEEEEAGESVEDIFSEVVGRKRQRSGPNRGAKRRREEARQRDQEFYIPYRPKDFDSERGLSISGEGGAFEQQAAGAVLDLMGDEAQNLTRGRQQLKWDRKKKRFVGQSGQEDKKKIKTESGRYISSSYKRDLYQKWKQKQKIDDRDSDEEGASDRRGPERRGGKRDRGQAGASRPHAPGTPAGRVRPELKTKQQILKQRRRAQKLHFLQRGGLKQLSARNRRRVQELQQGAFGRGARSKKGKMRKRM

SEQ ID NO: 22887 - DNA, 4380 bp, Homo sapiens
ccttctgcgttcccagcgcgcggcccgaatggcggccgacaagggcccggcggctggacctcggtcgcgagctgccatggcccagtggaggaagaagaaagggctccggaagcgccgaggcgcggcctcccaggcccgcggcagcgactcggaggacggcgagtttgagatccaggcggaagatgacgcccgggcccggaagctgggacctggaagacccctgcccaccttccccacctcggaatgcacctcggatgtggagccggacacccgggagatggtgcgtgcccagaacaagaagaagaagaagtctggaggcttccagtccatgggcctgagctacccggtgttcaaaggcatcatgaagaaggggtacaaggtgccaacacccatccagaggaagaccatcccggtgatcttggatggcaaggacgtggtggccatggcccggacgggcagtggcaagacagcctgcttcctcctcccaatgttcgagcggctcaagacccacagtgcccagaccggggcccgcgccctcatcctctcgccgacccgagagctggccctgcagaccctgaagttcactaaggagctaggcaagttcactggcctcaagactgccctgatcctgggtggagacaggatggaagaccagtttgcagccctgcacgaaaatcccgacataattattgccacgcccggacggttggtgcatgtggctgtggaaatgagcctgaagctgcagagtgtggaatacgtggtgttcgatgaagctgaccggctttttgaaatgggtttcgcagagcagctgcaggagatcatcgcccgcctccccgggggccaccagacggtgctgttctccgccacgctgcccaaactgctggtggaatttgcccgggctggcctcacggagcccgtgctcatccggcttgacgtggataccaagctcaacgagcagctgaagacctccttcttcctcgtgcgggaggacaccaaggctgccgtgctgctccacctgctgcacaacgtggtgcggccccaggaccagaccgtggtgtttgtggccacgaagcaccacgccgagtacctcactgagctgctgacgacccagcgggtgagctgcgcccacatctacagtgccctagacccgacagcccgcaagatcaatctcgccaaattcacgcttggcaagtgctccactctcattgtgactgacctggccgcccgaggcctggacatcccgctgctggacaatgtcatcaactacagcttccccgccaagggcaaactcttcctgcaccgcgtgggccgtgtggctcgggctggccgaagtggcacagcctactccttggtggcccctgatgaaatcccctacctgctggatctgcacctgttcctgggccgctccctcaccctcgcccgacccctcaaggagccctcaggtgtggccggtgtggatggcatgctgggtcgggtgccacagagtgtggtggacgaggaggacagtggtctgcagagcaccctggaggcatcgctggagctacggggcctggcccgcgttgctgataacgcccagcagcagtatgtgcgctcacgcccggcgccctcgcctgagtccatcaagagggccaaggagatggaccttgtggggctgggcctgcaccccctcttcagctcgcgttttgaggaggaggagctgcagcggctgaggctggtggacagcataaagaactaccgctcccgggcgactatctttgagatcaacgcctccagccgagacctgtgcagccaggtgatgcgcgccaagcggcagaaggaccgcaaggccatcgcccgcttccagcagggacagcaggggcggcaggagcagcaggagggcccagtgggcccagccccgagccgcccagcactgcaggagaagcagcctgagaaggaggaggaggaggaggcgggagagagtgtggaggacattttctcagaggtcgtgggccggaagcggcagcggtcaggacccaacaggggagccaagaggcggagggaggaggcccggcagcgggaccaggaattctacatcccctaccggcccaaggactttgacagcgagcggggcctgagcatcagcggggaagggggagcctttgagcagcaggcagctggcgctgtcctggacttgatgggggatgaagcccagaacctgacgaggggccggcagcagctcaagtgggaccgtaagaagaagcggtttgtgggacagtcaggacaggaagacaagaagaagattaagacagagagcggccgctacatcagcagctcctacaagcgagacctctatcagaagtggaaacagaaacagaaaattgatgatcgtgactcggacgaagaaggggcatctgaccggcgaggcccagagcgaagaggtgggaagcgagaccgtggccaagcaggtgcatcccggccccacgccccaggcacccctgcaggccgagtccgcccggaactcaagaccaagcagcagatcctgaagcagcggcgccgggcccagaagctgcacttcctgcagcgtggtggcctcaagcagctctctgcccgcaaccgccgccgcgtccaggagctgcagcagggcgccttcggccggggtgcccgctccaagaagggcaagatgcggaagaggatgtgaggaccaggacccagccccgtggctccttgattggccttagggtgggcatcagcagacgttcccgtgcaccactgtgtgcctggccctgtgctgggcactgggggcactccctgcaggagccatcatctgtgaaaaggagcactgtatggccacagaagggcagcagctgcgtcagcctaagacagagacatttgaacagggccttgaagggtgtgcaggagttcgccagcaaagccaggcaggccaagacttgagttggcaactcagctgctgctgcttccatgtgttctgggttcagaggtcatggctgcaccggtcagagccctgagtgcctcagggtttggcaatggaatttttaatgtaataaatctttattgagcactgctggtggccaggagtgcggtctacttggggaactggaatggagagacccaggtactaaaatcccagctaacgtggcagaggagttgcgggtctcctgagggtgagttctgctgccttgtccatttagcgatgaggaaagtgaagctcagagcacaaaccaggtgccagaggcgggagttggtcccccttcctcccactggacatggttgcagctgggagtgggctgggggaggggaacaggatgcccagcccagggggcaaggacacagctgctcccctctggctatgaagaggttaacgcggcccctccacacctggaggtcagaacctggcctgtcctctgtcttcttgccacccaccccctgtttgaggttctgagaaggtcaagggcagccccagcagctggattctcaggctgggcccctcacctggcagagtccatagtggagggggccttggtgatctctcatctagcatggaccctgttctgagacctgacaaagagttttttttcatgccccaaccaccctggcagggagggcctggtctgatctcattttagaggcagttgccccacacatagccccttgaccttcccatcacctcctcatcagggcctgcatttatggagtgcttgctatgtgcccctcatggcaggcccacagcactctgaacaggcacagccctcccatcttcccaatgaggaaacggattcaggaagagccactcagtccacaccccattggaaatgtgggccctcctatctcagggtctctcaggggttccctctcccgctgctcacctgtgtcagggctaggaggcaggggctgcaggctcagcctgacccaggccggccagcatggcagagaggtcctgcatgaacagcttcacctgggggggcccagcacgaagtcacatcccagccccagagtcactgtccagcccccacccctcaacacgcgggggaggccgaaaggtagggcggggactggagatcccctcattaaaagaacagtgatgatggtggttcccagaggtggtgactgagatcctaaaccgttctgggttttgaaagcctcaggccaaccttcccaactgctgcgtgagcagacaccttcacagcttcctcgctgctgtcacctgcactatccaattagtattttcatttacatcaatcagctttattttcttgtaactggatcagtcatattcattggtttgtgacctactcttatctccgtgggtggctctccttttgttttaattaacttctttatgaatatgaacttaataaataccatggatccattgtaaaaact

SEQ ID NO: 22888 - protein, 882 aa, Homo sapiens; identical to SEQ ID NO: 22886

SEQ ID NO: 22889 - DNA, 1584 bp, Homo sapiens
cttctgcgttcccagcgcgcggcccgaatggcggccgacaagggcccggcggctggacctcggtcgcgagctgccatggcccagtggaggaagaagaaagggctccggaagcgccgaggcgcggcctcccaggcccgcggcagcgactcggaggacggcgagtttgagatccaggcggaagatgacgcccgggcccggaagctgggacctggaagacccctgcccaccttccccacctcggaatgcacctcggatgtggagccggacacccgggagatggtgcgtgcccagaacaagaagaagaagaagtctggaggcttccagtccatgggcctgagctacccggtgttcaaaggcatcatgaagaagggggggagcctttgagcagcaggcagctggcgctgtcctggacttgatgggggatgaagcccagaacctgacgaggggccggcagcagctcaagtgggaccgtaagaagaagcggtttgtgggacagtcaggacaggaagacaagaagaagattaagacagagagcggccgctacatcagcagctcctacaagcgagacctctatcagaagtggaaacagaaacagaaaattgatgatcgtgactcggacgaagaaggggcatctgaccggcgaggcccagagcgaagaggtgggaagcgagaccgtggccaagcaggtgcatcccggccccacgccccaggcacccctgcaggccgagtccgcccggaactcaagaccaagcagcagatcctgaagcagcggcgccgggcccagaagctgcacttcctgcagcgtggtggcctcaagcagctctctgcccgcaaccgccgccgcgtccaggagctgcagcagggcgccttcggccggggtgcccgctccaagaagggcaagatgcggaagaggatgtgaggaccaggacccagccccgtggctccttgattggccttagggtgggcatcagcagacgttcccgtgcaccactgtgtgcctggccctgtgctgggcactgggggcactccctgcaggagccatcatctgtgaaaaggagcactgtatggccacagaagggcagcagctgcgtcagcctaagacagagacatttgaacagggccttgaagggtgtgcaggagttcgccagcaaagccaggcaggccaagacttgagttggcaactcagctgctgctgcttccatgtgttctgggttcagaggtcatggctgcaccggtcagagccctgagtgcctcagggtttggcaatggaatttttaatgtaataaatctttattgagcactgctggtggccaggagtgcggtctacttggggaactggaatggagagacccaggtactaaaatcccagctaacgtggcagaggagttgcgggtctcctgagggtgagttctgctgccttgtccatttagcgatgaggaaagtgaagctcagagcacaaaccaggtgccagaggcgggagttggtcccccttcctcccactggacatggttgcagctgggagtgggctgggggaggggaacaggatgcccagcccagggggcaaggacacagctgctcccctct

SEQ ID NO: 22890 - protein, 167 aa, Homo sapiens [sequence omitted]

SEQ ID NO: 22891 - DNA, 1065 bp, Homo sapiens
gcttcagctgcggctgggataacggaactctgtctgctggggcagtgtggggaggagccttctcccatcccaggggcttcacgcagcttccttaacgaggtttcccagctatcagaagtggaaacagaaacagaaaattgatgatcgtgactcggacgaagaaggggcatctgaccggcgaggcccagagcgaagaggtgggaagcgagaccgtggccaagcaggtgcatcccggccccacgccccaggcacccctgcaggccgagtccgcccggaactcaagaccaagcagcagatcctgaagcagcggcgccgggcccagaagctgcacttcctgcagcgtggtggcctcaagcagctctctgcccgcaaccgccgccgcgtccaggagctgcagcagggcgccttcggccggggtgcccgctccaagaagggcaagatgcggaagaggatgtgaggaccaggacccagccccgtggctccttgattggccttagggtgggcatcagcagacgttcccgtgcaccactgtgtgcctggccctgtgctgggcactgggggcactccctgcaggagccatcatctgtgaaaaggagcactgtatggccacagaagggcagcagctgcgtcagcctaagacagagacatttgaacagggccttgaagggtgtgcaggagttcgccagcaaagccaggcaggccaagacttgagttggcaactcagctgctgctgcttccatgtgttctgggttcagaggtcatggctgcaccggtcagagccctgagtgcctcagggtttggcaatggaatttttaatgtaataaatctttattgagcactgctggtggccaggagtgcggtctacttggggaactggaatggagagacccaggtactaaaatcccagctaacgtggcagaggagttgcgggtctcctgagggtgagttctgctgccttgtccatttagcgatgaggaaagtgaagctcagagcacaaaccaggtgccagaggcgggagttggtcccccttcctcccactggacatggttgcagctgggagtgggc

SEQ ID NO: 22892 - protein, 53 aa, Homo sapiens
MIVTRTKKGHLTGEAQSEEVGSETVAKQVHPGPTPQAPLQAESARNSRPSSRS

SEQ ID NO: 22893 - DNA, 842 bp, Homo sapiens
gcttcagctgcggctgggataacggaactctgtctgctggggcagtgtggggaggagccttctcccatcccaggggcttcacgcagcttccttaacgaggtttcccagctatcagaagtggaaacagaaacagaaaattgatgatcgtgactcggacgaagaaggggcatctgaccggcgaggcccagagcgaagaggtgggaagcgagaccgtggccaagcaggtgcatcccggccccacgccccaggcacccctgcaggccgagtccgcccggaactcaagaccaagcagcagatcctgaagcagcggcgccgggcccagaagctgcacttcctgcagcgtggtggcctcaagcagctctctgcccgcaaccgccgccgcgtccaggagctgcagcagggcgccttcggccggggtgcccgctccaagaagggcaagatgcggaagaggatgtgaggaccaggacccagccccgtggctccttgattggccttagggtgggcatcagcagacgttcccgtgcaccactgtgtgcctggccctgtgctgggcactgggggcactccctgcaggagccatcatctgtgaaaaggagcactgtatggccacagaagggcagcagctgcgtcagcctaagacagagacatttgaacagggccttgaagggtgtgcaggagttcgccagcaaagccaggcaggccaagacttgagttggcaactcagctgctgctgcttccatgtgttctgggttcagaggtcatggctgcaccggtcagagccctgagtgcctcagggtttggcaatggaatttttaatgtaataaatctttattgagcactgc

SEQ ID NO: 22894 - protein, 53 aa, Homo sapiens; identical to SEQ ID NO: 22892

SEQ ID NO: 22895 - DNA, 1304 bp, Homo sapiens
cttctgcgttcccagcgcgcggcccgaatggcggccgacaagggcccggcggctggacctcggtcgcgagctgccatggcccagtggaggaagaagaaagggctccggaagcgccgaggcgcggcctcccaggcccgcggcagcgactcggaggacggcgagtttgagatccaggcggaagatgacgcccgggcccggaagctgggacctggaagacccctgcccaccttccccacctcggaatgcacctcggatgtggagccggacacccgggagatggtgcgtgcccagaacaagaagaagaagaagtctggaggcttccagtccatgggcctgagctacccggtgttcaaaggcatcatgaagaagggggggagcctttgagcagcaggcagctggcgctgtcctggacttgatgggggatgaagcccagaacctgacgaggggccggcagcagctcaagtgggaccgtaagaagaagcggtttgtgggacagtcaggacaggaagacaagaagaagattaagacagagagcggccgctacatcagcagctcctacaagcgagacctctatcagaagtggaaacagaaacagaaaattgatgatcgtgactcggacgaagaaggggcatctgaccggcgaggcccagagcgaagaggtgggaagcgagaccgtggccaagcaggtgcatcccggccccacgccccaggcacccctgcaggccgagtccgcccggaactcaagaccaagcagcagatcctgaagcagcggcgccgggcccagaagctgcacttcctgcagcgtggtggcctcaagcagctctctgcccgcaaccgccgccgcgtccaggagctgcagcagggcgccttcggccggggtgcccgctccaagaagggcaagatgcggaagaggatgtgaggaccaggacccagccccgtggctccttgattggccttagggtgggcatcagcagacgttcccgtgcaccactgtgtgcctggccctgtgctgggcactgggggcactccctgcaggagccatcatctgtgaaaaggagcactgtatggccacagaagggcagcagctgcgtcagcctaagacagagacatttgaacagggccttgaagggtgtgcaggagttcgccagcaaagccaggcaggccaagacttgagttggcaactcagctgctgctgcttccatgtgttctgggttcagaggtcatggctgcaccggtcagagccctgagtgcctcagggtttggcaatggaatttttaatgtaataaatctttattgagcactgc

SEQ ID NO: 22896 - protein, 167 aa, Homo sapiens [sequence omitted]

SEQ ID NO: 22897 - DNA, 3061 bp, Homo sapiens
cttctgcgttcccagcgcgcggcccgaatggcggccgacaagggcccggcggctggacctcggtcgcgagctgccatggcccagtggaggaagaagaaagggctccggaagcgccgaggcgcggcctcccaggcccgcggcagcgactcggaggacggcgagtttgagatccaggcggaagatgacgcccgggcccggaagctgggacctggaagacccctgcccaccttccccacctcggaatgcacctcggatgtggagccggacacccgggagatggtgcgtgcccagaacaagaagaagaagaagtctggaggcttccagtccatgggcctgagctacccggtgttcaaaggcatcatgaagaaggggtacaaggtgccaacacccatccagaggaagaccatcccggtgatcttggatggcaaggacgtggtggccatggcccggacgggcagtggcaagacagcctgcttcctcctcccaatgttcgagcggctcaagacccacagtgcccagaccggggcccgcgccctcatcctctcgccgacccgagagctggccctgcagaccctgaagttcactaaggagctaggcaagttcactggcctcaagactgccctgatcctgggtggagacaggatggaagaccagtttgcagccctgcacgaaaatcccgacataattattgccacgcccggacggttggtgcatgtggctgtggaaatgagcctgaagctgcagagtgtggaatacgtggtgttcgatgaagctgaccggctttttgaaatgggtttcgcagagcagctgcaggagatcatcgcccgcctccccgggggccaccagacggtgctgttctccgccacgctgcccaaactgctggtggaatttgcccgggctggcctcacggagcccgtgctcatccggcttgacgtggataccaagctcaacgagcagctgaagacctccttcttcctcgtgcgggaggacaccaaggctgccgtgctgctccacctgctgcacaacgtggtgcggccccaggaccagaccgtggtgtttgtggccacgaagcaccacgccgagtacctcactgagctgctgacgacccagcgggtgagctgcgcccacatctacagtgccctagacccgacagcccgcaagatcaatctcgccaaattcacgcttggcaagtgctccactctcattgtgactgacctggccgcccgaggcctggacatcccgctgctggacaatgtcatcaactacagcttccccgccaagggcaaactcttcctgcaccgcgtgggccgtgtggctcgggctggccgaagtggcacagcctactccttggtggcccctgatgaaatcccctacctgctggatctgcacctgttcctgggccgctccctcaccctcgcccgacccctcaaggagccctcaggtgtggccggtgtggatggcatgctgggtcgggtgccacagagtgtggtggacgaggaggacagtggtctgcagagcaccctggaggcatcgctggagctacggggcctggcccgcgttgctgataacgcccagcagcagtatgtgcgctcacgcccggcgccctcgcctgagtccatcaagagggccaaggagatggaccttgtggggctgggcctgcaccccctcttcagctcgcgttttgaggaggaggagctgcagcggctgaggctggtggacagcataaagaactaccgctcccgggcgactatctttgagatcaacgcctccagccgagacctgtgcagccaggtgatgcgcgccaagcggcagaaggaccgcaaggccatcgcccgcttccagcagggacagcaggggcggcaggagcagcaggagggcccagtgggcccagccccgagccgcccagcactgcaggagaagcagcctgagaaggaggaggaggaggaggcgggagagagtgtggaggacattttctcagaggtcgtgggccggaagcggcagcggtcaggacccaacaggggagccaagaggcggagggaggaggcccggcagcgggaccaggaattctacatcccctaccggcccaaggactttgacagcgagcggggcctgagcatcagcggggaagggggagcctttgagcagcaggcagctggcgctgtcctggacttgatgggggatgaagcccagaacctgacgaggggccggcagcagctcaagtgggaccgtaagaagaagcggtttgtgggacagtcaggacaggaagacaagaagaagattaagacagagagcggccgctacatcagcagctcctacaagcgagacctctatcagaagtggaaacagaaacagaaaattgatgatcgtgactcggacgaagaaggggcatctgaccggcgaggcccagagcgaagaggtgggaagcgagaccgtggccaagcaggtgcatcccggccccacgccccaggcacccctgcaggccgagtccgcccggaactcaagaccaagcagcagatcctgaagcagcggcgccgggcccagaagctgcacttcctgcagcgtggtggcctcaagcagctctctgcccgcaaccgccgccgcgtccaggagctgcagcagggcgccttcggccggggtgcccgctccaagaagggcaagatgcggaagaggatgtgaggaccaggacccagccccgtggctccttgattggccttagggtgggcatcagcagacgttcccgtgcaccactgtgtgcctggccctgtgctgggcactgggggcactccctgcaggagccatcatctgtgaaaaggagcactgtatggccacagaagggcagcagctgcgtcagcctaagacagagacatttgaacagggccttgaagggtgtgcaggagttcgccagcaaagccaggcaggccaagacttgagttggcaactcagctgctgctgcttccatgtgttctgggttcagaggtcatggctgcaccggtcagagccctgagtgcctcagggtttggcaatggaatttttaatgtaataaatctttattgagcactgc

SEQ ID NO: 22898 - protein, 882 aa, Homo sapiens; identical to SEQ ID NO: 22886

SEQ ID NO: 22899 - DNA, 498 bp, Homo sapiens
gaggaggaggcgggagagagtgtggaggacattttctcagaggtcgtgggccggaagcggcagcggtcaggacccaacaggggagccaagaggcggagggaggaggcccggcagcgggaccaggaattctacatcccctaccggcccaaggactttgacagcgagcggggcctgagcatcagcggggaagggggagcctttgagcagcaggcagctggcgctgtcctggacttgatgggggatgaagcccagaacctgacgaggggccggcagcagctcaagtggtgagtgatcgagtgagccgcccctccatgctcggggtgagtgaccgagtgagctgctcctccgtgcctggggtgagtgatcgagtgagccgcccctccctccatgcccggggtgagtgagtgagtgagccgcccctccatgcccggggtgagtgatcgagtgagctgcccctccaggcccagggtgagtgagagagtgagctgcccctccatg

SEQ ID NO: 22900 - protein, 30 aa, Homo sapiens
MLGVSDRVSCSSVPGVSDRVSRPSLHARGE

SEQ ID NO: 22901 - DNA, 935 bp, Homo sapiens
cttctgcgttcccagcgcgcggcccgaatggcggccgacaagggcccggcggctggacctcggtcgcgagctgccatggcccagtggaggaagaagaaagggctccggaagcgccgaggcgcggcctcccaggcccgcggcagcgactcggaggacggcgagtttgagatccaggcggaagatgacgcccgggcccggaagctgggacctggaagacccctgcccaccttccccacctcggaatgcacctcggatgtggagccggacacccgggagatggtgcgtgcccagaacaagaagaagaagaagtctggaggcttccagtccatgggcctgagctacccggtgttcaaaggcatcatgaagaaggggtacaaggtgccaacacccatccagaggaagaccatcccggtgatcttggatggcaaggacgtggtggccatggcccggacgggcagtggcaagacagcctgcttcctcctcccaatgttcgagcggctcaagacccacagtgcccagaccggggcccgcgccctcatcctctcgccgacccgagagctggccctgcagaccctgaagttcactaaggagctaggcaagttcactggcctcaagactgccctgatcctgggtggagacaggatggaagaccagtttgcagccctgcacgaaaatcccgacataattattgccacgcccggacggttggtgcatgtggctgtggaaatgagcctgaagctgcagagtgtggaatacgtggtgttcgatgaagctgaccggctttttgaaatgggtttcgcagagcagctgcaggagatcatcgcccgcctccccgggggccaccagacggtgctgttctccgccacgctgcccaaactgctggtggaatttgcccgggctggtgcgtgagctgggggtggagatgggggctgggg

SEQ ID NO: 22902 - protein, 293 aa, Homo sapiens
MAADKGPAAGPRSRAAMAQWRKKKGLRKRRGAASQARGSDSEDGEFEIQAEDDARARKLGPGRPLPTFPTSECTSDVEPDTREMVRAQNKKKKKSGGFQSMGLSYPVFKGIMKKGYKVPTPIQRKTIPVILDGKDVVAMARTGSGKTACFLLPMFERLKTHSAQTGARALILSPTRELALQTLKFTKELGKFTGLKTALILGGDRMEDQFAALHENPDIIIATPGRLVHVAVEMSLKLQSVEYVVFDEADRLFEMGFAEQLQEIIARLPGGHQTVLFSATLPKLLVEFARAGA

SEQ ID NO: 22903 - DNA, 758 bp, Homo sapiens
cttctgcgttcccagcgcgcggcccgaatggcggccgacaagggcccggcggctggacctcggtcgcgagctgccatggcccagtggaggaagaagaaagggctccggaagcgccgaggcgcggcctcccaggcccgcggcagcgactcggaggacggcgagtttgagatccaggcggaagatgacgcccgggcccggaagctgggacctggaagacccctgcccaccttccccacctcggaatgcacctcggatgtggagccggacacccgggagatggtgcgtgcccagaacaagaagaagaagaagtctggaggcttccagtccatgggcctgagctacccggtgttcaaaggcatcatgaagaaggggtacaaggtgccaacacccatccagaggaagaccatcccggtgatcttggatggcaaggacgtggtggccatggcccggacgggcagtggcaagacagcctgcttcctcctcccaatgttcgagcggctcaagacccacagtgcccagaccggggcccgcgccctcatcctctcgccgacccgagagctggccctgcagaccctgaagttcactaaggaggtgtgtctgagcttggctagaggctggaggcaagggctgacttgggaccggacacagaggccacgagtgtgctgtcatctcacccctgccctctctcaatcactttctcttctcagctaggcaagttcactggcctcaagactgccctgatcctgggtggagacagg

SEQ ID NO: 22904 - protein, 227 aa, Homo sapiens
MAADKGPAAGPRSRAAMAQWRKKKGLRKRRGAASQARGSDSEDGEFEIQAEDDARARKLGPGRPLPTFPTSECTSDVEPDTREMVRAQNKKKKKSGGFQSMGLSYPVFKGIMKKGYKVPTPIQRKTIPVILDGKDVVAMARTGSGKTACFLLPMFERLKTHSAQTGARALILSPTRELALQTLKFTKEVCLSLARGWRQGLTWDRTQRPRVCCHLTPALSQSLSLLS

SEQ ID NO: 22905 - DNA, 882 bp, Homo sapiens
gctttcgccagtgcctgcggccctcggcggcctagtacacacgcacctgagtgagtggcaccagaggaccctctccatgtttagggacctcctgggcctcaggagcgtggcgcccgcccctgggcggactccccccatccgcgggcgcgaatggtccgggccgcgtccgcagtgctgctggctgctccctggttgctgggtgcaaagtgctgggttctgggtttctggattcgcgggccgttcacacgtagcctgtgccggctcctcgggtgagtccgtccgcgcgcggtgccccgggacggcctaggctgccgggggtccggggccccaggcattccgggctgcagattgacggggatcccggatgcaccgcgcgcccccgcgccctcaccgacgggtccagacctggtgggaagaaggtgcggggacgggtccctgaggatcccgatgcctacgagccaagatgctcagctttataggtgtgacctacacatgtgacttcacctcagttttgtgatccgtaaaatggacaaattcgaagctacttcacagtgctgttgagaggattaaatgaaacaatgcttgtaaagctctttgcaggagggagcctcggaagcagggcctggccggcagagcacacctgctgtcaccagggaccacaggcagcatgaagacccccgtggagctggccgtcagtgggatgcagaccctcggccttcagcaccgctgccgaggtggctaccgggtcaaggccaggacgtcatatgtggatgagactctgtttggcagcccagcaggcacccggcctaccccaccggacttcgatccgccctgggaggcatcgaaggccttgggggcaaaggggagctgtgagaccacccc

SEQ ID NO: 22906 - protein, 70 aa, Homo sapiens
MKTPVELAVSGMQTLGLQHRCRGGYRVKARTSYVDETLFGSPAGTRPTPPDFDPPWEASKALGAKGSCET

SEQ ID NO: 22907 - DNA, 1645 bp, Homo sapiens
agtgcctgcggccctcggcggcctagtacacacgcacctgagtgagtggcaccagaggaccctctccatgtttagggacctcctgggcctcaggagcgtggcgcccgcccctgggcggactccccccatccgcgggcgcgaatggtccgggccgcgtccgcagtgctgctggctgctccctggttgctgggtgcaaagtgctgggttctgggtttctggattcgcgggccgttcacacgtagcctgtgccggctcctcgggtgagtccgtccgcgcgcggtgccccgggacggcctaggctgccgggggtccggggccccaggcattccgggctgcagattgacggggatcccggatgcaccgcgcgcccccgcgccctcaccgacgggtccagacctggtgggaagaaggtgcggggacgggtccctgaggatcccgatgcctacgagccaagatgctcagctttataggtgtgacctacacatgtgacttcacctcagttttgtgatccgtaaaatggacaaattcgaagctacttcacagtgctgttgagaggattaaatgaaacaatgcttgtaaagctctttgcaggagggagcctcggaagcagggcctggccggcagagcacacctgctgtcaccagggaccacaggcagcatgaagacccccgtggagctggccgtcagtgggatgcagaccctcggccttcagcaccgctgccgaggtggctaccgggtcaaggccaggacgtcatatgtggatgagactctgtttggcagcccagcaggcacccggcctaccccaccggacttcgatccgccctgggtggagaaggctaacagaaccagaggcgtgggcaaggaggcatcgaaggccttgggggcaaaggggagctgtgagaccaccccctcaaggggcagcacccccaccctcacaccaaggaagaagaacaaatacagacccatcagccacaccccgtcttactgtgatgagtcgctgtttggctcccgatctgaaggcgccagcttcggggccccgcggatggcgaagggggatgccgcaaagctccgtgctctcttgtggacgccaccacctacccccaggggtagccactcgccccgccccagggagccaccagtgccccccacacaaatgggcctcaggatctcaggccttccacgtcaggggtgaccttccggagccccctggtgacttccagggctcgctcagttagcatttcagtgccatctaccccacgacgaggtggggccacccagaaaccaaagcccccttggaaatgatactctttcatcagggttgcctatggggccacggcgacaggtatggccccttgccagggtaggaggacattcatcacccagggaaccccaggtattaaagaagcccctgtgggggcagacagacatagcaggggtgggcagtgcctccctttatcctgacaatctctagtcgattcttgcctttttctcccgattgcggatttgggggccacctctaagatgcctctctccagccctgtctcaaccatactccaaattagtgccaacccaggggcctggcacctcccacatcatccattgtcttgctgccaagtgcgaataaacggcgtgattgccaacctgg

SEQ ID NO: 22908 - protein, 177 aa, Homo sapiens
MKTPVELAVSGMQTLGLQHRCRGGYRVKARTSYVDETLFGSPAGTRPTPPDFDPPWVEKANRTRGVGKEASKALGAKGSCETTPSRGSTPTLTPRKKNKYRPISHTPSYCDESLFGSRSEGASFGAPRMAKGDAAKLRALLWTPPPTPRGSHSPRPREPPVPPTQMGLRISGLPRQG

SEQ ID NO: 22909 - DNA, 1811 bp, Homo sapiens
agtgcctgcggccctcggcggcctagtacacacgcacctgagtgagtggcaccagaggaccctctccatgtttagggacctcctgggcctcaggagcgtggcgcccgcccctgggcggactccccccatccgcgggcgcgaatggtccgggccgcgtccgcagtgctgctggctgctccctggttgctgggtgcaaagtgctgggttctgggtttctggattcgcgggccgttcacacgtagcctgtgccggctcctcgggtgagtccgtccgcgcgcggtgccccgggacggcctaggctgccgggggtccggggccccaggcattccgggctgcagattgacggggatcccggatgcaccgcgcgcccccgcgccctcaccgacgggtccagacctggtgggaagaaggtgcggggacgggtccctgaggatcccgatgcctacgagccaagatgctcagctttataggtgtgacctacacatgtgacttcacctcagttttgtgatccgtaaaatggacaaattcgaagctacttcacagtgctgttgagaggattaaatgaaacaatgcttgtaaagctctttgcaggagggagcctcggaagcagggcctggccggcagagcacacctgctgtcaccagggaccacaggcagcatgaagacccccgtggagctggccgtcagtgggatgcagaccctcggccttcagcaccgctgccgaggtggctaccgggtcaaggccaggacgtcatatgtggatgagactctgtttggcagcccagcaggcacccggcctaccccaccggacttcgatccgccctgggtggagaaggctaacagaaccagaggcgtgggcaaggaggcatcgaaggccttgggggcaaaggggagctgtgagaccaccccctcaaggggcagcacccccaccctcacaccaaggaagaagaacaaatacagacccatcagccacaccccgtcttactgtgatgagtcgctgtttggctcccgatctgaaggcgccagcttcggggccccgcggatggcgaagggggatgccgcaaagctccgtgctctcttgtggacgccaccacctacccccaggggtagccactcgccccgccccagggaggcaccactgcgagccattcacccagctggtccctccaagacagagccggggccagcggcagactcccagaagttatctatgggtgggttacactcttcacgccccctgaagcggggactttcccattccctcacccacctgaatgtccccagcactggtcatccagccaccagtgccccccacacaaatgggcctcaggatctcaggccttccacgtcaggggtgaccttccggagccccctggtgacttccagggctcgctcagttagcatttcagtgccatctaccccacgacgaggtggggccacccagaaaccaaagcccccttggaaatgatactctttcatcagggttgcctatggggccacggcgacaggtatggccccttgccagggtaggaggacattcatcacccagggaaccccaggtattaaagaagcccctgtgggggcagacagacatagcaggggtgggcagtgcctccctttatcctgacaatctctagtcgattcttgcctttttctcccgattgcggatttgggggccacctctaagatgcctctctccagccctgtctcaaccatactccaaattagtgccaacccaggggcctggcacctcccacatcatccattgtcttgctgccaagtgcgaataaacggcgtgattgccaacctgg

SEQ ID NO: 22910 - protein, 269 aa, Homo sapiens; identical to SEQ ID NO: 3029

SEQ ID NO: 22911 - DNA, 1679 bp, Homo sapiens
agtgcctgcggccctcggcggcctagtacacacgcacctgagtgagtggcaccagaggaccctctccatgtttagggacctcctgggcctcaggagcgtggcgcccgcccctgggcggactccccccatccgcgggcgcgaatggtccgggccgcgtccgcagtgctgctggctgctccctggttgctgggtgcaaagtgctgggttctgggtttctggattcgcgggccgttcacacgtagcctgtgccggctcctcgggtgagtccgtccgcgcgcggtgccccgggacggcctaggctgccgggggtccggggccccaggcattccgggctgcagattgacggggatcccggatgcaccgcgcgcccccgcgccctcaccgacgggtccagacctggtgggaagaaggtgcggggacgggtccctgaggatcccgatgcctacgagccaagatgctcagggagcctcggaagcagggcctggccggcagagcacacctgctgtcaccagggaccacaggcagcatgaagacccccgtggagctggccgtcagtgggatgcagaccctcggccttcagcaccgctgccgaggtggctaccgggtcaaggccaggacgtcatatgtggatgagactctgtttggcagcccagcaggcacccggcctaccccaccggacttcgatccgccctgggtggagaaggctaacagaaccagaggcgtgggcaaggaggcatcgaaggccttgggggcaaaggggagctgtgagaccaccccctcaaggggcagcacccccaccctcacaccaaggaagaagaacaaatacagacccatcagccacaccccgtcttactgtgatgagtcgctgtttggctcccgatctgaaggcgccagcttcggggccccgcggatggcgaagggggatgccgcaaagctccgtgctctcttgtggacgccaccacctacccccaggggtagccactcgccccgccccagggaggcaccactgcgagccattcacccagctggtccctccaagacagagccggggccagcggcagactcccagaagttatctatgggtgggttacactcttcacgccccctgaagcggggactttcccattccctcacccacctgaatgtccccagcactggtcatccagccaccagtgccccccacacaaatgggcctcaggatctcaggccttccacgtcaggggtgaccttccggagccccctggtgacttccagggctcgctcagttagcatttcagtgccatctaccccacgacgaggtggggccacccagaaaccaaagcccccttggaaatgatactctttcatcagggttgcctatggggccacggcgacaggtatggccccttgccagggtaggaggacattcatcacccagggaaccccaggtattaaagaagcccctgtgggggcagacagacatagcaggggtgggcagtgcctccctttatcctgacaatctctagtcgattcttgcctttttctcccgattgcggatttgggggccacctctaagatgcctctctccagccctgtctcaaccatactccaaattagtgccaacccaggggcctggcacctcccacatcatccattgtcttgctgccaagtgcgaataaacggcgtgattgccaacctgg

SEQ ID NO: 22912 - protein, 293 aa, Homo sapiens
MLREPRKQGLAGRAHLLSPGTTGSMKTPVELAVSGMQTLGLQHRCRGGYRVKARTSYVDETLFGSPAGTRPTPPDFDPPWVEKANRTRGVGKEASKALGAKGSCETTPSRGSTPTLTPRKKNKYRPISHTPSYCDESLFGSRSEGASFGAPRMAKGDAAKLRALLWTPPPTPRGSHSPRPREAPLRAIHPAGPSKTEPGPAADSQKLSMGGLHSSRPLKRGLSHSLTHLNVPSTGHPATSAPHTNGPQDLRPSTSGVTFRSPLVTSRARSVSISVPSTPRRGGATQKPKPPWK

SEQ ID NO: 22913 - DNA, 1716 bp, Homo sapiens
agtgcctgcggccctcggcggcctagtacacacgcacctgagtgagtggcaccagaggaccctctccatgtttagggacctcctgggcctcaggagcgtggcgcccgcccctgggcggactccccccatccgcgggcgcgaatggtccgggccgcgtccgcagtgctgctggctgctccctggttgctgggtgcaaagtgctgggttctgggtttctggattcgcgggccgttcacacgtagcctgtgccggctcctcggatgcaccgcgcgcccccgcgccctcaccgacgggtccagacctggtgggaagaaggtgcggggacgggtccctgaggatcccgatgcctacgagccaagatgctcagctttataggtgtgacctacacatgtgacttcacctcagttttgtgatccgtaaaatggacaaattcgaagctacttcacagtgctgttgagaggattaaatgaaacaatgcttgtaaagctctttgcaggagggagcctcggaagcagggcctggccggcagagcacacctgctgtcaccagggaccacaggcagcatgaagacccccgtggagctggccgtcagtgggatgcagaccctcggccttcagcaccgctgccgaggtggctaccgggtcaaggccaggacgtcatatgtggatgagactctgtttggcagcccagcaggcacccggcctaccccaccggacttcgatccgccctgggtggagaaggctaacagaaccagaggcgtgggcaaggaggcatcgaaggccttgggggcaaaggggagctgtgagaccaccccctcaaggggcagcacccccaccctcacaccaaggaagaagaacaaatacagacccatcagccacaccccgtcttactgtgatgagtcgctgtttggctcccgatctgaaggcgccagcttcggggccccgcggatggcgaagggggatgccgcaaagctccgtgctctcttgtggacgccaccacctacccccaggggtagccactcgccccgccccagggaggcaccactgcgagccattcacccagctggtccctccaagacagagccggggccagcggcagactcccagaagttatctatgggtgggttacactcttcacgccccctgaagcggggactttcccattccctcacccacctgaatgtccccagcactggtcatccagccaccagtgccccccacacaaatgggcctcaggatctcaggccttccacgtcaggggtgaccttccggagccccctggtgacttccagggctcgctcagttagcatttcagtgccatctaccccacgacgaggtggggccacccagaaaccaaagcccccttggaaatgatactctttcatcagggttgcctatggggccacggcgacaggtatggccccttgccagggtaggaggacattcatcacccagggaaccccaggtattaaagaagcccctgtgggggcagacagacatagcaggggtgggcagtgcctccctttatcctgacaatctctagtcgattcttgcctttttctcccgattgcggatttgggggccacctctaagatgcctctctccagccctgtctcaaccatactccaaattagtgccaacccaggggcctggcacctcccacatcatccattgtcttgctgccaagtgcgaataaacggcgtgattgccaacctgg

SEQ ID NO: 22914 - protein, 269 aa, Homo sapiens; identical to SEQ ID NO: 3029

SEQ ID NO: 22915 - DNA, 1852 bp, Homo sapiens
agtgcctgcggccctcggcggcctagtacacacgcacctgagtgagtggcaccagaggaccctctccatgtttagggacctcctgggcctcaggagcgtggcgcccgcccctgggcggactccccccatccgcgggcgcgaatggtccgggccgcgtccgcagtgctgctggctgctccctggttgctgggtgcaaagtgctgggttctgggtttctggattcgcgggccgttcacacgtagcctgtgccggctcctcgggtgagtccgtccgcgcgcggtgccccgggacggcctaggctgccgggggtccggggccccaggcattccgggctgcagattgacggggatcccggatgcaccgcgcgcccccgcgccctcaccgacgggtccagacctggtgggaagaaggtgcggggacgggtccctgaggatcccgatgcctacgagccaagatgctcagctttataggtgtgacctacacatgtgacttcacctcagttttgtgatccgtaaaatggacaaattcgaagctacttcacagtgctgttgagaggattaaatgaaacaatgcttgtaaagctctttgcaggagggagcctcggaagcagggcctggccggcagagcacacctgctgtcaccagggaccacaggcagcatgaagacccccgtggagctggccgtcagtgggatgcagaccctcggccttcagcaccgctgccgaggtggctaccgggtcaaggccaggacgtcatatgtggatgagactctgtttggcagcccagcaggcacccggcctaccccaccggacttcgatccgccctgggtggagaaggctaacagaaccagaggcgtgggcaaggaggcatcgaaggccttgggggcaaaggggagctgtgagaccaccccctcaaggggcagcacccccaccctcacaccaaggaagaagaacaaatacagacccatcagccacaccccgtcttactgtgatgagtcgctgtttggctcccgatctgaaggcgccagcttcggggccccgcggatggcgaagggggatgccgcaaagctccgtgctctcttgtggacgccaccacctacccccaggggtagccactcgccccgccccagggagccaccagtgccccccacacaaatgggcctcaggatctcaggccttccacgtcaggggtgaccttccggagccccctggtgacttccagggctcgctcagttagcatttcagtgccatctaccccacgacgaggtggggccacccagaaaccaaagcccccttggaaatgatactctttcatcagggttgcctatggggccacggcgacaggtatggccccttgccagggtaggaggacattcatcacccagggaaccccaggtattaaagaagcccctgtgggggcagacagacatagcaggggtgggcagtgcctccctttatcctgacaatctctagtcgattcttgcctttttctcccgattgcggatttgggggccacctctaagatgcctctctccagccctgtctcaaccatactccaaattagtgccaacccaggggcctggcacctcccacatcatccattgtcttgctgccaagtgcgaataaacggcgtgattgccaacctggagggtcccctcttatcccttcaagccaagcttcctgctcaggattagtttccagctaagtctgcaagccctagaggagtttttccaggctgtctgtgaagcctggggaacacaacggcaactgggagatttgtgagtgaacactgtttcatcttaatatgcttctgaatttattttcatgtactaaatagatcagctcatcaaagcc

SEQ ID NO: 22916 - protein, 177 aa, Homo sapiens; identical to SEQ ID NO: 22908

SEQ ID NO: 22917 - DNA, 2018 bp, Homo sapiens
agtgcctgcggccctcggcggcctagtacacacgcacctgagtgagtggcaccagaggaccctctccatgtttagggacctcctgggcctcaggagcgtggcgcccgcccctgggcggactccccccatccgcgggcgcgaatggtccgggccgcgtccgcagtgctgctggctgctccctggttgctgggtgcaaagtgctgggttctgggtttctggattcgcgggccgttcacacgtagcctgtgccggctcctcgggtgagtccgtccgcgcgcggtgccccgggacggcctaggctgccgggggtccggggccccaggcattccgggctgcagattgacggggatcccggatgcaccgcgcgcccccgcgccctcaccgacgggtccagacctggtgggaagaaggtgcggggacgggtccctgaggatcccgatgcctacgagccaagatgctcagctttataggtgtgacctacacatgtgacttcacctcagttttgtgatccgtaaaatggacaaattcgaagctacttcacagtgctgttgagaggattaaatgaaacaatgcttgtaaagctctttgcaggagggagcctcggaagcagggcctggccggcagagcacacctgctgtcaccagggaccacaggcagcatgaagacccccgtggagctggccgtcagtgggatgcagaccctcggccttcagcaccgctgccgaggtggctaccgggtcaaggccaggacgtcatatgtggatgagactctgtttggcagcccagcaggcacccggcctaccccaccggacttcgatccgccctgggtggagaaggctaacagaaccagaggcgtgggcaaggaggcatcgaaggccttgggggcaaaggggagctgtgagaccaccccctcaaggggcagcacccccaccctcacaccaaggaagaagaacaaatacagacccatcagccacaccccgtcttactgtgatgagtcgctgtttggctcccgatctgaaggcgccagcttcggggccccgcggatggcgaagggggatgccgcaaagctccgtgctctcttgtggacgccaccacctacccccaggggtagccactcgccccgccccagggaggcaccactgcgagccattcacccagctggtccctccaagacagagccggggccagcggcagactcccagaagttatctatgggtgggttacactcttcacgccccctgaagcggggactttcccattccctcacccacctgaatgtccccagcactggtcatccagccaccagtgccccccacacaaatgggcctcaggatctcaggccttccacgtcaggggtgaccttccggagccccctggtgacttccagggctcgctcagttagcatttcagtgccatctaccccacgacgaggtggggccacccagaaaccaaagcccccttggaaatgatactctttcatcagggttgcctatggggccacggcgacaggtatggccccttgccagggtaggaggacattcatcacccagggaaccccaggtattaaagaagcccctgtgggggcagacagacatagcaggggtgggcagtgcctccctttatcctgacaatctctagtcgattcttgcctttttctcccgattgcggatttgggggccacctctaagatgcctctctccagccctgtctcaaccatactccaaattagtgccaacccaggggcctggcacctcccacatcatccattgtcttgctgccaagtgcgaataaacggcgtgattgccaacctggagggtcccctcttatcccttcaagccaagcttcctgctcaggattagtttccagctaagtctgcaagccctagaggagtttttccaggctgtctgtgaagcctggggaacacaacggcaactgggagatttgtgagtgaacactgtttcatcttaatatgcttctgaatttattttcatgtactaaatagatcagctcatcaaagcc

SEQ ID NO: 22918 - protein, 269 aa, Homo sapiens; identical to SEQ ID NO: 3029

SEQ ID NO: 22919 - DNA, 1886 bp, Homo sapiens
agtgcctgcggccctcggcggcctagtacacacgcacctgagtgagtggcaccagaggaccctctccatgtttagggacctcctgggcctcaggagcgtggcgcccgcccctgggcggactccccccatccgcgggcgcgaatggtccgggccgcgtccgcagtgctgctggctgctccctggttgctgggtgcaaagtgctgggttctgggtttctggattcgcgggccgttcacacgtagcctgtgccggctcctcgggtgagtccgtccgcgcgcggtgccccgggacggcctaggctgccgggggtccggggccccaggcattccgggctgcagattgacggggatcccggatgcaccgcgcgcccccgcgccctcaccgacgggtccagacctggtgggaagaaggtgcggggacgggtccctgaggatcccgatgcctacgagccaagatgctcagggagcctcggaagcagggcctggccggcagagcacacctgctgtcaccagggaccacaggcagcatgaagacccccgtggagctggccgtcagtgggatgcagaccctcggccttcagcaccgctgccgaggtggctaccgggtcaaggccaggacgtcatatgtggatgagactctgtttggcagcccagcaggcacccggcctaccccaccggacttcgatccgccctgggtggagaaggctaacagaaccagaggcgtgggcaaggaggcatcgaaggccttgggggcaaaggggagctgtgagaccaccccctcaaggggcagcacccccaccctcacaccaaggaagaagaacaaatacagacccatcagccacaccccgtcttactgtgatgagtcgctgtttggctcccgatctgaaggcgccagcttcggggccccgcggatggcgaagggggatgccgcaaagctccgtgctctcttgtggacgccaccacctacccccaggggtagccactcgccccgccccagggaggcaccactgcgagccattcacccagctggtccctccaagacagagccggggccagcggcagactcccagaagttatctatgggtgggttacactcttcacgccccctgaagcggggactttcccattccctcacccacctgaatgtccccagcactggtcatccagccaccagtgccccccacacaaatgggcctcaggatctcaggccttccacgtcaggggtgaccttccggagccccctggtgacttccagggctcgctcagttagcatttcagtgccatctaccccacgacgaggtggggccacccagaaaccaaagcccccttggaaatgatactctttcatcagggttgcctatggggccacggcgacaggtatggccccttgccagggtaggaggacattcatcacccagggaaccccaggtattaaagaagcccctgtgggggcagacagacatagcaggggtgggcagtgcctccctttatcctgacaatctctagtcgattcttgcctttttctcccgattgcggatttgggggccacctctaagatgcctctctccagccctgtctcaaccatactccaaattagtgccaacccaggggcctggcacctcccacatcatccattgtcttgctgccaagtgcgaataaacggcgtgattgccaacctggagggtcccctcttatcccttcaagccaagcttcctgctcaggattagtttccagctaagtctgcaagccctagaggagtttttccaggctgtctgtgaagcctggggaacacaacggcaactgggagatttgtgagtgaacactgtttcatcttaatatgcttctgaatttattttcatgtactaaatagatcagctcatcaaagcc

SEQ ID NO: 22920 - protein, 293 aa, Homo sapiens; identical to SEQ ID NO: 22912

SEQ ID NO: 22921 - DNA, 1923 bp, Homo sapiens
agtgcctgcggccctcggcggcctagtacacacgcacctgagtgagtggcaccagaggaccctctccatgtttagggacctcctgggcctcaggagcgtggcgcccgcccctgggcggactccccccatccgcgggcgcgaatggtccgggccgcgtccgcagtgctgctggctgctccctggttgctgggtgcaaagtgctgggttctgggtttctggattcgcgggccgttcacacgtagcctgtgccggctcctcggatgcaccgcgcgcccccgcgccctcaccgacgggtccagacctggtgggaagaaggtgcggggacgggtccctgaggatcccgatgcctacgagccaagatgctcagctttataggtgtgacctacacatgtgacttcacctcagttttgtgatccgtaaaatggacaaattcgaagctacttcacagtgctgttgagaggattaaatgaaacaatgcttgtaaagctctttgcaggagggagcctcggaagcagggcctggccggcagagcacacctgctgtcaccagggaccacaggcagcatgaagacccccgtggagctggccgtcagtgggatgcagaccctcggccttcagcaccgctgccgaggtggctaccgggtcaaggccaggacgtcatatgtggatgagactctgtttggcagcccagcaggcacccggcctaccccaccggacttcgatccgccctgggtggagaaggctaacagaaccagaggcgtgggcaaggaggcatcgaaggccttgggggcaaaggggagctgtgagaccaccccctcaaggggcagcacccccaccctcacaccaaggaagaagaacaaatacagacccatcagccacaccccgtcttactgtgatgagtcgctgtttggctcccgatctgaaggcgccagcttcggggccccgcggatggcgaagggggatgccgcaaagctccgtgctctcttgtggacgccaccacctacccccaggggtagccactcgccccgccccagggaggcaccactgcgagccattcacccagctggtccctccaagacagagccggggccagcggcagactcccagaagttatctatgggtgggttacactcttcacgccccctgaagcggggactttcccattccctcacccacctgaatgtccccagcactggtcatccagccaccagtgccccccacacaaatgggcctcaggatctcaggccttccacgtcaggggtgaccttccggagccccctggtgacttccagggctcgctcagttagcatttcagtgccatctaccccacgacgaggtggggccacccagaaaccaaagcccccttggaaatgatactctttcatcagggttgcctatggggccacggcgacaggtatggccccttgccagggtaggaggacattcatcacccagggaaccccaggtattaaagaagcccctgtgggggcagacagacatagcaggggtgggcagtgcctccctttatcctgacaatctctagtcgattcttgcctttttctcccgattgcggatttgggggccacctctaagatgcctctctccagccctgtctcaaccatactccaaattagtgccaacccaggggcctggcacctcccacatcatccattgtcttgctgccaagtgcgaataaacggcgtgattgccaacctggagggtcccctcttatcccttcaagccaagcttcctgctcaggattagtttccagctaagtctgcaagccctagaggagtttttccaggctgtctgtgaagcctggggaacacaacggcaactgggagatttgtgagtgaacactgtttcatcttaatatgcttctgaatttattttcatgtactaaatagatcagctcatcaaagcc

SEQ ID NO: 22922 - protein, 269 aa, Homo sapiens; identical to SEQ ID NO: 3029

SEQ ID NO: 22923 - DNA, 1445 bp, Homo sapiens
tggttgctgggtgcaaagtgctgggttctgggtttctggattcgcgggccgttcacacgtagcctgatcccgatgcctacgagccaagatgctcagctttataggtgtgacctacacatgtgacttcacctcagttttgtgatccgtaaaatggacaaattcgaagctacttcacagtgctgttgagaggattaaatgaaacaatgcttgtaaagctctttgcaggagggagcctcggaagcagggcctggccggcagagcacacctgctgtcaccagggaccacaggcagcatgaagacccccgtggagctggccgtcagtgggatgcagaccctcggccttcagcaccgctgccgaggtggctaccgggtcaaggccaggacgtcatatgtggatgagactctgtttggcagcccagcaggcacccggcctaccccaccggacttcgatccgccctgggtggagaaggctaacagaaccagaggcgtgggcaaggaggcatcgaaggccttgggggcaaaggggagctgtgagaccaccccctcaaggggcagcacccccaccctcacaccaaggaagaagaacaaatacagacccatcagccacaccccgtcttactgtgatgagtcgctgtttggctcccgatctgaaggcgccagcttcggggccccgcggatggcgaagggggatgccgcaaagctccgtgctctcttgtggacgccaccacctacccccaggggtagccactcgccccgccccagggaggcaccactgcgagccattcacccagctggtccctccaagacagagccggggccagcggcagactcccagaagttatctatgggtgggttacactcttcacgccccctgaagcggggactttcccattccctcacccacctgaatgtccccagcactggtcatccagccaccagtgccccccacacaaatgggcctcaggatctcaggccttccacgtcaggggtgaccttccggagccccctggtgacttccagggctcgctcagttagcatttcagtgccatctaccccacgacgaggtggggccacccagaaaccaaagcccccttggaaatgatactctttcatcagggttgcctatggggccacggcgacaggtatggccccttgccagggtaggaggacattcatcacccagggaaccccaggtattaaagaagcccctgtgggggcagacagacatagcaggggtgggcagtgcctccctttatcctgacaatctctagtcgattcttgcctttttctcccgattgcggatttgggggccacctctaagatgcctctctccagccctgtctcaaccatactccaaattagtgccaacccaggggcctggcacctcccacatcatccattgtcttgctgccaagtgcgaataaacggcgtgattgccaacctgg

SEQ ID NO: 22924 - protein, 269 aa, Homo sapiens; identical to SEQ ID NO: 3029

SEQ ID NO: 22925 - DNA, 1652 bp, Homo sapiens
tggttgctgggtgcaaagtgctgggttctgggtttctggattcgcgggccgttcacacgtagcctgatcccgatgcctacgagccaagatgctcagctttataggtgtgacctacacatgtgacttcacctcagttttgtgatccgtaaaatggacaaattcgaagctacttcacagtgctgttgagaggattaaatgaaacaatgcttgtaaagctctttgcaggagggagcctcggaagcagggcctggccggcagagcacacctgctgtcaccagggaccacaggcagcatgaagacccccgtggagctggccgtcagtgggatgcagaccctcggccttcagcaccgctgccgaggtggctaccgggtcaaggccaggacgtcatatgtggatgagactctgtttggcagcccagcaggcacccggcctaccccaccggacttcgatccgccctgggtggagaaggctaacagaaccagaggcgtgggcaaggaggcatcgaaggccttgggggcaaaggggagctgtgagaccaccccctcaaggggcagcacccccaccctcacaccaaggaagaagaacaaatacagacccatcagccacaccccgtcttactgtgatgagtcgctgtttggctcccgatctgaaggcgccagcttcggggccccgcggatggcgaagggggatgccgcaaagctccgtgctctcttgtggacgccaccacctacccccaggggtagccactcgccccgccccagggaggcaccactgcgagccattcacccagctggtccctccaagacagagccggggccagcggcagactcccagaagttatctatgggtgggttacactcttcacgccccctgaagcggggactttcccattccctcacccacctgaatgtccccagcactggtcatccagccaccagtgccccccacacaaatgggcctcaggatctcaggccttccacgtcaggggtgaccttccggagccccctggtgacttccagggctcgctcagttagcatttcagtgccatctaccccacgacgaggtggggccacccagaaaccaaagcccccttggaaatgatactctttcatcagggttgcctatggggccacggcgacaggtatggccccttgccagggtaggaggacattcatcacccagggaaccccaggtattaaagaagcccctgtgggggcagacagacatagcaggggtgggcagtgcctccctttatcctgacaatctctagtcgattcttgcctttttctcccgattgcggatttgggggccacctctaagatgcctctctccagccctgtctcaaccatactccaaattagtgccaacccaggggcctggcacctcccacatcatccattgtcttgctgccaagtgcgaataaacggcgtgattgccaacctggagggtcccctcttatcccttcaagccaagcttcctgctcaggattagtttccagctaagtctgcaagccctagaggagtttttccaggctgtctgtgaagcctggggaacacaacggcaactgggagatttgtgagtgaacactgtttcatcttaatatgcttctgaatttattttcatgtactaaatagatcagctcatcaaagcc

SEQ ID NO: 22926 - protein, 269 aa, Homo sapiens; identical to SEQ ID NO: 3029

SEQ ID NO: 22927 - DNA, 554 bp, Homo sapiens
agaagaaatataaagtggaaacggaaatcgagaactggatccagaaatatgatacagagatgggtgagaagcaggaggagttggaggatctggacgctgttcacagggaggagaagatctcgctggaggagctcaggcggaggcacaaagtgctggtgggagagtttgcgcagatccgggaagagcgggagatcaactccaagaaaaggatggaggcagagcaggagatggtgcgcatggtacgggcggccacgctcatccaggccctatggaagggctatctggtgcgctccctgctcagatccaagaagaagcggggcaagggcaaagcaaaggacaaggagaagggcaagcagaaaggcaaggagaagggcaagggcaagaaatgagctctccacccagcccgctcctgacccttatcttcccagagaccaggccaggaaggcccgagatggagagcactaaattcacggctttcatgtttttatttaataaattaaaaagtatttgaagccacattgaagggaacgctctacgaataaatctctttaccc

SEQ ID NO: 22928 - protein, 138 aa, Homo sapiens
MIQRWVRSRRSWRIWTLFTGRRRSRWRSSGGGTKCWWESLRRSGKSGRSTPRKGWRQSRRWCAWYGRPRSSRPYGRAIWCAPCSDPRRSGARAKQRTRRRASRKARRRARARNELSTQPAPDPYLPRDQARKARDGEH

SEQ ID NO: 22929 - DNA, 1348 bp, Homo sapiens
ctgagattggcgggtaacctagcaacgcagggaccgcggcggtaactgtggctagggaaacctggagcggtcagagcaggatggccagagacaataaaagcacgagacccaagtagtctaccgaagtctccatctctgtggacctacagaggcacagagggctgctcacaagatggctttagacattctcgccatggcccctttgtatcaggcccctgccatcaacagaatagggccaaagacagacccatctaaaaggccagctgatccactaaaacccttggttctctctaggaccaaactcaccaccattgaggccaaaaggatcatgtccatcctggatgaggcgatctacaaggtggagctggtgaccttgctgtcgtatgtggcatccaacagagaggatatggaggggatgctgggggaggacgtcatgagggcagtgagagagcatgaggatctctgccaggtcctccttgaaaacgtcaggtgcctgaaagagaaagaaaggcaattgcaggagcagaaagaggctgaggaggaagggtggctcagagaccgcctcctttccatagagctgcagaaatccagcctctcaccacttatgcagcagatcaaagactccaccaagaacgtccttagactcttgctcagcaacccccaggctgctaggctcctgcagatgcagacacagggtagaagtgcagaagcccagaattttattgacagcctgatagagctccgtggtttcctgtttgaaaaactactcactagtcccatggaagcgagggataaggcccagttcttacaggatatcagtagacagaatagtaataaccaacaaatcattgatactcttgaaaaggaattggcggagagaatgaagaacaggaatgcagaggaggagttggaggatctggacgctgttcacagggaggagaagatctcgctggaggagctcaggcggaggcacaaagtgctggtgggagagtttgcgcagatccgggaagagcgggagatcaactccaagaaaaggatggaggcagagcaggagatggtgcgcatggtacgggcggccacgctcatccaggccctatggaagggctatctggtgcgctccctgctcagatccaagaagaagcggggcaagggcaaagcaaaggacaaggagaagggcaagcagaaaggcaaggagaagggcaagggcaagaaatgagctctccacccagcccgctcctgacccttatcttcccagagaccaggccaggaaggcccgagatggagagcactaaattcacggctttcatgtttttatttaataaattaaaaagtatttgaagccacattg

SEQ ID NO: 22930 - protein, 347 aa, Homo sapiens; identical to SEQ ID NO: 3031

SEQ ID NO: 22931 - DNA, 515 bp, Homo sapiens
agaagaaatataaagtggaaacggaaatcgagaactggatccagaaatatgatacagagatgggtgagaagcaggaggagttggaggatctggacgctgttcacagggaggagaagatctcgctggaggagctcaggcggaggcacaaagtgctggtgggagagtttgcgcagatccgggaagagcgggagatcaactccaagaaaaggatggaggcagagcaggagatggtgcgcatggtacgggcggccacgctcatccaggccctatggaagggctatctggtgcgctccctgctcagatccaagaagaagcggggcaagggcaaagcaaaggacaaggagaagggcaagcagaaaggcaaggagaagggcaagggcaagaaatgagctctccacccagcccgctcctgacccttatcttcccagagaccaggccaggaaggcccgagatggagagcactaaattcacggctttcatgtttttatttaataaattaaaaagtatttgaagcc

SEQ ID NO: 22932 - protein, 138 aa, Homo sapiens; identical to SEQ ID NO: 22928

SEQ ID NO: 22933 - DNA, 2030 bp, Homo sapiens
agacaccgagtctcgccttctgagattggcgggtaacctagcaacgcagggaccgcggcggtaactgtggctagggaaacctggagcggtcagagcaggatggccagagacaataaaagcacgagacccaagtagtctaccgaagtctccatctctgtggacctacagaggcacagagggctgctcacaagatggctttagacattctcgccatggcccctttgtatcaggcccctgccatcaacagaatagggccaaagacagacccatctaaaaggccagctgatccactaaaacccttggttctctctaggaccaaactcaccaccattgaggccaaaaggatcatgtccatcctggatgaggcgatctacaaggtggagctggtgaccttgctgtcgtatgtggcatccaacagagaggatatggaggggatgctgggggaggacgtcatgagggcagtgagagagcatgaggatctctgccaggtcctccttgaaaacgtcaggtgcctgaaagagaaagaaaggcaattgcaggagcagaaagaggctgaggaggaagggtggctcagagaccgcctcctttccatagagctgcagaaatccagcctctcaccacttatgcagcagatcaaagactccaccaagaacgtccttagactcttgctcagcaacccccaggctgctaggctcctgcagatgcagacacagggtagaagtgcagaagcccagaattttattgacagcctgatagagctccgtggtttcctgtttgaaaaactactcactagtcccatggaagcgagggataaggcccagttcttacaggatatcagtagacagaatagtaataaccaacaaatcattgatactcttgaaaaggaattggcggagagaatgaagaacaggaatgcagaggtattgtttcatagtattgctgaaattactgaagaagccacacaaatcttttgttggttgggtttttcctcaatgattgattttttttttaagatggagtctcgctctgttgtccagactagagtgcagtggtgtaatctcgactcactgcaacctctgcctcccaggttcaagcgattctcccaccacagcctcccaagtagttgggattacaggcgtatgccaccacgcccggctaatttttgtatttttagtagagacagggtcacaccattctcctgcctcagcctcccgagtagctgggactacaggtgcccaccactgtactccagcctggctgcagagcaagaccctgtctcaaaaaaaaaagggaaacagtagcatgatcccaaaccctaataataattgtcatattgcacacatacagtgtatttagtttaacatacattttctctctaaatctttacaaaaaccctgtgagatggtgtatgagtacagatttggctgctataacagagacacccaaaatagctgtggcttagtcaagatggcagtgtatttctctgtagtggaaacaccggagctggtgtggcatctctgctccccaacttgtcagaggtctggtttcttctatgtgacttccctgctgtccccaacatgggacttctgcttgtgggccaagatggctgctccagctttccccatcatgtggcccccagtctagccagcaggaaggaggaaaggggaggagagggcttggttctgccccttaaggacacgtgtggaggtggcacacagaacttccatgcatatcttgtagccacacccagcagagagaagtgctaggaaggaccgaccacccgtcactggggctgtgttatgctccacattctaccccacagcctctctggggagagcagacatgggggtagccaggctgcactgccacaggcccttctgtttctatcccccaccactgatgaaaggttcaaggccctgggaaactattcacagccccctccctggtgctgggttgggcacttctcactgaatttgtcctttaaagcattcacctgactttgtggataacattcacctgactttgtggat

SEQ ID NO: 22934 - protein, 369 aa, Homo sapiens [sequence omitted]

SEQ ID NO: 22935 - DNA, 1149 bp, Homo sapiens
ttctgagattggcgggtaacctagcaacgcagggaccgcggcggtaactgtggctagggaaacctggagcggtcagagcagaatgctgtctgtatgcctggctggtccccgcctgacacatgtgcctgagatgcctccacacttggtcttcctgcccttgtggccctaacaccctcacaaagctgaaaactgcttccagtgaaaggttctgtgtaaaagcgacagaggacctaagatgaactcttgatgtcaacagttgtggtttctgcagccacactaaccacacagatgtcagcacagctgcactcacacctacttcttcattttgcaggatggccagagacaataaaagcacgagacccaagtagtctaccgaagtctccatctctgtggacctacagaggcacagagggctgctcacaagatggctttagacattctcgccatggcccctttgtatcaggcccctgccatcaacagaatagggccaaagacagacccatctaaaaggccagctgatccactaaaacccttggttctctctaggaccaaactcaccaccattgaggccaaaaggatcatgtccatcctggatgaggcgatctacaaggtggagctggtgaccttgctgtcgtatgtggcatccaacagagaggatatggaggggatgctgggggaggacgtcatgagggcagtgagagagcatgaggatctctgccaggtcctccttgaaaacgtcaggtgcctgaaagagaaagaaaggcaattgcaggagcagaaagaggctgaggaggaagggtggctcagagaccgcctcctttccatagagctgcagaaatccagcctctcaccacttatgcagcagatcaaagactccaccaagaacgtccttagactcttgctcagcaacccccaggctgctaggctcctgcagatgcagacacagggtagaagtgcagaagcccagaattttattgacagcctgatagagctccgtggtttcctgtttgaaaaactactcactagtcccatggaagcgagggataaggcccagttcttacaggatatcagtagacagaatagtaataaccaacaaatcattgatactcttgaaaaggaattggcggagagaatgaagaacaggaatgc

SEQ ID NO: 22936 - protein, 240 aa, Homo sapiens
MALDILAMAPLYQAPAINRIGPKTDPSKRPADPLKPLVLSRTKLTTIEAKRIMSILDEAIYKVELVTLLSYVASNREDMEGMLGEDVMRAVREHEDLCQVLLENVRCLKEKERQLQEQKEAEEEGWLRDRLLSIELQKSSLSPLMQQIKDSTKNVLRLLLSNPQAARLLQMQTQGRSAEAQNFIDSLIELRGFLFEKLLTSPMEARDKAQFLQDISRQNSNNQQIIDTLEKELAERMKNR

SEQ ID NO: 22937 - DNA, 2817 bp, Homo sapiens
gagaggacggtaggcggtggataggagagctggcgcagctgccctggtggcagtggctgaagtggcggcggcttcggcggctgcggcggctgcaacagcttcgggctcggggttttggcggcggcgccggcgggctaggctgcgcggtgcggaccccggcgcgcggtccgggttgctggggcggcgcgtaagatgcctctaatggaggagtttctgagcagcacccctggcccagtggctttgaaagggagctcaaaccagagactatttcaagccctggatatcatatcctgagggccacaggagaagagaacatggctgtgagtttggatgacgacgtgccgctcatcctgaccttggatgagggtggcagtgccccactggctccctccaacggcctgggccaagaagagctacctagcaaaaatggcggcagctatgccatccacgactcccaggcccccagtctcagctctgggggtgagagttccccctccagccccgcacacaactgggagatgaattaccaagaggcagcaatctacctccaggaaggcgagaacaacgacaagttcttcacccaccccaaggatgccaaggcgctggcggcctacctctttgcacacaatcacctcttctacctgatggagctggccacggccctgctgctgctgctgctctccctgtgcgaggcccccgccgtccccgcactccggcttggcatctatgtccacgccaccctggagctgtttgccctgatggtggtagtgtttgaactctgcatgaagttacgctggctgggcctccacaccttcatccggcacaagcggaccatggtcaagacctcggtgctggtggtgcagtttgtcgaggccatcgtggtgttggtacggcagatgtcccatgtgcgggtgacccgagcactgcgctgcattttcctggtggactgtcggtattgcggtggcgtccggcgcaacctgcggcagatcttccagtccctgccgcccttcatggacatcctcctgctgctgctgttcttcatgatcatctttgccatcctcggtttctacttgttctcccctaacccttcagacccctacttcagcaccctggagaacagcatcgtcagtctgtttgtccttctgaccacagccaatttcccagatgtgatgatgccctcctactcccggaacccctggtcctgcgtcttcttcatcgtgtacctctccatcgagctgtatttcatcatgaacctgcttctggctgtggtgttcgacaccttcaatgacattgagaaacgcaagttcaagtctttgctactgcacaagcgaaccgctatccagcatgcctaccgcctgctcatcagccagaggaggcctgccggcatctcctacaggcagtttgaaggcctcatgcgcttctacaagccccggatgagtgccagggagcgctatcttaccttcaaggccctgaatcagaacaacacacccctgctcagcctaaaggacttttacgatatctacgaagttgctgctttgaagtggaaggccaagaaaaacagagagcactggtttgatgagcttcccaggacggcgctcctcatcttcaaaggtattaatatccttgtgaagtccaaggccttccagtatttcatgtacttggtggtggcagtcaacggggtctggatcctcgtggagacatttatgctgaaaggtgggaacttcttctccaagcacgtgccctggagttacctcgtctttctaactatctatggggtggagctgttcctgaaggttgccggcctgggccctgtggagtacttgtcttccggatggaacttgtttgacttctccgtgacagtgttcgccttcctgggactgctggcgctggccctcaacatggagcccttctatttcatcgtggtcctgcgccccctccagctgctgaggttgtttaagttgaaggagcgctaccgcaacgtgctggacaccatgttcgagctgctgccccggatggccagcctgggcctcaccctgctcatcttttactactccttcgccatcgtgggcatggagttcttctgcgggatcgtcttccccaactgctgcaacacgagtacagtggcagatgcctaccgctggcgcaaccacaccgtgggcaacaggaccgtggtggaggaaggctactattatctcaataattttgacaacatcctcaacagctttgtgaccctgtttgagctcacagttgtcaacaactggtacatcatcatggaaggcgtcacctctcagacctcccactggagccgcctctacttcatgaccttttacattgtgaccatggtggtgatgacgatcattgtcgcctttatcctcgaggccttcgtcttccgaatgaactacagccgcaagaaccaggactcggaagttgatggtggcatcacccttgagaaggaaatctccaaagaagagctggttgccgtcctggagctctaccgggaggcacggggggcctcctcggatgtcaccaggctgctggagaccctctcccagatggagagataccagcaacattccatggtgtttctgggacggcgatcaaggaccaagagcgacctgagcctgaagatgtaccaggaggagatccaggagtggtatgaggagcatgccagggagcaagagcagcagcgacaactcagcagcagtgcagcccccgccgcccagcagcccccaggcagccgccagcgctcccagaccgttacctagcccagcgcccgaaagccgtctcttctatgcaataacacaatagtattactct

SEQ ID NO: 22938 - protein, 816 aa, Homo sapiens; identical to SEQ ID NO: 3033

SEQ ID NO: 22939 - DNA, 5278 bp, Homo sapiens
gagaggacggtaggcggtggataggagagctggcgcagctgccctggtggcagtggctgaagtggcggcggcttcggcggctgcggcggctgcaacagcttcgggctcggggttttggcggcggcgccggcgggctaggctgcgcggtgcggaccccggcgcgcggtccgggttgctggggcggcgcgtaagatgcctctaatggaggagtttctgagcagcacccctggcccagtggctttgaaagggagctcaaaccagagactatttcaagccctggatatcatatcctgagggccacaggagaagagaacatggctgtgagtttggatgacgacgtgccgctcatcctgaccttggatgagggtggcagtgccccactggctccctccaacggcctgggccaagaagagctacctagcaaaaatggcggcagctatgccatccacgactcccaggcccccagtctcagctctgggggtgagagttccccctccagccccgcacacaactgggagatgaattaccaagaggcagcaatctacctccaggaaggcgagaacaacgacaagttcttcacccaccccaaggatgccaaggcgctggcggcctacctctttgcacacaatcacctcttctacctgatggagctggccacggccctgctgctgctgctgctctccctgtgcgaggcccccgccgtccccgcactccggcttggcatctatgtccacgccaccctggagctgtttgccctgatggtggtagtgtttgaactctgcatgaagttacgctggctgggcctccacaccttcatccggcacaagcggaccatggtcaagacctcggtgctggtggtgcagtttgtcgaggccatcgtggtgttggtacggcagatgtcccatgtgcgggtgacccgagcactgcgctgcattttcctggtggactgtcggtattgcggtggcgtccggcgcaacctgcggcagatcttccagtccctgccgcccttcatggacatcctcctgctgctgctgttcttcatgatcatctttgccatcctcggtttctacttgttctcccctaacccttcagacccctacttcagcaccctggagaacagcatcgtcagtctgtttgtccttctgaccacagccaatttcccagatgtgatgatgccctcctactcccggaacccctggtcctgcgtcttcttcatcgtgtacctctccatcgagctgtatttcatcatgaacctgcttctggctgtggtgttcgacaccttcaatgacattgagaaacgcaagttcaagtctttgctactgcacaagcgaaccgctatccagcatgcctaccgcctgctcatcagccagaggaggcctgccggcatctcctacaggcagtttgaaggcctcatgcgcttctacaagccccggatgagtgccagggagcgctatcttaccttcaaggccctgaatcagaacaacacacccctgctcagcctaaaggacttttacgatatctacgaagttgctgctttgaagtggaaggccaagaaaaacagagagcactggtttgatgagcttcccaggacggcgctcctcatcttcaaaggtattaatatccttgtgaagtccaaggccttccagtatttcatgtacttggtggtggcagtcaacggggtctggatcctcgtggagacatttatgctgaaaggtgggaacttcttctccaagcacgtgccctggagttacctcgtctttctaactatctatggggtggagctgttcctgaaggttgccggcctgggccctgtggagtacttgtcttccggatggaacttgtttgacttctccgtgacagtgttcgccttcctgggactgctggcgctggccctcaacatggagcccttctatttcatcgtggtcctgcgccccctccagctgctgaggttgtttaagttgaaggagcgctaccgcaacgtgctggacaccatgttcgagctgctgccccggatggccagcctgggcctcaccctgctcatcttttactactccttcgccatcgtgggcatggagttcttctgcgggatcgtcttccccaactgctgcaacacgagtacagtggcagatgcctaccgctggcgcaaccacaccgtgggcaacaggaccgtggtggaggaaggctactattatctcaataattttgacaacatcctcaacagctttgtgaccctgtttgagctcacagttgtcaacaactggtacatcatcatggaaggcgtcacctctcagacctcccactggagccgcctctacttcatgaccttttacattgtgaccatggtggtgatgacgatcattgtcgcctttatcctcgaggccttcgtcttccgaatgaactacagccgcaagaaccaggactcggaagttgatggtggcatcacccttgagaaggaaatctccaaagaagagctggttgccgtcctggagctctaccgggaggcacggggggcctcctcggatgtcaccaggctgctggagaccctctcccagatggagagataccagcaacattccatggtgtttctgggacggcgatcaaggaccaagagcgacctgagcctgaagatgtaccaggaggagatccaggagtggtatgaggagcatgccagggagcaagagcagcagcgacaactcagcagcagtgcagcccccgccgcccagcagcccccaggcagccgccagcgctcccagaccgttacctagcccagcgcccgaaagccgtctcttctatgcaataacacaatagtattactctactgcgatgtacggaactgcggtgtgtgtacacatactcacgtatatgcacatatttatatacaggaagaaaaaagacagacaagatggggcttggtttataaccaccttgccctgtcttccttaactccagaagccagtttggtgaggggtgggggtgcggccaccaggtctgagctcttcctactgtggaaggctccagaaggcccttcacaaggagacccctcacctggatccagtcgactgcggggcttgcccctcatgtgggctggcctccatcggccacgtccaaagctgtcactgctactgcttcaggctcacatccccccgacctgatggcgtgcccgccccctctccctgcggcccatgccacaggtttctgtgttttgctttagggacagaaccacttaggaaggaaagaactcccggtctccagggtggtatttcagtgtctgtgataatgtcacgcaacacctcttcggggaccagtgcccaggatctaatggaagcggaattggggcaactgggcccatgtggccagagctcagttagccagtgccgggcggccacagattacactgaccaatctcctcccttggctctgcaagcctcccacccagccttctctggcttaacccttgttggcgaaaactcttccacagtggcctccttggggacccagaacccggaggaaggggcatgaggcaggaagtggggccgatgtctgcaacccagaccacttcgtggaatgggctcttgaccaaatccctttttttgcgatttacccgttcaagcaaaacaacgttttggttaactaaggattgtgctaaagccgataccaggtccttcacacgtgtgcactaggaacaggagcgaacagcacagagagacgctccctgtgggacgcagcagccccgtggccccggcccagttcccagccaccctccctggctctgctcacaccagagatttccatagcaggagcggttggtgcagaagtaggttcagatgaacctcagttaacgtcgccacccctcctcccaccatggtaccctgtaggagccctgtatgacatctgagcgtggtggaggtaggagggttgccagctgcagtgaccctgccacagaggcagggtcagtgcagaggtcgctttggttccgcttccctgggccacagaacggaacacagcataggttctgcagcaggagccgcagtggcaggatggagggtgcgaagggcaaggagtgcactgctgggcattcctggccagccccggccctctggtgcctgcttcctgtgacttcagaaggcaggtggacagagcctccctctggccttgtcctcttcccagccacagaacgggcagggtggcacccgaccccaggggagcagtacctggtcccccaccccctcctcccaaccacctccaaggccaagctgggtcccatagccagcacggcatggttctccccttccccccttcccaggtcaggggagttggacaagtagcaggtgtttgtttttaaagcacagccctttgggaaagcaacacattattgagactcactgtgattcccccgggagtcagactggctttgtcctcttcctctctggagggccatgggccatcagcaggagctccacatcgagccccaggccagaaccccctccctttcacagagagggaactttattgcacaattgggtgccttttagcttttgtgtgttgaaatgggcgttttggaagcaagggtcaggggacagcttctaaaggtgtgagtctctgacctgagcatctgggcctcgcctgggcccttcttcctccccaggggtggaaacgtggaggggccagcagcaccccggggtctgcccaggggagtcaaggccccgaggtgggggggcctattccaggaggagtgggatctcggccctgtccagagcgagttaatgtgtccatctgcccaaccctgtcctgagaaaggacctggttttggccaggacctgacaaatacccaatggcagcagtgtcaacagacgggagtccagccagggtgggtgcccttgtcattgaggttagggacagctatccccaggttatgcctggccccacccagcagggagttggggtccccccacaggctgtgagctctgtgggccctgggatgtgatctagctcagatgccctctcatccttgatgtcatagttgagtgcacccaagtggcacccactggcggccaggggcacagcctggtggtggtggcaatagaactgtgcccctcctcagctcctcgcttcccctcccacagccccagccttactccaccatgcggacaatcattttgtacggatcacgggagcaatgctgtacggttttgtacactggtggtttgtttcctagaaaacccattgtgtctctggatttctagcacattactaaaagagcctctgctttgtaaacatg

SEQ ID NO: 22940 - protein, 816 aa, Homo sapiens; identical to SEQ ID NO: 3033

SEQ ID NO: 22941 - DNA, 2859 bp, Homo sapiens
agtggctgaagtggcggcggcttcggcggctgcggcggctgcaacagcttcgggctcggggttttggcggcggcgccggcgggctaggctgcgcggtgcggaccccggcgcgcggtccgggttgctggggcggcgcgtagatggagtcttgctacattgcccaggctggtcttgaactgctaggctcaagcagttctcccaccttgacctcccaaagcgctgagattacagaagatgcctctaatggaggagtttctgagcagcacccctggcccagtggctttgaaagggagctcaaaccagagactatttcaagccctggatatcatatcctgagggccacaggagaagagaacatggctgtgagtttggatgacgacgtgccgctcatcctgaccttggatgagggtggcagtgccccactggctccctccaacggcctgggccaagaagagctacctagcaaaaatggcggcagctatgccatccacgactcccaggcccccagtctcagctctgggggtgagagttccccctccagccccgcacacaactgggagatgaattaccaagaggcagcaatctacctccaggaaggcgagaacaacgacaagttcttcacccaccccaaggatgccaaggcgctggcggcctacctctttgcacacaatcacctcttctacctgatggagctggccacggccctgctgctgctgctgctctccctgtgcgaggcccccgccgtccccgcactccggcttggcatctatgtccacgccaccctggagctgtttgccctgatggtggtagtgtttgaactctgcatgaagttacgctggctgggcctccacaccttcatccggcacaagcggaccatggtcaagacctcggtgctggtggtgcagtttgtcgaggccatcgtggtgttggtacggcagatgtcccatgtgcgggtgacccgagcactgcgctgcattttcctggtggactgtcggtattgcggtggcgtccggcgcaacctgcggcagatcttccagtccctgccgcccttcatggacatcctcctgctgctgctgttcttcatgatcatctttgccatcctcggtttctacttgttctcccctaacccttcagacccctacttcagcaccctggagaacagcatcgtcagtctgtttgtccttctgaccacagccaatttcccagatgtgatgatgccctcctactcccggaacccctggtcctgcgtcttcttcatcgtgtacctctccatcgagctgtatttcatcatgaacctgcttctggctgtggtgttcgacaccttcaatgacattgagaaacgcaagttcaagtctttgctactgcacaagcgaaccgctatccagcatgcctaccgcctgctcatcagccagaggaggcctgccggcatctcctacaggcagtttgaaggcctcatgcgcttctacaagccccggatgagtgccagggagcgctatcttaccttcaaggccctgaatcagaacaacacacccctgctcagcctaaaggacttttacgatatctacgaagttgctgctttgaagtggaaggccaagaaaaacagagagcactggtttgatgagcttcccaggacggcgctcctcatcttcaaaggtattaatatccttgtgaagtccaaggccttccagtatttcatgtacttggtggtggcagtcaacggggtctggatcctcgtggagacatttatgctgaaaggtgggaacttcttctccaagcacgtgccctggagttacctcgtctttctaactatctatggggtggagctgttcctgaaggttgccggcctgggccctgtggagtacttgtcttccggatggaacttgtttgacttctccgtgacagtgttcgccttcctgggactgctggcgctggccctcaacatggagcccttctatttcatcgtggtcctgcgccccctccagctgctgaggttgtttaagttgaaggagcgctaccgcaacgtgctggacaccatgttcgagctgctgccccggatggccagcctgggcctcaccctgctcatcttttactactccttcgccatcgtgggcatggagttcttctgcgggatcgtcttccccaactgctgcaacacgagtacagtggcagatgcctaccgctggcgcaaccacaccgtgggcaacaggaccgtggtggaggaaggctactattatctcaataattttgacaacatcctcaacagctttgtgaccctgtttgagctcacagttgtcaacaactggtacatcatcatggaaggcgtcacctctcagacctcccactggagccgcctctacttcatgaccttttacattgtgaccatggtggtgatgacgatcattgtcgcctttatcctcgaggccttcgtcttccgaatgaactacagccgcaagaaccaggactcggaagttgatggtggcatcacccttgagaaggaaatctccaaagaagagctggttgccgtcctggagctctaccgggaggcacggggggcctcctcggatgtcaccaggctgctggagaccctctcccagatggagagataccagcaacattccatggtgtttctgggacggcgatcaaggaccaagagcgacctgagcctgaagatgtaccaggaggagatccaggagtggtatgaggagcatgccagggagcaagagcagcagcgacaactcagcagcagtgcagcccccgccgcccagcagcccccaggcagccgccagcgctcccagaccgttacctagcccagcgcccgaaagccgtctcttctatgcaataacacaatagtattactct

SEQ ID NO: 22942 - protein, 888 aa, Homo sapiens
MESCYIAQAGLELLGSSSSPTLTSQSAEITEDASNGGVSEQHPWPSGFERELKPETISSPGYHILRATGEENMAVSLDDDVPLILTLDEGGSAPLAPSNGLGQEELPSKNGGSYAIHDSQAPSLSSGGESSPSSPAHNWEMNYQEAAIYLQEGENNDKFFTHPKDAKALAAYLFAHNHLFYLMELATALLLLLLSLCEAPAVPALRLGIYVHATLELFALMVVVFELCMKLRWLGLHTFIRHKRTMVKTSVLVVQFVEAIVVLVRQMSHVRVTRALRCIFLVDCRYCGGVRRNLRQIFQSLPPFMDILLLLLFFMIIFAILGFYLFSPNPSDPYFSTLENSIVSLFVLLTTANFPDVMMPSYSRNPWSCVFFIVYLSIELYFIMNLLLAVVFDTFNDIEKRKFKSLLLHKRTAIQHAYRLLISQRRPAGISYRQFEGLMRFYKPRMSARERYLTFKALNQNNTPLLSLKDFYDIYEVAALKWKAKKNREHWFDELPRTALLIFKGINILVKSKAFQYFMYLVVAVNGVWILVETFMLKGGNFFSKHVPWSYLVFLTIYGVELFLKVAGLGPVEYLSSGWNLFDFSVTVFAFLGLLALALNMEPFYFIVVLRPLQLLRLFKLKERYRNVLDTMFELLPRMASLGLTLLIFYYSFAIVGMEFFCGIVFPNCCNTSTVADAYRWRNHTVGNRTVVEEGYYYLNNFDNILNSFVTLFELTVVNNWYIIMEGVTSQTSHWSRLYFMTFYIVTMVVMTIIVAFILEAFVFRMNYSRKNQDSEVDGGITLEKEISKEELVAVLELYREARGASSDVTRLLETLSQMERYQQHSMVFLGRRSRTKSDLSLKMYQEEIQEWYEEHAREQEQQRQLSSSAAPAAQQPPGSRQRSQTVT

SEQ ID NO: 22943 - DNA, 5320 bp, Homo sapiens
agtggctgaagtggcggcggcttcggcggctgcggcggctgcaacagcttcgggctcggggttttggcggcggcgccggcgggctaggctgcgcggtgcggaccccggcgcgcggtccgggttgctggggcggcgcgtagatggagtcttgctacattgcccaggctggtcttgaactgctaggctcaagcagttctcccaccttgacctcccaaagcgctgagattacagaagatgcctctaatggaggagtttctgagcagcacccctggcccagtggctttgaaagggagctcaaaccagagactatttcaagccctggatatcatatcctgagggccacaggagaagagaacatggctgtgagtttggatgacgacgtgccgctcatcctgaccttggatgagggtggcagtgccccactggctccctccaacggcctgggccaagaagagctacctagcaaaaatggcggcagctatgccatccacgactcccaggcccccagtctcagctctgggggtgagagttccccctccagccccgcacacaactgggagatgaattaccaagaggcagcaatctacctccaggaaggcgagaacaacgacaagttcttcacccaccccaaggatgccaaggcgctggcggcctacctctttgcacacaatcacctcttctacctgatggagctggccacggccctgctgctgctgctgctctccctgtgcgaggcccccgccgtccccgcactccggcttggcatctatgtccacgccaccctggagctgtttgccctgatggtggtagtgtttgaactctgcatgaagttacgctggctgggcctccacaccttcatccggcacaagcggaccatggtcaagacctcggtgctggtggtgcagtttgtcgaggccatcgtggtgttggtacggcagatgtcccatgtgcgggtgacccgagcactgcgctgcattttcctggtggactgtcggtattgcggtggcgtccggcgcaacctgcggcagatcttccagtccctgccgcccttcatggacatcctcctgctgctgctgttcttcatgatcatctttgccatcctcggtttctacttgttctcccctaacccttcagacccctacttcagcaccctggagaacagcatcgtcagtctgtttgtccttctgaccacagccaatttcccagatgtgatgatgccctcctactcccggaacccctggtcctgcgtcttcttcatcgtgtacctctccatcgagctgtatttcatcatgaacctgcttctggctgtggtgttcgacaccttcaatgacattgagaaacgcaagttcaagtctttgctactgcacaagcgaaccgctatccagcatgcctaccgcctgctcatcagccagaggaggcctgccggcatctcctacaggcagtttgaaggcctcatgcgcttctacaagccccggatgagtgccagggagcgctatcttaccttcaaggccctgaatcagaacaacacacccctgctcagcctaaaggacttttacgatatctacgaagttgctgctttgaagtggaaggccaagaaaaacagagagcactggtttgatgagcttcccaggacggcgctcctcatcttcaaaggtattaatatccttgtgaagtccaaggccttccagtatttcatgtacttggtggtggcagtcaacggggtctggatcctcgtggagacatttatgctgaaaggtgggaacttcttctccaagcacgtgccctggagttacctcgtctttctaactatctatggggtggagctgttcctgaaggttgccggcctgggccctgtggagtacttgtcttccggatggaacttgtttgacttctccgtgacagtgttcgccttcctgggactgctggcgctggccctcaacatggagcccttctatttcatcgtggtcctgcgccccctccagctgctgaggttgtttaagttgaaggagcgctaccgcaacgtgctggacaccatgttcgagctgctgccccggatggccagcctgggcctcaccctgctcatcttttactactccttcgccatcgtgggcatggagttcttctgcgggatcgtcttccccaactgctgcaacacgagtacagtggcagatgcctaccgctggcgcaaccacaccgtgggcaacaggaccgtggtggaggaaggctactattatctcaataattttgacaacatcctcaacagctttgtgaccctgtttgagctcacagttgtcaacaactggtacatcatcatggaaggcgtcacctctcagacctcccactggagccgcctctacttcatgaccttttacattgtgaccatggtggtgatgacgatcattgtcgcctttatcctcgaggccttcgtcttccgaatgaactacagccgcaagaaccaggactcggaagttgatggtggcatcacccttgagaaggaaatctccaaagaagagctggttgccgtcctggagctctaccgggaggcacggggggcctcctcggatgtcaccaggctgctggagaccctctcccagatggagagataccagcaacattccatggtgtttctgggacggcgatcaaggaccaagagcgacctgagcctgaagatgtaccaggaggagatccaggagtggtatgaggagcatgccagggagcaagagcagcagcgacaactcagcagcagtgcagcccccgccgcccagcagcccccaggcagccgccagcgctcccagaccgttacctagcccagcgcccgaaagccgtctcttctatgcaataacacaatagtattactctactgcgatgtacggaactgcggtgtgtgtacacatactcacgtatatgcacatatttatatacaggaagaaaaaagacagacaagatggggcttggtttataaccaccttgccctgtcttccttaactccagaagccagtttggtgaggggtgggggtgcggccaccaggtctgagctcttcctactgtggaaggctccagaaggcccttcacaaggagacccctcacctggatccagtcgactgcggggcttgcccctcatgtgggctggcctccatcggccacgtccaaagctgtcactgctactgcttcaggctcacatccccccgacctgatggcgtgcccgccccctctccctgcggcccatgccacaggtttctgtgttttgctttagggacagaaccacttaggaaggaaagaactcccggtctccagggtggtatttcagtgtctgtgataatgtcacgcaacacctcttcggggaccagtgcccaggatctaatggaagcggaattggggcaactgggcccatgtggccagagctcagttagccagtgccgggcggccacagattacactgaccaatctcctcccttggctctgcaagcctcccacccagccttctctggcttaacccttgttggcgaaaactcttccacagtggcctccttggggacccagaacccggaggaaggggcatgaggcaggaagtggggccgatgtctgcaacccagaccacttcgtggaatgggctcttgaccaaatccctttttttgcgatttacccgttcaagcaaaacaacgttttggttaactaaggattgtgctaaagccgataccaggtccttcacacgtgtgcactaggaacaggagcgaacagcacagagagacgctccctgtgggacgcagcagccccgtggccccggcccagttcccagccaccctccctggctctgctcacaccagagatttccatagcaggagcggttggtgcagaagtaggttcagatgaacctcagttaacgtcgccacccctcctcccaccatggtaccctgtaggagccctgtatgacatctgagcgtggtggaggtaggagggttgccagctgcagtgaccctgccacagaggcagggtcagtgcagaggtcgctttggttccgcttccctgggccacagaacggaacacagcataggttctgcagcaggagccgcagtggcaggatggagggtgcgaagggcaaggagtgcactgctgggcattcctggccagccccggccctctggtgcctgcttcctgtgacttcagaaggcaggtggacagagcctccctctggccttgtcctcttcccagccacagaacgggcagggtggcacccgaccccaggggagcagtacctggtcccccaccccctcctcccaaccacctccaaggccaagctgggtcccatagccagcacggcatggttctccccttccccccttcccaggtcaggggagttggacaagtagcaggtgtttgtttttaaagcacagccctttgggaaagcaacacattattgagactcactgtgattcccccgggagtcagactggctttgtcctcttcctctctggagggccatgggccatcagcaggagctccacatcgagccccaggccagaaccccctccctttcacagagagggaactttattgcacaattgggtgccttttagcttttgtgtgttgaaatgggcgttttggaagcaagggtcaggggacagcttctaaaggtgtgagtctctgacctgagcatctgggcctcgcctgggcccttcttcctccccaggggtggaaacgtggaggggccagcagcaccccggggtctgcccaggggagtcaaggccccgaggtgggggggcctattccaggaggagtgggatctcggccctgtccagagcgagttaatgtgtccatctgcccaaccctgtcctgagaaaggacctggttttggccaggacctgacaaatacccaatggcagcagtgtcaacagacgggagtccagccagggtgggtgcccttgtcattgaggttagggacagctatccccaggttatgcctggccccacccagcagggagttggggtccccccacaggctgtgagctctgtgggccctgggatgtgatctagctcagatgccctctcatccttgatgtcatagttgagtgcacccaagtggcacccactggcggccaggggcacagcctggtggtggtggcaatagaactgtgcccctcctcagctcctcgcttcccctcccacagccccagccttactccaccatgcggacaatcattttgtacggatcacgggagcaatgctgtacggttttgtacactggtggtttgtttcctagaaaacccattgtgtctctggatttctagcacattactaaaagagcctctgctttgtaaacatg

SEQ ID NO: 22944 - protein, 888 aa, Homo sapiens; identical to SEQ ID NO: 22942

SEQ ID NO: 22945 - DNA, 560 bp, Homo sapiens
cttctgagtagctgggactacaggtgtgccacctgcccactaattttttgtattttcagtagagcctctttccttggctcccaaatggttacctttttgctgtgtccccacgtgattgtccctgagtctgtgtgtctgtcctcttctgataaagacaccagtcctattggattagagctcatccatatgaccttgttttatcttagtcacctttaaaggccctttctccaaacacagtcacattctttcaccatgttggccaggctgatctcaaattcctgacctcgagtgatctatccgccttggcctcctgaagcgctgggattacaggcatgagccaccatgcctggcccatccatttgtctttgtatcacatagctcagtgcccacaatatgcaggtactcaacaaatagtggtcagaatcaacgtacttggatttctggggcctcgcagcccatgggagtggcagtgtaagggcccgagttagaggtgggcagcctccctcctgccgcctctcctcaccattgctttgagtcccattgctctcagcacagctgag

SEQ ID NO: 22946 - protein, 51 aa, Homo sapiens
MSHHAWPIHLSLYHIAQCPQYAGTQQIVVRINVLGFLGPRSPWEWQCKGPS

SEQ ID NO: 22947 - DNA, 1597 bp, Homo sapiens
agccttctgggtccgaggctcccacctgctctaagcgcttgacaccctttaaaaaaatgtatttaaagaggctggttcctatccatccgactggaggcatctcagtgcaagagcaaagctaagtcctgcacacgctcctcccctcctcctcctccttctccccccaggttttcccgaatgtatctactccggttacaactagacgcggcccctcccccacctgcctccccccttccttccctcgatcgtggagggagcgttctctgtgccttcccaagtccccgtgggggaccttctatgttggagtggggggagggggggagggtcatataacgaaggccagaaagaacaaattagataatcaaaagaattatagtaattgctttcactttcccccgcccgctcagcggattccctcccccgcccctcccctggtttttctgtctgtcgggaatactcggtctttccgaccccctcccctcccccaggttcctcctctcctctccccttgctcgcgcgttccctctcttcctccgttttctggtgtgctggaacgttcagcggaatatgatgaatgatcacctgtcacagcttgtttattataatgcaggcaatcaattacacatccccaatgctggccggcccgcaggaaatttatatgctcagcacaaaccaatgtgaaaatggaatctcatttgccaaatgtctttctccccgtacagcacgatgattacagtctgtgtttgtttcaacagtcgtgtacaactgacagtgccatcatttactgcctggctcaggtcacgttactctaaggctttatttatggtgttacgaagggcagcacaggaaaaggacaagggtgtctgtcagggatggcactgtgttaaaaagtgggcgtgcaagggccgcattcccgggcagccgctgcaacctcagcccctgggcccttacctccgcagcctctcccagcatccagctacccagactccaaggccccaggcgagagccagctctcggtacctggagctccacaggtcccagaatcggggtggatcagagttcaaattctggttctgctactgtctaattgcgtgctgcagggactcaatctcttcatctgggaaatgggagtaataacccttggcaggaatgttgcgatcctctgggatgtcagaggtgttgatgaatgttagttcccgggacttcggaaagaggtcccgttggaagagatgtgaattggaattcacaccctatattaaaatctcctccaatcttcacctctgagacatggctgtctcaagactgttttgtttcccttcctggtggaattttgcacttttatgtcctgtgtagcagcaggtagtgtggctttgagaaaataaaatggccaccttgctccgctgttctttctttgtaaaaaaaaaaaaaaaaaaaaaaaaacggcatagcaatcttggcctttctagctgtgtgaccccaggccggtcaatccctcctcctctccaagcctcggattcctcccctgagaagtaaagaaaataactcctaaactgcctcccgaggcttgctggcaggatccaaggtgtccagagatgtt

SEQ ID NO: 22948 - protein, 143 aa, Homo sapiens; identical to SEQ ID NO: 3035

SEQ ID NO: 22949 - DNA, 435 bp, Homo sapiens
cgaggctcccacctgctctaagcgcttggtaccagggagggaatgggaggacgcttgcgggatagggaggcgggggctggaaattggcagggtgagagctggggaaactagtctgggacgcagccctccttgtcccccttcttcattcacccccttgttgaggcccttggcttttgcataattatggaagctccaaaaggaaagataccagattgatcttgatcacctctgcctccccagcacctagtcttccttggcacatcgtgagtgctcgggtcaggctgtgccacatccacccagccttgcctggggtcatttatcctacatgtactcagatcacgtgaactggtgatgggccacccatgtgcctgcctggagactcctattcacccttcagatcaatatcccccaaataaactcccagtcactctggca

SEQ ID NO: 22950 - protein, 60 aa, Homo sapiens
GPWLLHNYGSSKRKDTRLILITSASPAPSLPWHIVSARVRLCHIHPALPGVIYPTCTQIT

SEQ ID NO: 22951 - DNA, 316 bp, Homo sapiens
agggagggaatgggaggacgcttgcgggatagggaggcgggggctggaaattggcagggtgagagctggggaaactagtctgggacgcagccctccttgtcccccttcttcattcacccccttgttgaggcccttggcttttgcataatacaccctttaaaaaaatgtatttaaagaggctggttcctatccatccgactggaggcatctcagtgcaagagcaaagctaagtcctgcacacgctcctcccctcctcctcctccttctccccccaggttttcccgaatgtatctactccggttacaactagacgcgg

SEQ ID NO: 22952 - protein, 31 aa, Homo sapiens
SGTQPSLSPFFIHPLVEALGFCIIHPLKKCI

SEQ ID NO: 22953 - DNA, 313 bp, Homo sapiens
tatatttctttattatttgacacgtgtatttgtttaatggccctctgctccaccagtatggaagctccaaaaggaaagataccagattgatcttgatcacctctgcctccccagcacctagtcttccttggcacatcgtgagtgctcgggtcaggctgtgccacatccacccagccttgcctggggtcatttatcctacatgtactcagatcacgtgaactggtgatgggccacccatgtgcctgcctggagactcctattcacccttcagatcaatatcccccaaataaactcccagtcactctggcatccc

SEQ ID NO: 22954 - protein, 65 aa, Homo sapiens
HVYLFNGPLLHQYGSSKRKDTRLILITSASPAPSLPWHIVSARVRLCHIHPALPGVIYPTCTQIT

SEQ ID NO: 22955 - DNA, 901 bp, Homo sapiens
gcgattcctccctggtctggctatcatgtgttttgcagtggaccaagagacatgaagcccgttttccaccctcgcctctttctccatctagctgcatgaccttgggaggtggcgtgacctctcggcttctttgctgcctcatctgtcatgatccacctttactacttcatagccatgttctaggataaatgagagaagcctctacatcttttagtctcccagaaagactggaaccagtgatgagttccatgaagacaaagacctgtttatcttgttctgctccagcaccgagcaggtgcagtggcttatgcctgttatcccagaactttgggaggctgagtcaggaggatcacttgaggccagttcaagaccagcctgggaaacatagcaagagcctgtctctattgggagaaaaaaaaaaaaaagcaacagcgacgaggcccgaggtgcagctgtctcgcctcgcctgtcttttgcaggcaccggcatgcacagaagatggctctccgggaggaagattcctttccattttgttctctctctgcctccgcaaggctcgcagccacctctcgggagtgcagggccagatcctgtgccagcggccttgcttgaatggcttcttgacggttactgctccagttttgctgagtcagaagaatcccacagccgctcaccggaaacacagctgttgggcaaaaataaccacagagctgagcatcatgcaccttccagaaaagatggcagaaaacctcaaaacaaaagagaaatacaaaacaataggagacactgtcaagaaaaaaaaaacaaaaacaaaaaccaccgcagctcactaaccgatccaagctggtggcgctctcctgatctctctccactcccaggcccagcaacggctctgaaataa

SEQ ID NO: 22956 - protein, 214 aa, Homo sapiens
MREASTSFSLPERLEPVMSSMKTKTCLSCSAPAPSRCSGLCLLSQNFGRLSQEDHLRPVQDQPGKHSKSLSLLGEKKKKATATRPEVQLSRLACLLQAPACTEDGSPGGRFLSILFSLCLRKARSHLSGVQGQILCQRPCLNGFLTVTAPVLLSQKNPTAAHRKHSCWAKITTELSIMHLPEKMAENLKTKEKYKTIGDTVKKKKTKTKTTAAH

SEQ ID NO: 22957 - DNA, 2484 bp, Homo sapiens
atgacggatgaacaggtgtgcgagactgtggagaaatacggagccaaccgggaggagtgtgcccgcctcaacgcctccctctcctgcctcaggaatgtccacatgtcaggaggcaacctttccaaacaagactggaccatccagtggcccacgacagagacggggaaggagaacaatcccgtgtgccccccggagcccaccccgtggatccgcacccatctctcccagagccccagggtcccgtccaagtgcgtccagcactattgtcacaccagccccactcccggggcccctgtgtacacccacgtggacaggcttaccgtggacgcctacccgggcttgtgcccgcccccgccactggagtcgggccaccgttccctgcccccatcgccccggcagcggcacgcggtccgcaccccgccgcgcacccccaacatcgtcaccaccgtgaccccgccgggcacgccgcccatgaggaagaagaacaagctgaagcccccggggaccccaccgccctcctcccgaaaactgatacacttgatcccgggattcaccgcgctgcatcggagcaaatcccacgagttccagctggggcaccgcgtggacgaggcccacacgcccaaagccaagaagaagagcaaacccttgaacctcaagatccacagcagcgtaggcagctgcgagaacatcccctctcagcagcgctccccgctgctgtccgagcgctccctccgctccttctttgtgggacacgcacctttcctgccttccacccctcctgttcacactgaggccaacttctctgcaaacacactgtcagtgccacgctggtccccgcagatccctcgcagagatctcggcaactccatcaagcacaggttttccaccaagtactggatgtctcagacgtgcacagtctgtgggaaagggatgctttttggcctcaagtgtaaaaactgcaagttaaagtgccacaacaaatgcaccaaagaagccccaccctgtcatcttctgatcatccaccgaggagatccagcaaggttagtccggacagagtccgttccgtgtgacatcaacaaccctctacggaagccacctcgctattcagacctgcacatcagtcagacgctccccaaaaccaacaaaatcaacaaggaccacatccctgtcccttaccagccagactccagcagcaacccctcctccacgacgtcctccacgccctcctcgccagcaccccccctccctcctagtgccacgccgccttctcccctacacccttccccacagtgcacacggcagcagaagaacttcaacctgccagcatcccactactacaaatacaagcagcagttcatcttcccagatgtggtgccggtgccggagacgccgacccgggcgccccaggtcatcctgcatccggtgacctcgaatccaatcttggaaggaaatccattacttcaaattgaagtggagccaacgtcggagaatgaagaggtccatgatgaggccgaagagtcagaggatgacttcgaggagatgaacctgtccctcctctcggcccggagcttcccacgcaaggccagccagaccagcatcttccttcaggagtgggacatcccctttgagcagctggagatcggcgagctcattggaaagggccgctttgggcaagtgtaccacggccgctggcatggcgaggtggccatccggctgattgacattgagagggacaacgaggaccagctcaaggccttcaagcgggaggtgatggcctacaggcagacacggcatgagaacgtggtgcttttcatgggtgcctgcatgagcccgcctcacctggccatcatcaccagcctctgtaagggacggacgctctattccgttgtgagggatgccaaaatcgttttggatgtcaacaaaaccaggcagattgctcaagaaattgtgaagggcatgggctacctccacgccaagggaatcctacacaaggacctcaagtcaaagaacgtcttctatgacaacggcaaagtggtcatcacggactttggactcttcagcatttctggggtgctgcaggctggcaggcgggaggacaaactgcgcatccagaatggctggctatgccacctggcaccagagatcatccgccagctgtcccccgacacagaggaggataagctccccttctccaagcactctgacgtctttgcccttggcacaatctggtatgaactccacgccagggaatggcctttcaagacccaaccagcagaggcaataatctggcaaatgggcacaggcatgaaacccaacctcagccagattggcatgggaaaagaaatctcggacattcttctcttctgctgggcctttgaacaagaagagagacctaccttcaccaagctcatggacatgctggagaaactgccaaagcgaaaccgtcgcctgtctcaccctggacatttctggaagtctgcagag

SEQ ID NO: 22958 - protein, 827 aa, Homo sapiens
MTDEQVCETVEKYGANREECARLNASLSCLRNVHMSGGNLSKQDWTIQWPTTETGKENNPVCPPEPTPWIRTHLSQSPRVPSKCVQHYCHTSPTPGAPVYTHVDRLTVDAYPGLCPPPPLESGHRSLPPSPRQRHAVRTPPRTPNIVTTVTPPGTPPMRKKNKLKPPGTPPPSSRKLIHLIPGFTALHRSKSHEFQLGHRVDEAHTPKAKKKSKPLNLKIHSSVGSCENIPSQQRSPLLSERSLRSFFVGHAPFLPSTPPVHTEANFSANTLSVPRWSPQIPRRDLGNSIKHRFSTKYWMSQTCTVCGKGMLFGLKCKNCKLKCHNKCTKEAPPCHLLIIHRGDPARLVRTESVPCDINNPLRKPPRYSDLHISQTLPKTNKINKDHIPVPYQPDSSSNPSSTTSSTPSSPAPPLPPSATPPSPLHPSPQCTRQQKNFNLPASHYYKYKQQFIFPDVVPVPETPTRAPQVILHPVTSNPILEGNPLLQIEVEPTSENEEVHDEAEESEDDFEEMNLSLLSARSFPRKASQTSIFLQEWDIPFEQLEIGELIGKGRFGQVYHGRWHGEVAIRLIDIERDNEDQLKAFKREVMAYRQTRHENVVLFMGACMSPPHLAIITSLCKGRTLYSVVRDAKIVLDVNKTRQIAQEIVKGMGYLHAKGILHKDLKSKNVFYDNGKVVITDFGLFSISGVLQAGRREDKLRIQNGWLCHLAPEIIRQLSPDTEEDKLPFSKHSDVFALGTIWYELHAREWPFKTQPAEAIIWQMGTGMKPNLSQIGMGKEISDILLFCWAFEQEERPTFTKLMDMLEKLPKRNRRLSHPGHFWKSA

SEQ ID NO: 22959 - DNA, 547 bp, Homo sapiens
aaattaacacaggtcccagggctgagattttccatgtttagtttcaacccaaaggaaaattttgttagaaagttgaaagagtgtgactatttttaaataacgagacgtggggccatagtgtcagcacagtcaaaaaggtaaaaaacatttgtatcttgctttcttccaccctccccttcaattcagatggatagactgcagaagaaaacaagggaagttaacacttcattcagagcttgccaaatgtcaggaacttgctttatcctggaccaggagttctcaactatgcaccgtgggacatctctctgccatatcttgcatcacacttggatggtgtaatggaaataacattagactgggagtcaggagacttgtgttccagcagaagggaaaaagaagtctcagagtggaatattgcaacatcccatattctcccgagaagggctgctggattcccttgctgatgaggaattaccatggggtcaccttgctacatggttcatcactgtcatccctcccttcagaaaaattaaatcattcaaaggtc

SEQ ID NO: 22960 - protein, 50 aa, Homo sapiens
MDRLQKKTREVNTSFRACQMSGTCFILDQEFSTMHRGTSLCHILHHTWMV

SEQ ID NO: 22961 - DNA, 5262 bp, Homo sapiens
gcgcacgcacacacatccgaccccgtcgcctcttctctcctggtgctgcccagaaagccagccctcccttcccttcttggggcgcagaggctcagccagctcagagcgcagcctggagccgacccagaagggcgaagaaagcccagcggacgagcctcctttctctgctgcctgcccgggctggggcgtcccatcccccgccctgaactccgatctctcccaccccacccctctctgggtttcacccggacagagccgggagctgggtgtcgcccccgtttggaatccacgtttcagcactttggacagcgccccggacgccccggcccctttgggttggcgatggcgagcgttcagcaaggcgagaagcagctttttgagaagttctggcgaggaaccttcaaagcggtggccaccccccgtcccgagagcatcattgtcgccagtatcacggcccgcaagccgctgccaaggacagagccccagaataaccccgttgtcccagctcaggatggaccctcagaaaagctgggtcagcatctggccaccgagcccttgggcaccaacagttgggagagagacaagacctgtcgggaactgggtgccaccagaggacacagtgcctctcatgacaaagacttgacaccaccaccttcctccaggggaaagaagaaaaagaagaaatccactcggaagaagagaaggaggtcctcatcctatagcccatcgcctgtcaagaaaaagaagaagaaaagttccaagaaacacaagcgacgcaggtcattctccaagaagagaaggcacagctcctctagcccaaaaagcaaaagaagagatgagaagaggcacaagaaacaatctcgaagccggccccgaaagtctcaccgccaccgccatcaccgctgcccctcgcggtcccagagctcggagtcccgcccctcaagctgtgagagcaggcaccgcggccggtcccctgaggaagggcagaagtcccgccgaaggcactcccgccgctgctccaagaccctctgcaaggacagccctgaggcccagtccagtcgcccgcccagtcaacccctccagatgcttggctacctgtcagccaggggtgtaatcactgggtcggggtctgctgctgacctctttaccaaaacagccagcccgctcaccacctcgcgaggacgttcccaggagtacgactcaggaaatgacacgtcctcgccaccctccacgcaaaccagctcagccaggtctcggggccaggagaaggggagccccagtgggggcttgagcaagagccgggagctcaacagtggcaacacctctgattcagggaactccttcaccacctcctcaccccagaacaagggggccatgttggagaatctctcccccaccagcaggggcagagagtcaaggggatttcagtcaccgtgtctggaatgtgccgaagtgaagaagtccagtttggtcccatccacagcccggagctcacccatgaaagggtgttcccgcagctcctcctatgccagcacccgatcctccagtcactcgtcccgatccccaaatcccagggcttcccccaggtacacccaaagccgatccacctcttctgaaaaaaggtcctactcccgctctcccagctattcctccaagtctggcaagaggagcccgcccagcagaagctctaggtcccgccgcagccctagctactcccgctacagccccagcagggagcgggatcccaaatacagtgagaaggactcgcagcagcgggagcgcgagcgagcgcgtcggagacgtcggtcctactcgcctatgagaaagcgccggagagactccccgagccacctggaggcccggaggataaccagtgcccggaaacgccccatcccctactatcggcccagcccctcctcatccggcagcctcagcagcacctcctcctggtacagcagcagcagtagccgctcggccagccgcagctactcccggagccggagtcggagccggagccggagacggagccggacccgcacgagcagcagctctagctcccgcagccctagtccgggctcccgcagccggagccggagcaggagccggagccggagccggagcaggagccagagccggagctacagctcagcagacagctactccagcacgaggcgctaagtgcccctgagccagctgcccgtgggggccccttcgcgctgccagcctcccccaaccacctgccctccccgccttcttggtgacaaatagtgagggctcctataccttgtccttcctgcttgcctaggggaagaggagaagagggtaagggggcttcactctctagatcagcctgctaggagcctctaccagcatcatcctggggcccagctcaggcctgggcatatggaaagaaccatcatcttgtggcacaaaaaaagaagaaagaaaagaaaacttcaaggttttgtgagaagcaatgggtctgtgactcaaaaattgagccctggccaggaaaatgtggagacagttcttctcctccactgctcacaggaggcccgtggtaattctccccacctccccggatgccccactagtccaacttcatggctgcacgtggatggacccccatgtctgagaggggtgaaagaggagaccaatggcagttcaggttcaagataacggggtcaggcctttaacttcctcaaacaggcccaagcaaaggctggaagacatttgggtcctagaagaagggatatccttgaataccagatggggacgtttgacttggtgggaggtgtcaggagataggagttggttaagatgatagatagaaaaacggaagggttcagctgctgctcccaatacctcagcatggtaaggggacagagcccagcagatcccagctgtgaagaggccactgcatggctgacacaaaacacctcttggccattcacaggggccctgcaacctcacgagaaaggagatagtggaagagtcaggacaggttggtctccagccccacttcccaaatatgcctcagccccactagctggcaccaacttaattccacgggaccatctgctgaacattccccagtgccatggccagttgccaggccccagcgccagccagtctggccttaccctccggttggcgcctgccagccccctcccctctgcccaggctgccacgccctggatgccacccagtgcagcctggcacctacccacccacccttcagcttaagccactccccttgcctctcaggaattttgccaggatggggcacagcagctcaggtttgggggaaaagacccgaatccagagtgcaggggagaggggcttggatatgccatgtcttgggctcctgctggcttctgaggtttcttgtcagcttgggaaagacccacctttatttttgccctcaccccaagtcccccctggctggggctgggcagagagggtaagctgatctccgatccacaaataccaccagctgcttcatccacagaaggcgctaagaacggggaggtgaggaataagatccttaaaataaactcttgggcatccccctcaccagctgactggctttccggaggcttgtgggtgagtttcaagtttgtggtggcaacagcagcaggacagggcacggagggagcgagggagagaggaccggtcccagcttttggatattttgggttatggggaagcaagggccaaacattctttatccctcccaccccagggaaaacatttggaaaatagtcctttttcttggaagcagtgacgtctccctacccaatctttcccatcctatcaacccatggggctagagactgccatgcaaccaccaccacgacagcccttcctccatcagaagacaggagtgagggccccgggcagcagtggacgacccagcctccccataccgggcctctggcccagacctaagccctgcccacaaagactaatggatgccagtgctgtcactgcagaaggccagatggcaggtgcctgggacaggggcaggtgccccggggagggcaagtacagccactgtaaataaccctcgtccctgcccaggaacccagactggacttcagtctccctccatggagacaaaggcttcccagagccaccaaaaaccttcttagcaggacagctgtgagaggcatcagaacctcacgttcggactgccttcatcaagacaactctaggggaccattttgcctggggctcctagcaaacctttttatttattttatttatttatctatttatttatttgatgactgtctctctttctcgccattagcagtattgaattatttatttatacagaggttttgtgtgtgtgtgtgtgtgtgtgtgtgtgtgtgtgtgtgtgtgtgtgtgtgttggggggatctcctaaattatttctgtgcatctcctttttttttctgctgttttttatggatgggatttgagaggccaaaggtgagtgggctattggccttctccctgaaggctctaagcctggaacaccctggggttggcccagaaggaggcacatcagtcccaaaattcatcacttaacccagcgtccaggagggtcaggcctgtaccccagcctcctgtcccccaggaacctcacaggggtatcaaaaagatgtaaacagcccagaggcttatgagctacagtgatgaattgacacagtggagttgcaacttaggtgggggttggagtcgaaagttggcaaatggggccaaggctgcacaaagtcgaaatcccttgtgaatgtcccttagggaggcaccagattggagacagatgtgctatctcctaacagagtgatgaggcttcagttgagtacttgctgaagtagttgccttgtattttgagggccatggtggatgaaaatgatgtctggtttagtactggaattgcacttggggttgacaaggtgctcacaccatgagaatggaggcaggaattgagctgactgagggaagatgcaccttgatctcaccctcactccaaggcacatagcaggatcactccctagcttctctgagcacacctagttggtttcatgtatgttacacatgcttccactccacagtacctaatttctctctgtcccctgagatctgaaggctaccttgggaagaggcatcagccatcttgcttgagaaccaccaagccaaaagcaaaagcttttatctatgatctcttgctgtttcatcaggggaaagcacaaagctatttctgaaattagg

SEQ ID NO: 22962 - protein, 611 aa, Homo sapiens; identical to SEQ ID NO: 3039

SEQ ID NO: 22963 - DNA, 362 bp, Homo sapiens
aatggtattggggcagaggatcgggcagtgcaaacaccagtatgtaaggggaggctgtctgcatttcaggggggctggaatatatggtgcaaggagtatgcatgggacatgaggctggacagtcaggcagagtccagatcatggaggtttgttaatccaggcctgcttagatgtgggtgtcaagataagactgctcatatatggagtttttttttttgtttgtttgtttgtttgttcttgagactgagtttcactcttgttgctgaggcaggagaatcgcttgaacccaagaggcggaggtcgccgtgagcagagaatattccactgcagtccagcctggtgacagaatgagactccatctc

SEQ ID NO: 22964 - protein, 66 aa, Homo sapiens
MRLDSQAESRSWRFVNPGLLRCGCQDKTAHIWSFFFCLFVCLFLRLSFTLVAEAGESLEPKRRRSP

SEQ ID NO: 22965 - DNA, 608 bp, Homo sapiens
aggcgatgggctataggatgaggacctgccagggccaagaagacacatttcagaaggaggctcttaaaggccaagccaagaagcaagagcacggatttacatctcattggctgagggtgctccaggaatttctcacacagaagcgtgagtggctgaaacgaagagaatggacatggagcccacccggaagagcacccttaacatcatcatatccctgaagcacgagtcggggtggtgggactgccctggaaaccctgcacacagctggcttgagcagtgggtattttcataaggcatatatgggcatcacagaacacttggagctttaatgaagacagctgccattctgtgagctgttctatgaaggagcccacttggcaaggaactgggggaggtctcagattaacagccagcaagaaactgaatcctgctaacaaccacctgaatgaacatgaaagcagacccttccccaattgagtcttcagatgagacccagtgctcacctgcacctaggttggagccctaagagaaaccttgaagcagaggaaccagcttaacctgatccatggaaactataaaataaaatgtgtgttgtttaaactgctaaa

SEQ ID NO: 22966 - protein, 70 aa, Homo sapiens
MGYRMRTCQGQEDTFQKEALKGQAKKQEHGFTSHWLRVLQEFLTQKREWLKRREWTWSPPGRAPLTSSYP

SEQ ID NO: 22967 - DNA, 449 bp, Homo sapiens
ccccttgggagtgtggcatcaagcagatgaattgggcgcattgcatctgattcagcctcttgaggagaaagacttcatactgatccaaatagactcccgagaggcagaaagaggaaaatgataaataaatgccagccaagctctaaaatggaacactctagctgtgtggccactgctttaatgaagacagctgccattctgtgagctgttctatgaaggagcccacttggcaaggaactgggggaggtctcagattaacagccagcaagaaactgaatcctgctaacaaccacctgaatgaacatgaaagcagacccttccccaattgagtcttcagatgagacccagtgctcacctgcacctaggttggagccctaagagaaaccttgaagcagaggaaccagcttaacctgatccatggaaactataaaataaaatgtgtgttgttt

SEQ ID NO: 22968 - protein, 38 aa, Homo sapiens
MKEPTWQGTGGGLRLTASKKLNPANNHLNEHESRPFPN

SEQ ID NO: 22969 - DNA, 3225 bp, Homo sapiens
atgatctcttgctgtttcatcaggggaaagcacaaagctatttctgaaattaggaaaaaaaaaaaaaaggtggaaggagcagccagatgttccacaggaccccaccaagaaggtcatttccaaacccatcctggaagggcccaggatccaaaggtcatcagtcctgcttatctgaccaactggcagtgtcttctggctgctggccggagacagctcttgccctttccaaagtcactgtccactgccttgcaattgccagcttgtctggtccagctttgggtttggtgagacttttgcaacatccctggttgtttccctggcaatgtgactatccagccctaacccaaagcaagggagtgcccctttcctgggtgaagtttacaagaaggctgcttaaatgcctgcttcggggaaatctctgcctctctctctctctgtctctctctctgtctctctctctgtctctctctctctctctctctctctctctctctcagtgtatttctctactttcttttacatttcctttttttctatccaaaaacaatgtgcttgttgaggcactggtaaccctgattaaccagaacctcccattcccagtatcgctgttcctacgcccatttcaccctcattaccttctgcttccaaggaatatgacagatcaccaggatgctgctcgtcgtgaggatttatctcaaaaaccaacatccaaaatgggagggagatgtggcttgaggtcaagcgccatgcatcccaagcctttgaccttcccgctatggaagtgcactggatgacagaaactgaatacattgctccctttccctagggcaaagttcgacctctgttaagtggagggatttgtgagataaaaattcaaaatgttggcctgaggcctgagagtgtcaccaaagacagagggagcttcactgagactcagagggaaaaggaaaagagcctcaaacatttttaggaggttgtccatcatgaaagtaaaaacgaaaagcaagatttgatctcccttcagttaattaggcaaggctaagtaactcaaagccccctattagtaacattctggttcactgaggtttgatcatattcctatctgcattccttcccttctttgaaggacagctgatctttcagaagcagaataaaattaagatgttagaacaaaggtctcagtctcagagaaccgcatcacttcatttgctcagacccatcctcttttgcaaaagggtctgcttggagaggccaaaattcagggtgctctcaaaggcaaagaaagcacattgttttccttctccagtccaactttcatcttttcttctgctgttttcttttcccctcttctttttcacaaatgttcaaaatggtctcatgcgcatgtgtcttgccccactttcccctttagctgaacagaaaattttgtctcagtaaaacgaagtcaaaaaacaggattcctccaaacatgcctcctcccgcactggccagccgagtccagctgagaaacttatgctagattcaatgtcattgagcaatgctttattgaagtctcgttcttctcacttctgcaccagtgagccaatgatactgacagaaatgtcatctctcttctatctgtggttgctgtttttggagtaaaagtttctgtgtgtgtttttttagttcttttgatggctgttgttttgcattgtaaataccatgatgggggacccccatcagaacatggcttatttaataatttatttcgtatttattgagtaatattgggaaaagagaaggaccacctctttccctgaattgctattgagaattggtccatctcccagctccaggtgctgctgtctgcagcaagggcattactgcccaggtaaggagtgctagaatcaccaagcaaattgaaattggcagaaatggaggcttcagtcacacaaattagactcaaatggaactaaaacactggttatctccaggaaaacctcatttagatggaaattaatggaagaataaaatgcctacacatgaaccaacttctattaaaaagtcacaactccttgaaaaaaaaaataaagaaaaattgtaaactcttttttttttctggccaaggaaagctatgcctcatcttctaacgagccaagccaaaaagactgcaatggtattcctatgtgtttctttggcctgtgtatcagtctgaatgaaatggaatgggtctctagcctcagtcttgtcatctgtaaaatggggcttgtcctatatattatctgcaagacgtgggaaatgggggctcaagccctgatgctatggactccatactgttggatatattgtctcttgtgtcttctgctgactgcagattaaagggtgtcaaccaaggaaggaaacaaaaaagtagggcctggacttcatttgcagaatgaggtcatagtcgttgagtcccacagtcatatatgggagacctcaagttgctgtcaccttgataactcttgtatcctgggttaaagccctctgtatttagtttgaacttctctctaagccccgtggtccaaagtcatcacgggagagaccaagatgggcttaccttgccctgctctggatttaaccattgttcattgtcaggctatatttttgtacaatcattcaaataacccagtgacataggtcatattgccacttttcagaggagaaaactgaggctcaggagggggagttgacatgcccaagctcccttgagctcagatcagcttgactcaatgtccaacattcccttggtagctttttctccggggtcctgtgctataagaacttctctctgcactgtatttttttttctcccaattcttagctatttcctcaagcaatgattggccaaggacctagcataatccaccacattggccaaggggacgtggtgcaccccaaggccatttctctgcattggaggctgcgaatctcctctggaaaattcccaacccgaggacccaccatgagcccagctcagcctgaccagacagcctctgcctggagcattcacatcagatggaaagaagctgctgtgtcctccagcatcctgggaccctgtcctctgcccagtgacacagcagccatggctagcttgatttctggtctccaaagctaagcataaccttcccggggtttctggtttttcagcctgtacgaaacatgtctctgttctaattaaagttcccatggtatggtgttctcata

SEQ ID NO: 22970 - protein, 235 aa, Homo sapiens
MFHRTPPRRSFPNPSWKGPGSKGHQSCLSDQLAVSSGCWPETALALSKVTVHCLAIASLSGPALGLVRLLQHPWLFPWQCDYPALTQSKGVPLSWVKFTRRLLKCLLRGNLCLSLSLSLSLSLSLSLSLSLSLSLSQCISLLSFTFPFFLSKNNVLVEALVTLINQNLPFPVSLFLRPFHPHYLLLPRNMTDHQDAARREDLSQKPTSKMGGRCGLRSSAMHPKPLTFPLWKCTG

SEQ ID NO: 22971 - DNA, 1187 bp, Homo sapiens
gaggtggtcagggaaggcaattcctggaaagaattttggagaaaataatagaagaaagccagagctccaataagcaaacatgaagagaaacagcaagaaggtggcattgtttctaagaacttcacaaagaaaatccagcttcctgcagaggtggatcctgtgacagtatttgcctcactttccccagagggtctgctgatcatcgaagctccccaggtccctccttactcaacatttggagagagcagtttcaacaacgagcttccccaggacagccaggaagtcacctgtacctgagatgccagtactggcccatccttgttttgtccccaaccctagggcttctctgattccaggatacattactttagctgaactcagatttagtgcaagtaaaatgttagagggtgcgggggtgaggactgaccacagattccctggatagtgtagtggtagatttctccacaggatagcgcaattggcaaatcatgcttggttgtgttaggccaaaatactagttttgctttctttaccttttctatcttgatgaaaatgttgcacattctatagttgcaaaacacataaaaggggacttaacatttcacgttgtatcttacttgcagtgaatgcaagggttacttttctctggggacctcccccatcacccaggttcctactctgggctcccgattcccatggctcccaaaccatgccgcatggtttggttaatgaaacccagtagctaaccccactgtgcttccacatgcctggcctaaaatgggtgatatacaggtcttatatccccatatggaatttatccatcaaccacataaaaacaaacagtgccttctgccctctgcccagatgtgtccagcacgttctcaaagtttccacattagcactccctaaggacgctgggagcctgtcagtttatgatctgacctaggtcccccctttcttctgtcccctgtgtttaagtcgggatttttacagagggagctgtctccagacagctccatcaggaaccaagcaaaggccagatagcctgacagataggctagtggtattgtgtatatgggcgggacgtgtgtgtcattattatttgagttatgctgttgtttaggggtaaataacagtaaataattaataataataataataataataaaggagctgacgttcttagc

SEQ ID NO: 22972 - protein, 60 aa, Homo sapiens
MPGLKWVIYRSYIPIWNLSINHIKTNSAFCPLPRCVQHVLKVSTLALPKDAGSLSVYDLT

SEQ ID NO: 22973 - DNA, 564 bp, Homo sapiens
gttgtggggagaatcactgcaagccgcatgacgcaccggagaaacctggccctgcctgggacctgggcaggggctgggaccccccctacaatgacactaatggaattcccagcatactcggctccatgaaagcaggacccttgggagtcctgttcacagtagcatccccagcgcctagagggagcctgctgcactgtagaagcccagcatatcttggatgagtagatgatgtcgtatcagcaaccctgggtctgaattgccaactcccactgggtagactctacatgcagtaacaacatcaacatattaactaatttctgcagtccatagaaggtgccgggcaccaaggtttcccaagcgtgctctttttaattttcatcacagccccctagaggttttatactatcattattccctttttacagatgaggaaactgaggcaaaagacatgaggtgacctgcctgaggccaccagcttatggattctgaacccaggtctgtctgaactttaagcccaggcctcttttctctgccacacaccccagcaagaatgaataaataaac

SEQ ID NO: 22974 - protein, 33 aa, Homo sapiens
MTHRRNLALPGTWAGAGTPPTMTLMEFPAYSAP

SEQ ID NO: 22975 - DNA, 2004 bp, Homo sapiens
ccacagcccagctgttccctccgcggattctccggggctggttcatcacctccgaatattcctgtgacaggagacgcttgcaaaacccgcctccagcctccagcagcaaataaatagaaggcttgcagcccagaaggagccagaagaagtttctaggcgcgcgtgccctgggtttattaagctcctggctccgctctagacctcagcggttctggctgccagcctgggcagcctgggaagcctgggaggacggtggcttgccggtctgtcgtgaggcagtgcggacggggaccctctgggattctgctggatctgccccgggggttacctttgggggctgggaccccagtcgaggggacacaaccgtccctggcagtggttggttctgcttctccctgcagaaaagcagcattttcggaagctgaagaataagctagcccagccacaccaccttgttgtgtgaccttgggcaggtggttctgtctctctgagcctctgtttctctctgagctgagcagccaccatggctgacggtcagatgcccttctcctgccactacccaagccgcctgcgccgagaccccttccgggactctcccctctcctctcgcctgctggatgatggctttggcatggaccccttcccagacgacttgacagcctcttggcccgactgggctctgcctcgtctctcctccgcctggccaggcaccctaaggtcgggcatggtgccccggggccccactgccaccgccaggtttggggtgcctgccgagggcaggacccccccacccttccctggggagccctggaaagtgtgtgtgaatgtgcacagcttcaagccagaggagttgatggtgaagaccaaagatggatacgtggaggtgtctggcaaacatgaagagaaacagcaagaaggtggcattgtttctaagaacttcacaaagaaaatccagcttcctgcagaggtggatcctgtgacagtatttgcctcactttccccagagggtctgctgatcatcgaagctccccaggtccctccttactcaacatttggagagagcagtttcaacaacgagcttccccaggacagccaggaagtcacctgtacctgagatgccagtactggcccatccttgttttgtccccaaccctagggcttctctgattccaggatacattactttagctgaactcagatttagtgcaagtaaaatgttagagggtgcgggggtgaggactgaccacagattccctggatagtgtagtggtagatttctccacaggatagcgcaattggcaaatcatgcttggttgtgttaggccaaaatactagttttgctttctttaccttttctatcttgatgaaaatgttgcacattctatagttgcaaaacacataaaaggggacttaacatttcacgttgtatcttacttgcagtgaatgcaagggttacttttctctggggacctcccccatcacccaggttcctactctgggctcccgattcccatggctcccaaaccatgccgcatggtttggttaatgaaacccagtagctaaccccactgtgcttccacatgcctggcctaaaatgggtgatatacaggtcttatatccccatatggaatttatccatcaaccacataaaaacaaacagtgccttctgccctctgcccagatgtgtccagcacgttctcaaagtttccacattagcactccctaaggacgctgggagcctgtcagtttatgatctgacctaggtcccccctttcttctgtcccctgtgtttaagtcgggatttttacagagggagctgtctccagacagctccatcaggaaccaagcaaaggccagatagcctgacagataggctagtggtattgtgtatatgggcgggacgtgtgtgtcattattatttgagttatgctgttgtttaggggtaaataacagtaaataattaataataataataataataataaaggagctgacgttcttagc

SEQ ID NO: 22976 - protein, 196 aa, Homo sapiens; identical to SEQ ID NO: 3041

SEQ ID NO: 22977 - DNA, 1135 bp, Homo sapiens
gttccctccgcggattctccggggctggttcatcacctccgaatattcctgtgacaggagacgcttgcaaaacccgcctccagcctccagcagcaaataaatagaaggcttgcagcccagaaggagccagaagaagtttctaggcgcgcgtgccctgggtttattaagctcctggctccgctctagacctcagcggttctggctgccagcctgggcagcctgggaagcctgggaggacggtggcttgccggtctgtcgtgaggcagtgcggacggggaccctctgggattctgctggatctgccccgggggttacctttgggggctgggaccccagtcgaggggacacaaccgtccctggcagtggttggttctgcttctccctgcagaaaagcagcattttcggaagctgaagaataagctagcccagccacaccaccttgttgtgtgaccttgggcaggtggttctgtctctctgagcctctgtttctctctgagctgagcagccaccatggctgacggtcagatgcccttctcctgccactacccaagccgcctgcgccgagaccccttccgggactctcccctctcctctcgcctgctggatgatggctttggcatggaccccttcccagacgacttgacagcctcttggcccgactgggctctgcctcgtctctcctccgcctgccgagggcaggacccccccacccttccctggggagccctggaaagtgtgtgtgaatgtgcacagcttcaagccagaggagttgatggtgaagaccaaagatggatacgtggaggtgtctggtaagtcaggggcaggagggagagagaatggggaggccgggatgtagccctcagccctgggaatagccagagaaagtttcctgggagctgacgttgggacagtgtgacacaggtgacctcagggctcaggaatgcagcctgcaaagttatctttacggaaaacttctctcccggctcccagcagagatcttaacctgcctgactcagctattggggcctctgggtgctcatcaatcatggtacagacaggaaaatagaaaccatgttggatattttgacagagggcatttaatataaagaataggttaagcagatatcaaagaatt

SEQ ID NO: 22978 - protein, 100 aa, Homo sapiens
MADGQMPFSCHYPSRLRRDPFRDSPLSSRLLDDGFGMDPFPDDLTASWPDWALPRLSSACRGQDPPTLPWGALESVCECAQLQARGVDGEDQRWIRGGVW

SEQ ID NO: 22979 - DNA, 1788 bp, Homo sapiens
gttccctccgcggattctccggggctggttcatcacctccgaatattcctgtgacaggagacgcttgcaaaacccgcctccagcctccagcagcaaataaatagaaggcttgcagcccagaaggagccagaagaagtttctaggcgcgcgtgccctgggtttattaagctcctggctccgctctagacctcagcggttctggctgccagcctgggcagcctgggaagcctgggaggacggtggcttgccggtctgtcgtgaggcagtgcggacggggaccctctgggattctgctggatctgccccgggggttacctttgggggctgggaccccagtcgaggggacacaaccgtccctggcagtggttggttctgcttctccctgcagaaaagcagcattttcggaagctgaagaataagctagcccagccacaccaccttgttgtgtgaccttgggcaggtggttctgtctctctgagcctctgtttctctctgagctgagcagccaccatggctgacggtcagatgcccttctcctgccactacccaagccgcctgcgccgagacccccccacccttccctggggagccctggaaagtgtgtgtgaatgtgcacagcttcaagccagaggagttgatggtgaagaccaaagatggatacgtggaggtgtctggcaaacatgaagagaaacagcaagaaggtggcattgtttctaagaacttcacaaagaaaatccagcttcctgcagaggtggatcctgtgacagtatttgcctcactttccccagagggtctgctgatcatcgaagctccccaggtccctccttactcaacatttggagagagcagtttcaacaacgagcttccccaggacagccaggaagtcacctgtacctgagatgccagtactggcccatccttgttttgtccccaaccctagggcttctctgattccaggatacattactttagctgaactcagatttagtgcaagtaaaatgttagagggtgcgggggtgaggactgaccacagattccctggatagtgtagtggtagatttctccacaggatagcgcaattggcaaatcatgcttggttgtgttaggccaaaatactagttttgctttctttaccttttctatcttgatgaaaatgttgcacattctatagttgcaaaacacataaaaggggacttaacatttcacgttgtatcttacttgcagtgaatgcaagggttacttttctctggggacctcccccatcacccaggttcctactctgggctcccgattcccatggctcccaaaccatgccgcatggtttggttaatgaaacccagtagctaaccccactgtgcttccacatgcctggcctaaaatgggtgatatacaggtcttatatccccatatggaatttatccatcaaccacataaaaacaaacagtgccttctgccctctgcccagatgtgtccagcacgttctcaaagtttccacattagcactccctaaggacgctgggagcctgtcagtttatgatctgacctaggtcccccctttcttctgtcccctgtgtttaagtcgggatttttacagagggagctgtctccagacagctccatcaggaaccaagcaaaggccagatagcctgacagataggctagtggtattgtgtatatgggcgggacgtgtgtgtcattattatttgagttatgctgttgtttaggggtaaataacagtaaataattaataataataataataataataaaggagctgacgttcttagc

SEQ ID NO: 22980 - protein, 86 aa, Homo sapiens [sequence omitted]

SEQ ID NO: 22981 - DNA, 1927 bp, Homo sapiens
gttccctccgcggattctccggggctggttcatcacctccgaatattcctgtgacaggagacgcttgcaaaacccgcctccagcctccagcagcaaataaatagaaggcttgcagcccagaaggagccagaagaagtttctaggcgcgcgtgccctgggtttattaagctcctggctccgctctagacctcagcggttctggctgccagcctgggcagcctgggaagcctgggaggacggtggcttgccggtctgtcgtgaggcagtgcggacggggaccctctgggattctgctggatctgccccgggggttacctttgggggctgggaccccagtcgaggggacacaaccgtccctggcagtggttggttctgcttctccctgcagaaaagcagcattttcggaagctgaagaataagctagcccagccacaccaccttgttgtgtgaccttgggcaggtggttctgtctctctgagcctctgtttctctctgagctgagcagccaccatggctgacggtcagatgcccttctcctgccactacccaagccgcctgcgccgagaccccttccgggactctcccctctcctctcgcctgctggatgatggctttggcatggaccccttcccagacgacttgacagcctcttggcccgactgggctctgcctcgtctctcctccgcctggccaggcaccctaaggtcgggcatggtgccccggggccccactgccaccgccaggtttggggtgcctgccgagggcaggacccccccacccttccctggggagccctggaaagtgtgtgtgaatgtgcacagcttcaagccagaggagttgatggtgaagaccaaagatggatacgtggaggtgtctggcttcctgcagaggtggatcctgtgacagtatttgcctcactttccccagagggtctgctgatcatcgaagctccccaggtccctccttactcaacatttggagagagcagtttcaacaacgagcttccccaggacagccaggaagtcacctgtacctgagatgccagtactggcccatccttgttttgtccccaaccctagggcttctctgattccaggatacattactttagctgaactcagatttagtgcaagtaaaatgttagagggtgcgggggtgaggactgaccacagattccctggatagtgtagtggtagatttctccacaggatagcgcaattggcaaatcatgcttggttgtgttaggccaaaatactagttttgctttctttaccttttctatcttgatgaaaatgttgcacattctatagttgcaaaacacataaaaggggacttaacatttcacgttgtatcttacttgcagtgaatgcaagggttacttttctctggggacctcccccatcacccaggttcctactctgggctcccgattcccatggctcccaaaccatgccgcatggtttggttaatgaaacccagtagctaaccccactgtgcttccacatgcctggcctaaaatgggtgatatacaggtcttatatccccatatggaatttatccatcaaccacataaaaacaaacagtgccttctgccctctgcccagatgtgtccagcacgttctcaaagtttccacattagcactccctaaggacgctgggagcctgtcagtttatgatctgacctaggtcccccctttcttctgtcccctgtgtttaagtcgggatttttacagagggagctgtctccagacagctccatcaggaaccaagcaaaggccagatagcctgacagataggctagtggtattgtgtatatgggcgggacgtgtgtgtcattattatttgagttatgctgttgtttaggggtaaataacagtaaataattaataataataataataataataaaggagctgacgttcttagc

SEQ ID NO: 22982 - protein, 130 aa, Homo sapiens
MADGQMPFSCHYPSRLRRDPFRDSPLSSRLLDDGFGMDPFPDDLTASWPDWALPRLSSAWPGTLRSGMVPRGPTATARFGVPAEGRTPPPFPGEPWKVCVNVHSFKPEELMVKTKDGYVEVSGFLQRWIL

SEQ ID NO: 22983 - DNA, 1373 bp, Homo sapiens
tgtgacaggagacgcttgcaaaacccgcctccagcctccagcagcaaataaatagaaggcttgcagcccagaaggagccagaagaagtttctaggcgcgcgtgccctgggtttattaagctcctggctccgctctagacctcagcggttctggctgccagcctgggcagcctgggaagcctgggaggacggtggcttgccggtctgtcgtgaggcagtgcggacggggaccctctgggattctgctggatctgccccgggggttacctttgggggctgggaccccagtcgaggggacacaaccgtccctggcagtggttggttctgcttctccctgcagaaaagcagcattttcggaagctgaagaataagctagcccagccacaccaccttgttgtgtgaccttgggcaggtggttctgtctctctgagcctctgtttctctctgagctgagcagccaccatggctgacggtcagatgcccttctcctgccactacccaagccgcctgcgccgagaccccttccgggactctcccctctcctctcgcctgctggatgatggctttggcatggaccccttcccagacgacttgacagcctcttggcccgactgggctctgcctcgtctctcctccgcctggccaggcaccctaaggtcgggcatggtgccccggggccccactgccaccgccaggtttggggtgcctgccgagggcaggacccccccacccttccctggggagccctggaaagtgtgtgtgaatgtgcacagcttcaagccagaggagttgatggtgaagaccaaagatggatacgtggaggtgtctggcaaacatgaagagaaacagcaagaaggtggcattgtttctaagaacttcacaaagaaaatccaggaacataatacaactggatctaagcttaagcaaacacgtgatgagggaacaagtaaacaggcagacaaaatcgttactggagtaggaggctgtggacatctgaagaaataccacagaggaagcctatactgccatctttttctcattttttctgacaggatctatatcaattccttttttccattccttaattctattatttttaactacataagacattttgttacaggaaaaccagaaaacccgaaaacccagaagaaaatgaaaatcattcacattccctcctttcagagaaggctatgactattacattttcattgcttttttcccatcaactttcacatgcaccaacatatagagagtattgtttttaatattattttacagaaatggtatcaaacttggtgtatttcctcctctttattagtacatatcacgagtgtctttccttgctaataaatatggattgagttaatgttt

SEQ ID NO: 22984 - protein, 244 aa, Homo sapiens
MADGQMPFSCHYPSRLRRDPFRDSPLSSRLLDDGFGMDPFPDDLTASWPDWALPRLSSAWPGTLRSGMVPRGPTATARFGVPAEGRTPPPFPGEPWKVCVNVHSFKPEELMVKTKDGYVEVSGKHEEKQQEGGIVSKNFTKKIQEHNTTGSKLKQTRDEGTSKQADKIVTGVGGCGHLKKYHRGSLYCHLFLIFSDRIYINSFFPFLNSIIFNYIRHFVTGKPENPKTQKKMKIIHIPSFQRRL

SEQ ID NO: 22985 - DNA, 1339 bp, Homo sapiens
ttccatcaattatcttatttcaccttcatagccagccttggaagtggacttaggtgggtctgtatggcagacaaggtccttgaggcttagataactagagtctctagggtaggcctaagtcacacagcaaggcaggtccagggccaggatttgaacccaagcctcagtcctgaaggatgcccaaggaacatagatgctgacacgccacacttttcttccttccaggcaaacatgaagagaaacagcaagaaggtggcattgtttctaagaacttcacaaagaaaatccagcttcctgcagaggtggatcctgtgacagtatttgcctcactttccccagagggtctgctgatcatcgaagctccccaggtccctccttactcaacatttggagagagcagtttcaacaacgagcttccccaggacagccaggaagtcacctgtacctgagatgccagtactggcccatccttgttttgtccccaaccctagggcttctctgattccaggatacattactttagctgaactcagatttagtgcaagtaaaatgttagagggtgcgggggtgaggactgaccacagattccctggatagtgtagtggtagatttctccacaggatagcgcaattggcaaatcatgcttggttgtgttaggccaaaatactagttttgctttctttaccttttctatcttgatgaaaatgttgcacattctatagttgcaaaacacataaaaggggacttaacatttcacgttgtatcttacttgcagtgaatgcaagggttacttttctctggggacctcccccatcacccaggttcctactctgggctcccgattcccatggctcccaaaccatgccgcatggtttggttaatgaaacccagtagctaaccccactgtgcttccacatgcctggcctaaaatgggtgatatacaggtcttatatccccatatggaatttatccatcaaccacataaaaacaaacagtgccttctgccctctgcccagatgtgtccagcacgttctcaaagtttccacattagcactccctaaggacgctgggagcctgtcagtttatgatctgacctaggtcccccctttcttctgtcccctgtgtttaagtcgggatttttacagagggagctgtctccagacagctccatcaggaaccaagcaaaggccagatagcctgacagataggctagtggtattgtgtatatgggcgggacgtgtgtgtcattattatttgagttatgctgttgtttaggggtaaataacagtaaataattaataataataataataataataaaggagctgacgttcttagc

SEQ ID NO: 22986 - protein, 60 aa, Homo sapiens; identical to SEQ ID NO: 22972

SEQ ID NO: 22987 - DNA, 911 bp, Homo sapiens
cggagccgcgatgcctaaaggagggagaaagggaggccacaaaggctgggcgaggcagtataggagccctgaggagatcgacgtacagctgcaggctgagaagcagaaggccagggaagaagaggagcaaaaagaaggtggagatggggctgcaggtgaccccaaaaaggagaagaaatctctagactcagatgagagtgaggatgaagaagatgactaccagcaaaaccgcaaaggcgttgaagggctcttcaacatcgagaaccccaaccaggtggcacagacaaccaaaaaggtcacacaactgtatctggatgggccaaaggagctttcgaggagagaacgagaagagattgagaagcagaaggcaaaagagcgttacatgaaaatgcacttggccgggaagacagagcaagccaaggctgacctggcccgctggccatcatccggaaacagcgggaggaggctgcccggaagaaggaagaggaaaggaaagcaaaagatgatgccacattgtcaggaaaacgaatgcagtcgctctccctgtataagtaaccgcgacccatgggaggagatgccggggacctgggccgcgctgccaggacctctgctgtgtctcgcccaccctgtgccctggcgccgccgcaacagcccctcgtggccaggagccccccatggcctggggcctcctcttcggttatggcttgtccctggtcagtcctgtctgatcgaggcctcgcctctctgcccctccctgcccagttcctacccacctggctaaggccagtgcccatttttaaccctacccattgatcatttcaagaaacctctgtttactgtgtggcacccaggcaaaacatgttccacaagttcaacttgtatatttggcagattaaacttgacattatcgt

SEQ ID NO: 22988 - protein, 256 aa, Homo sapiens [sequence omitted]

SEQ ID NO: 22989 - DNA, 632 bp, Homo sapiens
caaagttcttccaacaatttaagccaggaattgccccactgtttccgaggtgatgagagcctctgagagatgagaaaactgaggcacatagggttaagtagattgtccaaggtcactgctgataactgcagcactgggatttgaagcactgaactctgctgactcctgagaagcatacctctaacagctgagatttccaaggctttttggccaatgtgtttgtcaacatctgcaacaaatttccagaactcaggccagagccctgggcaaagcctccttttttgtctcctctttttatctcccagtgcagtaggaagccatcagatgattttaaatggagaagtaagacacttggatctgtgcctaaaagaatcactctgctgttgagttcctgagaagcagactctgagatagagatcattttgtgggaagcttattgggaggtgctcttgggatccacacctgtagaagcctctttgctccccacacttcaggactggctctttaagatccaaaggagaagccaaccaaatgaaagcattcttggcaaccaggtattcctgaccagtccccggctctctgacaagctgtgtcacaatattgatccagtgattaaatttcatgctgaactg

SEQ ID NO: 22990 - protein, 57 aa, Homo sapiens
MCLSTSATNFQNSGQSPGQSLLFCLLFLSPSAVGSHQMILNGEVRHLDLCLKESLCC

SEQ ID NO: 22991 - DNA, 2316 bp, Homo sapiens
aggaaaacgacagtgtccggaagcctctgcaatgccctcttaggattgtccaagaagatggcgaaacatttgcaggcagcgataggagttgagggaatgtgcgggctgaaactaagtagagacggggtttcgccatgttggccagtctggtctggaactcctgacctcaagtgatccgccctcctcggcctcccaaagtgctgagattacagaagctggagcgcaatagtgcaatctcagctcactgcaacctccacctccgggtttcaagctattcttctcccttagcctcccaagtagctgggattacgggcgcctgccaccacacccaggtaatttttgtatttttagtagagacgggttttcaccatgttggtcaggctggtctcgaactcctgaccttcagatgatccacccgcctctgccttccaaagtactgggattaacaggcgtgagcctccacacccagcaactattgcattttattttactgtatgtatgtaataccttaaccacacacaaaaaattaccttgttcaaattttccagaattagaattctaccagttccccaaagtcttgctgtttctccatgccccttagcccttaccagctgctagagctgtcttttcatcctttgcaccctggcacactcctactcatccctcagaacccaaatgtcacctcttatctctaaaatgttccttgacatccttctgccaaatactagccccttcctctctgtttacaatgcagattcggtcctagtgaattactgttattttctactctgcctcactcatgaaggcacaagacttgatttacatacgctgtcctcttcaggccctgccacagggccacagaaggacctcacacatttcatgtcaattgaggtcactggactgacctgggaatgaggagcctgggttgttactccacttttgcacatagatgtgtgaccttgattattttccaccacgtcctggcctcggtttccttatctgttaaaagggaatgacaccacaggccttgcaaaattgaagggattatttctttgaagaccaacaggcgatagggggcagtagtgtcccaggatccagtttcccgcttcaggtttcaagaaacaggagcagctgcagtgatgaagttttcccgactatgacagtgtacagttgaccttgaacaacgtgggggtttggggcaccgacccctgcacagtccaaaatcctggggtcttttttttaatttgacatggagtctccctctgtcgccaaggctggagtgcagtggcgcgatctcagctcattgcaacctctgcctcccgggttgaagcaattctcctgcctcagccgcccaagtagctgagattacgggcgcccgccaccatgcccggctaatttttgtatttttagtagagacggggtttcaccaggttggccaagctggtcacgaactcctgacctcaggtgatccacccgcctcggcctcccaaagtgctgtgattacaggcatgagccactgcgcctggcctcatttttgactccccaaaaacaactttttttttttttttttttttgagatggagttttgctcttgtcgcccaggctggaatgcaatggcacgatctcggctcactgcaacctccacttcccagttcaagcagttctgcctcagcttcctgagtagctgggattacaagtgcccaccaccacgcctggctaatttttatatttttagtagagactgggtttcgccatgttggccaggctagtctcgactcctgacctcaggtgatctacccgctttggcctcccaaagtgctgggattacaggcgtgagccactgcgcccagcccaaaaacttaactattgacagcatactgttgaccagaagccttaccaatgacagttgattagcattttgtttgtttgtttttcgtttttgttttgagatggaatctcgctctgttgcccaggctgtagtgcagtgatgtgatctcggttcactgtaacctctgcctcctgggttcaagtgattctcctgcctcaacctcccaagtagctgggaccacaggcacccgccaccatgccaggctaatttttgtagttttagtacagatggggtttcaacatgttggccagggtggtctcgaactcctggcctcaagtgatccacccactctggccttccaaagtgctgggattacaggcatcagccactgtgcctggccaatgacagttgattagcatattttgtatgttatatatattacatgctgtatccttacaataaaccagagaaaagaaattgttattaag

SEQ ID NO: 22992 - protein, 38 aa, Homo sapiens
MAKHLQAAIGVEGMCGLKLSRDGVSPCWPVWSGTPDLK

SEQ ID NO: 22993 - DNA, 901 bp, Homo sapiens
gcggagcttaggcggcggtggctgagaaggcagcggggcggcggcggcggcggcggcggcggctgtggaggccgcagtccgggtcctggcttcggcctcagccccaccatggtgacgcttgctgaactgctggtgcttctggccgctctcctggccacggtctcgggctatttcgttagcatcgacgcccatgctgaagagtgcttctttgagcgggtcacctcgggcaccaagatgggcctcatcttcgaggtggcggagggcggcttcctggacatcgacgtggagattacaggaccagataacaaaggaatttacaaaggagacagagaatccagtgggaaatacacatttgctgctcacatggatggaacatacaaattttgttttagtaaccggatgtccaccatgactccaaaaatagtgatgttcaccattgatattggggaggctccaaaaggacaagatatggaaacagaagctcaccagaacaagctagaagaaatgatcaatgagctagcagtggcgatgacagctgtaaagcacgaacaggaatacatggaagtccgggagagaatacacagagccatcaacgacaacacaaacagcagagtggtcctttggtccttctttgaagctcttgttctagttgccatgacattgggacagatctactacctgaagagattttttgaagtccggagagttgtttaaaaagcctcttcctgatgatcccaactcagaattcactgtttaccaaacaccttggtcataataatgtcattagtttctccatttttattttctgaactgtacattcacaacttatgtttctttgagattaatagatattgggggaaaaacgcctttttaggaaaattatagtgaaaatttgacagtt

SEQ ID NO: 22994 - protein, 201 aa, Homo sapiens; identical to SEQ ID NO: 3043

SEQ ID NO: 22995 - DNA, 2128 bp, Homo sapiens
gcggagcttaggcggcggtggctgagaaggcagcggggcggcggcggcggcggcggcggcggctgtggaggccgcagtccgggtcctggcttcggcctcagccccaccatggtgacgcttgctgaactgctggtgcttctggccgctctcctggccacggtctcgggctatttcgttagcatcgacgcccatgctgaagagtgcttctttgagcgggtcacctcgggcaccaagatgggcctcatcttcgaggtggcggagggcggcttcctggacatcgacgtggagattacaggaccagataacaaaggaatttacaaaggagacagagaatccagtgggaaatacacatttgctgctcacatggatggaacatacaaattttgttttagtaaccggatgtccaccatgactccaaaaatagtgatgttcaccattgatattggggaggctccaaaaggacaagatatggaaacagaagctcaccagaacaagctagaagaaatgatcaatgagctagcagtggcgatgacagctgtaaagcacgaacaggaatacatggaagtccgggagagaatacacagagccatcaacgacaacacaaacagcagagtggtcctttggtccttctttgaagctcttgttctagttgccatgacattgggacagatctactacctgaagagattttttgaagtccggagagttgtttaaaaagcctcttcctgatgatcccaactcagaattcactgtttaccaaacaccttggtcataataatgtcattagtttctccatttttattttctgaactgtacattcacaacttatgtttctttgagattaatagatattgggggaaaaacgcctttttaggaaaattatagtgaaaatttgacagttgattggcataatttcttgtttgaatgctgcctccattatataggtccttccaggaactcaaacactgtaagtgaaatatgggagtatagtttttattatttcttcttttccttttgttttcataatataatgcagtttgttcaggaaatcagcacaaagcctgatagtactttactaaaatgactgcattctttggattccttcagtctatggttcaagtcactaaagattcatttttgttgagtccttatgagaaacagcagtatgaatcttgacggtttctgcccgtcctaatggcagagctctctgacttgggtgtatgctgccaggctgggtactttcatactttgttttcttgttttgctttaaaactacgactcagcatacattttcccacatacatttttacattgtaccttaggactcagtcatctccacttaaattgatgacacaagcagctaataaccatttctgggtttctgcctaaccccctaattgtctgttaaagccaattctctgggtgtcccagtgagtggtggctttttttctttccacattggcacattcacttctcccactcttggcatgtaagaaataagcatttacataattggaaaaatctggatttctgatgccaaagggttaaagcttcttggatttcatttcattgatatacagccactattttatttttgatcagtggcctttgggccactgttcagggtactgaccatcagtgtcagcattagggttttggtttttgtttcttttgggtctttcttttttggcacatgtgaatcttgttttgtgtaaaatgaaattactttctcttgttctctgatgatgggtttaaaattaaaagagcatccggttttggtatggggatgatccaggattatgttgtgactgatacatattagttacttgtgcttttttttttttttttggatctttgcaagggcaaaactacaagtaacgagttttatataattaatttaaatttgttacaggttttcatgttcaggataaaccatacttccaccttgggtgagaacacttgcaacagtttattaatgaggtgactttcaccttaggacaactgttgcatgccaagttttttgtgtgtgtgaaacacttcaaaactgatttaaaagatgtaaatttaaaattggttgtatctaatatgccccaggttcggtaaataaacaattctttttaaaaacagt

SEQ ID NO: 22996 - protein, 201 aa, Homo sapiens; identical to SEQ ID NO: 3043

SEQ ID NO: 22997 - DNA, 2567 bp, Homo sapiens
gcggagcttaggcggcggtggctgagaaggcagcggggcggcggcggcggcggcggcggcggctgtggaggccgcagtccgggtcctggcttcggcctcagccccaccatggtgacgcttgctgaactgctggtgcttctggccgctctcctggccacggtctcgggctatttcgttagcatcgacgcccatgctgaagagtgcttctttgagcgggtcacctcgggcaccaagatgggcctcatcttcgaggtggcggagggcggcttcctggacatcgacgtggagattacaggaccagataacaaaggaatttacaaaggagacagagaatccagtgggaaatacacatttgctgctcacatggatggaacatacaaattttgttttagtaaccggatgtccaccatgactccaaaaatagtgatgttcaccattgatattggggaggctccaaaaggacaagatatggaaacagaagctcaccagaacaagctagaagaaatgatcaatgagctagcagtggcgatgacagctgtaaagcacgaacaggaatacatggaagtccgggagagaatacacagagccatcaacgacaacacaaacagcagagtggtcctttggtccttctttgaagctcttgttctagttgccatgacattgggacagatctactacctgaagagattttttgaagtccggagagttgtttaaaaagcctcttcctgatgatcccaactcagaattcactgtttaccaaacaccttggtcataataatgtcattagtttctccatttttattttctgaactgtacattcacaacttatgtttctttgagattaatagatattgggggaaaaacgcctttttaggaaaattatagtgaaaatttgacagttgattggcataatttcttgtttgaatgctgcctccattatataggtccttccaggaactcaaacactgtaagtgaaatatgggagtatagtttttattatttcttcttttccttttgttttcataatataatgcagtttgttcaggaaatcagcacaaagcctgatagtactttactaaaatgactgcattctttggattccttcagtctatggttcaagtcactaaagattcatttttgttgagtccttatgagaaacagcagtatgaatcttgacggtttctgcccgtcctaatggcagagctctctgacttgggtgtatgctgccaggctgggtactttcatactttgttttcttgttttgctttaaaactacgactcagcatacattttcccacatacatttttacattgtaccttaggactcagtcatctccacttaaattgatgacacaagcagctaataaccatttctgggtttctgcctaaccccctaattgtctgttaaagccaattctctgggtgtcccagtgagtggtggctttttttctttccacattggcacattcacttctcccactcttggcatgtaagaaataagcatttacataattggaaaaatctggatttctgatgccaaagggttaaagcttcttggatttcatttcattgatatacagccactattttatttttgatcagtggcctttgggccactgttcagggtactgaccatcagtgtcagcattagggttttggtttttgtttcttttgggtctttcttttttggcacatgtgaatcttgttttgtgtaaaatgaaattactttctcttgttctctgatgatgggtttaaaattaaaagagcatccggttttggtatggggatgatccaggattatgttgtgactgatacatattagttacttgtgcttttttttttttttttggatctttgcaagggcaaaactacaagtaacgagttttatataattaatttaaatttgttacaggttttcatgttcaggataaaccatacttccaccttgggtgagaacacttgcaacagtttattaatgaggtgactttcaccttaggacaactgttgcatgccaagttttttgtgtgtgtgaaacacttcaaaactgatttaaaagatgtaaatttaaaattggttgtatctaatatgccccaggttcggtaaataaacaattctttttaaaaacagtattctgtgttttatatattgacagctaatccacattttttacacaccaactttctgttcttatttgacatgagacatgttcatgttttctgagtatttatacctattacgtctgttactttttaattctataaacttgaggatagtgaatggtaccaagttttagtttctgcgtaggttttccagtgtggcttctctgatggatcagtgctaaaatcttaagtatttttctatttgggaaaaaagggttgaattattttcacttgcccacgtagtttatgaatgtgggaaatagcttcaaagacagattaaatgatttgcccaaggccacagaaaagagtgaaaggtggaaccggagactagatcaccacctgtagaaactgttcttcctctgtgaaactaacggcctgctggtaataaaagtagctaccatttcttga

SEQ ID NO: 22998 - protein, 201 aa, Homo sapiens; identical to SEQ ID NO: 3043

SEQ ID NO: 22999 - DNA, 2169 bp, Homo sapiens
ggagcttaggcggcggtggctgagaaggcagcggggcggcggcggcggcggcggcggcggctgtggaggccgcagtccgggtcctggcttcggcctcagccccaccatggtgacgcttgctgaactgctggtgcttctggccgctctcctggccacggtctcgggctatttcgttagcatcgacgcccatgctgaagagtgcttctttgagcgggtcacctcgggcaccaagatgggcctcatcttcgaggtggcggagggcggcttcctggacatcgacgtggagattacaggaccagataacaaaggaatttacaaaggagacagagaatccagtgggaaatacacatttgctgctcacatggatggaacatacaaattttgttttagtaaccggatgtccaccatgactccaaaaatagtgatgttcaccattgatattggggaggctccaaaaggacaagatatggaaacagaagctcaccagaacaagctagaagaaatgatcaatgagctagcagtggcgatgacagctgtaaagcacgaacaggaatacatggaagtccgggagagaatacacagagccagtaagtgaatgccgtcactttgcagcagtgtctgatggtgaagtcaacgacaacacaaacagcagagtggtcctttggtccttctttgaagctcttgttctagttgccatgacattgggacagatctactacctgaagagattttttgaagtccggagagttgtttaaaaagcctcttcctgatgatcccaactcagaattcactgtttaccaaacaccttggtcataataatgtcattagtttctccatttttattttctgaactgtacattcacaacttatgtttctttgagattaatagatattgggggaaaaacgcctttttaggaaaattatagtgaaaatttgacagttgattggcataatttcttgtttgaatgctgcctccattatataggtccttccaggaactcaaacactgtaagtgaaatatgggagtatagtttttattatttcttcttttccttttgttttcataatataatgcagtttgttcaggaaatcagcacaaagcctgatagtactttactaaaatgactgcattctttggattccttcagtctatggttcaagtcactaaagattcatttttgttgagtccttatgagaaacagcagtatgaatcttgacggtttctgcccgtcctaatggcagagctctctgacttgggtgtatgctgccaggctgggtactttcatactttgttttcttgttttgctttaaaactacgactcagcatacattttcccacatacatttttacattgtaccttaggactcagtcatctccacttaaattgatgacacaagcagctaataaccatttctgggtttctgcctaaccccctaattgtctgttaaagccaattctctgggtgtcccagtgagtggtggctttttttctttccacattggcacattcacttctcccactcttggcatgtaagaaataagcatttacataattggaaaaatctggatttctgatgccaaagggttaaagcttcttggatttcatttcattgatatacagccactattttatttttgatcagtggcctttgggccactgttcagggtactgaccatcagtgtcagcattagggttttggtttttgtttcttttgggtctttcttttttggcacatgtgaatcttgttttgtgtaaaatgaaattactttctcttgttctctgatgatgggtttaaaattaaaagagcatccggttttggtatggggatgatccaggattatgttgtgactgatacatattagttacttgtgcttttttttttttttttggatctttgcaagggcaaaactacaagtaacgagttttatataattaatttaaatttgttacaggttttcatgttcaggataaaccatacttccaccttgggtgagaacacttgcaacagtttattaatgaggtgactttcaccttaggacaactgttgcatgccaagttttttgtgtgtgtgaaacacttcaaaactgatttaaaagatgtaaatttaaaattggttgtatctaatatgccccaggttcggtaaataaacaattctttttaaaaacagt

SEQ ID NO: 23000 - protein, 162 aa, Homo sapiens
MVTLAELLVLLAALLATVSGYFVSIDAHAEECFFERVTSGTKMGLIFEVAEGGFLDIDVEITGPDNKGIYKGDRESSGKYTFAAHMDGTYKFCFSNRMSTMTPKIVMFTIDIGEAPKGQDMETEAHQNKLEEMINELAVAMTAVKHEQEYMEVRERIHRASK

SEQ ID NO: 23001 - DNA, 2608 bp, Homo sapiens
ggagcttaggcggcggtggctgagaaggcagcggggcggcggcggcggcggcggcggcggctgtggaggccgcagtccgggtcctggcttcggcctcagccccaccatggtgacgcttgctgaactgctggtgcttctggccgctctcctggccacggtctcgggctatttcgttagcatcgacgcccatgctgaagagtgcttctttgagcgggtcacctcgggcaccaagatgggcctcatcttcgaggtggcggagggcggcttcctggacatcgacgtggagattacaggaccagataacaaaggaatttacaaaggagacagagaatccagtgggaaatacacatttgctgctcacatggatggaacatacaaattttgttttagtaaccggatgtccaccatgactccaaaaatagtgatgttcaccattgatattggggaggctccaaaaggacaagatatggaaacagaagctcaccagaacaagctagaagaaatgatcaatgagctagcagtggcgatgacagctgtaaagcacgaacaggaatacatggaagtccgggagagaatacacagagccagtaagtgaatgccgtcactttgcagcagtgtctgatggtgaagtcaacgacaacacaaacagcagagtggtcctttggtccttctttgaagctcttgttctagttgccatgacattgggacagatctactacctgaagagattttttgaagtccggagagttgtttaaaaagcctcttcctgatgatcccaactcagaattcactgtttaccaaacaccttggtcataataatgtcattagtttctccatttttattttctgaactgtacattcacaacttatgtttctttgagattaatagatattgggggaaaaacgcctttttaggaaaattatagtgaaaatttgacagttgattggcataatttcttgtttgaatgctgcctccattatataggtccttccaggaactcaaacactgtaagtgaaatatgggagtatagtttttattatttcttcttttccttttgttttcataatataatgcagtttgttcaggaaatcagcacaaagcctgatagtactttactaaaatgactgcattctttggattccttcagtctatggttcaagtcactaaagattcatttttgttgagtccttatgagaaacagcagtatgaatcttgacggtttctgcccgtcctaatggcagagctctctgacttgggtgtatgctgccaggctgggtactttcatactttgttttcttgttttgctttaaaactacgactcagcatacattttcccacatacatttttacattgtaccttaggactcagtcatctccacttaaattgatgacacaagcagctaataaccatttctgggtttctgcctaaccccctaattgtctgttaaagccaattctctgggtgtcccagtgagtggtggctttttttctttccacattggcacattcacttctcccactcttggcatgtaagaaataagcatttacataattggaaaaatctggatttctgatgccaaagggttaaagcttcttggatttcatttcattgatatacagccactattttatttttgatcagtggcctttgggccactgttcagggtactgaccatcagtgtcagcattagggttttggtttttgtttcttttgggtctttcttttttggcacatgtgaatcttgttttgtgtaaaatgaaattactttctcttgttctctgatgatgggtttaaaattaaaagagcatccggttttggtatggggatgatccaggattatgttgtgactgatacatattagttacttgtgcttttttttttttttttggatctttgcaagggcaaaactacaagtaacgagttttatataattaatttaaatttgttacaggttttcatgttcaggataaaccatacttccaccttgggtgagaacacttgcaacagtttattaatgaggtgactttcaccttaggacaactgttgcatgccaagttttttgtgtgtgtgaaacacttcaaaactgatttaaaagatgtaaatttaaaattggttgtatctaatatgccccaggttcggtaaataaacaattctttttaaaaacagtattctgtgttttatatattgacagctaatccacattttttacacaccaactttctgttcttatttgacatgagacatgttcatgttttctgagtatttatacctattacgtctgttactttttaattctataaacttgaggatagtgaatggtaccaagttttagtttctgcgtaggttttccagtgtggcttctctgatggatcagtgctaaaatcttaagtatttttctatttgggaaaaaagggttgaattattttcacttgcccacgtagtttatgaatgtgggaaatagcttcaaagacagattaaatgatttgcccaaggccacagaaaagagtgaaaggtggaaccggagactagatcaccacctgtagaaactgttcttcctctgtgaaactaacggcctgctggtaataaaagtagctaccatttcttga

SEQ ID NO: 23002 - protein, 162 aa, Homo sapiens; identical to SEQ ID NO: 23000

SEQ ID NO: 23003 - DNA, 1936 bp, Homo sapiens
ttaggcggcggtggctgagaaggcagcggggcggcggcggcggcggcggcggcggctgtggaggccgcagtccgggtcctggcttcggcctcagccccaccatggtgacgcttgctgaactgctggtgcttctggccgctctcctggccacggtctcgggctatttcgttagcatcgacgcccatgctgaagagtgcttctttgagcgggtcacctcgggcaccaagatgggcctcatcttcgaggtggcggagggcggcttcctggacatcgacgtggagattacaggaccagataacaaagctagaagaaatgatcaatgagctagcagtggcgatgacagctgtaaagcacgaacaggaatacatggaagtccgggagagaatacacagagccatcaacgacaacacaaacagcagagtggtcctttggtccttctttgaagctcttgttctagttgccatgacattgggacagatctactacctgaagagattttttgaagtccggagagttgtttaaaaagcctcttcctgatgatcccaactcagaattcactgtttaccaaacaccttggtcataataatgtcattagtttctccatttttattttctgaactgtacattcacaacttatgtttctttgagattaatagatattgggggaaaaacgcctttttaggaaaattatagtgaaaatttgacagttgattggcataatttcttgtttgaatgctgcctccattatataggtccttccaggaactcaaacactgtaagtgaaatatgggagtatagtttttattatttcttcttttccttttgttttcataatataatgcagtttgttcaggaaatcagcacaaagcctgatagtactttactaaaatgactgcattctttggattccttcagtctatggttcaagtcactaaagattcatttttgttgagtccttatgagaaacagcagtatgaatcttgacggtttctgcccgtcctaatggcagagctctctgacttgggtgtatgctgccaggctgggtactttcatactttgttttcttgttttgctttaaaactacgactcagcatacattttcccacatacatttttacattgtaccttaggactcagtcatctccacttaaattgatgacacaagcagctaataaccatttctgggtttctgcctaaccccctaattgtctgttaaagccaattctctgggtgtcccagtgagtggtggctttttttctttccacattggcacattcacttctcccactcttggcatgtaagaaataagcatttacataattggaaaaatctggatttctgatgccaaagggttaaagcttcttggatttcatttcattgatatacagccactattttatttttgatcagtggcctttgggccactgttcagggtactgaccatcagtgtcagcattagggttttggtttttgtttcttttgggtctttcttttttggcacatgtgaatcttgttttgtgtaaaatgaaattactttctcttgttctctgatgatgggtttaaaattaaaagagcatccggttttggtatggggatgatccaggattatgttgtgactgatacatattagttacttgtgcttttttttttttttttggatctttgcaagggcaaaactacaagtaacgagttttatataattaatttaaatttgttacaggttttcatgttcaggataaaccatacttccaccttgggtgagaacacttgcaacagtttattaatgaggtgactttcaccttaggacaactgttgcatgccaagttttttgtgtgtgtgaaacacttcaaaactgatttaaaagatgtaaatttaaaattggttgtatctaatatgccccaggttcggtaaataaacaattctttttaaaaacagt

SEQ ID NO: 23004 - protein, 112 aa, Homo sapiens
MLKSASLSGSPRAPRWASSSRWRRAASWTSTWRLQDQITKLEEMINELAVAMTAVKHEQEYMEVRERIHRAINDNTNSRVVLWSFFEALVLVAMTLGQIYYLKRFFEVRRVV

SEQ ID NO: 23005 - DNA, 2375 bp, Homo sapiens
ttaggcggcggtggctgagaaggcagcggggcggcggcggcggcggcggcggcggctgtggaggccgcagtccgggtcctggcttcggcctcagccccaccatggtgacgcttgctgaactgctggtgcttctggccgctctcctggccacggtctcgggctatttcgttagcatcgacgcccatgctgaagagtgcttctttgagcgggtcacctcgggcaccaagatgggcctcatcttcgaggtggcggagggcggcttcctggacatcgacgtggagattacaggaccagataacaaagctagaagaaatgatcaatgagctagcagtggcgatgacagctgtaaagcacgaacaggaatacatggaagtccgggagagaatacacagagccatcaacgacaacacaaacagcagagtggtcctttggtccttctttgaagctcttgttctagttgccatgacattgggacagatctactacctgaagagattttttgaagtccggagagttgtttaaaaagcctcttcctgatgatcccaactcagaattcactgtttaccaaacaccttggtcataataatgtcattagtttctccatttttattttctgaactgtacattcacaacttatgtttctttgagattaatagatattgggggaaaaacgcctttttaggaaaattatagtgaaaatttgacagttgattggcataatttcttgtttgaatgctgcctccattatataggtccttccaggaactcaaacactgtaagtgaaatatgggagtatagtttttattatttcttcttttccttttgttttcataatataatgcagtttgttcaggaaatcagcacaaagcctgatagtactttactaaaatgactgcattctttggattccttcagtctatggttcaagtcactaaagattcatttttgttgagtccttatgagaaacagcagtatgaatcttgacggtttctgcccgtcctaatggcagagctctctgacttgggtgtatgctgccaggctgggtactttcatactttgttttcttgttttgctttaaaactacgactcagcatacattttcccacatacatttttacattgtaccttaggactcagtcatctccacttaaattgatgacacaagcagctaataaccatttctgggtttctgcctaaccccctaattgtctgttaaagccaattctctgggtgtcccagtgagtggtggctttttttctttccacattggcacattcacttctcccactcttggcatgtaagaaataagcatttacataattggaaaaatctggatttctgatgccaaagggttaaagcttcttggatttcatttcattgatatacagccactattttatttttgatcagtggcctttgggccactgttcagggtactgaccatcagtgtcagcattagggttttggtttttgtttcttttgggtctttcttttttggcacatgtgaatcttgttttgtgtaaaatgaaattactttctcttgttctctgatgatgggtttaaaattaaaagagcatccggttttggtatggggatgatccaggattatgttgtgactgatacatattagttacttgtgcttttttttttttttttggatctttgcaagggcaaaactacaagtaacgagttttatataattaatttaaatttgttacaggttttcatgttcaggataaaccatacttccaccttgggtgagaacacttgcaacagtttattaatgaggtgactttcaccttaggacaactgttgcatgccaagttttttgtgtgtgtgaaacacttcaaaactgatttaaaagatgtaaatttaaaattggttgtatctaatatgccccaggttcggtaaataaacaattctttttaaaaacagtattctgtgttttatatattgacagctaatccacattttttacacaccaactttctgttcttatttgacatgagacatgttcatgttttctgagtatttatacctattacgtctgttactttttaattctataaacttgaggatagtgaatggtaccaagttttagtttctgcgtaggttttccagtgtggcttctctgatggatcagtgctaaaatcttaagtatttttctatttgggaaaaaagggttgaattattttcacttgcccacgtagtttatgaatgtgggaaatagcttcaaagacagattaaatgatttgcccaaggccacagaaaagagtgaaaggtggaaccggagactagatcaccacctgtagaaactgttcttcctctgtgaaactaacggcctgctggtaataaaagtagctaccatttcttga

SEQ ID NO: 23006 - protein, 112 aa, Homo sapiens; identical to SEQ ID NO: 23004

SEQ ID NO: 23007 - DNA, 1010 bp, Homo sapiens
tcaacgacaacacaaacagcagagtggtcctttggtccttctttgaagctcttgttctagttgccatgacattgggacagatctactacctgaagagattttttgaagtccggagagttgtttaaaaagcctcttcctgatgatcccaactcagaattcactgtttaccaaacaccttggtcataataatgtcattagtttctccatttttattttctgaactgtacattcacaacttatgtttctttgagattaatagatattgggggaaaaacgcctttttaggaaaattatagtgaaaatttgacagttgattggcataatttcttgtttgaatgctgcctccattatataggttttcatgttcaggataaaccatacttccaccttgggtgagaacacttgcaacagtttattaatgaggtgactttcaccttaggacaactgttgcatgccaagttttttgtgtgtgtgaaacacttcaaaactgatttaaaagatgtaaatttaaaattggttgtatctaatatgccccaggttcggtaaataaacaattctttttaaaaacagtattctgtgttttatatattgacagctaatccacattttttacacaccaactttctgttcttatttgacatgagacatgttcatgttttctgagtatttatacctattacgtctgttactttttaattctataaacttgaggatagtgaatggtaccaagttttagtttctgcgtaggttttccagtgtggcttctctgatggatcagtgctaaaatcttaagtatttttctatttgggaaaaaagggttgaattattttcacttgcccacgtagtttatgaatgtgggaaatagcttcaaagacagattaaatgatttgcccaaggccacagaaaagagtgaaaggtggaaccggagactagatcaccacctgtagaaactgttcttcctctgtgaaactaacggcctgctggtaataaaagtagctaccatttcttga

SEQ ID NO: 23008 - protein, 35 aa, Homo sapiens
MSLVSPFLFSELYIHNLCFFEINRYWGKNAFLGKL

SEQ ID NO: 23009 - DNA, 801 bp, Homo sapiens
gccttgtgcacccccaacgagcacttccgcttcccgcagctccagcggccggccgggaacttcgctggagcagcagagttccggagcgcggcgaaggctcccacgccgcgggagggaggaaaggcgtccgcgggacggtggaggcaggcggcggggcaggcctggggagttacacccgctccgcacagcgccctgggctccgggcgcctctccgcaccgggcaggagttttggcgggagggattctggcccggccctcccactttctctgcccctcggaggcaggtggcagcacaggaccgcgtccaggccgaaggacagcggggctggctaccgtgggcagagaaacgtgtcggggacccgggttagcagccctgcaaaacaggcacccgctgatggccggtacgtcctgaatgttgcggtccgatggccggtacgtcctgaatgttggtttactttcccggaagttagggtcagagtcctaactaagaacactgtcccattcctctgttcactgtttgcctgggccattcatgtccacatacaacttcactcagaaagctgtttttgttgttgttgttgttgttgttgttgtttgagacggagtctcgctctgttgcccaggctggaggctgggcgctataacggttcactgcaagctccgcctcccgggttcacgcccttctcctgcctcagcctcccgactactcaggagcctgaggcagaagaatcgcttgaaccagggaggtggaggttgcgccactgcactccagcgtgggtgacaaagcgagactcagtctca

SEQ ID NO: 23010 - protein, 266 aa, Homo sapiens
ALCTPNEHFRFPQLQRPAGNFAGAAEFRSAAKAPTPREGGKASAGRWRQAAGQAWGVTPAPHSALGSGRLSAPGRSFGGRDSGPALPLSLPLGGRWQHRTASRPKDSGAGYRGQRNVSGTRVSSPAKQAPADGRYVLNVAVRWPVRPECWFTFPEVRVRVLTKNTVPFLCSLFAWAIHVHIQLHSESCFCCCCCCCCCLRRSLALLPRLEAGRYNGSLQAPPPGFTPFSCLSLPTTQEPEAEESLEPGRWRLRHCTPAWVTKRDSV

SEQ ID NO: 23011 - DNA, 2151 bp, Homo sapiens
cgagcagcggcgaccgacgcggcgaaggagcgcgccatggagcatgtgacagagggctcctgggagtcgctgcctgtgccgctgcacccgcaggtgctgggcgcgctgcgggagctgggcttcccgtacatgacgccggtgcagtccgcaaccatccctctgttcatgcgaaacaaagatgtcgctgcagaagcggtcacaggtagtggcaaaacactcgcttttgtcatccccatcctggaaattcttctgagaagagaagagaagttaaaaaagagtcaggttggagccataatcatcacccccactcgagagctggccattcaaatagacgaggtcctgtcgcatttcacgaagcacttccccgagttcagccagattctttggatcggaggcaggaatcctggagaagatgttgagaggtttaagcaacaaggtgggaacatcattgtggccactccaggccgcttggaggacatgttccggaggaaggccgaaggcttggatctggccagctgtgtgcgatccctggatgtcctggtgttggatgaggcagacagacttctggacatggggtttgaggcaagcatcaacaccattctggagtttttgccaaagcagaggagaacaggccttttctctgccactcagacgcaggaagtggagaacctggtgagagcgggcctccggaaccctgtccgggtctcagtgaaggagaagggcgtggcagccagcagtgcccagaagaccccctcccgcctggaaaactactacatggtatgcaaggcagatgagaaatttaatcagctggtccattttcttcgcaatcataagcaggagaaacacctggtcttcttcagcacctgtgcctgtgtggaatactatgggaaggctctggaagtgctggtgaagggcgtgaagattatgtgcattcacggaaagatgaaatataaacgcaataagatcttcatggagttccgcaaattgcaaagtgggattttagtgtgcactgatgtgatggcccggggaattgatattcctgaagtcaactgggttttgcagtatgaccctcccagcaatgcaagtgccttcgtgcatcgctgcggtcgcacagctcgcattggccacgggggcagcgctctggtgttcctcctgcccatggaagagtcatacatcaatttccttgcaattaaccaaaaatgccccctgcaggagatgaagccccagagaaacacagcggaccttctgccaaaactcaagtccatggccctggctgacagagctgtgtttgaaaagggcatgaaagcttttgtgtcatatgtccaagcttatgcaaagcatgaatgcaacctgattttcagattaaaggatcttgattttgccagccttgctcgaggttttgccctgctgaggatgcccaagatgccagaattgagaggaaagcagtttccagattttgtgcccgtggacgttaataccgacacgattccatttaaagataaaatcagagaaaagcagaggcagaaactcctggagcaacaaagaagagagaaaacagaaaatgaagggagaagaaaattcataaaaaataaagcttggtcaaagcagaaggccaaaaaagaaaagaagaaaaaaatgaatgagaaaaggaaaagggaagagggttctgatattgaagatgaggacatggaagaacttcttaatgacacaagactcttgaaaaaacttaagaaaggcaaaataactgaagaagaatttgagaagggcttgttgacaactggcaaaagaacaatcaagacagtggatttagggatctcagatttggaagatgactgctgattccagtgccacagatgaacccacaaggacatagctgttccctaacttggtggatggctccagtttgcttttaacgaaaatcacaacttcaggagacatctgaaaagaatgatgtctctgaaagctgtcctttcagatgagggagaaatgaaggatttcacacttcagaatattttactaaaaacattccagtcttggccgggtgcggtggctcctgcctataatcccagcactttgggaggctgaggcaggaggatcacttgagcccaggagttcaagaccagcctgggaacacagcgagaccctctcatt

SEQ ID NO: 23012 - protein, 600 aa, Homo sapiens; identical to SEQ ID NO: 3045

SEQ ID NO: 23013 - DNA, 2642 bp, Homo sapiens
cgagcagcggcgaccgacgcggcgaaggagcgcgccatggagcatgtgacagagggctcctgggagtcgctgcctgtgccgctgcacccgcaggtgctgggcgcgctgcgggagctgggcttcccgtacatgacgccggtgcagtccgcaaccatccctctgttcatgcgaaacaaagatgtcgctgcagaagcggtcacaggtagtggcaaaacactcgcttttgtcatccccatcctggaaattcttctgagaagagaagagaagttaaaaaagagtcaggttggagccataatcatcacccccactcgagagctggccattcaaatagacgaggtcctgtcgcatttcacgaagcacttccccgagttcagccagattctttggatcggaggcaggaatcctggagaagatgttgagaggtttaagcaacaaggtgggaacatcattgtggccactccaggccgcttggaggacatgttccggaggaaggccgaaggcttggatctggccagctgtgtgcgatccctggatgtcctggtgttggatgaggcagacagacttctggacatggggtttgaggcaagcatcaacaccattctggagtttttgccaaagcagaggagaacaggccttttctctgccactcagacgcaggaagtggagaacctggtgagagcgggcctccggaaccctgtccgggtctcagtgaaggagaagggcgtggcagccagcagtgcccagaagaccccctcccgcctggaaaactactacatggtatgcaaggcagatgagaaatttaatcagctggtccattttcttcgcaatcataagcaggagaaacacctggtcttcttcagcacctgtgcctgtgtggaatactatgggaaggctctggaagtgctggtgaagggcgtgaagattatgtgcattcacggaaagatgaaatataaacgcaataagatcttcatggagttccgcaaattgcaaagtgggattttagtgtgcactgatgtgatggcccggggaattgatattcctgaagtcaactgggttttgcagtatgaccctcccagcaatgcaagtgccttcgtgcatcgctgcggtcgcacagctcgcattggccacgggggcagcgctctggtgttcctcctgcccatggaagagtcatacatcaatttccttgcaattaaccaaaaatgccccctgcaggagatgaagccccagagaaacacagcggaccttctgccaaaactcaagtccatggccctggctgacagagctgtgtttgaaaagggcatgaaagcttttgtgtcatatgtccaagcttatgcaaagcatgaatgcaacctgattttcagattaaaggatcttgattttgccagccttgctcgaggttttgccctgctgaggatgcccaagatgccagaattgagaggaaagcagtttccagattttgtgcccgtggacgttaataccgacacgattccatttaaagataaaatcagagaaaagcagaggcagaaactcctggagcaacaaagaagagagaaaacagaaaatgaagggagaagaaaattcataaaaaataaagcttggtcaaagcagaaggccaaaaaagaaaagaagaaaaaaatgaatgagaaaaggaaaagggaagagggttctgatattgaagatgaggacatggaagaacttcttaatgacacaagactcttgaaaaaacttaagaaaggcaaaataactgaagaagaatttgagaagggcttgttgacaactggcaaaagaacaatcaagacagtggatttagggatctcagatttggaagatgactgctgattccagtgccacagatgaacccacaaggacatagctgttccctaacttggtggatggctccagtttgcttttaacgaaaatcacaacttcaggagacatctgaaaagaatgatgtctctgaaagctgtcctttcagatgagggagaaatgaaggatttcacacttcagaatattttactaaaaacattccagtcttggccgggtgcggtggctcctgcctataatcccagcactttgggaggctgaggcaggaggatcacttgagcccaggagttcaagaccagcctgggaacacagcgagaccctctcattaaaaacaacaaaacaaaacaattccagtcttggagtagtctaacagaagaaaatgtaaaattatttgagtgtaaataatagatgtcagtatttatcatgatgggtcacatatagacatatgtacatattatatatatatatatatatatatatatatatatatatatatatatataagctcttttttctgaggctattttatagttatttttaaacataaagatacagaagtcttcttgacttctgattttcaaaaccattcctcagtatcttcaggcatttgacctcctgaatgtgcttggccctgggcttcagttatcctttgatgtcctgcaggggtggctaatgtgctggggtttttctgtgttaatagtcacagtattgttttattggtgaatagctgaaaaacagagggattaagtcatattccgggaaagagaattatagtttttatgcctcctgttgaataaatggtgtcctgattgcctggg

SEQ ID NO: 23014 - protein, 600 aa, Homo sapiens; identical to SEQ ID NO: 3045

SEQ ID NO: 23015 - DNA, 2718 bp, Homo sapiens
cggcgaaggagcgcgccatggagcatgtgacagagggctcctgggagtcgctgcctgtgccgctgcacccgcaggtgctgggcgcgctgcgggagctgggcttcccgtacatgacgccggtgcagtccgcaaccatccctctgttcatgcgaaacaaagatgtcgctgcagaagcggtcacaggtagtggcaaaacactcgcttttgtcatccccatcctggaaattcttctgagaagagaagagaagttaaaaaagagtcaggttggagccataatcatcacccccactcgagagctggccattcaaatagacgaggtcctgtcgcatttcacgaagcacttccccgagttcaggtgaattggatgcagtgtccctgttagtcatgggctgttttgtcgaacttaatcaaaggctgttttcttgttgtagccagattctttggatcggaggcaggaatcctggagaagatgttgagaggtttaagcaacaagggtgagtttgctcgtgtctgcttgtttctttgcttgcttttggcattgaacctaagaatcgatgtgtgatctcagcctaactgtgggtccccctttcagcagcctcctccccctgcaaaaaggtgttttctccaggccagcttcccattgtgctttgctggctccttcccataaggccctgatgagaacttcacaaactcaggttcttacagaggtcaagagaacgacgtgaagataaatgagtggtcaggggctgggggatggtgaggaactggccagcagctgccttgaatactcagctccagctggtagttgcctgggaggactcggctcagtagtggcaggttttgaattttttaaaaagaagatggaattccagatttgtgtgtgtaatctcctgattttttaactgttggcgtgtaatccacatttgaaaaacatatcttgtaggtgagccagtctgagggagccacatctggccctgagtctgccagtttgtgatctttacataggattctctaattctgtcaacatttccattttacaagtgagttacctgggacctacaatggttgagtaacttgcgtaagtcagaggttggtaagctttttttttataaaggagcagatggtaaatgttttcggctttgtgaaccatatggtctccatcgcacttactcaactgctgttgtagtgtgaaggcagcgatagacaacatgtgaataaatgggcgtggttttctgccaataaaatacttggcaaggacaggcagcagcccaggtttggtccgggagctggagtttgccaaccttgcctaggtcatagcccagaacccagatcccgtctcaccacagccctcagtctttctaccctgcagcactcttctactctcatgctcttcgttctcttcactagggcttaaatgactttggggggatataaaacttggtattttggtaatcatcaaccacattcccaagatccagagagtttggtaaatgttaactttctttccaaagtgggaacatcattgtggccactccaggccgcttggaggacatgttccggaggaaggccgaaggcttggatctggccagctgtgtgcgatccctggatgtcctggtgttggatgaggcagacagacttctggacatggggtttgaggcaagcatcaacaccattctggagtttttgccaaagcagaggagaacaggccttttctctgccactcagacgcaggaagtggagaacctggtgagagcgggcctccggaaccctgtccgggtctcagtgaaggagaagggcgtggcagccagcagtgcccagaagaccccctcccgcctggaaaactactacatggtatgcaaggcagatgagaaatttaatcagctggtccattttcttcgcaatcataagcaggagaaacacctggtcttcttcagcacctgtgcctgtgtggaatactatgggaaggctctggaagtgctggtgaagggcgtgaagattatgtgcattcacggaaagatgaaatataaacgcaataagatcttcatggagttccgcaaattgcaaagtgggattttagtgtgcactgatgtgatggcccggggaattgatattcctgaagtcaactgggttttgcagtatgaccctcccagcaatgcaagtgccttcgtgcatcgctgcggtcgcacagctcgcattggccacgggggcagcgctctggtgttcctcctgcccatggaagagtcatacatcaatttccttgcaattaaccaaaaatgccccctgcaggagatgaagccccagagaaacacagcggaccttctgccaaaactcaagtccatggccctggctgacagagctgtgtttgaaaagggcatgaaagcttttgtgtcatatgtccaagcttatgcaaagcatgaatgcaacctgattttcagattaaaggatcttgattttgccagccttgctcgaggttttgccctgctgaggatgcccaagatgccagaattgagaggaaagcagtttccagattttgtgcccgtggacgttaataccgacacgattccatttaaagataaaatcagagaaaagcagaggcagaaactcctggagcaacaaagaagagagaaaacagaaaatgaagggagaagaaaattcataaaaaataaagcttggtcaaagcagaaggccaaaaaagaaaagaagaaaaaaatgaatgag

SEQ ID NO: 23016 - protein, 388 aa, Homo sapiens
MFRRKAEGLDLASCVRSLDVLVLDEADRLLDMGFEASINTILEFLPKQRRTGLFSATQTQEVENLVRAGLRNPVRVSVKEKGVAASSAQKTPSRLENYYMVCKADEKFNQLVHFLRNHKQEKHLVFFSTCACVEYYGKALEVLVKGVKIMCIHGKMKYKRNKIFMEFRKLQSGILVCTDVMARGIDIPEVNWVLQYDPPSNASAFVHRCGRTARIGHGGSALVFLLPMEESYINFLAINQKCPLQEMKPQRNTADLLPKLKSMALADRAVFEKGMKAFVSYVQAYAKHECNLIFRLKDLDFASLARGFALLRMPKMPELRGKQFPDFVPVDVNTDTIPFKDKIREKQRQKLLEQQRREKTENEGRRKFIKNKAWSKQKAKKEKKKKMN

SEQ ID NO: 23017 - DNA, 317 bp, Homo sapiens
ggaaattcttctgagaagagaagagaagttaaaaaagagtcaggtgaggacaacaaaagtgatttattttcacctagtcatcagagagttcacattggattaagaagctggctacaaatgtgtgagctaccgcgcccggccattttgcacatttttgtgctttatgttggtgattttggtttttgaaatggccccgtgatgtagtgcagtctagtgttcctgggtgcaagaaggttatgacgtgcagagaaaatccctgtgctagagaagcacaagctaaggcatgagttaatgtgctgttggccacgagttcaatg

SEQ ID NO: 23018 - protein, 33 aa, Homo sapiens
EILLRREEKLKKSQVRTTKVIYFHLVIREFTLD

SEQ ID NO: 23019 - DNA, 4504 bp, Homo sapiens
gaaacttgaaaaaaaaagacagttaatcctcattatttgtggattctgtatttgtgaatttgcctgctcgttaaaatttagaacaccccagtggatcctcggtgcttctgtggtcatgggcgtgggcagagctgcctttgttttcactgctcaggtgtaaacagtgtccttttcgtcatttatttagtgccatgttttttaccttttttttttttttcttttttccctgagacagggttttgctctgtcacccaggctggagtgcagtggtgtgatctcatctcactgcaacctccacctcccaggcttaagctgtcctcctgcctcagccttccaagtagctgggactacaggtgtggaccatcatgtctgggtcattttttgtattttttgacatgttacccaggctggtcttaaactcctgggctcaagtgatccttccgcctcggcctcccaaagtgctgggattacaggtgtgagctaccgcgcccggccattttgcacatttttgtgctttatgttggtgattttggtttttgaaatggccccgtgatgtagtgcagtctagtgttcctgggtgcaagaaggttatgacgtgcagagaaaatccctgtgctagagaagcacaagctaaggcatgagttaatgtgctgttggccacgagttcaatgagaatgaatcaatagtatatgttaaatagagtcttttaagcacaaacagacataaaataggtttatgtattgattggttgacaaaaatgtcatgcccaaagactggcaggaacctaaccctgtgtttcccctgtgagcagtggttcagcattgactaattcactgttcttcatgacttgaaagagcataactgcagtatatgatgacgagtaaccgtaattcaaagtagttgatatgtgctcagagatgctgctgagaaagtctgggaactactgtttctctggaactttcctttgtgtggtagagggcggagggcctatgagttcctctctgggagtcccttgtgctgctgactgtgtcccttccttccatgtgggtaggttggagccataatcatcacccccactcgagagctggccattcaaatagacgaggtcctgtcgcatttcacgaagcacttccccgagttcaggtgaattggatgcagtgtccctgttagtcatgggctgttttgtcgaacttaatcaaaggctgttttcttgttgtagccagattctttggatcggaggcaggaatcctggagaagatgttgagaggtttaagcaacaagggtgagtttgctcgtgtctgcttgtttctttgcttgcttttggcattgaacctaagaatcgatgtgtgatctcagcctaactgtgggtccccctttcagcagcctcctccccctgcaaaaaggtgttttctccaggccagcttcccattgtgctttgctggctccttcccataaggccctgatgagaacttcacaaactcaggttcttacagaggtcaagagaacgacgtgaagataaatgagtggtcaggggctgggggatggtgaggaactggccagcagctgccttgaatactcagctccagctggtagttgcctgggaggactcggctcagtagtggcaggttttgaattttttaaaaagaagatggaattccagatttgtgtgtgtaatctcctgattttttaactgttggcgtgtaatccacatttgaaaaacatatcttgtaggtgagccagtctgagggagccacatctggccctgagtctgccagtttgtgatctttacataggattctctaattctgtcaacatttccattttacaagtgagttacctgggacctacaatggttgagtaacttgcgtaagtcagaggttggtaagctttttttttataaaggagcagatggtaaatgttttcggctttgtgaaccatatggtctccatcgcacttactcaactgctgttgtagtgtgaaggcagcgatagacaacatgtgaataaatgggcgtggttttctgccaataaaatacttggcaaggacaggcagcagcccaggtttggtccgggagctggagtttgccaaccttgcctaggtcatagcccagaacccagatcccgtctcaccacagccctcagtctttctaccctgcagcactcttctactctcatgctcttcgttctcttcactagggcttaaatgactttggggggatataaaacttggtattttggtaatcatcaaccacattcccaagatccagagagtttggtaaatgttaactttctttccaaagtgggaacatcattgtggccactccaggccgcttggaggacatgttccggaggaaggccgaaggcttggatctggccagctgtgtgcgatccctggatgtcctggtgttggatgaggcagacagacttctggacatggggtttgaggcaagcatcaacaccattctggagtttttgccaaagcagaggagaacaggccttttctctgccactcagacgcaggaagtggagaacctggtgagagcgggcctccggaaccctgtccgggtctcagtgaaggagaagggcgtggcagccagcagtgcccagaagaccccctcccgcctggaaaactactacatggtatgcaaggcagatgagaaatttaatcagctggtccattttcttcgcaatcataagcaggagaaacacctggtcttcttcagcacctgtgcctgtgtggaatactatgggaaggctctggaagtgctggtgaagggcgtgaagattatgtgcattcacggaaagatgaaatataaacgcaataagatcttcatggagttccgcaaattgcaaagtgggattttagtgtgcactgatgtgatggcccggggaattgatattcctgaagtcaactgggttttgcagtatgaccctcccagcaatgcaagtgccttcgtgcatcgctgcggtcgcacagctcgcattggccacgggggcagcgctctggtgttcctcctgcccatggaagagtcatacatcaatttccttgcaattaaccaaaaatgccccctgcaggagatgaagccccagagaaacacagcggaccttctgccaaaactcaagtccatggccctggctgacagagctgtgtttgaaaagggcatgaaagcttttgtgtcatatgtccaagcttatgcaaagcatgaatgcaacctgattttcagattaaaggatcttgattttgccagccttgctcgaggttttgccctgctgaggatgcccaagatgccagaattgagaggaaagcagtttccagattttgtgcccgtggacgttaataccgacacgattccatttaaagataaaatcagagaaaagcagaggcagaaactcctggagcaacaaagaagagagaaaacagaaaatgaagggagaagaaaattcataaaaaataaagcttggtcaaagcagaaggccaaaaaagaaaagaagaaaaaaatgaatgagaaaaggaaaagggaagagggttctgatattgaagatgaggacatggaagaacttcttaatgacacaagactcttgaaaaaacttaagaaaggcaaaataactgaagaagaatttgagaagggcttgttgacaactggcaaaagaacaatcaagacagtggatttagggatctcagatttggaagatgactgctgattccagtgccacagatgaacccacaaggacatagctgttccctaacttggtggatggctccagtttgcttttaacgaaaatcacaacttcaggagacatctgaaaagaatgatgtctctgaaagctgtcctttcagatgagggagaaatgaaggatttcacacttcagaatattttactaaaaacattccagtcttggccgggtgcggtggctcctgcctataatcccagcactttgggaggctgaggcaggaggatcacttgagcccaggagttcaagaccagcctgggaacacagcgagaccctctcattaaaaacaacaaaacaaaacaattccagtcttggagtagtctaacagaagaaaatgtaaaattatttgagtgtaaataatagatgtcagtatttatcatgatgggtcacatatagacatatgtacatattatatatatatatatatatatatatatatatatatatatatatatataagctcttttttctgaggctattttatagttatttttaaacataaagatacagaagtcttcttgacttctgattttcaaaaccattcctcagtatcttcaggcatttgacctcctgaatgtgcttggccctgggcttcagttatcctttgatgtcctgcaggggtggctaatgtgctggggtttttctgtgttaatagtcacagtattgttttattggtgaatagctgaaaaacagagggattaagtcatattccgggaaagagaattatagtttttatgcctcctgttgaataaatggtgtcctgattgcctggg

SEQ ID NO: 23020 - protein, 453 aa, Homo sapiens
MFRRKAEGLDLASCVRSLDVLVLDEADRLLDMGFEASINTILEFLPKQRRTGLFSATQTQEVENLVRAGLRNPVRVSVKEKGVAASSAQKTPSRLENYYMVCKADEKFNQLVHFLRNHKQEKHLVFFSTCACVEYYGKALEVLVKGVKIMCIHGKMKYKRNKIFMEFRKLQSGILVCTDVMARGIDIPEVNWVLQYDPPSNASAFVHRCGRTARIGHGGSALVFLLPMEESYINFLAINQKCPLQEMKPQRNTADLLPKLKSMALADRAVFEKGMKAFVSYVQAYAKHECNLIFRLKDLDFASLARGFALLRMPKMPELRGKQFPDFVPVDVNTDTIPFKDKIREKQRQKLLEQQRREKTENEGRRKFIKNKAWSKQKAKKEKKKKMNEKRKREEGSDIEDEDMEELLNDTRLLKKLKKGKITEEEFEKGLLTTGKRTIKTVDLGISDLEDDC

SEQ ID NO: 23021 - DNA, 5542 bp, Homo sapiens
gaaacttgaaaaaaaaagacagttaatcctcattatttgtggattctgtatttgtgaatttgcctgctcgttaaaatttagaacaccccagtggatcctcggtgcttctgtggtcatgggcgtgggcagagctgcctttgttttcactgctcaggtgtaaacagtgtccttttcgtcatttatttagtgccatgttttttaccttttttttttttttcttttttccctgagacagggttttgctctgtcacccaggctggagtgcagtggtgtgatctcatctcactgcaacctccacctcccaggcttaagctgtcctcctgcctcagccttccaagtagctgggactacaggtgtggaccatcatgtctgggtcattttttgtattttttgacatgttacccaggctggtcttaaactcctgggctcaagtgatccttccgcctcggcctcccaaagtgctgggattacaggtgtgagctaccgcgcccggccattttgcacatttttgtgctttatgttggtgattttggtttttgaaatggccccgtgatgtagtgcagtctagtgttcctgggtgcaagaaggttatgacgtgcagagaaaatccctgtgctagagaagcacaagctaaggcatgagttaatgtgctgttggccacgagttcaatgagaatgaatcaatagtatatgttaaatagagtcttttaagcacaaacagacataaaataggtttatgtattgattggttgacaaaaatgtcatgcccaaagactggcaggaacctaaccctgtgtttcccctgtgagcagtggttcagcattgactaattcactgttcttcatgacttgaaagagcataactgcagtatatgatgacgagtaaccgtaattcaaagtagttgatatgtgctcagagatgctgctgagaaagtctgggaactactgtttctctggaactttcctttgtgtggtagagggcggagggcctatgagttcctctctgggagtcccttgtgctgctgactgtgtcccttccttccatgtgggtaggttggagccataatcatcacccccactcgagagctggccattcaaatagacgaggtcctgtcgcatttcacgaagcacttccccgagttcaggtgaattggatgcagtgtccctgttagtcatgggctgttttgtcgaacttaatcaaaggctgttttcttgttgtagccagattctttggatcggaggcaggaatcctggagaagatgttgagaggtttaagcaacaagggtgagtttgctcgtgtctgcttgtttctttgcttgcttttggcattgaacctaagaatcgatgtgtgatctcagcctaactgtgggtccccctttcagcagcctcctccccctgcaaaaaggtgttttctccaggccagcttcccattgtgctttgctggctccttcccataaggccctgatgagaacttcacaaactcaggttcttacagaggtcaagagaacgacgtgaagataaatgagtggtcaggggctgggggatggtgaggaactggccagcagctgccttgaatactcagctccagctggtagttgcctgggaggactcggctcagtagtggcaggttttgaattttttaaaaagaagatggaattccagatttgtgtgtgtaatctcctgattttttaactgttggcgtgtaatccacatttgaaaaacatatcttgtaggtgagccagtctgagggagccacatctggccctgagtctgccagtttgtgatctttacataggattctctaattctgtcaacatttccattttacaagtgagttacctgggacctacaatggttgagtaacttgcgtaagtcagaggttggtaagctttttttttataaaggagcagatggtaaatgttttcggctttgtgaaccatatggtctccatcgcacttactcaactgctgttgtagtgtgaaggcagcgatagacaacatgtgaataaatgggcgtggttttctgccaataaaatacttggcaaggacaggcagcagcccaggtttggtccgggagctggagtttgccaaccttgcctaggtcatagcccagaacccagatcccgtctcaccacagccctcagtctttctaccctgcagcactcttctactctcatgctcttcgttctcttcactagggcttaaatgactttggggggatataaaacttggtattttggtaatcatcaaccacattcccaagatccagagagtttggtaaatgttaactttctttccaaagtgggaacatcattgtggccactccaggccgcttggaggacatgttccggaggaaggccgaaggcttggatctggccagctgtgtgcgatccctggatgtcctggtgttggatgaggcagacagacttctggacatggggtttgaggcaagcatcaacaccattctggagtttttgccaaagcagaggagaacaggccttttctctgccactcagacgcaggaagtggagaacctggtgagagcgggcctccggaaccctgtccgggtctcagtgaaggagaagggcgtggcagccagcagtgcccagaagaccccctcccgcctggaaaactactacatggtatgcaaggcagatgagaaatttaatcagctggtccattttcttcgcaatcataagcaggagaaacacctggtcttcttcagcacctgtgcctgtgtggaatactatgggaaggctctggaagtgctggtgaagggcgtgaagattatgtgcattcacggaaagatgaaatataaacgcaataagatcttcatggagttccgcaaattgcaaagtgggattttagtgtgcactgatgtgatggcccggggaattgatattcctgaagtcaactgggttttgcagtatgaccctcccagcaatgcaagtgccttcgtgcatcgctgcggtcgcacagctcgcattggccacgggggcagcgctctggtgttcctcctgcccatggaagagtcatacatcaatttccttgcaattaaccaaaaatgccccctgcaggagatgaagccccagagaaacacagcggaccttctgccaaaactcaagtccatggccctggctgacagagctgtgtttgaaaagggcatgaaagcttttgtgtcatatgtccaagcttatgcaaagcatgaatgcaacctgattttcagattaaaggatcttgattttgccagccttgctcgaggttttgccctgctgaggatgcccaagatgccagaattgagaggaaagcagtttccagattttgtgcccgtggacgttaataccgacacgattccatttaaagataaaatcagagaaaagcagaggcagaaactcctggagcaacaaagaagagagaaaacagaaaatgaagggagaagaaaattcataaaaaataaagcttggtcaaagcagaaggccaaaaaagaaaagaagaaaaaaatgaatgagaaaaggaaaagggaagagggttctgatattgaagatgaggacatggaagaacttcttaatgacacaagactcttgaaaaaacttaagaaaggcaaaataactgaagaagaatttgagaagggcttgttgacaactggcaaaagaacaatcaagacagtggatttagggatctcagatttggaagatgactgctgattccagtgccacagatgaacccacaaggacatagctgttccctaacttggtggatggctccagtttgcttttaacgaaaatcacaacttcaggagacatctgaaaagaatgatgtctctgaaagctgtcctttcagatgagggagaaatgaaggatttcacacttcagaatattttactaaaaacattccagtcttggccgggtgcggtggctcctgcctataatcccagcactttgggaggctgaggcaggaggatcacttgagcccaggagttcaagaccagcctgggaacacagcgagaccctctcattaaaaacaacaaaacaaaacaattccagtcttggagtagtctaacagaagaaaatgtaaaattatttgagtgtaaataatagatgtcagtatttatcatgatgggtcacatatagacatatgtacatattatatatatatatatatatatatatatatatatatatatatatatataagctcttttttctgaggctattttatagttatttttaaacataaagatacagaagtcttcttgacttctgattttcaaaaccattcctcagtatcttcaggcatttgacctcctgaatgtgcttggccctgggcttcagttatcctttgatgtcctgcaggggtggctaatgtgctggggtttttctgtgttaatagtcacagtattgttttattggtgaatagctgaaaaacagagggattaagtcatattccgggaaagagaattatagtttttatgcctcctgttgaataaatggtgtcctgattgcctgggtcttaagtgtgtaaatgtagctggacagtgttttcccctagatggcctggtcagcttgcagtattgatgcaacaccacatcagcgtctttcatagagtttatttgaaaagatgctgaatttattcccaagtataattttaaaaagctgtttaggacccaaacatatttaaacatctcttacacatacagaatttcagtttacaaatattccagaaggcattttcttaagcagtgaaccatgcagaatactgttgctaaacatcgtttctgccttcctcgtgttctcttggtagtttttactgtttggcttgatcctgctgaggaatgtgcttaccactggaagccagatgcagattcagcaagtgtttcttgcctcttacaaggcaccgcgtgtaacgtcctgaccagctgttggtcatttgtggcagaggggtgtggctgcttttcgcctgcatctcgcgtgctttaggcagatcagtctggagtgcaggggaggatgaagacaggtggacttgggctcatctttcatcagttaagtagccaattatctaacttgtatttctggaaactgaaaaggaaagtttctagaaaccgtaagaacaatttaagttgggatttagaatagctgacacatttttagatgggactgaaatgagtaagaaaggttctccaagatgtatgattttaagtccttactccataaatcttcattaaacacatctcagttttggcctgactcactggggtgtcaagcagctactcaccctgcctcaactacgtaagctgcaccttggcaggaaagggctcacaggttacagatagagcttgatgagctcatcgctgactgctgagggtgtcagcacgcccaggtctgtaaacagcagagtgattaaggaaggggcagtgtagtcgacccacggatgctcctctttgaggtcttgtccagtctgcgcgaccttgagagtgtctgccttatactgaggagagaagtacacattagtcggcactgaatatttagtgctctgacctggtagggcc

SEQ ID NO: 23022 - protein, 453 aa, Homo sapiens; identical to SEQ ID NO: 23020

SEQ ID NO: 23023 - DNA, 1101 bp, Homo sapiens
tttcaacctctgaaccggttttcttgtctgtaaaatggcatagcagtatctgacagggtcatgaggattctaagataatcttagcacagtccctggcacgctgcaagctctctattgtgactctcgatcttcccttgagaggtctggagaagttaatccggcatgagaatgaggggacatgggatttaagtttgttacactacagctctcagccagcacactgccatgatctggctcatggccacaactctgccctcgtctctagtgtcctgcatagcttagtttctcccattttcagagagcagtctcaggaagtagcacactgatcactcacaccaaggccctaccaggtcagagcactaaatattcagtgccgactaatgtgtacttctctcctcagtataaggcagacactctcaaggtcgcgcagactggacaagacctcaaagaggagcatccgtgggtcgactacactgccccttccttaatcactctgctgtttacagacctgggcgtgctgacaccctcagcagtcagcgatgagctcatcaagctctatctgtaacctgtgagccctttcctgccaaggtgcagcttacgtagttgaggcaggtttccagaaatacaagttagataattggctacttaactgatgaaagatgagcccaagtccacctgtcttcatcctcccctgcactccagactgatctgcctaaagcacgcgagatgcaggcgaaaagcagccacacccctctgccacaaatgaccaacagctggtcaggacgttacacgcggtgccttgtaagaggcaagaaacacttgctgaatctgcatctggcttccagtggtaagcacattcctcagcaggatcaagccaaacagtaaaaactaccaagagaacacgaggaaggcagaaacgatgtttagcaacagtattctgcatggttcactgcttaagaaaatgccttctggaatatttgtaaactgaaattctgtatgtgtaagagatgtttaaatatgtttgggtcctaaacagctttttaaaattatacttgggaataaattcagcatcttttcaaataaactctatgaaagacgctg

SEQ ID NO: 23024 - protein, 52 aa, Homo sapiens
MQAKSSHTPLPQMTNSWSGRYTRCLVRGKKHLLNLHLASSGKHIPQQDQAKQ

SEQ ID NO: 23025 - DNA, 1012 bp, Homo sapiens
tttcaacctctgaaccggttttcttgtctgtaaaatggcatagcagtatctgacagggtcatgaggattctaagataatcttagcacagtccctggcacgctgcaagctctctattgtgactctcgatcttcccttgagaggtctggagaagttaatccggcatgagaatgaggggacatgggatttaagtttgttacactacagctctcagccagcacactgccatgatctggctcatggccacaactctgccctcgtctctagtgtcctgcatagcttagtttctcccattttcagagagcagtctcaggaagtagcacactgatcactcacaccaaggccctaccaggtcagagcactaaatattcagtgccgactaatgtgtacttctctcctcagtataaggcagacactctcaaggtcgcgcagactggacaagacctcaaagaggagcatccgtgggtcgactacactgccccttccttaatcactctgctgtttacagacctgggcgtgctgacaccctcagcagtcagcgatgagctcatcaagctctatctgtaacctgtgagccctttcctgccaaggtgcagcttacgtagttgaggcaggactgatctgcctaaagcacgcgagatgcaggcgaaaagcagccacacccctctgccacaaatgaccaacagctggtcaggacgttacacgcggtgccttgtaagaggcaagaaacacttgctgaatctgcatctggcttccagtggtaagcacattcctcagcaggatcaagccaaacagtaaaaactaccaagagaacacgaggaaggcagaaacgatgtttagcaacagtattctgcatggttcactgcttaagaaaatgccttctggaatatttgtaaactgaaattctgtatgtgtaagagatgtttaaatatgtttgggtcctaaacagctttttaaaattatacttgggaataaattcagcatcttttcaaataaactctatgaaagacgctg

SEQ ID NO: 23026 - protein, 52 aa, Homo sapiens; identical to SEQ ID NO: 23024

SEQ ID NO: 23027 - DNA, 1611 bp, Homo sapiens
aaaccccatctctagggcatggtggcatatgctgtggtcccagctacctgggaggctgaaatgggaggatcgcttgagcctaagaggtagaggtttgggctgagatcatgccactgcactctagcctgggcaacagagtgagatctggtctcaaaaaaaaaaagaaagatttttaaaactgcataacacttttgtccaacttcagatctcatcagattttaaaattttgtttggtttgtgctgaagtagaaaagaaagtagaggataccacacttggaaggaagactgctgtgtcaggacattcttgcttcacttacacacatatgtacgtgtgcatgcgccgggcggcagtgtgaagtgtatgtctcattgtagggtcatgaccagaaaacacccctggtaacaatgccaggggtctatcgcgtgttaagtgcgctttaaaaaaaacaggtagttatgggaggaacttaccttgatagaaatggaatattgatctttgcagatgatgatgctactcgttagagccaagaaaataaagcatgaaaagctttttttccccttagctacatcatggagaaagcagatcttgtcatagttggtgctgaaggagttgttgaaaacgcacagaacaaacctttctatgtggttgcagaaagtttcaagtttgtccggctctttccactaaaccagcaagacgtcccagataagtttaagtataaggcagacactctcaaggtcgcgcagactggacaagacctcaaagaggagcatccgtgggtcgactacactgccccttccttaatcactctgctgtttacagacctgggcgtgctgacaccctcagcagtcagcgatgagctcatcaagctctatctgtaacctgtgagccctttcctgccaaggtgcagcttacgtagttgaggcagggtgagtagctgcttgacaccccagtgagtcaggccaaaactgagatgtgtttaatgaagatttatggagtaaggacttaaaatcatacatcttggagaacctttcttactcatttcagtcccatctaaaaatgtgtcagctattctaaatcccaacttaaattgttcttacggtttctagaaactttccttttcagtttccagaaatacaagttagataattggctacttaactgatgaaagatgagcccaagtccacctgtcttcatcctcccctgcactccagactgatctgcctaaagcacgcgagatgcaggcgaaaagcagccacacccctctgccacaaatgaccaacagctggtcaggacgttacacgcggtgccttgtaagaggcaagaaacacttgctgaatctgcatctggcttccagtggtaagcacattcctcagcaggatcaagccaaacagtaaaaactaccaagagaacacgaggaaggcagaaacgatgtttagcaacagtattctgcatggttcactgcttaagaaaatgccttctggaatatttgtaaactgaaattctgtatgtgtaagagatgtttaaatatgtttgggtcctaaacagctttttaaaattatacttgggaataaattcagcatcttttcaaataaactctatgaaagacgctg

SEQ ID NO: 23028 - protein, 102 aa, Homo sapiens
MEKADLVIVGAEGVVENAQNKPFYVVAESFKFVRLFPLNQQDVPDKFKYKADTLKVAQTGQDLKEEHPWVDYTAPSLITLLFTDLGVLTPSAVSDELIKLYL

SEQ ID NO: 23029 - DNA, 1662 bp, Homo sapiens
aaaccccatctctagggcatggtggcatatgctgtggtcccagctacctgggaggctgaaatgggaggatcgcttgagcctaagaggtagaggtttgggctgagatcatgccactgcactctagcctgggcaacagagtgagatctggtctcaaaaaaaaaaagaaagatttttaaaactgcataacacttttgtccaacttcagatctcatcagattttaaaattttgtttggtttgtgctgaagtagaaaagaaagtagaggataccacacttggaaggaagactgctgtgtcaggacattcttgcttcacttacacacatatgtacgtgtgcatgcgccgggcggcagtgtgaagtgtatgtctcattgtagggtcatgaccagaaaacacccctggtaacaatgccaggggtctatcgcgtgttaagtgcgctttaaaaaaaacaggtagttatgggaggaacttaccttgatagaaatggaatattgatctttgcagatgatgatgctactcgttagagccaagaaaataaagcatgaaaagctttttttccccttagctacatcatggagaaagcagatcttgtcatagttggtgctgaaggagttgttgaaaacggaggaattattaacaagattggaaccaaccagatggctgtgtgtgccaaagcacagaacaaacctttctatgtggttgcagaaagtttcaagtttgtccggctctttccactaaaccagcaagacgtcccagataagtttaagtataaggcagacactctcaaggtcgcgcagactggacaagacctcaaagaggagcatccgtgggtcgactacactgccccttccttaatcactctgctgtttacagacctgggcgtgctgacaccctcagcagtcagcgatgagctcatcaagctctatctgtaacctgtgagccctttcctgccaaggtgcagcttacgtagttgaggcagggtgagtagctgcttgacaccccagtgagtcaggccaaaactgagatgtgtttaatgaagatttatggagtaaggacttaaaatcatacatcttggagaacctttcttactcatttcagtcccatctaaaaatgtgtcagctattctaaatcccaacttaaattgttcttacggtttctagaaactttccttttcagtttccagaaatacaagttagataattggctacttaactgatgaaagatgagcccaagtccacctgtcttcatcctcccctgcactccagactgatctgcctaaagcacgcgagatgcaggcgaaaagcagccacacccctctgccacaaatgaccaacagctggtcaggacgttacacgcggtgccttgtaagaggcaagaaacacttgctgaatctgcatctggcttccagtggtaagcacattcctcagcaggatcaagccaaacagtaaaaactaccaagagaacacgaggaaggcagaaacgatgtttagcaacagtattctgcatggttcactgcttaagaaaatgccttctggaatatttgtaaactgaaattctgtatgtgtaagagatgtttaaatatgtttgggtcctaaacagctttttaaaattatacttgggaataaattcagcatcttttcaaataaactctatgaaagacgctg

SEQ ID NO: 23030 - protein, 119 aa, Homo sapiens [sequence omitted]

SEQ ID NO: 23031 - DNA, 1599 bp, Homo sapiens
gtgcgccggaagtggggtgcggaggtgtgcagcgcgctgtcagactggctcgcaggcggcgcggccggcggacccgttcgagacagcgcgggcggctcgggtcccctggggctccgcagcaggaggacgccatggacgacaaggagttaattgaatactttaagtctcagatgaaagaagatcctgacatggcctcagcagtggctgccatccggacgttgctggagttcttgaagagagataaaggggagacaatccagggtctgagggcgaatctcaccagtgccatagaaaccctgtgtggtgtggactcctctgtggcagtgtcctctggcggggagctcttcctccgcttcatcagtcttgcctccctggaatactccgattactccaaatgtaaaaagatcatgattgagcggggagaactttttctcaggagaatatcactgtcaagaaacaaaattgcagatctgtgccatactttcatcaaagatggagcgctacatcatggagaaagcagatcttgtcatagttggtgctgaaggagttgttgaaaacggaggaattattaacaagattggaaccaaccagatggctgtgtgtgccaaagcacagaacaaacctttctatgtggttgcagaaagtttcaagtttgtccggctctttccactaaaccagcaagacgtcccagataagtttaagtataaggcagacactctcaaggtcgcgcagactggacaagacctcaaagaggagcatccgtgggtcgactacactgccccttccttaatcactctgctgtttacagacctgggcgtgctgacaccctcagcagtcagcgatgagctcatcaagctctatctgtaacctgtgagccctttcctgccaaggtgcagcttacgtagttgaggcagggtgagtagctgcttgacaccccagtgagtcaggccaaaactgagatgtgtttaatgaagatttatggagtaaggacttaaaatcatacatcttggagaacctttcttactcatttcagtcccatctaaaaatgtgtcagctattctaaatcccaacttaaattgttcttacggtttctagaaactttccttttcagtttccagaaatacaagttagataattggctacttaactgatgaaagatgagcccaagtccacctgtcttcatcctcccctgcactccagactgatctgcctaaagcacgcgagatgcaggcgaaaagcagccacacccctctgccacaaatgaccaacagctggtcaggacgttacacgcggtgccttgtaagaggcaagaaacacttgctgaatctgcatctggcttccagtggtaagcacattcctcagcaggatcaagccaaacagtaaaaactaccaagagaacacgaggaaggcagaaacgatgtttagcaacagtattctgcatggttcactgcttaagaaaatgccttctggaatatttgtaaactgaaattctgtatgtgtaagagatgtttaaatatgtttgggtcctaaacagctttttaaaattatacttgggaataaattcagcatcttttcaaataaactctatgaaagacgctg

SEQ ID NO: 23032 - protein, 136 aa, Homo sapiens
MDDKELIEYFKSQMKEDPDMASAVAAIRTLLEFLKRDKGETIQGLRANLTSAIETLCGVDSSVAVSSGGELFLRFISLASLEYSDYSKCKKIMIERGELFLRRISLSRNKIADLCHTFIKDGALHHGESRSCHSWC

SEQ ID NO: 23033 - DNA, 1837 bp, Homo sapiens
gccccctaatctgcggaagtggagtgcggggagtgcgccggaagaggggtacggaagtgcgccggaagtggggtgcggaggtgtgcagcgcgctgtcagactggctcgcaggcggcgcggccggcggacccgttcgagacagcgcgggcggctcgggtcccctggggctccgcagcaggaggacgccatggacgacaaggagttaattgaatactttaagtctcagatgaaagaagatcctgacatggcctcagcagtggctgccatccggacgttgctggagttcttgaagagagataaaggggagacaatccagggtctgagggcgaatctcaccagtgccatagaaaccctgtgtggtgtggactcctctgtggcagtgtcctctggcggggagctcttcctccgcttcatcagtcttgcctccctggaatactccgattactccaaatgtaaaaagatcatgattgagcggggagaactttttctcaggagaatatcactgtcaagaaacaaaattgcagatctgtgccatactttcatcaaagatggagcgacaatattgactcacgcctactccagagtggtcctgagagtcctggaagcagccgtggcggccaagaagcgatttagtgtatacgtcacagagtcacagcctgatttgtcagggcaaaaaatggccaaagccctctgccacctcaacgtccctgtcactgtggtgctagatgctgctgtcggctacatcatggagaaagcagatcttgtcatagttggtgctgaaggagttgttgaaaacggaggaattattaacaagattggaaccaaccagatggctgtgtgtgccaaagcacagaacaaacctttctatgtggttgcagaaagtttcaagtttgtccggctctttccactaaaccagcaagacgtcccagataagtttaagtataaggcagacactctcaaggtcgcgcagactggacaagacctcaaagaggagcatccgtgggtcgactacactgccccttccttaatcactctgctgtttacagacctgggcgtgctgacaccctcagcagtcagcgatgagctcatcaagctctatctgtaacctgtgagccctttcctgccaaggtgcagcttacgtagttgaggcagggtgagtagctgcttgacaccccagtgagtcaggccaaaactgagatgtgtttaatgaagatttatggagtaaggacttaaaatcatacatcttggagaacctttcttactcatttcagtcccatctaaaaatgtgtcagctattctaaatcccaacttaaattgttcttacggtttctagaaactttccttttcagtttccagaaatacaagttagataattggctacttaactgatgaaagatgagcccaagtccacctgtcttcatcctcccctgcactccagactgatctgcctaaagcacgcgagatgcaggcgaaaagcagccacacccctctgccacaaatgaccaacagctggtcaggacgttacacgcggtgccttgtaagaggcaagaaacacttgctgaatctgcatctggcttccagtggtaagcacattcctcagcaggatcaagccaaacagtaaaaactaccaagagaacacgaggaaggcagaaacgatgtttagcaacagtattctgcatggttcactgcttaagaaaatgccttctggaatatttgtaaactgaaattctgtatgtgtaagagatgtttaaatatgtttgggtcctaaacagctttttaaaattatacttgggaataaattcagcatcttttcaaataaactctatgaaagacgctg

SEQ ID NO: 23034 - protein, 305 aa, Homo sapiens
MDDKELIEYFKSQMKEDPDMASAVAAIRTLLEFLKRDKGETIQGLRANLTSAIETLCGVDSSVAVSSGGELFLRFISLASLEYSDYSKCKKIMIERGELFLRRISLSRNKIADLCHTFIKDGATILTHAYSRVVLRVLEAAVAAKKRFSVYVTESQPDLSGQKMAKALCHLNVPVTVVLDAAVGYIMEKADLVIVGAEGVVENGGIINKIGTNQMAVCAKAQNKPFYVVAESFKFVRLFPLNQQDVPDKFKYKADTLKVAQTGQDLKEEHPWVDYTAPSLITLLFTDLGVLTPSAVSDELIKLYL

SEQ ID NO: 23035 - DNA, 358 bp, Homo sapiens
cacagtggtgcatgcctgtattccagcattttgggaggccgaggtgggtggatcacctgaacccatgagtttgggaccagcctaggcaacacggtgagacctcgtctcaattacaataaaggaacaattaaaaaacagcaatagaaagttatgtatataatatagatatacatatatctaatacatatattagatatatctaattctgactttggaatcaaaaaaataaatgtttctcaaaggatatagaaacagccactagaggctggatgtggtggctcacgcctacaaaccccaattccaattcaagccaattttgtataaatataaattacactttttttttttttttttttac

SEQ ID NO: 23036 - protein, 31 aa, Homo sapiens
RLDVVAHAYKPQFQFKPILYKYKLHFFFFFF

SEQ ID NO: 23037 - DNA, 1021 bp, Homo sapiens
tacatcatggagaaagcagatcttgtcatagttggtgctgaaggagttgttgaaaacggaggaattattaacaaggtaagagcatcagttctccccagttccctgctcaagacttggaggtgtcttgctgacctaggacaccacagcagtgttgattatggttccttctaatcctgcttcacttcaggacttcatcatggtattgagttgttgcccatttcccgtaagtcatagcaatgggcagtccagtttcagtcaaatcttttttagattgatctacataaatgaagacaatgtaatttggtcaggtgtgatgccttatacctgtaatcctagcaatttgagaggccagggtgggaggatcacttgaggccttgagttcaagaccagcctgggcaacatagtgaaaccctgtctctacaaaaaattagaaaaattagctgggcgtggtggtgcttgcctgtagttccagctgcccaggaagctgaggcaggagtatcacgtgagcccaggaatttgaggttgcagtaagttatgatcacactactgcattccagcctgggcgatggtgagaccctgtctcagtaaaaaaaaaaaaaaaaaaagtgtaatttatatttatacaaaattggcttgaattggaattggggtttgtctggtttttgctttatttatgtgtatatgtatgttttatttatgcatatatatacacacacataatatatatacacaaatatttttaaaatattatttatatatttacatataaagtatgtatgtataaaatacgtgtatttatatataaatattatatatattttaaaatagagacacattcactctgttgcccaggctgtagtgtagtacagtgatcatagcttactgcagtcttgaactcctagcctgaagcaatctttccacttcccaaagtgctaggattacaggcatgagccacacatccagcctctagtggctgtttctatatcctttgagaaacatttatttttttgattccaaagtc

SEQ ID NO: 23038 - protein, 70 aa, Homo sapiens
MVPSNPASLQDFIMVLSCCPFPVSHSNGQSSFSQIFFRLIYINEDNVIWSGVMPYTCNPSNLRGQGGRIT

SEQ ID NO: 23039 - DNA, 273 bp, Homo sapiens
cttcacttcaggacttcatcatggtattgagttgttgcccatttcccgtaagtcatagcaatgggcagtccagtttcagtcaaatcttttttagattgatctacataaatgaagacaatgtaatttgctgggcgtggtggtgcttgcctgtagttccagctgcccaggaagctgaggcaggagtatcacgtgagcccaggaatttgaggttgcagtaagttatgatcacactactgcattccagcctgggcgatggtgagaccctgtctcagt

SEQ ID NO: 23040 - protein, 65 aa, Homo sapiens [sequence omitted]

SEQ ID NO: 23041 - DNA, 1545 bp, Homo sapiens
gggtacggaagtgcgccggaagtggggtgcggaggtgtgcagcgcgctgtcagactggctcgcaggcggcgcggccggcggacccgttcgagacagcgcgggcggctcgggtcccctggggctccgcagcaggaggacgccatggacgacaaggagttaattgaatactttaagtctcagatgaaagaagatcctgacatggcctcagcagtggctgccatccggacgttgctggagttcttgaagagagataaaggggagacaatccagggtctgagggcgaatctcaccagtgccatagaaaccctgtgtggtgtggactcctctgtggcagtgtcctctggcggggagctcttcctccgcttcatcagtcttgcctccctggaatactccgattactccaaatgtaaaaagatcatgattgagcggggagaactttttctcaggagaatatcactgtcaagaaacaaaattgcagatctgtgccatactttcatcaaagatggagcgacaatattgactcacgcctactccagagtggtcctgagagtcctggaagcagccgtggcggccaagaagcgatttagtgtatacgtcacagagtcacagcctgatttgtcagggcaagtacctttctgttcagttatgtgcccagccataattttacagagcaaactgcggattacagtccaacaggatcagaaccagaatgtgcccccagcttgccagcagtcagcactgcctttcattgtaccttttcctgcctttggaagaaaaatcactgaatttgcagcaggccgcagtatatgatctaggggtttcacttaagtagttaactccgtggaagagcagagattgtattgatgaagatttttatcaaggaataggtaacttatatctccctctctctagacgataatcaaagcaaaacttcctccttttttcctgaatttacatctcttacccagagtctaagagtatagttttccaaaaatacttctttctaaagaactcaaattcttgtttccttagtccaaagtattgggatctgccccttaacccattagtattaatgtgagtttcaagcaaacatccactgtccacattaggtgacatacatcactgtggtactgtcttgtactttctctaacgttctcaaaatgtcatcttcagtaagaaaatggccaaagccctctgccacctcaacgtccctgtcactgtggtgctagatgctgctgtcgggtgagtgcccatcttccccagccataatcacctcccccaccccatgctggcttacagcaagttttcagattgaaagtttgagtcccgttcataaagccacaccaggtagcgtcctacttcttaattaatagctgccctaaaccagcaagcttgttatgaggttgtgatagcatacaaagaagacagagctgtaggatgttggggagagtgggagttgtgtctatagctttatggctgtaagtgttgagtttgttgttgttgttgtttttgtttgtttgttttttgtttttttgagatggagtc

SEQ ID NO: 23042 - protein, 222 aa, Homo sapiens
MDDKELIEYFKSQMKEDPDMASAVAAIRTLLEFLKRDKGETIQGLRANLTSAIETLCGVDSSVAVSSGGELFLRFISLASLEYSDYSKCKKIMIERGELFLRRISLSRNKIADLCHTFIKDGATILTHAYSRVVLRVLEAAVAAKKRFSVYVTESQPDLSGQVPFCSVMCPAIILQSKLRITVQQDQNQNVPPACQQSALPFIVPFPAFGRKITEFAAGRSI

SEQ ID NO: 23043 - DNA, 1904 bp, Homo sapiens
ggcggcgccggacgttgggctgcgcaggatttgagacgctcccctgaccaccacttgctctgcgctgaggtgctgggacagccatggtttcagacgaagatgaattgaatcttctggttattgtagttgatgccaacccaatttggtggggaaagcaagcattaaaggaatctcagttcactttatccaaatgcatagatgccgtgatggtgctgggaaattcgcatttattcatgaatcgttccaacaaacttgctgtgatagcaagtcacattcaagaaagccgattcttatatcctggaaagaatggcagacttggagacttcttcggagaccctggcaaccctcctgaatttaatccctctgggagtaaagatggaaaatacgaacttttaacctcagcaaatgaagttattgttgaagagattaaagatctaatgaccaaaagtgacataaagggtcaacatacagaaactttgctggcaggatccctggccaaagccctttgctacattcatagaatgaacaaggaagttaaagacaatcaggaaatgaaatcaaggatattggtgattaaggctgcagaagacagtgcgttgcagtatatgaacttcatgaatgtcatctttgcagcacagaaacagaatattttgattgatgcctgtgttttagactccgactcagggctcctccaacaggcttgtgacatcacgggaggactgtacctgaaggtgcctcagatgccttctcttctgcagtatttgctgtgggtgtttcttcccgatcaagatcagagatctcagttaatcctcccacccccagttcatgttgactacagggctgcttgcttctgtcatcgaaatctcattgaaattggttatgtctgttctgtgtgtttgtcaatattctgcaatttcagccccatttgtactacgtgcgagacagcctttaaaatttctctgcctccagtgctgaaagccaagaaaaagaaactgaaagtgtctgcctgaggataaaatattttccccatcttttagagctgttaatagaaattatatagcagattctttgttgggaagactgaaaaaaataaagataggtataggataatttttaatatggtgaccttacagaaaatatttcccaaacatccttttcatcctgtgcttctggaggactgatttgtttgagggaatcattctatgcattatatcctaaaatattctatgactggtttctgtccatgtttgtggctttcatttttttaatgggatgactattagtcaaagtcagcttgtcatgactcatcataggctttctaacctactccctgaatccgggtcctcattgtgaaatgcatgccatacgaaatttgaacgtagctttggaaaaagggactatttgtggagtaatggcattaatcaacatagaacatcttatttgaatcaacagttaacttcagtagtcatgtgaataaaattcttattgtctaaattgagacagcctcagatatttgcagatatttactttttgtctgatatcagtacatatttggacaaagtcatctaaataatagtttgtcaccaaataactacaaaatctcattttaaatgagtaaggagaacgtgtacagaagcaaattttcttcaaaatagttgtgggaagagcttatatgtgaaagcttatgactggttttgagggagaacttactggagaaaatggactctatgttaagtatggttttcagatagaattctttccttttttaatgaggaaaaaaaatccacattaatattgaaactgcacctgtaatcccagcactttgggaggctgaggcagaggttgcagtgagccaagatagcgcctctgtactccagcctgggtgacagagcgagactctgtat

SEQ ID NO: 23044 - protein, 308 aa, Homo sapiens; identical to SEQ ID NO: 3049

SEQ ID NO: 23045 - DNA, 952 bp, Homo sapiens
tcaaaatataaaaataaaaataaaataataataatctgcagtgtcatatcctcctctgattttgtaggcccaaggcattgctcatgagaacctcattcctctggaaaccctaggtaagtgcgagtttggcagcaagccgcctgtgtcttgcaggcttgtgacatcacgggaggactgtacctgaaggtgcctcagatgccttctcttctgcagtatttgctgtgggtgtttcttcccgatcaagatcagagatctcagttaatcctcccacccccagttcatgttgactacagggctgcttgcttctgtcatcgaaatctcattgaaattggttatgtctgttctgtgtgtttgtcaatattctgcaatttcagccccatttgtactacgtgcgagacagcctttaaaatttctctgcctccagtgctgaaagccaagaaaaagaaactgaaagtgtctgcctgaggataaaatattttccccatcttttagagctgttaatagaaattatatagcagattctttgttgggaagactgaaaaaaataaagataggtataggataatttttaatatggtgaccttacagaaaatatttcccaaacatccttttcatcctgtgcttctggaggactgatttgtttgagggaatcattctatgcattatatcctaaaatattctatgactggtttctgtccatgtttgtggctttcatttttttaatgggatgactattagtcaaagtcagcttgtcatgactcatcataggctttctaacctactccctgaatccgggtcctcattgtgaaatgcatgccatacgaaatttgaacgtagctttggaaaaagggactatttgtggagtaatggcattaatcaacatagaacatcttatttgaatcaacagttaacttcagtagtcatgtgaataaaattcttattgtctaaattg

SEQ ID NO: 23046 - protein, 89 aa, Homo sapiens
MPSLLQYLLWVFLPDQDQRSQLILPPPVHVDYRAACFCHRNLIEIGYVCSVCLSIFCNFSPICTTCETAFKISLPPVLKAKKKKLKVSA

SEQ ID NO: 23047 - DNA, 1870 bp, Homo sapiens
tcaaaatataaaaataaaaataaaataataataatctgcagtgtcatatcctcctctgattttgtaggcccaaggcattgctcatgagaacctcattcctctggaaaccctaggtaagtgcgagtttggcagcaagccgcctgtgtcttgcaggcttgtgacatcacgggaggactgtacctgaaggtgcctcagatgccttctcttctgcagtatttgctgtgggtgtttcttcccgatcaagatcagagatctcagttaatcctcccacccccagttcatgttgactacagggctgcttgcttctgtcatcgaaatctcattgaaattggttatgtctgttctgtgtgtttgtcaatattctgcaatttcagccccatttgtactacgtgcgagacagcctttaaaatttctctgcctccagtgctgaaagccaagaaaaagaaactgaaagtgtctgcctgaggataaaatattttccccatcttttagagctgttaatagaaattatatagcagattctttgttgggaagactgaaaaaaataaagataggtataggataatttttaatatggtgaccttacagaaaatatttcccaaacatccttttcatcctgtgcttctggaggactgatttgtttgagggaatcattctatgcattatatcctaaaatattctatgactggtttctgtccatgtttgtggctttcatttttttaatgggatgactattagtcaaagtcagcttgtcatgactcatcataggctttctaacctactccctgaatccgggtcctcattgtgaaatgcatgccatacgaaatttgaacgtagctttggaaaaagggactatttgtggagtaatggcattaatcaacatagaacatcttatttgaatcaacagttaacttcagtagtcatgtgaataaaattcttattgtctaaattgagacagcctcagatatttgcagatatttactttttgtctgatatcagtacatatttggacaaagtcatctaaataatagtttgtcaccaaataactacaaaatctcattttaaatgagtaaggagaacgtgtacagaagcaaattttcttcaaaatagttgtgggaagagcttatatgtgaaagcttatgactggttttgagggagaacttactggagaaaatggactctatgttaagtatggttttcagatagaattctttccttttttaatgaggaaaaaaaatccacattaatattgaaactgcacctgtaatcccagcactttgggaggctgaggacagaggattgcttgagcccaggagttcgagagcagcctgggcagcaaagtgagaccccatctctactaaaaatttaaatgtatttattaaaactgttctctagaagctttggactgaatcccaaaagtgtttataagttcaaaagcaaaagtatttgtaatttcaacaacaaaaaatgtatttctttatgtaatcttgaaattattaaaagtccttttagcttctagcacatatttgtacaaagagtttaaggaatggtggctggtttggtttgttttttaaaaatgtttactgacgaggccgggcgtggtggctcacccctgcaatcccagcactttgggaggccgaggcaggcagatcacaaggtcaggagttcaagatcagcctggccagtatggtgaaaccctgtctctactaaaaatagaaaaattagccatgcgaagtagcaggtgcctgtagttccagctactcgggaggctgaggcaagagaattgcttgaatccaggaggcagaggttgcagtgagccaagatagcgcctctgtactccagcctgggtgacagagcgagactctgtatc

SEQ ID NO: 23048 - protein, 89 aa, Homo sapiens; identical to SEQ ID NO: 23046

SEQ ID NO: 23049 - DNA, 2835 bp, Homo sapiens
tcaaaatataaaaataaaaataaaataataataatctgcagtgtcatatcctcctctgattttgtaggcccaaggcattgctcatgagaacctcattcctctggaaaccctaggtaagtgcgagtttggcagcaagccgcctgtgtcttgcaggcttgtgacatcacgggaggactgtacctgaaggtgcctcagatgccttctcttctgcagtatttgctgtgggtgtttcttcccgatcaagatcagagatctcagttaatcctcccacccccagttcatgttgactacagggctgcttgcttctgtcatcgaaatctcattgaaattggttatgtctgttctgtgtgtttgtcaatattctgcaatttcagccccatttgtactacgtgcgagacagcctttaaaatttctctgcctccagtgctgaaagccaagaaaaagaaactgaaagtgtctgcctgaggataaaatattttccccatcttttagagctgttaatagaaattatatagcagattctttgttgggaagactgaaaaaaataaagataggtataggataatttttaatatggtgaccttacagaaaatatttcccaaacatccttttcatcctgtgcttctggaggactgatttgtttgagggaatcattctatgcattatatcctaaaatattctatgactggtttctgtccatgtttgtggctttcatttttttaatgggatgactattagtcaaagtcagcttgtcatgactcatcataggctttctaacctactccctgaatccgggtcctcattgtgaaatgcatgccatacgaaatttgaacgtagctttggaaaaagggactatttgtggagtaatggcattaatcaacatagaacatcttatttgaatcaacagttaacttcagtagtcatgtgaataaaattcttattgtctaaattgagacagcctcagatatttgcagatatttactttttgtctgatatcagtacatatttggacaaagtcatctaaataatagtttgtcaccaaataactacaaaatctcattttaaatgagtaaggagaacgtgtacagaagcaaattttcttcaaaatagttgtgggaagagcttatatgtgaaagcttatgactggttttgagggagaacttactggagaaaatggactctatgttaagtatggttttcagatagaattctttccttttttaatgaggaaaaaaaatccacattaatattgaaactgcacctgtaatcccagcactttgggaggctgaggacagaggattgcttgagcccaggagttcgagagcagcctgggcagcaaagtgagaccccatctctactaaaaatttaaatgtatttattaaaactgttctctagaagctttggactgaatcccaaaagtgtttataagttcaaaagcaaaagtatttgtaatttcaacaacaaaaaatgtatttctttatgtaatcttgaaattattaaaagtccttttagcttctagcacatatttgtacaaagagtttaaggaatggtggctggtttggtttgttttttaaaaatgtttactgacgaggccgggcgtggtggctcacccctgcaatcccagcactttgggaggccgaggcaggcagatcacaaggtcaggagttcaagatcagcctggccagtatggtgaaaccctgtctctactaaaaatagaaaaattagccatgcgaagtagcaggtgcctgtagttccagctactcgggaggctgaggcaagagaattgcttgaatccaggaggcagaggttgcagtgagccaagatagcgcctctgtactccagcctgggtgacagagcgagactctgtatcaaaaaaaaaaaagatcgggcacgttggctcacgcctgtaatcccagcactttgggaggccaaggtgggtggatcacgaggtcaggagtgatcaggctgggtttctgttttgttttgttttgtgagacagagtctcgctctgttgcccaggctggggtgcagtggtgcaagctcggctctctgcaagctctgtctcctgggttcacgccattctcctgcctcagcctcccaagtagctgggattactactctactgaacccatgaggcagaaatttgagaccatcctgcccaacgtggtgaaaacatggtgaaaccctgtctctactaaaaatacaaaaattagctgggcgtggtggcaggtgcctgtaatcccagctactcaggagactgaggcaggagaattgcttgaacccaggaggtggaggttgcagtgagccaagatcaagattgcgccattgcactccagcctgggcgacaagaacaaaactctgtctcaaaaaaaaaaaaaaaaaaaaagtctgtactgataaaacccattgtgtacaaaactttgtatgtaaggaagattttaattttctctttatacaagctgagtcatatttaaataatttgatgttggcttagataatttcagatagattttatattctggatttgtgtttttgttaacaaatatacaaagactttggtgatcactttgcaaatatttgttaatccttgagtttgagaacctgtcttttaaaaataatattttgtatactaattaagtgtaatggaaatcacaattttaagtctaggaaataaagtattatatatactttcaaacaagctagcaaggcttttattattacttttttatttgaaatatcttatatatttggttagttctgtttaacttgtttttaactgttgcccttatgagttattttatataaatttttacaataaaataatttgattttcat

SEQ ID NO: 23050 - protein, 89 aa, Homo sapiens; identical to SEQ ID NO: 23046

SEQ ID NO: 23051 - DNA, 1664 bp, Homo sapiens
ttgtgaaatgcatgccatacgaaatttgaacgtagctttggaaaaagggactatttgtggagtaatggcattaatcaacatagaacatcttatttgaatcaacagttaacttcagtagtcatgtgaataaaattcttattgtctaaattgagacagcctcagatatttgcagatatttactttttgtctgatatcagtacatatttggacaaagtcatctaaataatagtttgtcaccaaataactacaaaatctcattttaaatgagtaaggagaacgtgtacagaagcaaattttcttcaaaatagttgtgggaagagcttatatgtgaaagcttatgactggttttgagggagaacttactggagaaaatggactctatgttaagtatggttttcagatagaattctttccttttttaatgaggaaaaaaaatccacattaatattgaaactgcacctgtaatcccagcactttgggaggctgaggacagaggattgcttgagcccaggagttcgagagcagcctgggcagcaaagtgagaccccatctctactaaaaatttaaatgtatttattaaaactgttctctagaagctttggactgaatcccaaaagtgtttataagttcaaaagcaaaagtatttgtaatttcaacaacaaaaaatgtatttctttatgtaatcttgaaattattaaaagtccttttagcttctagcacatatttgtacaaagagtttaaggaatggtggctggtttggtttgttttttaaaaatgtttactgacgaggccgggcgtggtggctcacccctgcaatcccagcactttgggaggccgaggcaggcagatcacaaggtcaggagttcaagatcagcctggccagtatggtgaaaccctgtctctactaaaaatagaaaaattacctcccaagtagctgggattactactctactgaacccatgaggcagaaatttgagaccatcctgcccaacgtggtgaaaacatggtgaaaccctgtctctactaaaaatacaaaaattagctgggcgtggtggcaggtgcctgtaatcccagctactcaggagactgaggcaggagaattgcttgaacccaggaggtggaggttgcagtgagccaagatcaagattgcgccattgcactccagcctgggcgacaagaacaaaactctgtctcaaaaaaaaaaaaaaaaaaaaagtctgtactgataaaacccattgtgtacaaaactttgtatgtaaggaagattttaattttctctttatacaagctgagtcatatttaaataatttgatgttggcttagataatttcagatagattttatattctggatttgtgtttttgttaacaaatatacaaagactttggtgatcactttgcaaatatttgttaatccttgagtttgagaacctgtcttttaaaaataatattttgtatactaattaagtgtaatggaaatcacaattttaagtctaggaaataaagtattatatatactttcaaacaagctagcaaggcttttattattacttttttatttgaaatatcttatatatttggttagttctgtttaacttgtttttaactgttgcccttatgagttattttatataaatttttacaataaaataatttgattttcat

SEQ ID NO: 23052 - protein, 49 aa, Homo sapiens
MYLLKLFSRSFGLNPKSVYKFKSKSICNFNNKKCISLCNLEIIKSPFSF

SEQ ID NO: 23053 - DNA, 2914 bp, Homo sapiens
atagctccgggcgttcgcttgcaagatggcggcggcggggcagtggctgctgcgttttcgtgtctgagtccttcctgggttctaatgagggcgcggttctgctgtgcccggcccgcgaggtctaaggcatgggcttccagcctccggccgctcttcttttgaggcttttccttctgcagggcatcctgaggcttctgtggggggacctggctttcatccctccttttatccgaatgtccggccctgcggtcagcgcgtccctggtcggagacaccgagggtgtgaccgtgtccctggcagtgctgcaggacgaggcgggaatattgccaattccgacgtgtggagtgctgaacaatgagacggaagactggagcgtgactgtgatccccggtgcgaaggtgttggaagtgacagtgaggtggaagagaggtctggactggtgttcctccaatgagacagattccttctcagagtccccctgtatcctccagacccttctggtttcagcatctcataattcatcctgttcagcacatctactcattcaagtggaaatttatgccaactcttctctgacccataatgcctcaggcaaaacgtgactgtcattcctaaccaggtgtatcagccccttggcccttgtccttgtaatttaacagctggagcctgtgatgttcgctgctgctgtgaccaggaatgctcatcaaatttaacaacgctgttcagacggtcctgcttcaccggcgtgtttggaggagacgtcaatcctccttttgatcagctctgctctgctgggacgacgacacgtggtgtccccgattggtttccctttctgtgtgtgcagtccccccttgccaacacacccttccttggttacttctatcatggtgctgtttcccccaaacaggactcttcctttgaagtatatgtggatactgacgcaaaagactttgcagactttggttacaaacaaggagatcccattatgactgtaaagaaggcatattttactattccgcaggtgtccctggctgggcagtgtatgcagaacgccccagtggcatttcttcacaattttgatgttaaatgcgttactaatttggaactataccaagaacgagatggtattatcaatgcgaagataaagaatgttgccttaggaggcatagttacaccaaaagtgatctatgaggaagcaactgacctagacaaattcatcaccaatacagaaactcctttaaataacggatcaacccctagaattgtgaatgtggaagaacattatattttcaaatggaataataataccatcagtgaaataaatgttaaaatttttagggcagagattaatgcccaccagaaagggataatgacacagagatttgtagtaaaatttttaagctataatagtggtaatgaagaagaattatctggaaatccaggttaccaacttggcaagcctgtccgagctctaaatatcaacaggatgaataatgtcacgactttacatctttggcaatcggctggaaggggtctgtgtacatcagcaactttcaaacccattttatttggagaaaatgtactctctggatgcctgttagaagtcgggattaatgaaaattgtactcagctcagggagaatgctgttgaaagacttgattcattaatacaagcgactcacgttgcaatgagaggcaactccgattacgctgatcttagtgatggctggctcgaaataatacgtgtagatgcccctgatccaggtgcagacccgctggctagcagtgtgaacggcatgtgcctggatattcctgctcacctgagcatccgcatcctcatctcggatgctggcgcggtggaagggattactcagcaggagatactcggtgtagagacaaggttctcctcagtgaactggcagtaccagtgtgggcttacctgtgagcacaaggccgaccttctccctatcagtgcatccgtccagtttattaaaattcctgcacagttaccccaccccctgacaagattccagatcaattatacagagtatgactgcaacagaaatgaggtgtgttggccgcagcttctatatccatggactcagtattatcaaggggagctgcattctcagtgtgttgctaagggcttactgttgctgttgttcctcacattggccttgttcctcagcaacccctggaccagaatatgcaaagcctatagttagacaaccacctggcttttatttttttgagatggagttttgctcttgttgcccaggctgaagtgatctcggctcaccacaacctcctcctcttgggttcaagcgattctcctgcctcagcctccggagaactgggattacaggcatgcaccaccacgcccggctaattttgtatttttagtagagacagggttccaccgtattggccaggctgctctcgaactcctgacctcatgatccgcccatcttggcctcccaaagtgctgagattacaggcatgagccaccgcacccggcctttttttttttttttttttttttgaggcggggtctctgtcacccaggctggagtgcagtgcacaatctcggctcactgcaatctctgcctcccaagcaatcctcccacctcagcctctggtgtagctgggaccacagatgctccaccatgcctggctgtatttttggtaaagacggggtttcgccttgttgcccagggtggtctgtaactcctgagctcagatgatctgcccacctcggcctcccaaagtgctgggatcacagacgtgagccactgcgtccggtccatctgacttctcaaagactttagaccttgacttcagtgatttgttgtagtcttgtatgcttctctataaaattttaataaatgaaatgtcttatttttgtagaaaatttt

SEQ ID NO: 23054 - protein, 412 aa, Homo sapiens
MTVKKAYFTIPQVSLAGQCMQNAPVAFLHNFDVKCVTNLELYQERDGIINAKIKNVALGGIVTPKVIYEEATDLDKFITNTETPLNNGSTPRIVNVEEHYIFKWNNNTISEINVKIFRAEINAHQKGIMTQRFVVKFLSYNSGNEEELSGNPGYQLGKPVRALNINRMNNVTTLHLWQSAGRGLCTSATFKPILFGENVLSGCLLEVGINENCTQLRENAVERLDSLIQATHVAMRGNSDYADLSDGWLEIIRVDAPDPGADPLASSVNGMCLDIPAHLSIRILISDAGAVEGITQQEILGVETRFSSVNWQYQCGLTCEHKADLLPISASVQFIKIPAQLPHPLTRFQINYTEYDCNRNEVCWPQLLYPWTQYYQGELHSQCVAKGLLLLLFLTLALFLSNPWTRICKAYS

SEQ ID NO: 23055 - DNA, 994 bp, Homo sapiens
acttctgaagaaaccaccgctcaggatctgagaagtctgataaaggcacctttgttcagctttgaaaggattagactaacagtgatctcagtttttgaaaactggcaactttatttctacttactgttttctgtttttcacggaaaactgaagttaatctttacttttgtttagcaaaaagtagcaagaggataatctttttcttttatagctggaaggggtctgtgtacatcagcaactttcaaacccattttatttggagaaaatgtactctctggatgcctgttagaagtcgggattaatgaaaattgtactcagctcagggagaatgctgttgaaagacttgattcattaatacaagcgactcacgttgcaatgagaggcaactccgattacgctgatcttagtgatggctggctcgaaataatacggtttcattctgtcacccaggctggagtgcagtggtgcaatcacagctcattgcctcctcatcctcccaggctcaagggatcctcccgcctcagccttccaagtagctggaaccacaggtgtagatgcccctgatccaggtgcagacccgctggctagcagtgtgaacggcatgtgcctggatattcctgctcacctgagcatccgcatcctcatctcggatgctggcgcggtggaagggattactcagcaggagatactcggtgtagagacaaggttctcctcagtgaactggcagtaccagtgtgggcttacctgtgagcacaaggccgaccttctccctatcagtgcatccgtccagtttattaaaattcctgcacagttaccccaccccctgacaagattccagatcaattatacagagtatgactgcaacagaaatgaggtgtgttggccgcagcttctatatccatggactcagtattatcaaggtagggtgaaacagatttctatgaccaattatgttatgtcaatttaaaaaaattttttaaatgatgtctaaatg

SEQ ID NO: 23056 - protein, 121 aa, Homo sapiens
MCLDIPAHLSIRILISDAGAVEGITQQEILGVETRFSSVNWQYQCGLTCEHKADLLPISASVQFIKIPAQLPHPLTRFQINYTEYDCNRNEVCWPQLLYPWTQYYQGRVKQISMTNYVMSI

SEQ ID NO: 23057 - DNA, 324 bp, Homo sapiens
tttcaggggagctgcattctcagtgtgttgctaagggcttactgttgctgttgttcctcacattggccttgttcctcagcaacccctggaccagaatatgcaaagcctatagttagacaaccacctggcttttatttttttgagatggagttttgctcttgttgcccaggctgaagtgatctcggcctcccaaagtgctgggatcacagacgtgagccactgcgtccggtccatctgacttctcaaagactttagaccttgacttcagtgatttgttgtagtcttgtatgcttctctataaaattttaataaatgaaatgtctt

SEQ ID NO: 23058 - protein, 41 aa, Homo sapiens
LDNHLAFIFLRWSFALVAQAEVISASQSAGITDVSHCVRSI

SEQ ID NO: 23059 - DNA, 1702 bp, Homo sapiens
gggggcggaaccggaaccggcagtggcttgggggcgggacctcgcggactgctgtggcggcagctggagcggcggccgcggtggcagaaccgggggcggccgctgcagtctggagccccatagtgcggggccgcggccaggccacaggaagagctcgaggcccgggccgcaccggctgagtgtgcgggcccgcgcggctcggagccgccgccgcccatcgagcccctccgggcgcgggtcggcccgccatggggtccctgttccggagcgagaccatgtgcctggcgcagctcttcctgcagtcgggcacggcctacgagtgcctcagcgccctgggcgagaaaggcctggtccagttccgagacctcaaccagaacgtaagttctttccaaagaaaatttgttggtgaggtgaagaggtgtgaagagctagagcgaatattggtgtatttggtacaggaaattaatagagctgatattccccttcctgaaggagaggccagccctcctgcgccacccctgaaacaggttctagaaatgcaggagcagttgcagaagctcgaggttgaactgagagaagtcactaagaacaaggagaaactgaggaaaaacttgctggaactgatagagtacactcacatgctgagagtgacaaagacctttgtgaaacgcaatgttgagtttgaacccacttatgaagaattcccttccttagagagtgattctttgttggattacagctgtatgcagaggctgggagcaaaactgggatttgtgtctggcctaattaaccaaggaaaagtggaagcatttgaaaaaatgttgtggagagtctgcaaagggtacaccatcgtgtcctatgcagaactggatgaatcccttgaagaccctgaaacaggggaagtcataaaatggtatgtctttttaatatccttttggggagagcagattggccacaaggttaagaagatatgtgattgctaccactgccacgtgtacccctatccaaacacagccgaggagcggagggagatccaggaggggctgaacacccgcatccaggatctctacactgtactgcacaaaaccgaggactatttgaggcaagtgctatgtaaagccgccgagtctgtctacagccgtgtgatccaggtgaagaaaatgaaggccatctatcacatgctgaacatgtgcagctttgacgtgaccaacaagtgcctcattgctgaggtctggtgtcccgaggcggatctgcaggacctgcgccgggcactggaggagggctcggtaaggctgccttcctctcctctgccaggaacagaagagagactgatggaactgataaattcagagaaaaaaaggaagtgagaatttcatagagtaatgagaatgcagtgtgttgactcttcttttgtttttttaaaatattaattaacaaaattaaaatagagatggggttttgctgtgttgcccaggctggtctcaaactcctggccccgagcgatcctcctgcctcagcctcccaaagtgctgggattacaggtgtgagccactgtgcccagccttggctctgtttttgaactgaaattatggtgagctggtcattcaaagctgtatgtgagtacatgtgtttttaaattgctcttttgagtaattcattcacatggtgtaaaagtgaaaagaaataaaagagtatgaaagac

SEQ ID NO: 23060 - protein, 372 aa, Homo sapiens
MGSLFRSETMCLAQLFLQSGTAYECLSALGEKGLVQFRDLNQNVSSFQRKFVGEVKRCEELERILVYLVQEINRADIPLPEGEASPPAPPLKQVLEMQEQLQKLEVELREVTKNKEKLRKNLLELIEYTHMLRVTKTFVKRNVEFEPTYEEFPSLESDSLLDYSCMQRLGAKLGFVSGLINQGKVEAFEKMLWRVCKGYTIVSYAELDESLEDPETGEVIKWYVFLISFWGEQIGHKVKKICDCYHCHVYPYPNTAEERREIQEGLNTRIQDLYTVLHKTEDYLRQVLCKAAESVYSRVIQVKKMKAIYHMLNMCSFDVTNKCLIAEVWCPEADLQDLRRALEEGSVRLPSSPLPGTEERLMELINSEKKRK

SEQ ID NO: 23061 - DNA, 3057 bp, Homo sapiens
gggggcggaaccggaaccggcagtggcttgggggcgggacctcgcggactgctgtggcggcagctggagcggcggccgcggtggcagaaccgggggcggccgctgcagtctggagccccatagtgcggggccgcggccaggccacaggaagagctcgaggcccgggccgcaccggctgagtgtgcgggcccgcgcggctcggagccgccgccgcccatcgagcccctccgggcgcgggtcggcccgccatggggtccctgttccggagcgagaccatgtgcctggcgcagctcttcctgcagtcgggcacggcctacgagtgcctcagcgccctgggcgagaaaggcctggtccagttccgagacctcaaccagaacgtaagttctttccaaagaaaatttgttggtgaggtgaagaggtgtgaagagctagagcgaatattggtgtatttggtacaggaaattaatagagctgatattccccttcctgaaggagaggccagccctcctgcgccacccctgaaacaggttctagaaatgcaggagcagttgcagaagctcgaggttgaactgagagaagtcactaagaacaaggagaaactgaggaaaaacttgctggaactgatagagtacactcacatgctgagagtgacaaagacctttgtgaaacgcaatgttgagtttgaacccacttatgaagaattcccttccttagagagtgattctttgttggattacagctgtatgcagaggctgggagcaaaactgggatttgtgtctggcctaattaaccaaggaaaagtggaagcatttgaaaaaatgttgtggagagtctgcaaagggtacaccatcgtgtcctatgcagaactggatgaatcccttgaagaccctgaaacaggggaagtcataaaatggtatgtctttttaatatccttttggggagagcagattggccacaaggttaagaagatatgtgattgctaccactgccacgtgtacccctatccaaacacagccgaggagcggagggagatccaggaggggctgaacacccgcatccaggatctctacactgtactgcacaaaaccgaggactatttgaggcaagtgctatgtaaagccgccgagtctgtctacagccgtgtgatccaggtgaagaaaatgaaggccatctatcacatgctgaacatgtgcagctttgacgtgaccaacaagtgcctcattgctgaggtctggtgtcccgaggcggatctgcaggacctgcgccgggcactggaggagggctcgagagagagtggtgctacaatcccctcattcatgaatataatccccacaaaagaaacaccccccactcggatccgcaccaacaaattcaccgagggatttcagaacatcgtggatgcttatggagtcggaagctacagagaagtcaatccagctctctttaccatcatcaccttcccgtttttatttgctgtgatgtttggagacttcggacatggctttgtgatgtttttatttgccctcttgttggtgttaaatgaaaatcatcccagactaaatcagtcacaagagatcatgaggatgttttttaatggccggtacatcctcctgctgatggggctgttctcagtgtacactggcctcatctacaacgactgcttttcaaagtcagtcaacctgttcggctctgggtggaacgtgtcggccatgtacagctccagccacccacccgcagagcataagaagatggtgctttggaatgacagcgtcgttagacacaacagcattttgcagctggatccaagcattcctggagtgttccgaggcccttatccccttggcattgatcctatttggaacttggccacaaatcgcctcacttttctaaactctttcaaaatgaaaatgtccgtgattttaggaatcattcatatgacttttggagtcattctgggaatatttaaccacttgcacttcaggaagaagttcaacatttacctggtttccatcccggaacttctcttcatgctctgtatctttggataccttatatttatgattttctacaagtggctggttttttcagcagaaacctccagagttgctcccagcattctgattgaatttattaacatgtttttattcccagccagtaaaacaagtggcctttacacagggcaggagtatgtccagagagtgctgctggttgtcacagcattgtctgtccctgtcctcttcttgggaaagccactgtttttgttgtggcttcacaatgggcgtagttgcttcggggtgaaccggagtggctacacacttataaggaaagatagtgaggaagaagtttcattgctgggaagccaagatatagaagagggaaatcaccaggtggaagatggatgtagagaaatggcgtgtgaagagtttaattttggagaaatattaatgacccaagtaatccattccatcgagtactgtctgggatgcatctccaacaccgcctcctacctgaggctctgggcgcttagcctggctcacgcacagttgtctgatgtcctgtgggccatgctgatgcgcgtgggcctccgcgttgacaccacctatggcgtcttgctactgctcccggttatcgcgctctttgcagttttgaccattttcatccttctgatcatggaagggctttctgcgtttcttcacgccatacgcctccactgggtagaatttcagaacaaattctacgttggtgcaggcaccaaatttgttcctttctcattcagtctactttcatcaaagttcaataacgacgacagtgtggcatgatcatattgctgtaaccaacaagctttcagatttatggagaatgaccatgttatagactttcacttatgtcagatttatgataggaaaaattccatcttcattactgccttatgacatagccaaataattctgtaagatatacctcttcctcatatgttaaatattttgtaaagtttaccaatttgagatataaaaatttcttttggttttttatgatgagcaaatataagttaatgcc

SEQ ID NO: 23062 - protein, 856 aa, Homo sapiens; identical to SEQ ID NO: 3053

SEQ ID NO: 23063 - DNA, 5759 bp, Homo sapiens
gggggcggaaccggaaccggcagtggcttgggggcgggacctcgcggactgctgtggcggcagctggagcggcggccgcggtggcagaaccgggggcggccgctgcagtctggagccccatagtgcggggccgcggccaggccacaggaagagctcgaggcccgggccgcaccggctgagtgtgcgggcccgcgcggctcggagccgccgccgcccatcgagcccctccgggcgcgggtcggcccgccatggggtccctgttccggagcgagaccatgtgcctggcgcagctcttcctgcagtcgggcacggcctacgagtgcctcagcgccctgggcgagaaaggcctggtccagttccgagacctcaaccagaacgtaagttctttccaaagaaaatttgttggtgaggtgaagaggtgtgaagagctagagcgaatattggtgtatttggtacaggaaattaatagagctgatattccccttcctgaaggagaggccagccctcctgcgccacccctgaaacaggttctagaaatgcaggagcagttgcagaagctcgaggttgaactgagagaagtcactaagaacaaggagaaactgaggaaaaacttgctggaactgatagagtacactcacatgctgagagtgacaaagacctttgtgaaacgcaatgttgagtttgaacccacttatgaagaattcccttccttagagagtgattctttgttggattacagctgtatgcagaggctgggagcaaaactgggatttgtgtctggcctaattaaccaaggaaaagtggaagcatttgaaaaaatgttgtggagagtctgcaaagggtacaccatcgtgtcctatgcagaactggatgaatcccttgaagaccctgaaacaggggaagtcataaaatggtatgtctttttaatatccttttggggagagcagattggccacaaggttaagaagatatgtgattgctaccactgccacgtgtacccctatccaaacacagccgaggagcggagggagatccaggaggggctgaacacccgcatccaggatctctacactgtactgcacaaaaccgaggactatttgaggcaagtgctatgtaaagccgccgagtctgtctacagccgtgtgatccaggtgaagaaaatgaaggccatctatcacatgctgaacatgtgcagctttgacgtgaccaacaagtgcctcattgctgaggtctggtgtcccgaggcggatctgcaggacctgcgccgggcactggaggagggctcgagagagagtggtgctacaatcccctcattcatgaatataatccccacaaaagaaacaccccccactcggatccgcaccaacaaattcaccgagggatttcagaacatcgtggatgcttatggagtcggaagctacagagaagtcaatccagctctctttaccatcatcaccttcccgtttttatttgctgtgatgtttggagacttcggacatggctttgtgatgtttttatttgccctcttgttggtgttaaatgaaaatcatcccagactaaatcagtcacaagagatcatgaggatgttttttaatggccggtacatcctcctgctgatggggctgttctcagtgtacactggcctcatctacaacgactgcttttcaaagtcagtcaacctgttcggctctgggtggaacgtgtcggccatgtacagctccagccacccacccgcagagcataagaagatggtgctttggaatgacagcgtcgttagacacaacagcattttgcagctggatccaagcattcctggagtgttccgaggcccttatccccttggcattgatcctatttggaacttggccacaaatcgcctcacttttctaaactctttcaaaatgaaaatgtccgtgattttaggaatcattcatatgacttttggagtcattctgggaatatttaaccacttgcacttcaggaagaagttcaacatttacctggtttccatcccggaacttctcttcatgctctgtatctttggataccttatatttatgattttctacaagtggctggttttttcagcagaaacctccagagttgctcccagcattctgattgaatttattaacatgtttttattcccagccagtaaaacaagtggcctttacacagggcaggagtatgtccagagagtgctgctggttgtcacagcattgtctgtccctgtcctcttcttgggaaagccactgtttttgttgtggcttcacaatgggcgtagttgcttcggggtgaaccggagtggctacacacttataaggaaagatagtgaggaagaagtttcattgctgggaagccaagatatagaagagggaaatcaccaggtggaagatggatgtagagaaatggcgtgtgaagagtttaattttggagaaatattaatgacccaagtaatccattccatcgagtactgtctgggatgcatctccaacaccgcctcctacctgaggctctgggcgcttagcctggctcacgcacagttgtctgatgtcctgtgggccatgctgatgcgcgtgggcctccgcgttgacaccacctatggcgtcttgctactgctcccggttatcgcgctctttgcagttttgaccattttcatccttctgatcatggaagggctttctgcgtttcttcacgccatacgcctccactgggtagaatttcagaacaaattctacgttggtgcaggcaccaaatttgttcctttctcattcagtctactttcatcaaagttcaataacgacgacagtgtggcatgatcatattgctgtaaccaacaagctttcagatttatggagaatgaccatgttatagactttcacttatgtcagatttatgataggaaaaattccatcttcattactgccttatgacatagccaaataattctgtaagatatacctcttcctcatatgttaaatattttgtaaagtttaccaatttgagatataaaaatttcttttggttttttatgatgagcaaatataagttaatgccaaacgttatgttaaagttattttttcaaatacaggatttggggagagaagccaattttgcatggctagttgaaaatggtattagatacttatttcctttaaactttatttaaaacaaacaacagagttaatctgtcacctgaagttgccagataatattttccaacagctgaagtagggatagttttttaaaaaatttaatgatgggtaatcaaaacattcacatttattctgctggatttaaaaatatgtactttttttttttttttgagatgaagtcttgctgtgtcacgtaggctggagtgcaatggcacgatcgtgtctcattgcaacttccgcctcctggattcaggtgattctcctgtctcagcctcccgagtaactgggattacaggcatgcgccaccgtgaccagctaatttttttgtatttttgtagagatggggtttcaccatgttggccaggctggtctcgaacttctgacctcaagtgatccacctgcctcggcctccctaagtgctgggattacaggcgtgagccaccatgcctggccaaaatatgcaaatattttttatcctgtgctacctagaattacaagtagaggattgtttttacaattttgtcttgttttagtaattggggacaatgggataaaatgacatacaacaaatggttatcccacttgtatatttttttaaagactcttatcctgttacccttacataaaaccagttatgataattgtatgtttggaagataaattgtatgctgagccttaaaacccagtgtgactgtagaagatataatgcggacatgatttgaatttagtgacagcttggctgatgtcactgaaccagaagggtttatactgagtgaaggaaaggtaaaaagtagtattttgtatatttttgtaacaaaatataaatgaagatattttaccatgaagagattgcacttatccttgagaacagtctaaatataaatgaagatattttaccatgaagagattgcacttatccttgagaacagtctaatgatactttttttactttcagactgtttctagctaaagttctgataaaagtattgagttaatttaaactttcaaacactgtttagatcagttgaaaactaattcttaatagccattgttttataatctttagtttaaattcatctgtttgacatttggttttttgtgaacttgagtcagtcctattgaacattttgacctatattcttgcaaattatgttaatttttcatattttagtttgattttagacaattattttcaaaaagaaacctgactttttttcaccttcttgacattgtgagtgatacacgttaaaaggctatttgcccgcatcctcctctatcctgtttcgaggtagagagcttggcacttctgttacaagctgagagtctggaggtgctgagtttaacgtggctgtgcagctgatttcaaggcatgagctgaacagcgttgacacagccgtgacttacaattaaaccctttcaattacagtacagattctgtgtgctacttgatgagatgttacccaaggccagtttggacttactgctttttgtccctcatattaaattatcaaatgatgccgatgaaatgcttgaaaatgattctgctctcaaagttatgcttccctagaaaggtgtcatgtcgggcacttgtgttgggtgactatgacatcccagcagtgctggtcaggtctcagagttgctttcacctagagctgatgcttccacaaggggacatttgtgttactttgctccaggggtctgtcataaaaacaatggtaactacttcatccctaggaagcccaagacttcagggcactgttagctgattggtaaataagggacacgatattcacgggaattgtttactgctccccactagtaattctcatggggccacttttttaactctttctaattaacacctcttctcagcatagagcagaggatgcagtcatttctctgttgaaatctatgtagtatttatgtagaatgtcattatatgaaaagcgaattcagaatcctaactctgggaaagcgctctctggaaatgtagtttgataatagtgtcttataggggccacgggaatttgtttctctataaagcgatgggctccagtgtcatgttaccagagttatcgctcagttttgtttgttaaggcttttgctagaacctattatgtatccagtttttaaaacatacttcattcccttgatagcagagatccagagcacagatggcaagttgtgtggatgatactgaatatgtttattttcctaaagataaatgtcacgacacgacatttctcagtttttatttagatgtttattaccatgtgttaacagaatcttaaaacccaagggatttcttcagtaaactagactttgattcaacctgctgggctggagactgtaattgccgtggtcagttaaggagtgcaaagggtgttctgtctgataggatctgggtgagccctgcggactttccagcagcgaaaggacttggaactcctctttcgctgaatgctgctctgtttctggaatggatattttataacaacattctggtgtcagcatcccctcagcagttgtttatttaaaaatttttttattttttttgagacagtgtctcactctgtcacctaggctgaagtgcagtggtgcagt

SEQ ID NO: 23064 - protein, 856 aa, Homo sapiens; identical to SEQ ID NO: 3053

SEQ ID NO: 23065 - DNA, 450 bp, Homo sapiens
atcaagagctccagcctacttcacagggtgaggaacgaattcaccgaggatgctaataagcagcacagagagatcaccatcttccatagttttgagaagaaaggcagaaaagcattagacaacatgaaataagatttgtactgggcactctcaagaaacagttaagatacaacttgacatgaaacttggtggccaggaaataaaatgttcgcctgagtggatttcaattcagtcactccaggaacacagggactgtgtctgccttgctcaccaccgagtctccagcaccaaaaacagtgcctgaacatagcgggcagtcaagaaaagcttgtctgttcattcaacaaatgcctatcgatgccaatgactgccaaggactgcgttaaggtacttactctcagaggttgacagtccttggtggagacaaacaataaacaagtaaatggacaa

SEQ ID NO: 23066 - protein, 41 aa, Homo sapiens [sequence omitted]

SEQ ID NO: 23067 - DNA, 538 bp, Homo sapiens
ccgtgttggcccggctggattttcaggcttttttggtaacagttgacaaattgctctcaagaaaagttgtgtcagtttatagtttcattcaatagtatacaagagtgtacatcccccaaactttggtgatgttttattttttacataaaagtatttttaaattttagaaatttaaaccatatttttcatccttttctcagctcaaccagaacgtaagttctttccaaagaaaatttgttggtgaggtgaagaggtgtgaagagctagagcgaatattggtgtatttggtacaggaaattaatagagctgatattccccttcctgaaggagaggccagccctcctgcgccacccctgaaacaggttctagaaatgcaggtaacttgcttctgacgaagctggttgcagccattgatcttgggggctgcttacttacttatttcatgttgtctaatgcttttctgcctttcttctcaaaactatggaagatggtgatctctctaggcagagagattaaagaccgctattatgattaaccc

SEQ ID NO: 23068 - protein, 30 aa, Homo sapiens
MLSNAFLPFFSKLWKMVISLGREIKDRYYD

SEQ ID NO: 23069 - DNA, 667 bp, Homo sapiens
gagggccagtcttgggggtctcacgctcatcacagccttcggaatgttttagctaatatgtggtgtgaacttcacagaaattacctgaattaatatgaaacaataaatgagcctatttatttatttactttgagaaggagtcttgctctgtcacccaagctggagttgcagtgagccgagatcatgccactgcactccagcctgggcgacagagggagactccatctcaaaaaaaaaaaaaagaaaaaaacaaaacaaaaaaacccactgtttttggtatactgcatgaagattattggaattacacttggaactaattactaccctcttaagtaaccattgttttgttttaggagcagttgcagaagctcgaggttgaactgagagaagtcactaagaacaaggagaaactgaggaaaaacttgctggaactgatagagtacactcacatgctgagagtgacaaagacctttgtgaaacgcaatgttgaggtactgaacagctcgtgaggaaatacagctgtttttataaacagctttttataaaaatctcattcccataggctgtgtattttgctattagttcatatagatatgttgcttcttttaagagattaaatttatttatttatttaattttatattttgtttttgagacggaattttgc

SEQ ID NO: 23070 - protein, 50 aa, Homo sapiens
MPLHSSLGDRGRLHLKKKKKKKTKQKNPLFLVYCMKIIGITLGTNYYPLK

SEQ ID NO: 23071 - DNA, 605 bp, Homo sapiens
gataagcttggacagcacagtgtcccgtccaaaccctgggaagccatgcagactgccgtggctgtgtaagcctgagtggattttgcttttgatttagctttaagtaactataaatcttcgtttttctaaggaagtgtttttggttttgttctgaattctcttccacgattttctgtgtgtggaggtaaatccacttgctgattcacactcatagtcctcagacggtctttataatcatcaaagaacaggaaaacagaaccaagaatatacaaaatattctgcttgtgcttatactttctcatttacagtgtttacagaaaatgattagttggagtttgactctctttagaatttttgtaaagtttccttgaggctggtcttgaactcctgacctcaggtgattcacctgcctcggcttcccaaagtgctgtgattacaggtgtgagccactgtgcctagcctaaagaacttttttattctcaaagagctgaatcattaagagaaacaaagaaactatacaagtttggttttgtcacaaccttgtggttttacaggcactgactctgtgctcttttggttgttagagtggctacacacttataagg

SEQ ID NO: 23072 - protein, 32 aa, Homo sapiens
SFLEAGLELLTSGDSPASASQSAVITGVSHCA

SEQ ID NO: 23073 - DNA, 3381 bp, Homo sapiens
tggctttcacatgagaaacagttgggtctgtgttacatgtgtgtctattattttatgggataatagttcagggccgtcagggggaaactcagtccaggtagctcacagagggacccactgtacataagcgagcatgacctgtgcaggctgcactcctttgcagagttgtctgatgtcctgtgggccatgctgatgcgcgtgggcctccgcgttgacaccacctatggcgtcttgctactgctcccggttatcgcgctctttgcagttttgaccattttcatccttctgatcatggaagggctttctgcgtttcttcacgccatacgcctccactgggtagaatttcagaacaaattctacgttggtgcaggcaccaaatttgttcctttctcattcagtctactttcatcaaagttcaataacgacgacagtgtggcatgatcatattgctgtaaccaacaagctttcagatttatggagaatgaccatgttatagactttcacttatgtcagatttatgataggaaaaattccatcttcattactgccttatgacatagccaaataattctgtaagatatacctcttcctcatatgttaaatattttgtaaagtttaccaatttgagatataaaaatttcttttggttttttatgatgagcaaatataagttaatgccaaacgttatgttaaagttattttttcaaatacaggatttggggagagaagccaattttgcatggctagttgaaaatggtattagatacttatttcctttaaactttatttaaaacaaacaacagagttaatctgtcacctgaagttgccagataatattttccaacagctgaagtagggatagttttttaaaaaatttaatgatgggtaatcaaaacattcacatttattctgctggatttaaaaatatgtactttttttttttttttgagatgaagtcttgctgtgtcacgtaggctggagtgcaatggcacgatcgtgtctcattgcaacttccgcctcctggattcaggtgattctcctgtctcagcctcccgagtaactgggattacaggcatgcgccaccgtgaccagctaatttttttgtatttttgtagagatggggtttcaccatgttggccaggctggtctcgaacttctgacctcaagtgatccacctgcctcggcctccctaagtgctgggattacaggcgtgagccaccatgcctggccaaaatatgcaaatattttttatcctgtgctacctagaattacaagtagaggattgtttttacaattttgtcttgttttagtaattggggacaatgggataaaatgacatacaacaaatggttatcccacttgtatatttttttaaagactcttatcctgttacccttacataaaaccagttatgataattgtatgtttggaagataaattgtatgctgagccttaaaacccagtgtgactgtagaagatataatgcggacatgatttgaatttagtgacagcttggctgatgtcactgaaccagaagggtttatactgagtgaaggaaaggtaaaaagtagtattttgtatatttttgtaacaaaatataaatgaagatattttaccatgaagagattgcacttatccttgagaacagtctaaatataaatgaagatattttaccatgaagagattgcacttatccttgagaacagtctaatgatactttttttactttcagactgtttctagctaaagttctgataaaagtattgagttaatttaaactttcaaacactgtttagatcagttgaaaactaattcttaatagccattgttttataatctttagtttaaattcatctgtttgacatttggttttttgtgaacttgagtcagtcctattgaacattttgacctatattcttgcaaattatgttaatttttcatattttagtttgattttagacaattattttcaaaaagaaacctgactttttttcaccttcttgacattgtgagtgatacacgttaaaaggctatttgcccgcatcctcctctatcctgtttcgaggtagagagcttggcacttctgttacaagctgagagtctggaggtgctgagtttaacgtggctgtgcagctgatttcaaggcatgagctgaacagcgttgacacagccgtgacttacaattaaaccctttcaattacagtacagattctgtgtgctacttgatgagatgttacccaaggccagtttggacttactgctttttgtccctcatattaaattatcaaatgatgccgatgaaatgcttgaaaatgattctgctctcaaagttatgcttccctagaaaggtgtcatgtcgggcacttgtgttgggtgactatgacatcccagcagtgctggtcaggtctcagagttgctttcacctagagctgatgcttccacaaggggacatttgtgttactttgctccaggggtctgtcataaaaacaatggtaactacttcatccctaggaagcccaagacttcagggcactgttagctgattggtaaataagggacacgatattcacgggaattgtttactgctccccactagtaattctcatggggccacttttttaactctttctaattaacacctcttctcagcatagagcagaggatgcagtcatttctctgttgaaatctatgtagtatttatgtagaatgtcattatatgaaaagcgaattcagaatcctaactctgggaaagcgctctctggaaatgtagtttgataatagtgtcttataggggccacgggaatttgtttctctataaagcgatgggctccagtgtcatgttaccagagttatcgctcagttttgtttgttaaggcttttgctagaacctattatgtatccagtttttaaaacatacttcattcccttgatagcagagatccagagcacagatggcaagttgtgtggatgatactgaatatgtttattttcctaaagataaatgtcacgacacgacatttctcagtttttatttagatgtttattaccatgtgttaacagaatcttaaaacccaagggatttcttcagtaaactagactttgattcaacctgctgggctggagactgtaattgccgtggtcagttaaggagtgcaaagggtgttctgtctgataggatctgggtgagccctgcggactttccagcagcgaaaggacttggaactcctctttcgctgaatgctgctctgtttctggaatggatattttataacaacattctggtgtcagcatcccctcagcagttgtttatttaaaaatttttttattttttttgagacagtgtctcactctgtcacctaggctgaagtgcagtggtgcagt

SEQ ID NO: 23074 - protein, 84 aa, Homo sapiens [sequence omitted]

SEQ ID NO: 23075 - DNA, 3983 bp, Homo sapiens
atggacgacctgcgggtgctgtggatgcgcgaccgcgtgtatgcggctttcggcatcaccgacccccagcttttcgaggacctgctcaaccgcgacgacggccagggcgaggacctcatcttgcacttcctcaaccaggcgagcgaggaggaggggccctcggcgctcttcatctaccgcactatggtgccggaggaggtggaggtggagattgctaagcgtgtgtcactgagaaccgaatctctaggccaacctctaaacagagaggatgaagaaatggacaaagagatttcagaaaaactcccttccaaaagaactgcgaagcacatcatggaaaagatgcatctccacatgctctgtacccctcttcccgaggagttcctggaccaaaacgtggtgtttttcctcagaaataccaaagaggcaatctctgaagctaccgacatgaaggaagctatggaaattatgccagaaacactggagtatggaattataaacgctaatgtgctccattttctgaagaatattatatgtcaggtttttttgccagcattgtccttcaatcagcacaggacgagtacaaccgtgggagtcacatctggagaagtctctaattcctctgagcatgaatcagacctgccgcccatgcctggggaggcagtagaatatcacagtattcaattaatacgggatgaatttttaatgaacgtgcagaaatttgcaagtaatattcaaagaaccatgcagcaacttgaaggtgagatcaagttagaaatgccaatcatcagtgtggagggagaggtgtctgacctggcagctgacccggaaaccgttgacatcttggagcagtgtgtgataaactggctgaatcagatatccacagcggttgaggcccaactgaagaagacacctcagggtaaaggccctctggctgaaattgaattctggagggaaagaaatgcaaccttaagtgcgctgcatgaacaaacaaagcttccaatagtcagaaaagtcttggatgtgatcaaggaatccgactccatgcttgtggctaatctgcagccagtgttcaccgagttattcaagttccacacggaggcctcagacaatgtgcgctttctctccaccgtggagcgttatttcaagaacataacgcacgggtctggcttccacgtggtcctggacaccatccccgccatgatgagtgccctgcggatggtgtggatcatctcccgacactacaacaaagacgagaggatgattccgctcatggagcgcatcgcctgggaaatcgctgagagagtctgccgagtggtcaacctgcggactttgttcaaagaaaatcgagcgagtgcccaaagcaaaaccttggaagccaggaacaccctcaggctgtggaaaaaggcctattttgacacccgggccaagatagaggcttcggggagggaagatcggtgggagtttgaccggaagcggctgttcgagaggacggattatatggccaccatctgccaggacctctccgacgttctgcagattttggaggaattttataacatatttggtccagaactaaaggcagtgacgggggaccccaagcgcattgatgatgtcctatgcagagtggacggcctagtcacccccatggaaaacctgacctttgaccccttcagcatcaagtcctcccagttctggaaatatgtgatggatgaattcaagattgaagttctgattgacatcattaataaaatctttgtccagaaccttgaaaatccaccactgtataagaatcaccctccagtagcaggtgcaatatactgggaacgatctctgttctttcggattaagcataccatcctccgatttcaagaggtacaagagatactggacagtgatcgaggacaggaggtcaaacaaaaatatttggaagtaggtaggacaatgaaggagtatgaagacagaaagtatgagcagtggatggaggtgacggagcaggtgctgccagctctcatgaagaagagccttttgaccaagtcttccatcgccacagaggagccttcgactttagaaaggggagctgtttttgcaatcaacttttcaccggctctcagagagattattaatgaaacaaagtacttagagcagctggggttcactgtccctgaattagcaagaaatgttgctctccaggaagacaaattccttaggtacacagctgggatacagcgcatgttggatcattatcacatgctcataggaacgttaaacgatgcggagtctgtgcttctcaaagatcattcccaggaactgctccgagtgtttaggtcgggatataagaggttgaactggaactcactaggtatcggtgactatataactggttgcaaacaggccattgggaaatttgagtctctcgtccaccagattcataagaatgcagatgacatttcttccaggctgacattaatagaggccataaatctctttaaatatccagccgctaaaagtgaggaagaactcccaggcgtgaaggaattttttgaacacattgagcgagaaagggccagcgacgtggaccacatggtccggtggtatcttgccattggaccactgctgaccaaagttgagggcctggtcgtccacaccaacacaggcaaggcccccaagctggcctcctactacaaatactgggaaaagaaaatttatgaggtcctgacaaagctcatcctgaagaacttgcagtcttttaattctttgatccttggaaatgtccctctgttccacactgaaaccattctgacggcacctgagatcatccttcatcccaacacaaatgagatcgacaagatgtgcttccattgtgtccggaattgcgtggagatcaccaagcattttgttcgttggatgaatggcagctgcatagaatgcccacctcagaagggggaggaagaggaagttgttataataaacttttacaatgatatctctctgaaccctcagataattgaacaagctgttatgatcccccaaaatgtccacaggattctgatcaatcttatgaagtatctacaaaaatggaagcggtatcgacctctctggaaattggacaaagctattgtgatggagaaatttgctgccaagaaacctccttgtgtagcatatgatgaaaagttgcagttctattccaagatagcttatgaggttatgcgccaccctctaattaaggatgagcattgcatcagacttcagctcaggcatctggcaaacacagtgcaggaaaatgccaagtcctgggtgatttcgcttggaaaacttctcaatgagtcagcaaaagaggagctctataatctccatgaagagatggaggtactcaatcgctgtgtgtaattgaaactacttttcgtgtaagttgggtcttcatttgcgccattactgttttttctgtgtttgcttagtgttctttgtactttctgttatagcacctggccaaaaaccttaggaagatccccaatacccttgaagatctcaagtttgtccttgcaacaattgcagaaattagaagtaaatctctagtcatggaactcagatatagggacgtccaggagcgataccgtaccatggcaatgtataacctctttgtaagtcaacttgtattttcttattcatttaacaattggattgaccactaacgacccttttcagaaatgcttctcaagtatactgccattgatttgttttcaaataagtgactttaagtaatacattgtaaatgtaaagcaatgccactgttatttagaataatgaaaatatagagtatttttcaatctgtatggctcaaatggattgatctgtaactataccatttccattctcccttttcttttcttcttttttttgtgttaatttcctttaatagataaagagctcttgcaaaaatgataagaagagagtgaaagatttaagataataaaagaaactggtag

SEQ ID NO: 23076 - protein, 1128 aa, Homo sapiens
MDDLRVLWMRDRVYAAFGITDPQLFEDLLNRDDGQGEDLILHFLNQASEEEGPSALFIYRTMVPEEVEVEIAKRVSLRTESLGQPLNREDEEMDKEISEKLPSKRTAKHIMEKMHLHMLCTPLPEEFLDQNVVFFLRNTKEAISEATDMKEAMEIMPETLEYGIINANVLHFLKNIICQVFLPALSFNQHRTSTTVGVTSGEVSNSSEHESDLPPMPGEAVEYHSIQLIRDEFLMNVQKFASNIQRTMQQLEGEIKLEMPIISVEGEVSDLAADPETVDILEQCVINWLNQISTAVEAQLKKTPQGKGPLAEIEFWRERNATLSALHEQTKLPIVRKVLDVIKESDSMLVANLQPVFTELFKFHTEASDNVRFLSTVERYFKNITHGSGFHVVLDTIPAMMSALRMVWIISRHYNKDERMIPLMERIAWEIAERVCRVVNLRTLFKENRASAQSKTLEARNTLRLWKKAYFDTRAKIEASGREDRWEFDRKRLFERTDYMATICQDLSDVLQILEEFYNIFGPELKAVTGDPKRIDDVLCRVDGLVTPMENLTFDPFSIKSSQFWKYVMDEFKIEVLIDIINKIFVQNLENPPLYKNHPPVAGAIYWERSLFFRIKHTILRFQEVQEILDSDRGQEVKQKYLEVGRTMKEYEDRKYEQWMEVTEQVLPALMKKSLLTKSSIATEEPSTLERGAVFAINFSPALREIINETKYLEQLGFTVPELARNVALQEDKFLRYTAGIQRMLDHYHMLIGTLNDAESVLLKDHSQELLRVFRSGYKRLNWNSLGIGDYITGCKQAIGKFESLVHQIHKNADDISSRLTLIEAINLFKYPAAKSEEELPGVKEFFEHIERERASDVDHMVRWYLAIGPLLTKVEGLVVHTNTGKAPKLASYYKYWEKKIYEVLTKLILKNLQSFNSLILGNVPLFHTETILTAPEIILHPNTNEIDKMCFHCVRNCVEITKHFVRWMNGSCIECPPQKGEEEEVVIINFYNDISLNPQIIEQAVMIPQNVHRILINLMKYLQKWKRYRPLWKLDKAIVMEKFAAKKPPCVAYDEKLQFYSKIAYEVMRHPLIKDEHCIRLQLRHLANTVQENAKSWVISLGKLLNESAKEELYNLHEEMEVLNRCV

SEQ ID NO: 23077 - DNA, 4787 bp, Homo sapiens
atgaactacagagttcagatagaggagtttgcaaagcgtttttacagtgaaggccctggttctgttggtgatgatcttgataaaggagtagagcttttaggtgtttatgaaagagagctggcaagacatgaaaagagccgtcaggaactggctaacgctgagaaacttttcgatcttcctattacaatgtacccagagctgctgaaagtgcagaaggaaatgagtgggctgaggatgatttacgagctctatgaaggactaaaggttgcaaaagaagaatggtctcagaccctttggatcaacctgaatgtgcagattctccaggaaggaattgaaggttttctcagggctctcagaaagctacctcggccagtccgtggcttatcagtgacctactacttggaagcaaaaatgaaggcattcaaagactcgattcctttacttcttgacttgaaaaacgaggcactaagagacaggcattggaaagaacttatggaaaaaacgtctgtcttttttgaaatgaccgaaacgttcaccttggaaaatatgtttgctatggaactgcacaaacacacagatgttctcaatgagattgtcacagcagcaatcaaggaggttgccattgagaaggctgtgaaggaaatcctagacacgtgggaaaatatgaaattcactgtagtcaagtattgcaaaggcacacaggagcgaggctacatcctgggttctgttgacgaaattattcagtctcttgatgacaacactttcaacctgcagagcatctcaggaagcagatttgtggggccttttctgcaaactgttcacaaatgggaaaaaacgctttctctaataggggaagtcattgagatttggatgttggttcagagaaaatggatgtatcttgaaagtatttttattggtggagatataagatcacaacttccggaagaggcaaaaaagtttgacaacatcgataaagtatttaaaaggatcatgggtgagaccttaaaagaccccgtgatcaagaggtgctgtgaagccccaaaccgcctcagtgacctacagaacgtcagcgagggcctggagaaatgccagaaaagcctcaacgactacttagattcgaagagaaatgctttcccaaggttcttcttcatttctgacgatgagttgcttagcattctggggagcagcgacccactctgcgtccaggagcacatgatcaagatgtacgacaacatagcatcactgaggtttaatgacggcgatagtggagaaaaactggtgtccgcgatgatttcagcagaaggagaagtcatggagtttcggaagatcttgcgggctgaagggcgcgtggaggactggatgacggcagttttgaatgagatgagaagaactaatagactaattaccaaagaggctatttttagatactgtgaagacagaagcagagtcgactggatgctcctgtaccagggcatggtggtgctggccgctagccaggtgtggtggacctgggaggtggaagacgtcttccacaaagcgcaaaaaggggagaagcaggccatgaagaactatggcaggaaaatgcaccggcagatcgatgagttggtaacgcgcatcaccatgccgctaagcaaaaacgacaggaaaaaatacaacactgttctcatcattgatgtgcatgccagagacatagttgattctttcataagaggcagtatcctggaggcccgagagtttgactgggaaagtcagttgcggttttattgggaccgggagccggatgagctgaacatccgccagtgcacgggaacctttggctacggctacgagtacatgggcctgaacggcaggctggtcatcacgcccctcaccgatcggatttacctgacgctcacccaggcgctgtccatgtatctaggtggggcccccgccggcccagcaggaaccggcaaaaccgagaccaccaaggacctggcgaaagccttgggcttgctctgtgttgtcaccaactgtggcgaaggcatggattacagggccgtggggaagattttctctggcctggcacagtgcggggcttggggctgctttgatgagtttaatcgaatcgatgcttctgtgctctccgtgatctcctcccagatccagacgatccgaaatgctctgatccatcagttaaccacgttccagtttgaagggcaggagatttccctggactcccgcatgggcatcttcatcaccatgaaccccggctacgcaggccgcacggagctgcccgagtcggtgaaggcgctgttcaggcctgtggtcgtgatcgtgcccgacctgcagcagatctgtgagatcatgctcttctctgagggcttcctggaggccaagactctggcgaaaaagatgacggttctgtataagctggcccgggagcagctgtccaagcagtatcactatgattttggactcagagccctgaaatcggtgctggtcatggctggtgagctgaagagaggctcctctgaccttagggaggacgtggtgctgatgagggccttgcgagacatgaacttgcccaaatttgtgtttgaagatgttcctcttttccttggtttgatttcggatctgtttcctgggctggactgccctcgcgtccgctaccctgacttcaacgatgcggtagagcaggtcctggaggagaacggctacgcggtcctacccatccaggtggataaagtggttcaaatgttcgagaccatgttaacccgccacacgacgatggtggtggggcccaccagagggggcaagtccgtcgtcattaacactctgtgtcaggcccagaccaacctctcttgatttaggcttgggctgacgacaaagttgtacatcctgaaccccaaagccgtgagtgtcatagaactctacggcatcctggacccaaccacccgagactggacagatggggtgttgtcaaacatcttcagggaaatcaacaagccaacagacaagaaggagcgaaagtatattttatttgatggtgatgtggatgctctatgggtggaaaacatgaattctgtgatggatgacaacaggttgttgacattggccaacggggaacgcatccggctccaagcacactgtgccctgctctttgaggttggagatttacagtatgcctcccctgcaactgtctctcgatgtggaatggtttatgtggatcctaaaaacttgaaatatcgaccatactggaaaaaatgggttaatcaaataccaaacaaggtggagcaatacaatttgaatagtctctttgagaagtatgtgccctatctcatggatgtgatagtggaaggaattgtggatggaagacaagcagaaaagctgaagacaatagttcctcagacagacctcaatatggtaacccagttagccaagatgttggatgcgttgctagaaggagaaatagaagaccttgacctgctggagtgctacttcctggaggctttgtactgctctctgggagcctccctgcttgaggatggaaggatgaaatttgacgaatatatcaaacgccttgcttctttgtctactgttgacacagaaggagtttgggccaaccctggggaactgccaggtcaacttccaaccttgtatgactttcattttgataacaaacggaatcaatgggtcccatggagtaaattagttccagagtatattcatgcccccgagaggaaattcatcaacatcctggacgtttcatgagagcattgtggctgtgagtggcaagctgacattctgcacgctagcactttacaaaaatattgtgcaagacctacctcccactccgtcaaagttccattacatcttcaaccttcgagatctctcacgggtttttaatggtcttgtcctcactaacccggagcgattccagacggtggcccagatggtgagagtctggaggaatgagtgtctgagagtcttccacgaccggctgatcagtgaaacagacaagcagctggtacaacagcacataggcagcttggttgtggaacattttaaagatgacgtggaggtggtgatgagggatcccatattgtttggagacttccagatggctctgcacgaaggagaaccacgcatttatgaagacatccaggactacgaggcggccaaggctctgttccaggaaattcttgaagagtataatgaaagcaacaccaaaatgaacttggttctcttcgacgatgctctggagcatttaacccgggtgcaccgtatcatccgcatggaccgcggccacgccctgctggtcggggtagggggctcagggaagcagtctctttcgaggctggctgccttcacagccagctgtgaggtcagtccacgtaccctcccagaaataggtttacgatgccagtttctgcagttggtagttcgtgtacatattggaacaatccacagcagatcatagcatgatgttttcatagagtatcgaggtgggtgttttggtttgttttattttttcttgtttttggcttgatattactatattttaactgaatagccagagcatctaagtacaggtgttctttggcttaggatagggttacatcctgataaaataatcataagtcaaaaatattgtcagttgaaaatacatttaatatcccaattaacccatcataaagttgaaaaatcctaagtggaaccatcaaagccggggaccatctgtattgctttgtttttaggatggagaatgtcagatcaagttagaaagtcaaatacaagcacatcctgtg

SEQ ID NO: 23078 - protein, 947 aa, Homo sapiens
MNYRVQIEEFAKRFYSEGPGSVGDDLDKGVELLGVYERELARHEKSRQELANAEKLFDLPITMYPELLKVQKEMSGLRMIYELYEGLKVAKEEWSQTLWINLNVQILQEGIEGFLRALRKLPRPVRGLSVTYYLEAKMKAFKDSIPLLLDLKNEALRDRHWKELMEKTSVFFEMTETFTLENMFAMELHKHTDVLNEIVTAAIKEVAIEKAVKEILDTWENMKFTVVKYCKGTQERGYILGSVDEIIQSLDDNTFNLQSISGSRFVGPFLQTVHKWEKTLSLIGEVIEIWMLVQRKWMYLESIFIGGDIRSQLPEEAKKFDNIDKVFKRIMGETLKDPVIKRCCEAPNRLSDLQNVSEGLEKCQKSLNDYLDSKRNAFPRFFFISDDELLSILGSSDPLCVQEHMIKMYDNIASLRFNDGDSGEKLVSAMISAEGEVMEFRKILRAEGRVEDWMTAVLNEMRRTNRLITKEAIFRYCEDRSRVDWMLLYQGMVVLAASQVWWTWEVEDVFHKAQKGEKQAMKNYGRKMHRQIDELVTRITMPLSKNDRKKYNTVLIIDVHARDIVDSFIRGSILEAREFDWESQLRFYWDREPDELNIRQCTGTFGYGYEYMGLNGRLVITPLTDRIYLTLTQALSMYLGGAPAGPAGTGKTETTKDLAKALGLLCVVTNCGEGMDYRAVGKIFSGLAQCGAWGCFDEFNRIDASVLSVISSQIQTIRNALIHQLTTFQFEGQEISLDSRMGIFITMNPGYAGRTELPESVKALFRPVVVIVPDLQQICEIMLFSEGFLEAKTLAKKMTVLYKLAREQLSKQYHYDFGLRALKSVLVMAGELKRGSSDLREDVVLMRALRDMNLPKFVFEDVPLFLGLISDLFPGLDCPRVRYPDFNDAVEQVLEENGYAVLPIQVDKVVQMFETMLTRHTTMVVGPTRGGKSVVINTLCQAQTNLS

SEQ ID NO: 23079 - DNA, 5852 bp, Homo sapiens
atgtgctctgtgtctgcatcgcaggtgtttgagatcctgctgagccgaggctactcggagaacagtttccgggaagacctgaagagcctctatttgaaacttgggattgagaacaaagcgatgatctttctgttcacggatgcccatgtggctgaggagggcttcctggagctcatcaacaacatgctgacctcaggaattgtacctgcgcttttttctgaagaggagaaagagtctatcctgagtcagattggacaggaagctctgaagcaaggcatggggccggccaaggagtctgtgtggcagtacttcgtgaacaaaagtgcaaataacctgcacattgtcctgggcatgtcgccagtgggggacaccctgaggacctggtgcagaaacttcccaggtatggtaaataacactggtattgactggttcatgccctggcctccccaagccctccatgcggtcgcaaagtcctttctagggtataatccaatgatcccggcagaaaatatagaaaatgtggtgaagcatgttgtcttggttcaccaatccgtggaccactacagccaacagtttctacagaaattgaggcgcagcaactatgtcactcccaagaactaccttgattttattaacacctattcaaaattgctggatgagaaaactcagtgtaatatagctcagtgcaagcgtctggatgggggactggacaagctgaaggaggccaccatccagctggacgagctgaaccagaagctggccgagcagaagatcgtgctggcggagaagtccgccgcctgcgaggccttgctggaggagatcgccgtcaacaccgctgtagccgaggagaagaagaaactggcagaggaaaaggccatggagatagaggagcagaacaaagtcattgccatggagaaggccgaggccgagacgaccctggcagaggtcatgcccatcctggaggccgccaagctggaactgcagaagctggacaagtcggacgtgactgagattaggtcgtttgctaagcccccgaagcaggtgcagacggtctgcgaatgcatcctcatcatgaaagggtacaaagagctgaactggaaaacagccaagggcgtgatgtccgacccgaatttcctgcggtctctgatggagattgattttgattcgattacccagagccaagtgaaaaacatcaaaggcctcttgaagactcttaataccacaactgaagaaatggaagctgtcagcaaagccgggctggggatgctgaaatttgttgaagctgtaatgggctactgtgatgttttcagagaaatcaagcccaaaagagagaaggtggccaggctggagcggaatttttacctcactaaacgggaactggaaaggatccagaatgagttggcagcaattcagaaagagctggaaacattgggtgccaaatatgaggccgccatactggaaaagcagaagctgcaggaagaagccgagatcatggagaggcggctgattgccgcagacaaactcatctcgggtctggggtcagaaaacatcaggtggctgaacgacctggatgagctgatgcaccggcgcgtgaagctgctgggggactgcctgctctgcgcggctttcctcagctacgagggagccttcacctgggagttccgtgacgagatggtcaatcggatttggcaaaatgacatcctggagcgggagatccccctgagccagcctttccggctggaaagcctgctcacggatgatgttgagatcagcagatggggatcccagggccttccccccgatgagctctccgttcagaatggcatcctcaccacccgggccagccgcttccctctgtgtatcgacccccagcagcaggccctcaactggatcaagagaaaagaggagaagaacaatctgcgggtcgcttcctttaatgaccctgacttcctcaagcagctagagatgtccataaagtacgggacccctttcctgttccgcgatgttgatgaatacatcgatcctgtgattgacaacgtcttagaaaaaaatataaaagtctcccaaggacggcagtttattatcctgggagacaaggaagtggactatgattcaaatttcagactgtacctgaacaccaagctggccaatcccagatattccccatccgtgtttgggaaagctatggtgatcaattacactgtcacgctgaagggcctggaggaccagctgctgagcgtgctggtggcttacgagaggcgggagctggaggagcagcgggagcacctcatccaggagaccagcgagaacaagaacctgctcaaggacctggaagattccctccttcgggagctggccacgtccacggggaacatgctggacaatgtggacctggtgcacaccctggaggagaccaaatccaaggcaacagaggtctcagagaaactcaagctggcggagaagacagccttggacatcgacaggctgcgggatggctaccggccagcagccaggaggggggccatcctgttcttcgtcctgtctgagatggccctggtgaactccatgtaccagtactccctgattgccttcttagaggtcttcaggctgtcactgaagaagtcgctgcctgattccatcctcatgaaacgcctgaggaacatcatggacacgctgaccttcagcatctataaccacggctgcacagggctgtttgagaggcacaagctactcttttcttttaatatgaccatcaagatagaacaagcagaagggagagtccctcaagaagaactagatttctttttaaaaggaaacatttccctggagaaaagcaaaagaaaaaagccctgcgcttggttgtctgaccaaggatgggaagatatcattcttttatcagaaatgttttcagacaactttgggcaacttcctgatgatgttgagaataatcagactgtctggcaggagtggtatgacctggattcactggagcagtttcccgtccccttgggttacgataacaacatcacccctttccagaagttgcttattttgcgctgtttccgtgtggatcgggtctatcgggccgtgactgactatgtgactgtaacaatgggagagaagtatgtgcagcccccaatgatcagctttgaagctatttttgagcagagcactccacattcgcccattgtgtttatcctgagtcctggctccgaccctgccactgatcttatgaaattagcagagcgaagtggttttggaggaaatcgcctcaaattccttgcaatgggtcaaggtcaagaaaaggtggccctgcagctgctggagacggcggtggctcgggggcagtggctgatgctgcagaactgccacctcctggtcaagtggctgaaagatctggagaagtccctggagaggatcaccaagccccacccagacttccgcctgtggctcaccacggaccccaccaagggcttccccattgggattctgcagaagtccctaaaggttgtcaccgagccacccaatgggctgaaactcaacatgagggcaacttacttcaagatctctcacgaaatgctggaccagtgcccgcaccctgccttcaagccgctggtctacgtgctggcgttctttcatgctgtggtgcaggagagaaggaagtttgggaagattggctggaacgtgtactatgacttcaatgagtctgacttccaggtctgcatggaaattctgaacacgtacttaacgaaagccttccagcaacgggacccaaggatcccgtggggcagcctcaagtacctaattggagaggtaggggtgaccggggatccttccgcaggtgcctctggggctacagagctgtggcctcgtgcccctattttcctctgagccctcagaaccagcctcttctgcccctgtgttccccttgggtttctgtgacaattctctctgctctcacctggttgttctttgtcctaagtgagctctgttcacatggaggttccctgagctggatccatggctggggatccaggcaaggcatcctctagccccttgcctcagctgttgctgtatacagagctcacaggaagcatccccggtggtctgcacacggctcaggcagtgacatcaattccaaagacagaagcagctgctggcttcttcagctgtttgtttgatgtgtttgggggactttgcctgctgcacaggagctcccaacacttcctgagggcttcttactgctttgggccctatcccttgggaagccagcaaagccacagatcaattgtgtgaacagtggcccgaaaggttatgcaagtcaacaggttcaagccttgcagcagccaggctgctggagtctcttgaccctgggtgagcctctggccccgggcccccagggtgcacacagtaggttctgagctcctggctggctctcaggccctctaatttcaggtcatgtatggaggacgggccatcgacagctttgatcgccgcatcctgaccatctacatggatgagtacctgggggacttcatttttgatactttccagccattccacttcttccggaacaaggaagtggactacaaaatccctgttggtgatgaaaaggagaaatttgttgaagccatcgaggccctcccgcttgccaacacgccagaagtgtttggtctccaccccaacgctgagattggctattacacgcaggcggctcgagacatgtgggctcacctgctggagctgcagcctcagacaggggaatccagcagtggtatcagccgcgatgattatattggccaagtggccaaagaaatagaaaacaagatgcccaaagtctttgacttggaccaggtgaggaagcgcctcggaacaggactctcccccacttcggtggtgctcctgcaggaactggaacgcttcaacaagcttgtggtccggatgacgaagtctctggctgaacttcaaagggccttggctggagaagttggaatgagcaatgagttagatgatgtggccaggtctctttttatcgggcatatccctaatatctggagaaggcttgctcctgacaccttaaagtcccttggaaactggatggtctacttcctgcggcggttcagccagtacatgttgtgggtgaccgagagcgagcccagcgtgatgtggctctcggggctgcacatccctgagtcctacctcacggcgctggtgcaggccacctgccggaagaacggctggccactggaccgctccaccttgttcacacaagtgaccaagttccaggatgcagatgaagtgaatgagcgggcgggacaaggatgctttgtctcaggactgtacctggaaggtgctgactgggatatagaaaaaggatgtcttatcaagagcaaacccaaggtgctggttgtggacctgccgatcctgaagatcatccccattgaagcccatcgcctcaagctgcagaatactttccggacccccgtctacaccacctccatgagaaggaacgccatgggagtcggcttggtttttgaagctgatctctttaccacgaggcacatttctcactgggtgctgcaaggagtatgcctcaccctgaattctgattaacctttgggtgaagaaaactgcttaatgaattcggagcctggggttgtcagagtgatcgggtctgctgtcatttcttggggcctctcaagaggcaggagggggactgacactgatttttcatttgaaatcagccacttaaatctctttccatacaaattaacctgaatggttttgtttttaatactactttttaaaaggaatttatataatcaaaaagtaaatattggagagtattttaa

SEQ ID NO: 23080 - protein, 1296 aa, Homo sapiens
MCSVSASQVFEILLSRGYSENSFREDLKSLYLKLGIENKAMIFLFTDAHVAEEGFLELINNMLTSGIVPALFSEEEKESILSQIGQEALKQGMGPAKESVWQYFVNKSANNLHIVLGMSPVGDTLRTWCRNFPGMVNNTGIDWFMPWPPQALHAVAKSFLGYNPMIPAENIENVVKHVVLVHQSVDHYSQQFLQKLRRSNYVTPKNYLDFINTYSKLLDEKTQCNIAQCKRLDGGLDKLKEATIQLDELNQKLAEQKIVLAEKSAACEALLEEIAVNTAVAEEKKKLAEEKAMEIEEQNKVIAMEKAEAETTLAEVMPILEAAKLELQKLDKSDVTEIRSFAKPPKQVQTVCECILIMKGYKELNWKTAKGVMSDPNFLRSLMEIDFDSITQSQVKNIKGLLKTLNTTTEEMEAVSKAGLGMLKFVEAVMGYCDVFREIKPKREKVARLERNFYLTKRELERIQNELAAIQKELETLGAKYEAAILEKQKLQEEAEIMERRLIAADKLISGLGSENIRWLNDLDELMHRRVKLLGDCLLCAAFLSYEGAFTWEFRDEMVNRIWQNDILEREIPLSQPFRLESLLTDDVEISRWGSQGLPPDELSVQNGILTTRASRFPLCIDPQQQALNWIKRKEEKNNLRVASFNDPDFLKQLEMSIKYGTPFLFRDVDEYIDPVIDNVLEKNIKVSQGRQFIILGDKEVDYDSNFRLYLNTKLANPRYSPSVFGKAMVINYTVTLKGLEDQLLSVLVAYERRELEEQREHLIQETSENKNLLKDLEDSLLRELATSTGNMLDNVDLVHTLEETKSKATEVSEKLKLAEKTALDIDRLRDGYRPAARRGAILFFVLSEMALVNSMYQYSLIAFLEVFRLSLKKSLPDSILMKRLRNIMDTLTFSIYNHGCTGLFERHKLLFSFNMTIKIEQAEGRVPQEELDFFLKGNISLEKSKRKKPCAWLSDQGWEDIILLSEMFSDNFGQLPDDVENNQTVWQEWYDLDSLEQFPVPLGYDNNITPFQKLLILRCFRVDRVYRAVTDYVTVTMGEKYVQPPMISFEAIFEQSTPHSPIVFILSPGSDPATDLMKLAERSGFGGNRLKFLAMGQGQEKVALQLLETAVARGQWLMLQNCHLLVKWLKDLEKSLERITKPHPDFRLWLTTDPTKGFPIGILQKSLKVVTEPPNGLKLNMRATYFKISHEMLDQCPHPAFKPLVYVLAFFHAVVQERRKFGKIGWNVYYDFNESDFQVCMEILNTYLTKAFQQRDPRIPWGSLKYLIGEVGVTGDPSAGASGATELWPRAPIFL

SEQ ID NO: 23081 - DNA, 631 bp, Homo sapiens
tgctggaaggctttcgttaagtacgtgttcagaatttccatgcagaccttgaaagaagagaacacgctcagttatactgaaacccaccaagctgttcacattctgatacttttctgaaaaggctgctgggaacggtgcaaccctgctgtggttgaacccggaggaaagtcgggaggaagtgggccgcctaaggaagccatttccaaggagaagcagccactgtcacctggaagtcagactcattgaagtcatagtacacgttccagccaatcttcccaaacttccttctctcctgcaccacagcatgaaagaacgccagcacgtagaccacctcatcactcactgccatggcctgctggctacaagggcacatctgagctgcagccccacacgctccgcctggcttcgtaccccatgctagagctacattgtccagtgcgatggccgtgaggcacagcacttaaaatgtggctagccccaattgagatgtgctgtaagtgtgaattcacacaggattttgtagacttaataccagaaaaaagcatgtaaaatgtctcaatcatgttcatattgattatacattcaaatgataattttaatatattcatttaaataaaatgttattacaatt

SEQ ID NO: 23082 - protein, 38 aa, Homo sapiens
MKERQHVDHLITHCHGLLATRAHLSCSPTRSAWLRTPC

SEQ ID NO: 23083 - DNA, 692 bp, Homo sapiens
tggttttggaggaaatcgcctcaaattccttgcaatgggtcaaggtcaagaaaaggtggccctgcagctgctggagacggcggtggctcgggggcagtggctgatgctgcagaactgccacctcctggtcaagtggctgaaagatctggagaagtccctggagaggatcaccaagccccacccagacttccgcctgtggctcaccacggaccccaccaagggcttccccattgggattctgcagaagtccctaaaggttgtcaccgagccacccaatgggctgaaactcaacatgagggcaacttacttcaagatctctcacgaaatgctggaccagtgcccgcaccctgccttcaagccgctggtctacgtgctggcgttctttcatgctgtggtgcaggagagaaggaagtttgggaagattggctggaacgtgtactatgacttcaatgagtctgacttccaggtgacagtggctgcttctccttggaaatggcttccttaggcggcccacttcctcccgactttcctccgggttcaaccacagcagggttgcaccgttcccagcagccttttcagaaaagtatcagaatgtgaacagcttggtgggtttcagtataactgagcgtgttctcttctttcaaggtctgcatggaaattctgaacacgtacttaacgaaagccttccagca

SEQ ID NO: 23084 - protein, 156 aa, Homo sapiens
MGQGQEKVALQLLETAVARGQWLMLQNCHLLVKWLKDLEKSLERITKPHPDFRLWLTTDPTKGFPIGILQKSLKVVTEPPNGLKLNMRATYFKISHEMLDQCPHPAFKPLVYVLAFFHAVVQERRKFGKIGWNVYYDFNESDFQVTVAASPWKWLP

SEQ ID NO: 23085 - DNA, 4403 bp, Homo sapiens
cacctctggaaggaccggcatccacacacacatacagccgcgccttttccaggaagcagctatccgtagcttttatcacggctccaagactctccccagcccataaagcttaggcacccctgttttaaaaagtaggactgttggaaaccacctcagccataactacagtcagaagaggaagggccctggtgtcagagaggaggggctgggaccttcacctgcagcttgaggcgatgggcttcaatggggatgatcttcaggatcggcaggtccacaaccagcaccttgggtttgctcttgataagacatcctttttctatatcccagtcagcaccttccaggtacagtcctgagacaaagcatcctagggacacaaggcagagactggatacaactggagcatgcacagcctgccacggagtggctctatcaggcgcacacacagcgacacacaggccactggctggcctcctccccagcgcattggggacagcccaggcccttctccagcatttctgtcctgcccaccttccctctgtggaggagcagcccagacaggagaccctgtggccctgccccatggcccagagaaatgggtgtggggcggtggcctctcccccaggaatcctcattcctggggcatcaaggcccacggacttagaccaccctgggcccccaggctagaaagatgcatggtcccagagtcagaatgggcaccatggcaaccccagctaccctgtgagccgaagtggctggggagcaggaagtcgaagcctcacagagaaagtggtctccggggaggaggacccagcagatgtgcaaagagaggaacacactcctgtggccccagagagagtggtggcccggacacctgccacctcccctgccactgagacctggagagtccctgcatctttaccggattttgtagtccacttccttgttccggaagaagtggaatggctggaaagtatcaaaaatgaagtcccccaggtactcatccatgtagatggtcaggatgcggcgatcaaagctgtcgatggcccgtcctccatacatgacctgaaattagagggcctgagagccagccaggagctcagaacctactgtgtgcaccctgggggcccggggccagaggctcacccagggtcaagagactccagcagcctggctgctgcaaggcttgaacctgttgacttgcataacctttcgggccactgttcacacaattgatctgtggctttgctggcttcccaagggatagggcccaaagcagtaagaagccctcaggaagtgttgggagctcctgtgcagcaggcaaagtcccccaaacacatcaaacaaacagctgaagaagccagcagctgcttctgtctttggaattgatgtcactgcctgagccgtgtgcagaccaccggggatgcttcctgtgagctctgtatacagcaacagctgaggcaaggggctagaggatgccttgcctggatccccagccatggatccagctcagggaacctccatgtgaacagagctcacttaggacaaagaacaaccaggtgagagcagagagaattgtcacagaaacccaaggggaacacaggggcagaagaggctggttctgagggctcagaggaaaataggggcacgaggccacagctctgtagccccagaggcacctgcggaaggatccccggtcacccctacctctccaattaggtacttgaggctgccccacgggatccttgggtcccgttgctggaaggctttcgttaagtacgtgttcagaatttccatgcagaccttgaaagaagagaacacgctcagttatactgaaacccaccaagctgttcacattctgatacttttctgaaaaggctgctgggaacggtgcaaccctgctgtggttgaacccggaggaaagtcgggaggaagtgggccgcctaaggaagccatttccaaggagaagcagccactgtcacctggaagtcagactcattgaagtcatagtacacgttccagccaatcttcccaaacttccttctctcctgcaccacagcatgaaagaacgccagcacgtagaccagcggcttgaaggcagggtgcgggcactggtccagcatttcgtgagagatcttgaagtaagttgccctcatgttgagtttcagcccattgggtggctcggtgacaaccttcagaagagaagaaaacacacagtgatggagaccgcaggcccacaagcttggaagagtgtgcacaatgcaggcactgcgctttccttcctctctacggagccatctgtctgagacctccaatagctaaagtctcttgtccagggcccaggctgagaagttaaaggactagatgttctggctctcagggtcaagggtcaagagtctttgaccttcctctgaaccatgagatcctttactatatataaaatgaaagtaaagtcttccctccacctccccagagagagagagagagacagagaatgacaaaacctttccaaaagaatttcccggagaataaattaaatggggcatgtaaaccacgcgaaactcctgcagtcagcactagcgaactgcaggctgtgtgtgggggggggggccgtgaagtttatgaaaagtagcgtagatattgttagggacacatgcagaattggtagagataggcctgggagtcacaaacacccaacccaggacagcggctccctctaaagagagaggtgggattgagaagggtttcaaccgcaaggtttcacctgcagcctaaggtttatttctacacagacaaaggcacaccccggccccagagcagcatgcaggtgttctgagaagctgcgtgctggcatgttgatgtccatcctgaagccagacctttagggacttctgcagaatcccaatggggaagcccttggtggggtccgtggtgagccacaggcggaagtctgggtggggcttggtgatcctctccagggacttctccagatctttcagccacttgaccaggaggtggcagttctgcagcatcagccactgcccccgagccaccgccgtctccagcagctgcagggccacctgcgccgggggagagggaagaggagaggggttggcatccaaacccaaccccgtgctctccagagacccactccacacccacagaagggcgatggcagctccagcagaagccaaaagcaagccgaggatccaggagctacaggtggagccttcaaataaaccatctttgagaaaccccatgggccccgtgggtgcactgagctggtcacacccagcctggaagatgggtgagcattttgcactcatctgcctccctggccctggaagtcccagctcctcccacacagtcgctcctgtcccctgaggactcctgagcagggctgcaagagaccagctaaagcccaccaggaagtcgggactgtcctggccactgtaagatcttcagggccctaggcctggaaaacaatcaccatgtcccctcccaaatgtaattcaaagcacaaacaagctaaacacccaaatcaagccttgctttctgaaatggcttaaaacacatgagtgctggcgttacaatagcttatttcagtgttgtggttgagagagctggcccgccttgctggtgcccagggcttgcctcctgggccatccagcatgggtattgccatcctcatctcacccaggggctttcagcagtagaggggcttacccaaagcctcacagttcatagcaaagccaggactggcagtcagctccctctgaccccaacacgcatgcctgcaaccatcacacttactgacgcacagacttttcctgcaagctttgtcccacattgtactgaacttgtgtagcaagttctagcagggagcactgtgatgcagagaggcaagacctcagcaaagaaagctcactggctcagaaaggtaggaggatttgcaccacagttctgtcctgaatggtcctgggctcagcctctctccacccactcccttggccatgcaattggggccataataatcctgatccacaatgaggctgttcagggactaaggaaggtaaggactgtgtgtgaaagggctttgaaaacagcacagcctgagcatcgtgtctcatgcctgtgatcccaacactttgggaggccgaagtggaaggatcgcttgagcccaggagttcaagaccagccagggcaacatggtgacgtgtttgtatttttctctacagaaaataccaaaaaaattagccaggcatggtgacgcatgcctgtagtctcagctgctactggggaggctgaggcaggacgatcacttcacaatcaggaggtcgaggctgcagtgagctatgttcgcaccactgcactccagcctgggtgacagagtgagaccctgtctc

SEQ ID NO: 23086 - protein, 38 aa, Homo sapiens
MCKERNTLLWPQREWWPGHLPPPLPLRPGESLHLYRIL

SEQ ID NO: 23087 - DNA, 3683 bp, Homo sapiens
ctgctttgtgagggaagggcaaggtcagaaggtgctcaccctttccacagcaagcacgcggcacacgtgtgccacacgctgaacctgccttggttgtagctggctcctttgttaaggtcagcgccccccaagaccacgtgctgtgcagacagtgttgggatctcgggaactgtggggttccacttagaaactagtgtctggcccagcagcctacacaggagagtttgcggttacagcacagagacggtttcggggacagaaacatcctttctcactcctgccggaatgctgctcacggctccactgaggaaagccctgcttgatggaaactcaactctgccatcatctgcagcccagtgcgacggcagtcaaaggccagggagagctatgctttgttttatagaaacatgcctagaaatggtcgccttaagttatttaacccactccctattgtcgggttttgagtttgtttctagtcttttccaactgcaaactgcactgtagtgaccattctcacagctacctcttttcacacaaaagtaataatttccctttggtagatttctaaaaataaattgctagttcagagagatgaccaattccaaggcttctgatcagctctgcccaatcactgcccgtggtgaggtgccccccgagactgtacttgccgtgtcctggggccactgccctctcctgccagtttttgtccccaactgaaagggcctcttgtttctctttttcttggtcctttttaggatgtatcattgttcattccccttcgtgagctccgtcgtgttttatttccttctctgcgttctcaggttgccctcggagtggagtctgtggctttccaccggagcagcgcccaggaagtgttttcgtgtgatgaaagtgtatgtctgaagttcgttatgaactcgtcctagctccagagctagtgtgcatgcatgtcactggtcgtacagataattgatgagcaattggtgtcgtctgaagcagtgacagcctgggtgtgtcagtgtctccaaaacggttccactgtggcatcctacaaatgggctgcgtcctgggagccattgagaagttgtacctcctttacggagggttctctggaatagcaaattagggaaaatgcattctgaggttctgtatttacaataataatttataagcaaataactcacatttcatcctcagtatttttcagtgctgtacaagcgtcttgaattactctggtagcttttccagaaagacccatgacttcaccacatttctcgagttacgatgaaggtagagtctggggccctgagtgagcatcagatgctggaagctggggctgggaggggccaagcattggggacagactccagacacctgcaccaccccctggccccatgagatacgttctcagaccttcccaagaaggatctgtggctcctctcagtgctgtgaagtgcagggggcttccctctggaattcagcccatctctccctcctactttggctggctccagatgccatttagaggaaatgtttggcccatttcccaggtgccagcttttcccatgaggaagctgtcagtgcttcctggtcagggaaatcttttgggcgtgatttggtcagtcacagtctgttggggtgaggtggtgcgtggagaggacaggatttggaaccaagggtccctggattagaatccctgctccatacctcactggctgtgtgaccccaggctcgcgaatctgcctctcttgatctgtttcctcatgagtaaagggaaatgactttgtactctggagtgggcctcactcattcatgtgccaggcatcgtgctaggtgctagggcacaccccaaggcgttcgggaagcagaggctgccgtccctggcctggggcctccctgcagtgatgggaatgtagccctggtgcccccacaccctgcccttcaggagccgtggtttccttctgctctctcctgggaggcgcacacccctctgcacccagagccaaggagggcaggcagccctgggaccctcttcaggcaccgcagccagggtctgtgttacccacaggtcctctggatgtcagcatggcagccacaaacctggagaaccagctgcacagcgcacagaagaacctcctgttccttcagcgggagcatgccagcacgctcaaggggctgcactccgagatcaggcggctgcagcagcactgcacagatttaacatatgagctgacagtcaaaagttcggaacagacaggagacgggacttctaaaagcagtgaattaaagaaaagatgtgaagagctggaagcccaactgaaagtgaaagagaacgaaaatgctgagttgttgaaagaactggagcagaaaaacgcgatgatcacagtgctggagaacaccatcaaggagcgagagaagaagtacctggaggagctgaaggccaagagtcacaagctgaccctgctgtctagcgagctggagcagcgggccagcaccatcgcctacctgacctcccagctgcacgccgccaagaagaagctcatgagctccagcgggacctcagatgccagcccgtcagggagccccgtgctggccagctacaagccagcgccccccaaagacaagctacccgaaacgcctcgccgccgcatgaaaaagagcctctcagcccccttgcacccggaatttgaagaggtctacagattcggggcagagagcaggaaactccttttgcgggaaccagtggatgctatgcccgaccccaccccatttctgctggctagggagtccgccgaggtccacctcatcaaagagaggcccctcgtcatcccccccatcgcctccgaccgaagcggcgagcagcacagcccggcccgcgaaaagccgcacaaggcccacgtcggggtggcacatcggatccaccacgccaccccgccgcaggcccagcccgaggtgaagaccctggcggtcgaccaggtgaacggaggcaaggtggtgaggaagcactcagggacggacagaactgtgtgaagcccgccgtgccccaccccgcgctgtccatgcactgtgagcaccactgggaaatctcagccacaccttttctgtttaatcccatgcatgccaaacacttttcacacctaccgacccattctccttctgcttctcttgccctcttcttcacaccaaaatatgatcgtgtccctgccgcagaatatgtatttcctaattgctgtggccaaacgcctgtgtgccgaatcgcttgcttctgatcccgctccgtgtaacctaagtgcgctgcaggcaaagcccaggccacggctgcgtcactactgatgttcacgatgccacacagtcacacacctaattcattctcaagtcggagcaacacataccaaccttgaccttatcctcaagctccagggcagcctggccgagcagcccctgctccctcctggagacccttgtcacctcccgagctcctcctggagacccctgtcacctcctgaccaacctttcccagggcggcaccgatcaccgagcagccgtgcgtgtatctcaaggaactaaataagatgacgctactcctcatagcaccacaacctgaatgtgtgttcatatttttttgttagttttatccaaaatgtttaagatcccaacaaactttattttctaaacctgccttc

SEQ ID NO: 23088 - protein, 314 aa, Homo sapiens
MAATNLENQLHSAQKNLLFLQREHASTLKGLHSEIRRLQQHCTDLTYELTVKSSEQTGDGTSKSSELKKRCEELEAQLKVKENENAELLKELEQKNAMITVLENTIKEREKKYLEELKAKSHKLTLLSSELEQRASTIAYLTSQLHAAKKKLMSSSGTSDASPSGSPVLASYKPAPPKDKLPETPRRRMKKSLSAPLHPEFEEVYRFGAESRKLLLREPVDAMPDPTPFLLARESAEVHLIKERPLVIPPIASDRSGEQHSPAREKPHKAHVGVAHRIHHATPPQAQPEVKTLAVDQVNGGKVVRKHSGTDRTV

SEQ ID NO: 23089 - DNA, 1797 bp, Homo sapiens
gatttgcctgtgattcgtgaaacggagcagaatgcacaaacgcagcagagctccaggcttggctactgggctgccgtctgctacggcgatatttttcagtgctgtacaagcgtcttgaattactctggtagcttttccagaaagacccatgacttcaccacatttctcgagttacgatgaaggtcctctggatgtcagcatggcagccacaaacctggagaaccagctgcacagcgcacagaagaacctcctgttccttcagcgggagcatgccagcacgctcaaggggctgcactccgagatcaggcggctgcagcagcactgcacagatttaacatatgagctgacagtcaaaagttcggaacagacaggagacgggacttctaaaagcagtgaattaaagaaaagatgtgaagagctggaagcccaactgaaagtgaaagagaacgaaaatgctgagttgttgaaagaactggagcagaaaaacgcgatgatcacagtgctggagaacaccatcaaggagcgagagaagaagtacctggaggagctgaaggccaagagtcacaagctgaccctgctgtctagcgagctggagcagcgggccagcaccatcgcctacctgacctcccagctgcacgccgccaagaagaagctcatgagctccagcgggacctcagatgccagcccgtcagggagccccgtgctggccagctacaagccagcgccccccaaagacaagctacccgaaacgcctcgccgccgcatgaaaaagagcctctcagcccccttgcacccggaatttgaagaggtctacagattcggggcagagagcaggaaactccttttgcgggaaccagtggatgctatgcccgaccccaccccatttctgctggctagggagtccgccgaggtccacctcatcaaagagaggcccctcgtcatcccccccatcgcctccgaccgaagcggcgagcagcacagcccggcccgcgaaaagccgcacaaggcccacgtcggggtggcacatcggatccaccacgccaccccgccgcaggcccagcccgaggtgaagaccctggcggtcgaccaggtgaacggaggcaaggtggtgaggaagcactcagggacggacagaactgtgtgaagcccgccgtgccccaccccgcgctgtccatgcactgtgagcaccactgggaaatctcagccacaccttttctgtttaatcccatgcatgccaaacacttttcacacctaccgacccattctccttctgcttctcttgccctcttcttcacaccaaaatatgatcgtgtccctgccgcagaatatgtatttcctaattgctgtggccaaacgcctgtgtgccgaatcgcttgcttctgatcccgctccgtgtaacctaagtgcgctgcaggcaaagcccaggccacggctgcgtcactactgatgttcacgatgccacacagtcacacacctaattcattctcaagtcggagcaacacataccaaccttgaccttatcctcaagctccagggcagcctggccgagcagcccctgctccctcctggagacccttgtcacctcccgagctcctcctggagacccctgtcacctcctgaccaacctttcccagggcggcaccgatcaccgagcagccgtgcgtgtatctcaaggaactaaataagatgacgctactcctcatagcaccacaacctgaatgtgtgttcatatttttttgttagttttatccaaaatgtttaagatcccaacaaactttattttctaaacctgccttc

SEQ ID NO: 23090 - protein, 331 aa, Homo sapiens; identical to SEQ ID NO: 3055

SEQ ID NO: 23091 - DNA, 2034 bp, Homo sapiens
caggagcgccccggggcctagcccggctttgtctgggatgctgtggggaggaggccgtctgaatccacatcgcctttttaaatgcttgttaccacccggggaaccttagagaccctccctgacaagttgtatcgcctcccgtcctggtagcctttccccaacagaatcctggatttgagtctgtcctttgaaagcatctctgctagagttcccacttccaaacccctttcagctcttcgggattcagcctccaggttgccctcggagtggagtctgtggctttccaccggagcagcgcccaggaagtgttttcgtgtgatgaaagttatttttcagtgctgtacaagcgtcttgaattactctggtagcttttccagaaagacccatgacttcaccacatttctcgagttacgatgaaggtcctctggatgtcagcatggcagccacaaacctggagaaccagctgcacagcgcacagaagaacctcctgttccttcagcgggagcatgccagcacgctcaaggggctgcactccgagatcaggcggctgcagcagcactgcacagatttaacatatgagctgacagtcaaaagttcggaacagacaggagacgggacttctaaaagcagtgaattaaagaaaagatgtgaagagctggaagcccaactgaaagtgaaagagaacgaaaatgctgagttgttgaaagaactggagcagaaaaacgcgatgatcacagtgctggagaacaccatcaaggagcgagagaagaagtacctggaggagctgaaggccaagagtcacaagctgaccctgctgtctagcgagctggagcagcgggccagcaccatcgcctacctgacctcccagctgcacgccgccaagaagaagctcatgagctccagcgggacctcagatgccagcccgtcagggagccccgtgctggccagctacaagccagcgccccccaaagacaagctacccgaaacgcctcgccgccgcatgaaaaagagcctctcagcccccttgcacccggaatttgaagaggtctacagattcggggcagagagcaggaaactccttttgcgggaaccagtggatgctatgcccgaccccaccccatttctgctggctagggagtccgccgaggtccacctcatcaaagagaggcccctcgtcatcccccccatcgcctccgaccgaagcggcgagcagcacagcccggcccgcgaaaagccgcacaaggcccacgtcggggtggcacatcggatccaccacgccaccccgccgcaggcccagcccgaggtgaagaccctggcggtcgaccaggtgaacggaggcaaggtggtgaggaagcactcagggacggacagaactgtgtgaagcccgccgtgccccaccccgcgctgtccatgcactgtgagcaccactgggaaatctcagccacaccttttctgtttaatcccatgcatgccaaacacttttcacacctaccgacccattctccttctgcttctcttgccctcttcttcacaccaaaatatgatcgtgtccctgccgcagaatatgtatttcctaattgctgtggccaaacgcctgtgtgccgaatcgcttgcttctgatcccgctccgtgtaacctaagtgcgctgcaggcaaagcccaggccacggctgcgtcactactgatgttcacgatgccacacagtcacacacctaattcattctcaagtcggagcaacacataccaaccttgaccttatcctcaagctccagggcagcctggccgagcagcccctgctccctcctggagacccttgtcacctcccgagctcctcctggagacccctgtcacctcctgaccaacctttcccagggcggcaccgatcaccgagcagccgtgcgtgtatctcaaggaactaaataagatgacgctactcctcatagcaccacaacctgaatgtgtgttcatatttttttgttagttttatccaaaatgtttaagatcccaacaaactttattttctaaacctgccttc

SEQ ID NO: 23092 - protein, 331 aa, Homo sapiens; identical to SEQ ID NO: 3055

SEQ ID NO: 23093 - DNA, 1821 bp, Homo sapiens
ctggggtgggagcgggcgagatgcgccgggcgggcggtgcccactgacctccctcggcggcccggcccgggcagcgcccgagcccaggcagccccgcccgccgcgccccgcccagcccatgggccacgggcccccaccgccgcccgccgggaggaccgagcctaagagggcagccgcctgaaggaacgcgacggcggcgcccgcaggtcctctggatgtcagcatggcagccacaaacctggagaaccagctgcacagcgcacagaagaacctcctgttccttcagcgggagcatgccagcacgctcaaggggctgcactccgagatcaggcggctgcagcagcactgcacagatttaacatatgagctgacagtcaaaagttcggaacagacaggagacgggacttctaaaagcagtgaattaaagaaaagatgtgaagagctggaagcccaactgaaagtgaaagagaacgaaaatgctgagttgttgaaagaactggagcagaaaaacgcgatgatcacagtgctggagaacaccatcaaggagcgagagaagaagtacctggaggagctgaaggccaagagtcacaagctgaccctgctgtctagcgagctggagcagcgggccagcaccatcgcctacctgacctcccagctgcacgccgccaagaagaagctcatgagctccagcgggacctcagatgccagcccgtcagggagccccgtgctggccagctacaagccagcgccccccaaagacaagctacccgaaacgcctcgccgccgcatgaaaaagagcctctcagcccccttgcacccggaatttgaagaggtctacagattcggggcagagagcaggaaactccttttgcgggaaccagtggatgctatgcccgaccccaccccatttctgctggctagggagtccgccgaggtccacctcatcaaagagaggcccctcgtcatcccccccatcgcctccgaccgaagcggcgagcagcacagcccggcccgcgaaaagccgcacaaggcccacgtcggggtggcacatcggatccaccacgccaccccgccgcaggcccagcccgaggtgaagaccctggcggtcgaccaggtgaacggaggcaaggtggtgaggaagcactcagggacggacagaactgtgtgaagcccgccgtgccccaccccgcgctgtccatgcactgtgagcaccactgggaaatctcagccacaccttttctgtttaatcccatgcatgccaaacacttttcacacctaccgacccattctccttctgcttctcttgccctcttcttcacaccaaaatatgatcgtgtccctgccgcagaatatgtatttcctaattgctgtggccaaacgcctgtgtgccgaatcgcttgcttctgatcccgctccgtgtaacctaagtgcgctgcaggcaaagcccaggccacggctgcgtcactactgatgttcacgatgccacacagtcacacacctaattcattctcaagtcggagcaacacataccaaccttgaccttatcctcaagctccagggcagcctggccgagcagcccctgctccctcctggagacccttgtcacctcccgagctcctcctggagacccctgtcacctcctgaccaacctttcccagggcggcaccgatcaccgagcagccgtgcgtgtatctcaaggaactaaataagatgacgctactcctcatagcaccacaacctgaatgtgtgttcatatttttttgttagttttatccaaaatgtttaagatcccaacaaactttattttctaaacctgccttc

SEQ ID NO: 23094 - protein, 314 aa, Homo sapiens; identical to SEQ ID NO: 23088

SEQ ID NO: 23095 - DNA, 1900 bp, Homo sapiens
cgccgcgccggcgcctagcccgccgggtcagcgcggccaggcctcgccgccggccccgctcccagggtgcaccgcggctagcgctggggtgggagcgggcgagatgcgccgggcgggcggtgcccactgacctccctcggcggcccggcccgggcagcgcccgagcccaggcagccccgcccgccgcgcccctatttttcagtgctgtacaagcgtcttgaattactctggtagcttttccagaaagacccatgacttcaccacatttctcgagttacgatgaaggtcctctggatgtcagcatggcagccacaaacctggagaaccagctgcacagcgcacagaagaacctcctgttccttcagcgggagcatgccagcacgctcaaggggctgcactccgagatcaggcggctgcagcagcactgcacagatttaacatatgagctgacagtcaaaagttcggaacagacaggagacgggacttctaaaagcagtgaattaaagaaaagatgtgaagagctggaagcccaactgaaagtgaaagagaacgaaaatgctgagttgttgaaagaactggagcagaaaaacgcgatgatcacagtgctggagaacaccatcaaggagcgagagaagaagtacctggaggagctgaaggccaagagtcacaagctgaccctgctgtctagcgagctggagcagcgggccagcaccatcgcctacctgacctcccagctgcacgccgccaagaagaagctcatgagctccagcgggacctcagatgccagcccgtcagggagccccgtgctggccagctacaagccagcgccccccaaagacaagctacccgaaacgcctcgccgccgcatgaaaaagagcctctcagcccccttgcacccggaatttgaagaggtctacagattcggggcagagagcaggaaactccttttgcgggaaccagtggatgctatgcccgaccccaccccatttctgctggctagggagtccgccgaggtccacctcatcaaagagaggcccctcgtcatcccccccatcgcctccgaccgaagcggcgagcagcacagcccggcccgcgaaaagccgcacaaggcccacgtcggggtggcacatcggatccaccacgccaccccgccgcaggcccagcccgaggtgaagaccctggcggtcgaccaggtgaacggaggcaaggtggtgaggaagcactcagggacggacagaactgtgtgaagcccgccgtgccccaccccgcgctgtccatgcactgtgagcaccactgggaaatctcagccacaccttttctgtttaatcccatgcatgccaaacacttttcacacctaccgacccattctccttctgcttctcttgccctcttcttcacaccaaaatatgatcgtgtccctgccgcagaatatgtatttcctaattgctgtggccaaacgcctgtgtgccgaatcgcttgcttctgatcccgctccgtgtaacctaagtgcgctgcaggcaaagcccaggccacggctgcgtcactactgatgttcacgatgccacacagtcacacacctaattcattctcaagtcggagcaacacataccaaccttgaccttatcctcaagctccagggcagcctggccgagcagcccctgctccctcctggagacccttgtcacctcccgagctcctcctggagacccctgtcacctcctgaccaacctttcccagggcggcaccgatcaccgagcagccgtgcgtgtatctcaaggaactaaataagatgacgctactcctcatagcaccacaacctgaatgtgtgttcatatttttttgttagttttatccaaaatgtttaagatcccaacaaactttattttctaaacctgccttc

SEQ ID NO: 23096 - protein, 331 aa, Homo sapiens; identical to SEQ ID NO: 3055

SEQ ID NO: 23097 - DNA, 2014 bp, Homo sapiens
ggcagacacaggcccgccgccgcgccggcgcctagcccgccgggtcagcgcggccaggcctcgccgccggccccgctcccagggtgcaccgcggctagcgctggggtgggagcgggcgagatgcgccgggcgggcggtgcccactgacctccctcggcggcccggcccgggcagcgcccgagcccaggcagccccgcccgccgcgccccgcccagcccatgggccacgggcccccaccgccgcccgccgggaggaccgagcctaagagggcagccgcctgaaggaacgcgacggcggcgcccgcagtatttttcagtgctgtacaagcgtcttgaattactctggtagcttttccagaaagacccatgacttcaccacatttctcgagttacgatgaaggtcctctggatgtcagcatggcagccacaaacctggagaaccagctgcacagcgcacagaagaacctcctgttccttcagcgggagcatgccagcacgctcaaggggctgcactccgagatcaggcggctgcagcagcactgcacagatttaacatatgagctgacagtcaaaagttcggaacagacaggagacgggacttctaaaagcagtgaattaaagaaaagatgtgaagagctggaagcccaactgaaagtgaaagagaacgaaaatgctgagttgttgaaagaactggagcagaaaaacgcgatgatcacagtgctggagaacaccatcaaggagcgagagaagaagtacctggaggagctgaaggccaagagtcacaagctgaccctgctgtctagcgagctggagcagcgggccagcaccatcgcctacctgacctcccagctgcacgccgccaagaagaagctcatgagctccagcgggacctcagatgccagcccgtcagggagccccgtgctggccagctacaagccagcgccccccaaagacaagctacccgaaacgcctcgccgccgcatgaaaaagagcctctcagcccccttgcacccggaatttgaagaggtctacagattcggggcagagagcaggaaactccttttgcgggaaccagtggatgctatgcccgaccccaccccatttctgctggctagggagtccgccgaggtccacctcatcaaagagaggcccctcgtcatcccccccatcgcctccgaccgaagcggcgagcagcacagcccggcccgcgaaaagccgcacaaggcccacgtcggggtggcacatcggatccaccacgccaccccgccgcaggcccagcccgaggtgaagaccctggcggtcgaccaggtgaacggaggcaaggtggtgaggaagcactcagggacggacagaactgtgtgaagcccgccgtgccccaccccgcgctgtccatgcactgtgagcaccactgggaaatctcagccacaccttttctgtttaatcccatgcatgccaaacacttttcacacctaccgacccattctccttctgcttctcttgccctcttcttcacaccaaaatatgatcgtgtccctgccgcagaatatgtatttcctaattgctgtggccaaacgcctgtgtgccgaatcgcttgcttctgatcccgctccgtgtaacctaagtgcgctgcaggcaaagcccaggccacggctgcgtcactactgatgttcacgatgccacacagtcacacacctaattcattctcaagtcggagcaacacataccaaccttgaccttatcctcaagctccagggcagcctggccgagcagcccctgctccctcctggagacccttgtcacctcccgagctcctcctggagacccctgtcacctcctgaccaacctttcccagggcggcaccgatcaccgagcagccgtgcgtgtatctcaaggaactaaataagatgacgctactcctcatagcaccacaacctgaatgtgtgttcatatttttttgttagttttatccaaaatgtttaagatcccaacaaactttattttctaaacctgccttc

SEQ ID NO: 23098 - protein, 331 aa, Homo sapiens; identical to SEQ ID NO: 3055

SEQ ID NO: 23099 - DNA, 2016 bp, Homo sapiens
gtagccccgcctcgccaagtgaatatcggcccgccgcccccgcccagcccggcagacacaggcccgccgccgcgccggcgcctagcccgccgggtcagcgcggccaggcctcgccgccggccccgctcccagggtgcaccgcggctagcgctggggtgggagcgggcgagatgcgccgggcgggcggtgcccactgacctccctcggcggcccggcccgggcagcgcccgagcccaggcagccccgcccgccgcgccccgcccagcccatgggccacgggcccccaccgccgcccgccgggaggaccgagcctaagagggcagccgcctgaaggaacgcgacggcggcgcccgcagtatttttcagtgctgtacaagcgtcttgaattactctggtagcttttccagaaagacccatgacttcaccacatttctcgagttacgatgaaggtcctctggatgtcagcatggcagccacaaacctggagaaccagctgcacagcgcacagaagaacctcctgttccttcagcgggagcatgccagcacgctcaaggggctgcactccgagatcaggcggctgcagcagcactgcacagatttaacatatgagctgacagtcaaaagttcggaacagacaggagacgggacttctaaaagcagtgaattaaagaaaagatgtgaagagctggaagcccaactgaaagtgaaagagaacgaaaatgctgagttgttgaaagaactggagcagaaaaacgcgatgatcacagtgctggagaacaccatcaaggagcgagagaagaagtacctggaggagctgaaggccaagagtcacaagctgaccctgctgtctagcgagctggagcagcgggccagcaccatcgcctacctgacctcagatgccagcccgtcagggagccccgtgctggccagctacaagccagcgccccccaaagacaagctacccgaaacgcctcgccgccgcatgaaaaagagcctctcagcccccttgcacccggaatttgaagaggtctacagattcggggcagagagcaggaaactccttttgcgggaaccagtggatgctatgcccgaccccaccccatttctgctggctagggagtccgccgaggtccacctcatcaaagagaggcccctcgtcatcccccccatcgcctccgaccgaagcggcgagcagcacagcccggcccgcgaaaagccgcacaaggcccacgtcggggtggcacatcggatccaccacgccaccccgccgcaggcccagcccgaggtgaagaccctggcggtcgaccaggtgaacggaggcaaggtggtgaggaagcactcagggacggacagaactgtgtgaagcccgccgtgccccaccccgcgctgtccatgcactgtgagcaccactgggaaatctcagccacaccttttctgtttaatcccatgcatgccaaacacttttcacacctaccgacccattctccttctgcttctcttgccctcttcttcacaccaaaatatgatcgtgtccctgccgcagaatatgtatttcctaattgctgtggccaaacgcctgtgtgccgaatcgcttgcttctgatcccgctccgtgtaacctaagtgcgctgcaggcaaagcccaggccacggctgcgtcactactgatgttcacgatgccacacagtcacacacctaattcattctcaagtcggagcaacacataccaaccttgaccttatcctcaagctccagggcagcctggccgagcagcccctgctccctcctggagacccttgtcacctcccgagctcctcctggagacccctgtcacctcctgaccaacctttcccagggcggcaccgatcaccgagcagccgtgcgtgtatctcaaggaactaaataagatgacgctactcctcatagcaccacaacctgaatgtgtgttcatatttttttgttagttttatccaaaatgtttaagatcccaacaaactttattttctaaacctgccttc

SEQ ID NO: 23100 - protein, 315 aa, Homo sapiens
MTSPHFSSYDEGPLDVSMAATNLENQLHSAQKNLLFLQREHASTLKGLHSEIRRLQQHCTDLTYELTVKSSEQTGDGTSKSSELKKRCEELEAQLKVKENENAELLKELEQKNAMITVLENTIKEREKKYLEELKAKSHKLTLLSSELEQRASTIAYLTSDASPSGSPVLASYKPAPPKDKLPETPRRRMKKSLSAPLHPEFEEVYRFGAESRKLLLREPVDAMPDPTPFLLARESAEVHLIKERPLVIPPIASDRSGEQHSPAREKPHKAHVGVAHRIHHATPPQAQPEVKTLAVDQVNGGKVVRKHSGTDRTV

SEQ ID NO: 23101 - DNA, 543 bp, Homo sapiens
cagcacagagacggtttcggggacagaaacatcctttctcactcctgccggaatgctgctcacggctccactgaggaaagccctgcttgatggaaactcaactctgccatcatctgcagcccagtgcgacggcagtcaaaggccagggagagctatgctttgttttatagaaacatgcctagaaatggtcgccttaagttatttaacccactccctattgtcgggttttgagtttgtttctagtcttttccaactgcaaactgcactgtagtgaccattctcacagctacctcttttcacacaaaagtaataatttccctttggtagatttctaaaaataaattgctagttcagagagatgaccaattccaaggcttctgatcagctctgcccgatcaccgagcagccgtgcgtgtatctcaaggaactaaataagatgacgctactcctcatagcaccacaacctgaatgtgtgttcatatttttttgttagttttatccaaaatgtttaagatcccaacaaactttattttctaaacctgc

SEQ ID NO: 23102 - protein, 44 aa, Homo sapiens
MTNSKASDQLCPITEQPCVYLKELNKMTLLLIAPQPECVFIFFC

SEQ ID NO: 23103 - DNA, 550 bp, Homo sapiens
gcaccaggagcgccccggggcctagcccggctttgtctgggatgctgtggggaggaggccgtctgaatccacatcgcctttttaaatgcttgttaccacccggggaaccttagagaccctccctgacaagttgtatcgcctcccgtcctggtagccttatttttcagtgctgtacaagcgtcttgaattactctggtagcttttccagaaagacccatgacttcaccacatttctcgagttacgatgaaggtcctctggatgtcagcatggcagccacaaacctggagaaccagctgcacagcgcacagaagaacctccttcctggagacccttgtcacctcccgagctcctcctggagacccctgtcacctcctgaccaacctttcccagggcggcaccgatcaccgagcagccgtgcgtgtatctcaaggaactaaataagatgacgctactcctcatagcaccacaacctgaatgtgtgttcatatttttttgttagttttatccaaaatgtttaagatcccaacaaactttattttctaaacctgc

SEQ ID NO: 23104 - protein, 73 aa, Homo sapiens
MTSPHFSSYDEGPLDVSMAATNLENQLHSAQKNLLPGDPCHLPSSSWRPLSPPDQPFPGRHRSPSSRACISRN

SEQ ID NO: 23105 - DNA, 452 bp, Homo sapiens
gcgctggggtgggagcgggcgagatgcgccgggcgggcggtgcccactgacctccctcggcggcccggcccgggcagcgcccgagcccaggcagccccgcccgccgcgccccgcccagcccatgggccacgggcccccaccgccgcccgccgggaggaccgagcctaagagggcagccgcctgaaggaacgcgacggcggcgcccgcagcacaggaagtttgcggagaggacgcttgaactgaataatccacgctggagctctcagatcactagatggaaagtcagaggtcaaacacccttacatggacgtgctgaagccatcaaaaaacaaaacagaaaaaaacctctaggaaatgatctaggaaaatggtaaatgccctcttaaaaatataagtttatcttttaaaaatattggtacttaggctgtgttattccaaataaataaatgttc

SEQ ID NO: 23106 - protein, 107 aa, Homo sapiens
PPSAARPGQRPSPGSPARRAPPSPWATGPHRRPPGGPSLRGQPPEGTRRRRPQHRKFAERTLELNNPRWSSQITRWKVRGQTPLHGRAEAIKKQNRKKPLGNDLGKW

SEQ ID NO: 23107 - DNA, 5125 bp, Homo sapiens
ggaggcgggcggtgggggcgcgggccgggtggccgcgcatgcgtgcggcccccgctcccccggggcttccccggcctcgtgcgtgcgcacgcgcgctgtcccccggaggcgtctgggtgtgcggagcgcgcgcgcgcgcggctcggaggcgcacctgtgaggtgtccctgaggagagggaggtgggtgcgcggcgcccgcggcctggggcgctgactcccctcacttggagtgagttctcggcggccgggctgcagtctttctttctttcccggagggaggcgggggccgggggccagggagcgggctgggggtgggaaggaggtggagtggcttaaagaaaagaaaaacaacccatcccggaggatgggcctcgggatggcggggaaggtcagagcggctccgcgcagcctggcgggtcccgggctgagaagccgcccctcgggcctcgggcggtcggccgcgggcccgcagtgcgggggagcggggccggggggcgcagatggcggccggtgcgagcgagggctgggcagcgggcagggcgaggccgggcgaggcccctcgggagccggactcccgagccaggctccattgttgttggagccgagggaagggggagcgctgccgccctcgtcgcccgtggagccgcgtcttggagcccttccaggcgggtcccgggagaggcggtcatggccgcgccaggggaccggggagccgggcggctgcggaggagccggctgcatggggtgctgtgtgtttttcagggcgccctgcgtccggcagaggaggcgagcatcccgctcaggtgatgaggaacccctcgcgcacccagcgcagaaggctgctgccgccggacgcctccattgtttgaccacaacaagggccggattctcacccagcaggatcctaaggcctttgtagtccttcagccactgtgggccctgcctctgcctgttcttctggaatgtcttgggggttttgatcctgtcactgtgagtcttgctctgtcgcccaggctggagtgcagtggcacgatctcagctcattgcaacctctgtctcccaggttcaagcgattctcctgcctcagcctctggagtagctgggattacagatgggaccacctagttgcaggaaaacaagctcagggctcccactgattctacattatgacctgcaaatccaagagacacatctttggaagataagagagcttcttcaagaccaaaaaaggagacggcatgatacccatgtagggaattccccaaagcagggcttgccatacctggaccccgaggagcctgcttgctggaaaggctttcctgtctgatgtgcaggaggcagaatgccaaactgactcttcaaggggcaactgcaggggctcgagaccagccagcagtatctcatccttcgatacaggggatatactgtacagtcctttttctagaagtgagacatacaagattactctacaagaggaagattccaggggctcaaaaacgcaaaggtttgcactttgagagccccttggaatgttgacaactcaggatctaaaacaaagttctgtgttaatgagttacagaattcacgtggaagtcaatgtcactttataatcgataataatactgagtgaggaacactatgcaggaagaaaccttccgtagaaagacaggcagggaaaagcttaggctgaccttaaacttacctaatagagcaagcctgagatagactgccaaaatggccaaataagagactctatgaaataacagtcttgtaactgtagtaatcataaggaaattttctccttgaaatcacgataccaaataggaaaaatgatctacaagtgccccatgtgtagggaatttttctctgagagagcagatctttttatgcatcagaaaattcacacagctgagaagccccataaatgtgacaagtgtgataagggtttctttcatatatcagaacttcatattcattggagagaccatacaggagagaaggtctataaatgtgatgattgtggtaaggattttagcactacaacaaaacttaatagacataagaaaatccacacagtggagaagccctataaatgttacgagtgtggcaaagccttcaattggagctcccatcttcaaattcatatgagagttcatacaggtgagaaaccgtatgtctgtagtgagtgtggaaggggctttagtaatagttcaaacctttgcatgcatcagagagtccacaccggagagaagccctttaaatgtgaagagtgtgggaaggccttcaggcacacctccagcctctgcatgcatcaaagagtccacacaggagagaaaccctataaatgttatgagtgtgggaaggcgttcagtcagagttcgagcctctgcatccaccagagagtccacactggagagaaaccctatagatgttgtggatgtgggaaggccttcagtcagagttcgagcctgtgcatccaccagagagtccacacaggagagaaacctttcaaatgtgatgagtgcggaaaggccttcagtcagagtacgagcctctgcatccaccagagagtccacacaaaggagagaaaccatctcaaaatatcagttatataaaacgttttgctaagagtttaaaatcttaaaacccataagtgccactaggaaggaaaccctgtatatacctacattgacccaagaaatatttacgcaatccctagcagaacattgtttctgaggaggcatatgtgagattgatttgttggttcatgccaagtgtgttccacaggttgactttgaatgtggacctctgagcatccacgcaggatggctctcaggtcccagtcacagacgtcgcttcctgggattccagcacgatgcctccatagttgaaagactacacaaaaagccacaatcattgcccggcctcctgagtcaccttctatctatactttgcttaaaagctatcccagatactcccccttgaggagctcatgcccttccttcctctttattcgagcatactggcaatgcattggaaaacagacagctcccactaagatcacgttctggtatttctgaggttaacacttgatttagcccctacatatctttccatatatcctattatttctgaatatatgtcctcaaaatccccataaatatccatcccttcctagatggcattaactttcattttagattttaggtgactcataattcccattcacttagcctatcagaaaagtcattggcagacatatatgtccttgaaccttttttatttgtgtggattctgctcatcactgtctctgttagacttattttgtagtggctgcatcacatatttttcacttgaatttttttggaaatagctgaatgtaaatagcagggaggaagaagcaagcaaagtgagagcttttcttcatccagaattgccctctgggctcctttggtaacagatggagctccttcctagctagggagaccttatgagaagtggatggtaggaggagtcactaatgtttcaatctctatttctgtaatcttgggcaataatgcataggagttcttgataccccttcattgattactgtgtatcagttctttgttaggcatgaacgtctttattaatccatcattcttttcttcattcaacaaatatgtattgaacacctcctatatgccaggcactgtgctaggtgctgggaataccactgatgagacagacaaggtccctactcttgtggagtttacttctggtggaggagacagatgataagtaaacaaataaataatgtagtttgagatagtgattaagtgctatgaagaaaataaactagggtgatgattttagtggtggggtggggtgggggtggggtgacattagctagtggtcagggaggcctttccgcggtgggatgttgagctgaggccggaggagaagtagcagtcgctggcagagcacacaggctgctctgggggatgagctggtgcgtttaaggaacaggccagcactggcattcgcaagcagtggggaaggggagagatgccgaggtggtcagtatcctgactttcagaggcctttttttgtttgttttaatttttgctagattgatattaaaaactcatgtggaggaactcaaggaatgtttagaagaccaaaagtccccaatgacaggaacaaaagcaaccaatttttaactttctcttctcattcctgttttcattgatttcccacatgtagtccttttgctcaggaagtctttggggaaattaaggatctttgaagctctgaaataggtgatcaggttagtggtgtctgtcagctgtctaagaggttggaaaatgaactactcaagatagtcacgaaaatactgaaagtttgatttttctttccatatttgaattaattttttctgtttgactggaaggggtttttgtataactaaaacctcagcgcataaaggagatttaaaaggagcacatgatttagtgggtgggccatgaaactagagatgggatttgggggtgaatttgtcaatatctggattttaatccagacatctctgctaacaagcctttggtaagtcacttcagatacttttcctcctttttacaaagagagggctggcttagttatttgccaaagccccttccaggcctgaattccacaagtacgatttactgtagtgtcttatcactctttcatgtcacaatagcgtggagcattagagaaaagcctagacttttagttgatagccagttgaaatatcattgatagaattttagttttaggaaaaattggtttgatttctagctttattactattaggtatgtgagcttgggcaaatcgcttaatctttgagtctagttttctctcaaaatgagaacattaggctaaatgatttccgagtttccagctagtcctagagttctatatttctacatagttgaattattttatcatgctgttgctggggaatatgactaacccttttgaagctactaattttatgtcgagctttaaagtccataattgttatcttcagaaaatattatttgacctacagtatgtccaaatcaatttaataaaatcgctttataacagggttctgtgcttga

SEQ ID NO: 23108 - protein, 184 aa, Homo sapiens [sequence omitted]

SEQ ID NO: 23109 - DNA, 4272 bp, Homo sapiens
ctgtcccccggaggcgtctgggtgtgcggagcgcgcgcgcgcgcggctcggaggcgcacctgtgaggtgtccctgaggagagggagggcgccctgcgtccggcagaggaggcgagcatcccgctcaggtgatgaggaacccctcgcgcacccagcgcagaaggctgctgccgccggacgcctccattgtttgaccacaacaagggccggattctcacccagcaggatcctaaggcctttgtagtccttcagccactgtgggccctgcctctgcctgttcttctggaatgtcttgggggttttgatcctgtcactgtgacctgcaaatccaagagacacatctttggaagataagagagcttcttcaagaccaaaaaaggagacggcatgatacccatgtagggaattccccaaagcagggcttgccatacctggaccccgaggagcctgcttgctggaaaggctttcctgtctgatgtgcaggaggcagaatgccaaactgactcttcaaggggcaactgcaggggctcgagaccagccagcagtatctcatccttcgatacaggggatatactgtacagtcctttttctagaagtgagacatacaagattactctacaagaggaagattccaggggctcaaaaacgcaaaggtttgcactttgagagccccttggaatgttgacaactcaggatctaaaacaaagttctgtgttaatgagttacagaattcacgtggaagtcaatgtcactttataatcgataataatactgagtgaggaacactatgcaggaagaaaccttccgtagaaagacaggcagggaaaagcttaggctgaccttaaacttacctaatagagcaagcctgagatagactgccaaaatggccaaataagagactctatgaaataacagtcttgtaactgtagtaatcataaggaaattttctccttgaaatcacgataccaaataggaaaaatgatctacaagtgccccatgtgtagggaatttttctctgagagagcagatctttttatgcatcagaaaattcacacagctgagaagccccataaatgtgacaagtgtgataagggtttctttcatatatcagaacttcatattcattggagagaccatacaggagagaaggtctataaatgtgatgattgtggtaaggattttagcactacaacaaaacttaatagacataagaaaatccacacagtggagaagccctataaatgttacgagtgtggcaaagccttcaattggagctcccatcttcaaattcatatgagagttcatacaggtgagaaaccgtatgtctgtagtgagtgtggaaggggctttagtaatagttcaaacctttgcatgcatcagagagtccacaccggagagaagccctttaaatgtgaagagtgtgggaaggccttcaggcacacctccagcctctgcatgcatcaaagagtccacacaggagagaaaccctataaatgttatgagtgtgggaaggcgttcagtcagagttcgagcctctgcatccaccagagagtccacactggagagaaaccctatagatgttgtggatgtgggaaggccttcagtcagagttcgagcctgtgcatccaccagagagtccacacaggagagaaacctttcaaatgtgatgagtgcggaaaggccttcagtcagagtacgagcctctgcatccaccagagagtccacacaaaggagagaaaccatctcaaaatatcagttatataaaacgttttgctaagagtttaaaatcttaaaacccataagtgccactaggaaggaaaccctgtatatacctacattgacccaagaaatatttacgcaatccctagcagaacattgtttctgaggaggcatatgtgagattgatttgttggttcatgccaagtgtgttccacaggttgactttgaatgtggacctctgagcatccacgcaggatggctctcaggtcccagtcacagacgtcgcttcctgggattccagcacgatgcctccatagttgaaagactacacaaaaagccacaatcattgcccggcctcctgagtcaccttctatctatactttgcttaaaagctatcccagatactcccccttgaggagctcatgcccttccttcctctttattcgagcatactggcaatgcattggaaaacagacagctcccactaagatcacgttctggtatttctgaggttaacacttgatttagcccctacatatctttccatatatcctattatttctgaatatatgtcctcaaaatccccataaatatccatcccttcctagatggcattaactttcattttagattttaggtgactcataattcccattcacttagcctatcagaaaagtcattggcagacatatatgtccttgaaccttttttatttgtgtggattctgctcatcactgtctctgttagacttattttgtagtggctgcatcacatatttttcacttgaatttttttggaaatagctgaatgtaaatagcagggaggaagaagcaagcaaagtgagagcttttcttcatccagaattgccctctgggctcctttggtaacagatggagctccttcctagctagggagaccttatgagaagtggatggtaggaggagtcactaatgtttcaatctctatttctgtaatcttgggcaataatgcataggagttcttgataccccttcattgattactgtgtatcagttctttgttaggcatgaacgtctttattaatccatcattcttttcttcattcaacaaatatgtattgaacacctcctatatgccaggcactgtgctaggtgctgggaataccactgatgagacagacaaggtccctactcttgtggagtttacttctggtggaggagacagatgataagtaaacaaataaataatgtagtttgagatagtgattaagtgctatgaagaaaataaactagggtgatgattttagtggtggggtggggtgggggtggggtgacattagctagtggtcagggaggcctttccgcggtgggatgttgagctgaggccggaggagaagtagcagtcgctggcagagcacacaggctgctctgggggatgagctggtgcgtttaaggaacaggccagcactggcattcgcaagcagtggggaaggggagagatgccgaggtggtcagtatcctgactttcagaggcctttttttgtttgttttaatttttgctagattgatattaaaaactcatgtggaggaactcaaggaatgtttagaagaccaaaagtccccaatgacaggaacaaaagcaaccaatttttaactttctcttctcattcctgttttcattgatttcccacatgtagtccttttgctcaggaagtctttggggaaattaaggatctttgaagctctgaaataggtgatcaggttagtggtgtctgtcagctgtctaagaggttggaaaatgaactactcaagatagtcacgaaaatactgaaagtttgatttttctttccatatttgaattaattttttctgtttgactggaaggggtttttgtataactaaaacctcagcgcataaaggagatttaaaaggagcacatgatttagtgggtgggccatgaaactagagatgggatttgggggtgaatttgtcaatatctggattttaatccagacatctctgctaacaagcctttggtaagtcacttcagatacttttcctcctttttacaaagagagggctggcttagttatttgccaaagccccttccaggcctgaattccacaagtacgatttactgtagtgtcttatcactctttcatgtcacaatagcgtggagcattagagaaaagcctagacttttagttgatagccagttgaaatatcattgatagaattttagttttaggaaaaattggtttgatttctagctttattactattaggtatgtgagcttgggcaaatcgcttaatctttgagtctagttttctctcaaaatgagaacattaggctaaatgatttccgagtttccagctagtcctagagttctatatttctacatagttgaattattttatcatgctgttgctggggaatatgactaacccttttgaagctactaattttatgtcgagctttaaagtccataattgttatcttcagaaaatattatttgacctacagtatgtccaaatcaatttaataaaatcgctttataacagggttctgtgcttga

SEQ ID NO: 23110 - protein, 261 aa, Homo sapiens; identical to SEQ ID NO: 3057

SEQ ID NO: 23111 - DNA, 4312 bp, Homo sapiens
ggaggcgtctgggtgtgcggagcgcgcgcgcgcgcggctcggaggcgcacctgtgaggtgtccctgaggagagggaggtgggtgcgcggcgcccgcggcctggggcgctgactcccctcacttggaggcgccctgcgtccggcagaggaggcgagcatcccgctcaggtgatgaggaacccctcgcgcacccagcgcagaaggctgctgccgccggacgcctccattgtttgaccacaacaagggccggattctcacccagcaggatcctaaggcctttgtagtccttcagccactgtgggccctgcctctgcctgttcttctggaatgtcttgggggttttgatcctgtcactgtgacctgcaaatccaagagacacatctttggaagataagagagcttcttcaagaccaaaaaaggagacggcatgatacccatgtagggaattccccaaagcagggcttgccatacctggaccccgaggagcctgcttgctggaaaggctttcctgtctgatgtgcaggaggcagaatgccaaactgactcttcaaggggcaactgcaggggctcgagaccagccagcagtatctcatccttcgatacaggggatatactgtacagtcctttttctagaagtgagacatacaagattactctacaagaggaagattccaggggctcaaaaacgcaaaggtttgcactttgagagccccttggaatgttgacaactcaggatctaaaacaaagttctgtgttaatgagttacagaattcacgtggaagtcaatgtcactttataatcgataataatactgagtgaggaacactatgcaggaagaaaccttccgtagaaagacaggcagggaaaagcttaggctgaccttaaacttacctaatagagcaagcctgagatagactgccaaaatggccaaataagagactctatgaaataacagtcttgtaactgtagtaatcataaggaaattttctccttgaaatcacgataccaaataggaaaaatgatctacaagtgccccatgtgtagggaatttttctctgagagagcagatctttttatgcatcagaaaattcacacagctgagaagccccataaatgtgacaagtgtgataagggtttctttcatatatcagaacttcatattcattggagagaccatacaggagagaaggtctataaatgtgatgattgtggtaaggattttagcactacaacaaaacttaatagacataagaaaatccacacagtggagaagccctataaatgttacgagtgtggcaaagccttcaattggagctcccatcttcaaattcatatgagagttcatacaggtgagaaaccgtatgtctgtagtgagtgtggaaggggctttagtaatagttcaaacctttgcatgcatcagagagtccacaccggagagaagccctttaaatgtgaagagtgtgggaaggccttcaggcacacctccagcctctgcatgcatcaaagagtccacacaggagagaaaccctataaatgttatgagtgtgggaaggcgttcagtcagagttcgagcctctgcatccaccagagagtccacactggagagaaaccctatagatgttgtggatgtgggaaggccttcagtcagagttcgagcctgtgcatccaccagagagtccacacaggagagaaacctttcaaatgtgatgagtgcggaaaggccttcagtcagagtacgagcctctgcatccaccagagagtccacacaaaggagagaaaccatctcaaaatatcagttatataaaacgttttgctaagagtttaaaatcttaaaacccataagtgccactaggaaggaaaccctgtatatacctacattgacccaagaaatatttacgcaatccctagcagaacattgtttctgaggaggcatatgtgagattgatttgttggttcatgccaagtgtgttccacaggttgactttgaatgtggacctctgagcatccacgcaggatggctctcaggtcccagtcacagacgtcgcttcctgggattccagcacgatgcctccatagttgaaagactacacaaaaagccacaatcattgcccggcctcctgagtcaccttctatctatactttgcttaaaagctatcccagatactcccccttgaggagctcatgcccttccttcctctttattcgagcatactggcaatgcattggaaaacagacagctcccactaagatcacgttctggtatttctgaggttaacacttgatttagcccctacatatctttccatatatcctattatttctgaatatatgtcctcaaaatccccataaatatccatcccttcctagatggcattaactttcattttagattttaggtgactcataattcccattcacttagcctatcagaaaagtcattggcagacatatatgtccttgaaccttttttatttgtgtggattctgctcatcactgtctctgttagacttattttgtagtggctgcatcacatatttttcacttgaatttttttggaaatagctgaatgtaaatagcagggaggaagaagcaagcaaagtgagagcttttcttcatccagaattgccctctgggctcctttggtaacagatggagctccttcctagctagggagaccttatgagaagtggatggtaggaggagtcactaatgtttcaatctctatttctgtaatcttgggcaataatgcataggagttcttgataccccttcattgattactgtgtatcagttctttgttaggcatgaacgtctttattaatccatcattcttttcttcattcaacaaatatgtattgaacacctcctatatgccaggcactgtgctaggtgctgggaataccactgatgagacagacaaggtccctactcttgtggagtttacttctggtggaggagacagatgataagtaaacaaataaataatgtagtttgagatagtgattaagtgctatgaagaaaataaactagggtgatgattttagtggtggggtggggtgggggtggggtgacattagctagtggtcagggaggcctttccgcggtgggatgttgagctgaggccggaggagaagtagcagtcgctggcagagcacacaggctgctctgggggatgagctggtgcgtttaaggaacaggccagcactggcattcgcaagcagtggggaaggggagagatgccgaggtggtcagtatcctgactttcagaggcctttttttgtttgttttaatttttgctagattgatattaaaaactcatgtggaggaactcaaggaatgtttagaagaccaaaagtccccaatgacaggaacaaaagcaaccaatttttaactttctcttctcattcctgttttcattgatttcccacatgtagtccttttgctcaggaagtctttggggaaattaaggatctttgaagctctgaaataggtgatcaggttagtggtgtctgtcagctgtctaagaggttggaaaatgaactactcaagatagtcacgaaaatactgaaagtttgatttttctttccatatttgaattaattttttctgtttgactggaaggggtttttgtataactaaaacctcagcgcataaaggagatttaaaaggagcacatgatttagtgggtgggccatgaaactagagatgggatttgggggtgaatttgtcaatatctggattttaatccagacatctctgctaacaagcctttggtaagtcacttcagatacttttcctcctttttacaaagagagggctggcttagttatttgccaaagccccttccaggcctgaattccacaagtacgatttactgtagtgtcttatcactctttcatgtcacaatagcgtggagcattagagaaaagcctagacttttagttgatagccagttgaaatatcattgatagaattttagttttaggaaaaattggtttgatttctagctttattactattaggtatgtgagcttgggcaaatcgcttaatctttgagtctagttttctctcaaaatgagaacattaggctaaatgatttccgagtttccagctagtcctagagttctatatttctacatagttgaattattttatcatgctgttgctggggaatatgactaacccttttgaagctactaattttatgtcgagctttaaagtccataattgttatcttcagaaaatattatttgacctacagtatgtccaaatcaatttaataaaatcgctttataacagggttctgtgcttga

SEQ ID NO: 23112 - protein, 261 aa, Homo sapiens; identical to SEQ ID NO: 3057

SEQ ID NO: 23113 - DNA, 4311 bp, Homo sapiens
gggtgtgcggagcgcgcgcgcgcgcggctcggaggcgcacctgtgaggtgtccctgaggagagggagggcgccctgcgtccggcagaggaggcgagcatcccgctcaggtgatgaggaacccctcgcgcacccagcgcagaaggctgctgccgccggacgcctccattgtttgaccacaacaagggccggattctcacccagcaggatcctaaggcctttgtagtccttcagccactgtgggccctgcctctgcctgttcttctggaatgtcttgggggttttgatcctgtcactgtgatgggaccacctagttgcaggaaaacaagctcagggctcccactgattctacattatgacctgcaaatccaagagacacatctttggaagataagagagcttcttcaagaccaaaaaaggagacggcatgatacccatgtagggaattccccaaagcagggcttgccatacctggaccccgaggagcctgcttgctggaaaggctttcctgtctgatgtgcaggaggcagaatgccaaactgactcttcaaggggcaactgcaggggctcgagaccagccagcagtatctcatccttcgatacaggggatatactgtacagtcctttttctagaagtgagacatacaagattactctacaagaggaagattccaggggctcaaaaacgcaaaggtttgcactttgagagccccttggaatgttgacaactcaggatctaaaacaaagttctgtgttaatgagttacagaattcacgtggaagtcaatgtcactttataatcgataataatactgagtgaggaacactatgcaggaagaaaccttccgtagaaagacaggcagggaaaagcttaggctgaccttaaacttacctaatagagcaagcctgagatagactgccaaaatggccaaataagagactctatgaaataacagtcttgtaactgtagtaatcataaggaaattttctccttgaaatcacgataccaaataggaaaaatgatctacaagtgccccatgtgtagggaatttttctctgagagagcagatctttttatgcatcagaaaattcacacagctgagaagccccataaatgtgacaagtgtgataagggtttctttcatatatcagaacttcatattcattggagagaccatacaggagagaaggtctataaatgtgatgattgtggtaaggattttagcactacaacaaaacttaatagacataagaaaatccacacagtggagaagccctataaatgttacgagtgtggcaaagccttcaattggagctcccatcttcaaattcatatgagagttcatacaggtgagaaaccgtatgtctgtagtgagtgtggaaggggctttagtaatagttcaaacctttgcatgcatcagagagtccacaccggagagaagccctttaaatgtgaagagtgtgggaaggccttcaggcacacctccagcctctgcatgcatcaaagagtccacacaggagagaaaccctataaatgttatgagtgtgggaaggcgttcagtcagagttcgagcctctgcatccaccagagagtccacactggagagaaaccctatagatgttgtggatgtgggaaggccttcagtcagagttcgagcctgtgcatccaccagagagtccacacaggagagaaacctttcaaatgtgatgagtgcggaaaggccttcagtcagagtacgagcctctgcatccaccagagagtccacacaaaggagagaaaccatctcaaaatatcagttatataaaacgttttgctaagagtttaaaatcttaaaacccataagtgccactaggaaggaaaccctgtatatacctacattgacccaagaaatatttacgcaatccctagcagaacattgtttctgaggaggcatatgtgagattgatttgttggttcatgccaagtgtgttccacaggttgactttgaatgtggacctctgagcatccacgcaggatggctctcaggtcccagtcacagacgtcgcttcctgggattccagcacgatgcctccatagttgaaagactacacaaaaagccacaatcattgcccggcctcctgagtcaccttctatctatactttgcttaaaagctatcccagatactcccccttgaggagctcatgcccttccttcctctttattcgagcatactggcaatgcattggaaaacagacagctcccactaagatcacgttctggtatttctgaggttaacacttgatttagcccctacatatctttccatatatcctattatttctgaatatatgtcctcaaaatccccataaatatccatcccttcctagatggcattaactttcattttagattttaggtgactcataattcccattcacttagcctatcagaaaagtcattggcagacatatatgtccttgaaccttttttatttgtgtggattctgctcatcactgtctctgttagacttattttgtagtggctgcatcacatatttttcacttgaatttttttggaaatagctgaatgtaaatagcagggaggaagaagcaagcaaagtgagagcttttcttcatccagaattgccctctgggctcctttggtaacagatggagctccttcctagctagggagaccttatgagaagtggatggtaggaggagtcactaatgtttcaatctctatttctgtaatcttgggcaataatgcataggagttcttgataccccttcattgattactgtgtatcagttctttgttaggcatgaacgtctttattaatccatcattcttttcttcattcaacaaatatgtattgaacacctcctatatgccaggcactgtgctaggtgctgggaataccactgatgagacagacaaggtccctactcttgtggagtttacttctggtggaggagacagatgataagtaaacaaataaataatgtagtttgagatagtgattaagtgctatgaagaaaataaactagggtgatgattttagtggtggggtggggtgggggtggggtgacattagctagtggtcagggaggcctttccgcggtgggatgttgagctgaggccggaggagaagtagcagtcgctggcagagcacacaggctgctctgggggatgagctggtgcgtttaaggaacaggccagcactggcattcgcaagcagtggggaaggggagagatgccgaggtggtcagtatcctgactttcagaggcctttttttgtttgttttaatttttgctagattgatattaaaaactcatgtggaggaactcaaggaatgtttagaagaccaaaagtccccaatgacaggaacaaaagcaaccaatttttaactttctcttctcattcctgttttcattgatttcccacatgtagtccttttgctcaggaagtctttggggaaattaaggatctttgaagctctgaaataggtgatcaggttagtggtgtctgtcagctgtctaagaggttggaaaatgaactactcaagatagtcacgaaaatactgaaagtttgatttttctttccatatttgaattaattttttctgtttgactggaaggggtttttgtataactaaaacctcagcgcataaaggagatttaaaaggagcacatgatttagtgggtgggccatgaaactagagatgggatttgggggtgaatttgtcaatatctggattttaatccagacatctctgctaacaagcctttggtaagtcacttcagatacttttcctcctttttacaaagagagggctggcttagttatttgccaaagccccttccaggcctgaattccacaagtacgatttactgtagtgtcttatcactctttcatgtcacaatagcgtggagcattagagaaaagcctagacttttagttgatagccagttgaaatatcattgatagaattttagttttaggaaaaattggtttgatttctagctttattactattaggtatgtgagcttgggcaaatcgcttaatctttgagtctagttttctctcaaaatgagaacattaggctaaatgatttccgagtttccagctagtcctagagttctatatttctacatagttgaattattttatcatgctgttgctggggaatatgactaacccttttgaagctactaattttatgtcgagctttaaagtccataattgttatcttcagaaaatattatttgacctacagtatgtccaaatcaatttaataaaatcgctttataacagggttctgtgcttga

SEQ ID NO: 23114 - protein, 71 aa, Homo sapiens
MGPPSCRKTSSGLPLILHYDLQIQETHLWKIRELLQDQKRRRHDTHVGNSPKQGLPYLDPEEPACWKGFPV

SEQ ID NO: 23115 - DNA, 4522 bp, Homo sapiens
ggagcgcgcgcgcgcgcggctcggaggcgcacctgtgaggtgtccctgaggagagggagggcgccctgcgtccggcagaggaggcgagcatcccgctcaggtgatgaggaacccctcgcgcacccagcgcagaaggctgctgccgccggacgcctccattgtttgaccacaacaagggccggattctcacccagcaggatcctaaggcctttgtagtccttcagccactgtgggccctgcctctgcctgttcttctggaatgtcttgggggttttgatcctgtcactgtgagtcttgctctgtcgcccaggctggagtgcagtggcacgatctcagctcattgcaacctctgtctcccaggttcaagcgattctcctgcctcagcctctggagtagctgggattacagattgtcatacagggattttctaagccaggggtccccaacctgtgggccacagatgggtaccagtccatggcctgttaggaaccaaggccacacagcatgagatgggaccacctagttgcaggaaaacaagctcagggctcccactgattctacattatgacctgcaaatccaagagacacatctttggaagataagagagcttcttcaagaccaaaaaaggagacggcatgatacccatgtagggaattccccaaagcagggcttgccatacctggaccccgaggagcctgcttgctggaaaggctttcctgtctgatgtgcaggaggcagaatgccaaactgactcttcaaggggcaactgcaggggctcgagaccagccagcagtatctcatccttcgatacaggggatatactgtacagtcctttttctagaagtgagacatacaagattactctacaagaggaagattccaggggctcaaaaacgcaaaggtttgcactttgagagccccttggaatgttgacaactcaggatctaaaacaaagttctgtgttaatgagttacagaattcacgtggaagtcaatgtcactttataatcgataataatactgagtgaggaacactatgcaggaagaaaccttccgtagaaagacaggcagggaaaagcttaggctgaccttaaacttacctaatagagcaagcctgagatagactgccaaaatggccaaataagagactctatgaaataacagtcttgtaactgtagtaatcataaggaaattttctccttgaaatcacgataccaaataggaaaaatgatctacaagtgccccatgtgtagggaatttttctctgagagagcagatctttttatgcatcagaaaattcacacagctgagaagccccataaatgtgacaagtgtgataagggtttctttcatatatcagaacttcatattcattggagagaccatacaggagagaaggtctataaatgtgatgattgtggtaaggattttagcactacaacaaaacttaatagacataagaaaatccacacagtggagaagccctataaatgttacgagtgtggcaaagccttcaattggagctcccatcttcaaattcatatgagagttcatacaggtgagaaaccgtatgtctgtagtgagtgtggaaggggctttagtaatagttcaaacctttgcatgcatcagagagtccacaccggagagaagccctttaaatgtgaagagtgtgggaaggccttcaggcacacctccagcctctgcatgcatcaaagagtccacacaggagagaaaccctataaatgttatgagtgtgggaaggcgttcagtcagagttcgagcctctgcatccaccagagagtccacactggagagaaaccctatagatgttgtggatgtgggaaggccttcagtcagagttcgagcctgtgcatccaccagagagtccacacaggagagaaacctttcaaatgtgatgagtgcggaaaggccttcagtcagagtacgagcctctgcatccaccagagagtccacacaaaggagagaaaccatctcaaaatatcagttatataaaacgttttgctaagagtttaaaatcttaaaacccataagtgccactaggaaggaaaccctgtatatacctacattgacccaagaaatatttacgcaatccctagcagaacattgtttctgaggaggcatatgtgagattgatttgttggttcatgccaagtgtgttccacaggttgactttgaatgtggacctctgagcatccacgcaggatggctctcaggtcccagtcacagacgtcgcttcctgggattccagcacgatgcctccatagttgaaagactacacaaaaagccacaatcattgcccggcctcctgagtcaccttctatctatactttgcttaaaagctatcccagatactcccccttgaggagctcatgcccttccttcctctttattcgagcatactggcaatgcattggaaaacagacagctcccactaagatcacgttctggtatttctgaggttaacacttgatttagcccctacatatctttccatatatcctattatttctgaatatatgtcctcaaaatccccataaatatccatcccttcctagatggcattaactttcattttagattttaggtgactcataattcccattcacttagcctatcagaaaagtcattggcagacatatatgtccttgaaccttttttatttgtgtggattctgctcatcactgtctctgttagacttattttgtagtggctgcatcacatatttttcacttgaatttttttggaaatagctgaatgtaaatagcagggaggaagaagcaagcaaagtgagagcttttcttcatccagaattgccctctgggctcctttggtaacagatggagctccttcctagctagggagaccttatgagaagtggatggtaggaggagtcactaatgtttcaatctctatttctgtaatcttgggcaataatgcataggagttcttgataccccttcattgattactgtgtatcagttctttgttaggcatgaacgtctttattaatccatcattcttttcttcattcaacaaatatgtattgaacacctcctatatgccaggcactgtgctaggtgctgggaataccactgatgagacagacaaggtccctactcttgtggagtttacttctggtggaggagacagatgataagtaaacaaataaataatgtagtttgagatagtgattaagtgctatgaagaaaataaactagggtgatgattttagtggtggggtggggtgggggtggggtgacattagctagtggtcagggaggcctttccgcggtgggatgttgagctgaggccggaggagaagtagcagtcgctggcagagcacacaggctgctctgggggatgagctggtgcgtttaaggaacaggccagcactggcattcgcaagcagtggggaaggggagagatgccgaggtggtcagtatcctgactttcagaggcctttttttgtttgttttaatttttgctagattgatattaaaaactcatgtggaggaactcaaggaatgtttagaagaccaaaagtccccaatgacaggaacaaaagcaaccaatttttaactttctcttctcattcctgttttcattgatttcccacatgtagtccttttgctcaggaagtctttggggaaattaaggatctttgaagctctgaaataggtgatcaggttagtggtgtctgtcagctgtctaagaggttggaaaatgaactactcaagatagtcacgaaaatactgaaagtttgatttttctttccatatttgaattaattttttctgtttgactggaaggggtttttgtataactaaaacctcagcgcataaaggagatttaaaaggagcacatgatttagtgggtgggccatgaaactagagatgggatttgggggtgaatttgtcaatatctggattttaatccagacatctctgctaacaagcctttggtaagtcacttcagatacttttcctcctttttacaaagagagggctggcttagttatttgccaaagccccttccaggcctgaattccacaagtacgatttactgtagtgtcttatcactctttcatgtcacaatagcgtggagcattagagaaaagcctagacttttagttgatagccagttgaaatatcattgatagaattttagttttaggaaaaattggtttgatttctagctttattactattaggtatgtgagcttgggcaaatcgcttaatctttgagtctagttttctctcaaaatgagaacattaggctaaatgatttccgagtttccagctagtcctagagttctatatttctacatagttgaattattttatcatgctgttgctggggaatatgactaacccttttgaagctactaattttatgtcgagctttaaagtccataattgttatcttcagaaaatattatttgacctacagtatgtccaaatcaatttaataaaatcgctttataacagggttctgtgcttga

SEQ ID NO: 23116 - protein, 71 aa, Homo sapiens; identical to SEQ ID NO: 23114

SEQ ID NO: 23117 - DNA, 1552 bp, Homo sapiens
ggtgtccctgaggagagggaggtgggtgcgcggcgcccgcggcctggggcgctgactcccctcacttggaggcgccctgcgtccggcagaggaggcgagcatcccgctcaggtgatgaggaacccctcgcgcacccagcgcagaaggctgctgccgccggacgcctccattgtttgaccacaacaagggccggattctcacccaggtaaaccggctgccggcgctgtccacttccctctgactcccgcctccgcaggcgttctcaccccttccaggactcgactgcagttttctcactgtccccggcttctcatgaactccgtataccccctcccagacattttcccgtccggatccatctctccgccacatcacctctcatttcccccagaactcagctcctttgtgaaacctttcttgccgaactctaacaactaaatctccccgggagcctgctccgaactgaactgttctggttgctagattgcttacgggctgtcttattgcaacaaaggagaccagataccgaaaaaagatttctgagctattgccttcttcaaggaacgttttctgatatttacagtttattgttttcacaggctggaacggtttttaggcattttggcttcttatttagagagggctcctatttccttcatagacgcatagttttttagagcaggaaattgaccttgttcaacccgcaggttaattaaaaatttaaaaattaattctaaattagcagagtagtacattttctttgtaaaaacagcatatcacagagatggcattttgtctttgactatcaacctctgtcttcagggatgccgactattatgtgtgtggtgtttatccttctagatcttttggagtacttttacgtgtgtgcacttaacatcatttttgactgctttaacaaggactgttgcaccgtaactttcaatgttagcatgtaatgcttcaagtcattttttaacaactgctgcaccatgttccatagtttcagtatatcatggtttagccatttcccaaattgatagcagtttaagttttaactttaaaacagcttttttgctggtggtggttctctgatgagatgaaatttcggtgataggagcacagatctacgctaattatcgagattcggcatttatgatgaagttctcttttggttaagaaattgatatgtggaagcagccacccctcccctatggtagttctgactctagcagttagaagttgtgtgaccttggggaggacattgaatcacaccaaacctcggttttcttttctgtaaatggcctgctctgtctgctccatagagttcagtgatacagtgcgtatgtgttgtggaatgtaaagtagtatatataaaggttggttttattagcctttgtgatccaaaaattatttgcaatatcatttatattttttgaccagatgtgtgtgtatcatatcacagagcactacagatagtcaactttgaatgctttttaatttgtgactttttaaattaatttttatcaagtactgacaatacattagtcttctt

SEQ ID NO: 23118 - protein, 49 aa, Homo sapiens
MLACNASSHFLTTAAPCSIVSVYHGLAISQIDSSLSFNFKTAFLLVVVL

SEQ ID NO: 23119 - DNA, 4151 bp, Homo sapiens
gaggagagggaggtgggtgcgcggcgcccgcggcctggggcgctgactcccctcacttggaggcgccctgcgtccggcagaggaggcgagcatcccgctcaggtgatgaggaacccctcgcgcacccagcgcagaaggctgctgccgccggacgcctccattgtttgaccacaacaagggccggattctcacccagacctgcaaatccaagagacacatctttggaagataagagagcttcttcaagaccaaaaaaggagacggcatgatacccatgtagggaattccccaaagcagggcttgccatacctggaccccgaggagcctgcttgctggaaaggctttcctgtctgatgtgcaggaggcagaatgccaaactgactcttcaaggggcaactgcaggggctcgagaccagccagcagtatctcatccttcgatacaggggatatactgtacagtcctttttctagaagtgagacatacaagattactctacaagaggaagattccaggggctcaaaaacgcaaaggtttgcactttgagagccccttggaatgttgacaactcaggatctaaaacaaagttctgtgttaatgagttacagaattcacgtggaagtcaatgtcactttataatcgataataatactgagtgaggaacactatgcaggaagaaaccttccgtagaaagacaggcagggaaaagcttaggctgaccttaaacttacctaatagagcaagcctgagatagactgccaaaatggccaaataagagactctatgaaataacagtcttgtaactgtagtaatcataaggaaattttctccttgaaatcacgataccaaataggaaaaatgatctacaagtgccccatgtgtagggaatttttctctgagagagcagatctttttatgcatcagaaaattcacacagctgagaagccccataaatgtgacaagtgtgataagggtttctttcatatatcagaacttcatattcattggagagaccatacaggagagaaggtctataaatgtgatgattgtggtaaggattttagcactacaacaaaacttaatagacataagaaaatccacacagtggagaagccctataaatgttacgagtgtggcaaagccttcaattggagctcccatcttcaaattcatatgagagttcatacaggtgagaaaccgtatgtctgtagtgagtgtggaaggggctttagtaatagttcaaacctttgcatgcatcagagagtccacaccggagagaagccctttaaatgtgaagagtgtgggaaggccttcaggcacacctccagcctctgcatgcatcaaagagtccacacaggagagaaaccctataaatgttatgagtgtgggaaggcgttcagtcagagttcgagcctctgcatccaccagagagtccacactggagagaaaccctatagatgttgtggatgtgggaaggccttcagtcagagttcgagcctgtgcatccaccagagagtccacacaggagagaaacctttcaaatgtgatgagtgcggaaaggccttcagtcagagtacgagcctctgcatccaccagagagtccacacaaaggagagaaaccatctcaaaatatcagttatataaaacgttttgctaagagtttaaaatcttaaaacccataagtgccactaggaaggaaaccctgtatatacctacattgacccaagaaatatttacgcaatccctagcagaacattgtttctgaggaggcatatgtgagattgatttgttggttcatgccaagtgtgttccacaggttgactttgaatgtggacctctgagcatccacgcaggatggctctcaggtcccagtcacagacgtcgcttcctgggattccagcacgatgcctccatagttgaaagactacacaaaaagccacaatcattgcccggcctcctgagtcaccttctatctatactttgcttaaaagctatcccagatactcccccttgaggagctcatgcccttccttcctctttattcgagcatactggcaatgcattggaaaacagacagctcccactaagatcacgttctggtatttctgaggttaacacttgatttagcccctacatatctttccatatatcctattatttctgaatatatgtcctcaaaatccccataaatatccatcccttcctagatggcattaactttcattttagattttaggtgactcataattcccattcacttagcctatcagaaaagtcattggcagacatatatgtccttgaaccttttttatttgtgtggattctgctcatcactgtctctgttagacttattttgtagtggctgcatcacatatttttcacttgaatttttttggaaatagctgaatgtaaatagcagggaggaagaagcaagcaaagtgagagcttttcttcatccagaattgccctctgggctcctttggtaacagatggagctccttcctagctagggagaccttatgagaagtggatggtaggaggagtcactaatgtttcaatctctatttctgtaatcttgggcaataatgcataggagttcttgataccccttcattgattactgtgtatcagttctttgttaggcatgaacgtctttattaatccatcattcttttcttcattcaacaaatatgtattgaacacctcctatatgccaggcactgtgctaggtgctgggaataccactgatgagacagacaaggtccctactcttgtggagtttacttctggtggaggagacagatgataagtaaacaaataaataatgtagtttgagatagtgattaagtgctatgaagaaaataaactagggtgatgattttagtggtggggtggggtgggggtggggtgacattagctagtggtcagggaggcctttccgcggtgggatgttgagctgaggccggaggagaagtagcagtcgctggcagagcacacaggctgctctgggggatgagctggtgcgtttaaggaacaggccagcactggcattcgcaagcagtggggaaggggagagatgccgaggtggtcagtatcctgactttcagaggcctttttttgtttgttttaatttttgctagattgatattaaaaactcatgtggaggaactcaaggaatgtttagaagaccaaaagtccccaatgacaggaacaaaagcaaccaatttttaactttctcttctcattcctgttttcattgatttcccacatgtagtccttttgctcaggaagtctttggggaaattaaggatctttgaagctctgaaataggtgatcaggttagtggtgtctgtcagctgtctaagaggttggaaaatgaactactcaagatagtcacgaaaatactgaaagtttgatttttctttccatatttgaattaattttttctgtttgactggaaggggtttttgtataactaaaacctcagcgcataaaggagatttaaaaggagcacatgatttagtgggtgggccatgaaactagagatgggatttgggggtgaatttgtcaatatctggattttaatccagacatctctgctaacaagcctttggtaagtcacttcagatacttttcctcctttttacaaagagagggctggcttagttatttgccaaagccccttccaggcctgaattccacaagtacgatttactgtagtgtcttatcactctttcatgtcacaatagcgtggagcattagagaaaagcctagacttttagttgatagccagttgaaatatcattgatagaattttagttttaggaaaaattggtttgatttctagctttattactattaggtatgtgagcttgggcaaatcgcttaatctttgagtctagttttctctcaaaatgagaacattaggctaaatgatttccgagtttccagctagtcctagagttctatatttctacatagttgaattattttatcatgctgttgctggggaatatgactaacccttttgaagctactaattttatgtcgagctttaaagtccataattgttatcttcagaaaatattatttgacctacagtatgtccaaatcaatttaataaaatcgctttataacagggttctgtgcttga

SEQ ID NO: 23120 - protein, 261 aa, Homo sapiens; identical to SEQ ID NO: 3057

SEQ ID NO: 23121 - DNA, 316 bp, Homo sapiens
gaggaggcgagcatcccgctcaggtgatgaggaacccctcgcgcacccagcgcagaaggctgctgccgccggacgcctccattgtttgaccacaacaagggccggattctcacccaggccgcacttggtgagagtcttcacggaccacagtgttgcacgaggtgattgtgtttgcagaggtttttttgtccttgaagagcacttagggctggagagcaagacacatgctgacgagcagaagctgacaggcttgctgccatgtgggaaagtccttggacgagttgtctgcttgcggagaggtgtctgcggctcaggt

SEQ ID NO: 23122 - protein, 104 aa, Homo sapiens
RRRASRSGDEEPLAHPAQKAAAAGRLHCLTTTRAGFSPRPHLVRVFTDHSVARGDCVCRGFFVLEEHLGLESKTHADEQKLTGLLPCGKVLGRVVCLRRGVCGS

SEQ ID NO: 23123 - DNA, 498 bp, Homo sapiens
gcgcacccagcgcagaaggctgctgccgccggacgcctccattgtttgaccacaacaagggccggattctcacccagcaggatcctaaggcctttgtagtccttcagccactgtgggccctgcctctgcctgttcttctggaatgtcttgggggttttgatcctgtcactgtgatcggtgttgctggaagtcggtccaggagctttttggataatccacctcatgactggaaaacaacgaagaaacccagtagcttcttcgccgtgtggattcagacccgggagctcaggcctgcacctgggcagctgctccctgcacgtggccggacatatggaatatggagccccgctgccttggagtcagagagctgccaagtagaatttgcatgtaatgctgctatcattttcaattgctctcccaataaaacaggccctggagccgaggtgaatgccgtagaaggcattttttccactgggtgtgggtccagaataaataatc

SEQ ID NO: 23124 - protein, 51 aa, Homo sapiens [sequence omitted]

SEQ ID NO: 23125 - DNA, 425 bp, Homo sapiens
tccttagagctccagctaatccagatgcaacattgacgaattagtgccggaatgagtatcagcacttgaaaaccctacagagatgccttggtcactccagataagagtttctgtggctgagaggccccactgtatgactcctgtttctgcctgctggacttcactttctggggcttggcatctgatgacctctgtatacatgctgtgcctcctgttctttatgtggccacttcactttgtcctttgggtttcagcttaaaagtagagtcaactagaaatcttcattaccatgctgagactagttaggatgcccctggctcatcagctgtaatgcctctgtcaaagctccactcaaacatgctagaaccatcgccttcccctcctcaactgtaaaccacagaaatgcagaggccctgtctgttttg

SEQ ID NO: 23126 - protein, 58 aa, Homo sapiens
MPWSLQIRVSVAERPHCMTPVSACWTSLSGAWHLMTSVYMLCLLFFMWPLHFVLWVSA

SEQ ID NO: 23127 - DNA, 1875 bp, Homo sapiens
tttattcgagcatactggcaatgcattggaaaacagacagctcccactaagatcacgttctggtatttctgaggttaacacttgatttagcccctacatatctttccatatatcctattatttctgaatatatgtcctcaaaatccccataaatatccatcccttcctagatggcattaactttcattttagattttaggtgactcataattcccattcacttagcctatcagaaaagtcattggcagacatatatgtccttgaaccttttttatttgtgtggattctgctcatcactgtctctgttagacttattttgtagtggctgcatcacatatttttcacttgaatttttttggaaatagctgaatgtaaatagcagggaggaagaagcaagcaaagtgagagcttttcttcatccagaattgccctctgggctcctttggtaacagatggagctccttcctagctagggagaccttatgagaagtggatggtaggaggagtcactaatgtttcaatctctatttctgtaatcttgggcaataatgcataggagttcttgataccccttcattgattactgtgtatcagttctttgttaggcatgaacgtctttattaatccatcattcttttcttcattcaacaaatatgtattgaacacctcctatatgccaggcactgtgctaggtgctgggaataccactgatgagacagacaaggtccctactcttgtggagtttacttctggtggaggagacagatgataagtaaacaaataaataatgtagtttgagatagtgattaagtgctatgaagaaaataaactagggtgatgattttagtggtggggtggggtgggggtggggtgacattagctagtggtcagggaggcctttccgcggtgggatgttgagctgaggccggaggagaagtagcagtcgctggcagagcacacaggctgctctgggggatgagctggtgcgtttaaggaacaggccagcactggcattcgcaagcagtggggaaggggagagatgccgaggtggtcagtatcctgactttcagaggcctttttttgtttgttttaatttttgctagattgatattaaaaactcatgtggaggaactcaaggaatgtttagaagaccaaaagtccccaatgacaggaacaaaagcaaccaatttttaactttctcttctcattcctgttttcattgatttcccacatgtagtccttttgctcaggaagtctttggggaaattaaggatctttgaagctctgaaataggtgatcaggttagtggtgtctgtcagctgtctaagaggttggaaaatgaactactcaagatagtcacgaaaatactgaaagtttgatttttctttccatatttgaattaattttttctgcctgaattccacaagtacgatttactgtagtgtcttatcactctttcatgtcacaatagcgtggagcattagagaaaagcctagacttttagttgatagccagttgaaatatcattgatagaattttagttttaggaaaaattggtttgatttctagctttattactattaggtatgtgagcttgggcaaatcgcttaatctttgagtctagttttctctcaaaatgagaacattaggctaaatgatttccgagtttccagctagtcctagagttctatatttctacatagttgaattattttatcatgctgttgctggggaatatgactaacccttttgaagctactaattttatgtcgagctttaaagtccataattgttatcttcagaaaatattatttgacctacagtatgtccaaatcaatttaataaaatcgctttataacagggttctgtgcttga

SEQ ID NO: 23128 - protein, 53 aa, Homo sapiens [sequence omitted]

SEQ ID NO: 23129 - DNA, 719 bp, Homo sapiens
ctatatgccaggcactgtgctaggtgctgggaataccactgatgagacagacaaggtccctactcttgtggagtttacttctggtggaggagacagatgataagtaaacaaataaataatgtagtttgagatagtgattaagtgctatgaagaaaataaactagggtgatgattttagtggtggggtggggtgggggtggggtgacattagctagtggtcagggaggcctttccgcggtgggatgttgagctgaggccggaggagaagtagcagtcgctggcagagcacacaggctgctctgggggatgagctggtgcgtttaaggaacaggccagcactggcattcgcaagcagtggggaaggggagagatgccgaggtggtcagtatcctgactttcagaggcctttttttgtttgttttaatttttgctagattgatattaaaaactcatgtggaggaactcaaggaatgtttagaagaccaaaagtccccaatgacaggaacaaaagcaaccaatttttaactttctcttctcattcctgttttcattgatttcccacatgtagtccttttgctcaggaagtctttggggaaattaaggatctttgaagcttaattttatgtcgagctttaaagtccataattgttatcttcagaaaatattatttgacctacagtatgtccaaatcaatttaataaaatcgctttataacaggg

SEQ ID NO: 23130 - protein, 31 aa, Homo sapiens
MSSFKVHNCYLQKILFDLQYVQINLIKSLYN

SEQ ID NO: 23131 - DNA, 446 bp, Homo sapiens
ggggagtttgaagaatggggtcctgaccttgctaggcaccatttgaagtgctcacatgtcctttgtcttattcagtctccatttgttttcatttatgagtgaaaggagatgaaattgagatggacttgccttgctcttggtgcagagctgtgattacagagttgatgagaaagctgttccaactgtgcatggagatgcattccgtggtcaatctgcacatggctgtcaggaactagctggagtcagcaggagagagagcaatgccttgttcatccatccaggtggggctccgagagcttccaaaccaatggataagaaggaggagccacagaggctagaaaagactgccgaccacagtttgtcccatgtagaactttctggaacattcagctgcagaaagtgaatgggctcaaagctttctgtctccttctgaacaggctgtctat

SEQ ID NO: 23132 - protein, 38 aa, Homo sapiens [sequence omitted]

SEQ ID NO: 23133 - DNA, 1604 bp, Homo sapiens
cgtgagccagccaggcctggccgctgggcctgaccggccccccagcccctacaccccgcttctcccggactctcccagcggacagccccccagccccacagcctgagcctcccagctgccatgtgcctgttgcacacctgcacacacgccctggcacacatacacacatgcgtgcaggcttgtgcagacactcagggatggagctgctgctgaagggacttgtagggagaggctcgtcaacaagcactgttctggaaccttctctccacgtggcccacaggcctgaccacaggggctgtgggtcctgcgtccccttcctcgggtgagcctggcctgtcccgttcagccgttgggcccaggcttcctcccctccaaggtgaaacactgcagtcccggtgtggtggctccccatgcaggacgggccaggctgggagtgccgccttcctgtgccaaattcagtggggactcagtgcccaggccctggccacgagctttggccttggtctacctgccaggccaggcaaagcgcctttacacaggcctcggaaaacaatggagtgagcacaagatgccctgtgcagctgcccgagggtctccgcccactctctggccgaagtggccgcaggctgtgcccccgagctgcccccaccccctcacagggtccctcagattataggtgcccaggctgaggtgaagaggcctgggggccctgccttccgggcgctcctggaccctggggcaaacctgtgacccttttctactggaatagaaatgagttttatcatctttgaaaaataattcactcttgaagtaataaacgtttaaaaaaatgggatgcctgcctctgtgacagccttgtttgctgaggtcgtgggggtgggggcctctgggaagttccgggctcctcttctcttggtcaatagctcctttctggtggctgccaagagcgtctctcccagggccgggctgctggcttaccttcctgttgttttcaaatttcaaccttgtgcaatgttgagtttcatagaaatactgcatgagtacgcccttgtttagaagcagcagggtctgagtcccatcccacagcccccagtgcagacgcttttgccacttttgcatggggccccctggatgtgtttctgtgcatttatctacaaatcctggtgcccataggacatgccccgtgttgttctaggcctttgctttctgctcgttacataaatggtgaagaagagaagcgggtaagagaacagattggagccatctaaaagttctcatcttaagtgtagatcattgcaaaggatggaattttctccgattgtcatcatcgttgatgtttgaatatgagaccatttcatcagtatttaagtgtgcccgctgggatctaactaggagaggagagggtattcactgccgaacatttcaaagaatatacgaacaagctcttttatggtcagaaatgttagcccttttccccttaaacttgtatttcctttcttcttccctcctaaaattttatctaaatgatatttatatttgatgcttttaagccttttattaatcactcctatacttgcctgcaacataaatatataagttgaagc

SEQ ID NO: 23134 - protein, 92 aa, Homo sapiens
MQDGPGWECRLPVPNSVGTQCPGPGHELWPWSTCQARQSAFTQASENNGVSTRCPVQLPEGLRPLSGRSGRRLCPRAAPTPSQGPSDYRCPG

SEQ ID NO: 23135 - DNA, 2089 bp, Homo sapiens
agagagaccgtctctaaaaaataaaaaataaatcaacacataaacatacgttctcctcctgagggacagagcttgccccggttgttccatgttgactgtgctgcacacaggccgccccccttgctctgcccctcactgtattaagtctctttgggcctcagtttctccatctctaaaggaggtcggggaggccaggcgggtgttgagtgagatgaagaggcccttggagtcattccaggagtctataggtgactccagtctcttctcacttctgacagcctggtggcgggggtggagtctctgctggggatgtgggtacagggctgtggtgggcggggatgagggtggggtttggtgacagggcgtgggtggtcacccagctttgcctttctccacagggtcctgaggacaccgtgagccagccaggcctggccgctgggcctgaccggccccccagcccctacaccccgcttctcccggactctcccagcggacagccccccagccccacagcctgagcctcccagctgccatgtgcctgttgcacacctgcacacacgccctggcacacatacacacatgcgtgcaggcttgtgcagacactcagggatggagctgctgctgaagggacttgtagggagagggtggcccacaggcctgaccacaggggctgtgggtcctgcgtccccttcctcgggtgagcctggcctgtcccgttcagccgttgggcccaggcttcctcccctccaaggtgaaacactgcagtcccggtgtggtggctccccatgcaggacgggccaggctgggagtgccgccttcctgtgccaaattcagtggggactcagtgcccaggccctggccacgagctttggccttggtctacctgccaggccaggcaaagcgcctttacacaggcctcggaaaacaatggagtgagcacaagatgccctgtgcagctgcccgagggtctccgcccaccccggccggactttgatccccccgaagtcttcacaggcactgcatcgggttgtctggcgcccttttcctccagcctaaactgacatcatcctatggactgagccggccactctctggccgaagtggccgcaggctgtgcccccgagctgcccccaccccctcacagggtccctcagattataggtgcccaggctgaggtgaagaggcctgggggccctgccttccgggcgctcctggaccctggggcaaacctgtgacccttttctactggaatagaaatgagttttatcatctttgaaaaataattcactcttgaagtaataaacgtttaaaaaaatgggatgcctgcctctgtgacagccttgtttgctgaggtcgtgggggtgggggcctctgggaagttccgggctcctcttctcttggtcaatagctcctttctggtggctgccaagagcgtctctcccagggccgggctgctggcttaccttcctgttgttttcaaatttcaaccttgtgcaatgttgagtttcatagaaatactgcatgagtacgcccttgtttagaagcagcagggtctgagtcccatcccacagcccccagtgcagacgcttttgccacttttgcatggggccccctggatgtgtttctgtgcatttatctacaaatcctggtgcccataggacatgccccgtgttgttctaggcctttgctttctgctcgttacataaatggtgaagaagagaagcgggtaagagaacagattggagccatctaaaagttctcatcttaagtgtagatcattgcaaaggatggaattttctccgattgtcatcatcgttgatgtttgaatatgagaccatttcatcagtatttaagtgtgcccgctgggatctaactaggagaggagagggtattcactgccgaacatttcaaagaatatacgaacaagctcttttatggtcagaaatgttagcccttttccccttaaacttgtatttcctttcttcttccctcctaaaattttatctaaatgatatttatatttgatgcttttaagccttttattaatcactcctatacttgcctgcaacataaatatataagttgaagc

SEQ ID NO: 23136 - protein, 118 aa, Homo sapiens
MRAGLCRHSGMELLLKGLVGRGWPTGLTTGAVGPASPSSGEPGLSRSAVGPRLPPLQGETLQSRCGGSPCRTGQAGSAAFLCQIQWGLSAQALATSFGLGLPARPGKAPLHRPRKTME

SEQ ID NO: 23137 - DNA, 2523 bp, Homo sapiens
gtttttatgtaatttgtcctgatttaaaaaaaaaaaatcacatgcgggtaaactcaacatattttaatttctctttagagaaattttccacttgagccaggtatggtggctcttgcctgtaatctgagctactcgggaggttgaggtgggaggatcacttgagcccaggagttggaggctgcagtgagccatgatcgcaccattgcactccagcctggacaacagagtgagatcctgtctcaaaaattaaaaaaagcagtaattttttcttctcaagtcattcttttaaaataaatcaaaagtattttaacagaacaatctgttcctcgttgattttaaacagccccccagctaagtccactggttgtcggtctccatggcccatctccccaccttgcttcctcgctggcttaaattttcaagtggacgagcccttttcagcttggcttgtccacctcccaggtgtgtttcctgaagatgcttgtacttatgtctaagagcggcagctccccacatctcagccacctgcaatcgttgagggttgttggactctaaacttatgtgcctttcctgtttcctctttgccttttgcaaattgaagaaccgtgtaaaaccatttttatgtggcttcaacgtcaactataaattagcttggttatcttctaggagaaatgctatttattttggagtagtagtaaaaagggctcaaaggataaggaggccattcaggcctattctgaatccctgatgacatcagctcccaagggctctgtgctgcaggaagcaaaactgtagggtcctgaggacaccgtgagccagccaggcctggccgctgggcctgaccggccccccagcccctacaccccgcttctcccggactctcccagcggacagccccccagccccacagcctgagcctcccagctgccatgtgcctgttgcacacctgcacacacgccctggcacacatacacacatgcgtgcaggcttgtgcagacactcagggatggagctgctgctgaagggacttgtagggagaggctcgtcaacaagcactgttctggaaccttctctccacgtggcccacaggcctgaccacaggggctgtgggtcctgcgtccccttcctcgggtgagcctggcctgtcccgttcagccgttgggcccaggcttcctcccctccaaggtgaaacactgcagtcccggtgtggtggctccccatgcaggacgggccaggctgggagtgccgccttcctgtgccaaattcagtggggactcagtgcccaggccctggccacgagctttggccttggtctacctgccaggccaggcaaagcgcctttacacaggcctcggaaaacaatggagtgagcacaagatgccctgtgcagctgcccgagggtctccgcccaccccggccggactttgatccccccgaagtcttcacaggcactgcatcgggttgtctggcgcccttttcctccagcctaaactgacatcatcctatggactgagccggccactctctggccgaagtggccgcaggctgtgcccccgagctgcccccaccccctcacagggtccctcagattataggtgcccaggctgaggtgaagaggcctgggggccctgccttccgggcgctcctggaccctggggcaaacctgtgacccttttctactggaatagaaatgagttttatcatctttgaaaaataattcactcttgaagtaataaacgtttaaaaaaatgggatgcctgcctctgtgacagccttgtttgctgaggtcgtgggggtgggggcctctgggaagttccgggctcctcttctcttggtcaatagctcctttctggtggctgccaagagcgtctctcccagggccgggctgctggcttaccttcctgttgttttcaaatttcaaccttgtgcaatgttgagtttcatagaaatactgcatgagtacgcccttgtttagaagcagcagggtctgagtcccatcccacagcccccagtgcagacgcttttgccacttttgcatggggccccctggatgtgtttctgtgcatttatctacaaatcctggtgcccataggacatgccccgtgttgttctaggcctttgctttctgctcgttacataaatggtgaagaagagaagcgggtaagagaacagattggagccatctaaaagttctcatcttaagtgtagatcattgcaaaggatggaattttctccgattgtcatcatcgttgatgtttgaatatgagaccatttcatcagtatttaagtgtgcccgctgggatctaactaggagaggagagggtattcactgccgaacatttcaaagaatatacgaacaagctcttttatggtcagaaatgttagcccttttccccttaaacttgtatttcctttcttcttccctcctaaaattttatctaaatgatatttatatttgatgcttttaagccttttattaatcactcctatacttgcctgcaacataaatatataagttgaagc

SEQ ID NO: 23138 - protein, 91 aa, Homo sapiens
MQDGPGWECRLPVPNSVGTQCPGPGHELWPWSTCQARQSAFTQASENNGVSTRCPVQLPEGLRPPRPDFDPPEVFTGTASGCLAPFSSSLN

SEQ ID NO: 23139 - DNA, 1876 bp, Homo sapiens
gcggtcactgctgggggctgcgcagcacgcttgcgtcttttgcatgccgcgttgccactactctgcctgttctggaaggcctgggaccctcccttggagggggcacaggtgggctttgagtaatgagacctggtacttgcatcatccattcatcaagtcagcacccggggatgccaggttctgttaggggcgaggggacgtacagcagtagaggagacagctgagatccctgctcagggggattgaggggggctggcatcccagccggggagacagatgaaaaccaagtaaatcagcagaaaagataatttcactcatgataggagctgtgaggggttagagccaaatagaaatacagcgtgagccacgtgtgaggttttcagtttaaattttctaatagccacttaacagtcaaaggaaacaggtggaattaattttaatcttatttaacccaaatatatgcaaagtattatcacttcaacatgtaatcagtataaacggcatcaatatttttgcagtgtttttgcatgaagtctttgaaatcctgtgtgtacgatacatgtgcagcaggtctcattttggactggccccgtttcaagggctcaccaactgaatgcagcttccagactggagagtgcatgtctggagcaagtggggacaaggacagatggagcttcaggaaggcctctctgaagaggtagatagtgagctttgacatggaggccagggaggcactcagcacacagccacatgaggaatgctgcctggagcggccactgcaaaggccctgtggcagggacaggcaaggcacattggacggtcaggtagggccagggtggctggaggggagtgagggcagggacagagccggccactctctggccgaagtggccgcaggctgtgcccccgagctgcccccaccccctcacagggtccctcagattataggtgcccaggctgaggtgaagaggcctgggggccctgccttccgggcgctcctggaccctggggcaaacctgtgacccttttctactggaatagaaatgagttttatcatctttgaaaaataattcactcttgaagtaataaacgtttaaaaaaatgggatgcctgcctctgtgacagccttgtttgctgaggtcgtgggggtgggggcctctgggaagttccgggctcctcttctcttggtcaatagctcctttctggtggctgccaagagcgtctctcccagggccgggctgctggcttaccttcctgttgttttcaaatttcaaccttgtgcaatgttgagtttcatagaaatactgcatgagtacgcccttgtttagaagcagcagggtctgagtcccatcccacagcccccagtgcagacgcttttgccacttttgcatggggccccctggatgtgtttctgtgcatttatctacaaatcctggtgcccataggacatgccccgtgttgttctaggcctttgctttctgctcgttacataaatggtgaagaagagaagcgggtaagagaacagattggagccatctaaaagttctcatcttaagtgtagatcattgcaaaggatggaattttctccgattgtcatcatcgttgatgtttgaatatgagaccatttcatcagtatttaagtgtgcccgctgggatctaactaggagaggagagggtattcactgccgaacatttcaaagaatatacgaacaagctcttttatggtcagaaatgttagcccttttccccttaaacttgtatttcctttcttcttccctcctaaaattttatctaaatgatatttatatttgatgcttttaagccttttattaatcactcctatacttgcctgcaacataaatatataagttgaagc

SEQ ID NO: 23140 - protein, 101 aa, Homo sapiens
MEAREALSTQPHEECCLERPLQRPCGRDRQGTLDGQVGPGWLEGSEGRDRAGHSLAEVAAGCAPELPPPPHRVPQIIGAQAEVKRPGGPAFRALLDPGANL

SEQ ID NO: 23141 - DNA, 834 bp, Homo sapiens
cgtgagccagccaggcctggccgctgggcctgaccggccccccagcccctacaccccgcttctcccggactctcccagcggacagccccccagccccacagcctgagcctcccagctgccatgtgcctgttgcacacctgcacacacgccctggcacacatacacacatgcgtgcaggcttgtgcagacactcagggatggagctgctgctgaagggacttgtagggagaggctcgtcaacaagcactgttctggaaccttctctccacgtggcccacaggcctgaccacaggggctgtgggtcctgcgtccccttcctcgggtgagcctggcctgtcccgttcagccgttgggcccaggcttcctcccctccaaggtgaaacactgcagtcccggtgtggtggctccccatgcaggacgggccaggctgggagtgccgccttcctgtgccaaattcagtggggactcagtgcccaggccctggccacgagctttggccttggtctacctgccaggccaggcaaagcgcctttacacaggcctcggaaaacaatggagtgagcacaagatgccctgtgcagctgcccgagggtctccgcccactctctggccgaagtggccgcaggctgtgcccccgagctgcccccaccccctcacagggtccctcagattataggtgcccaggctgaggtgaagaggcctgggggccctgccttccgggcgctcctggaccctggggcaaacctgtgacccttttctactggaatagaaatgagttttatcatctttgaaaaataattcactcttgaagtaataaacgtttaaaaaaatggg

SEQ ID NO: 23142 - protein, 92 aa, Homo sapiens; identical to SEQ ID NO: 23134

SEQ ID NO: 23143 - DNA, 1319 bp, Homo sapiens
agagagaccgtctctaaaaaataaaaaataaatcaacacataaacatacgttctcctcctgagggacagagcttgccccggttgttccatgttgactgtgctgcacacaggccgccccccttgctctgcccctcactgtattaagtctctttgggcctcagtttctccatctctaaaggaggtcggggaggccaggcgggtgttgagtgagatgaagaggcccttggagtcattccaggagtctataggtgactccagtctcttctcacttctgacagcctggtggcgggggtggagtctctgctggggatgtgggtacagggctgtggtgggcggggatgagggtggggtttggtgacagggcgtgggtggtcacccagctttgcctttctccacagggtcctgaggacaccgtgagccagccaggcctggccgctgggcctgaccggccccccagcccctacaccccgcttctcccggactctcccagcggacagccccccagccccacagcctgagcctcccagctgccatgtgcctgttgcacacctgcacacacgccctggcacacatacacacatgcgtgcaggcttgtgcagacactcagggatggagctgctgctgaagggacttgtagggagagggtggcccacaggcctgaccacaggggctgtgggtcctgcgtccccttcctcgggtgagcctggcctgtcccgttcagccgttgggcccaggcttcctcccctccaaggtgaaacactgcagtcccggtgtggtggctccccatgcaggacgggccaggctgggagtgccgccttcctgtgccaaattcagtggggactcagtgcccaggccctggccacgagctttggccttggtctacctgccaggccaggcaaagcgcctttacacaggcctcggaaaacaatggagtgagcacaagatgccctgtgcagctgcccgagggtctccgcccaccccggccggactttgatccccccgaagtcttcacaggcactgcatcgggttgtctggcgcccttttcctccagcctaaactgacatcatcctatggactgagccggccactctctggccgaagtggccgcaggctgtgcccccgagctgcccccaccccctcacagggtccctcagattataggtgcccaggctgaggtgaagaggcctgggggccctgccttccgggcgctcctggaccctggggcaaacctgtgacccttttctactggaatagaaatgagttttatcatctttgaaaaataattcactcttgaagtaataaacgtttaaaaaaatggg

SEQ ID NO: 23144 - protein, 118 aa, Homo sapiens; identical to SEQ ID NO: 23136

SEQ ID NO: 23145 - DNA, 1753 bp, Homo sapiens
gtttttatgtaatttgtcctgatttaaaaaaaaaaaatcacatgcgggtaaactcaacatattttaatttctctttagagaaattttccacttgagccaggtatggtggctcttgcctgtaatctgagctactcgggaggttgaggtgggaggatcacttgagcccaggagttggaggctgcagtgagccatgatcgcaccattgcactccagcctggacaacagagtgagatcctgtctcaaaaattaaaaaaagcagtaattttttcttctcaagtcattcttttaaaataaatcaaaagtattttaacagaacaatctgttcctcgttgattttaaacagccccccagctaagtccactggttgtcggtctccatggcccatctccccaccttgcttcctcgctggcttaaattttcaagtggacgagcccttttcagcttggcttgtccacctcccaggtgtgtttcctgaagatgcttgtacttatgtctaagagcggcagctccccacatctcagccacctgcaatcgttgagggttgttggactctaaacttatgtgcctttcctgtttcctctttgccttttgcaaattgaagaaccgtgtaaaaccatttttatgtggcttcaacgtcaactataaattagcttggttatcttctaggagaaatgctatttattttggagtagtagtaaaaagggctcaaaggataaggaggccattcaggcctattctgaatccctgatgacatcagctcccaagggctctgtgctgcaggaagcaaaactgtagggtcctgaggacaccgtgagccagccaggcctggccgctgggcctgaccggccccccagcccctacaccccgcttctcccggactctcccagcggacagccccccagccccacagcctgagcctcccagctgccatgtgcctgttgcacacctgcacacacgccctggcacacatacacacatgcgtgcaggcttgtgcagacactcagggatggagctgctgctgaagggacttgtagggagaggctcgtcaacaagcactgttctggaaccttctctccacgtggcccacaggcctgaccacaggggctgtgggtcctgcgtccccttcctcgggtgagcctggcctgtcccgttcagccgttgggcccaggcttcctcccctccaaggtgaaacactgcagtcccggtgtggtggctccccatgcaggacgggccaggctgggagtgccgccttcctgtgccaaattcagtggggactcagtgcccaggccctggccacgagctttggccttggtctacctgccaggccaggcaaagcgcctttacacaggcctcggaaaacaatggagtgagcacaagatgccctgtgcagctgcccgagggtctccgcccaccccggccggactttgatccccccgaagtcttcacaggcactgcatcgggttgtctggcgcccttttcctccagcctaaactgacatcatcctatggactgagccggccactctctggccgaagtggccgcaggctgtgcccccgagctgcccccaccccctcacagggtccctcagattataggtgcccaggctgaggtgaagaggcctgggggccctgccttccgggcgctcctggaccctggggcaaacctgtgacccttttctactggaatagaaatgagttttatcatctttgaaaaataattcactcttgaagtaataaacgtttaaaaaaatggg

SEQ ID NO: 23146 - protein, 91 aa, Homo sapiens; identical to SEQ ID NO: 23138

SEQ ID NO: 23147 - DNA, 2741 bp, Homo sapiens
gctcaggccccgcccctgccgccggaatcctgaagcccaaggctgcccgggggcggtccggcggcgccggcgatggggcataaaaccactggccacctgccgggctgctcctgcgtgcgctgccgtcccggatccaccgtgcctctgcggcctgcgtgcccggagtccccgcctgtgtcgtctctgtcgccgtccccgtctcctgccaggcgcggagccctgcgagccgcgggtgggccccaggcgcgcagacatgggctgctccgccaaagcgcgctgggctgccggggcgctgggcgtcgcggggctactgtgcgctgtgctgggcgctgtcatgatcgtgatggtgccgtcgctcatcaagcagcaggtccttaagaacgtgcgcatcgaccccagtagcctgtccttcaacatgtggaaggagatccctatccccttctatctctccgtctacttctttgacgtcatgaaccccagcgagatcctgaagggcgagaagccgcaggtgcgggagcgcgggccctacgtgtacagggagttcaggcacaaaagcaacatcaccttcaacaacaacgacaccgtgtccttcctcgagtaccgcaccttccagttccagccctccaagtcccacggctcggagagcgactacatcgtcatgcccaacatcctggtcttgggtgcggcggtgatgatggagaataagcccatgaccctgaagctcatcatgaccttggcattcaccaccctcggcgaacgtgccttcatgaaccgcactgtgggtgagatcatgtggggctacaaggacccccttgtgaatctcatcaacaagtactttccaggcatgttccccttcaaggacaagttcggattatttgctgagctcaacaactccgactctgggctcttcacggtgttcacgggggtccagaacatcagcaggatccacctcgtggacaagtggaacgggctgagcaaggttgacttctggcattccgatcagtgcaacatgatcaatggaacttctgggcaaatgtggccgcccttcatgactcctgagtcctcgctggagttctacagcccggaggcctgccgatccatgaagctaatgtacaaggagtcaggggtgtttgaaggcatccccacctatcgcttcgtggctcccaaaaccctgtttgccaacgggtccatctacccacccaacgaaggcttctgcccgtgcctggagtctggaattcagaacgtcagcacctgcaggttcagtgcccccttgtttctctcccatcctcacttcctcaacgctgacccggttctggcagaagcggtgactggcctgcaccctaaccaggaggcacactccttgttcctggacatccacccggtcacgggaatccccatgaactgctctgtgaaactgcagctgagcctctacatgaaatctgtcgcaggcattggacaaactgggaagattgagcctgtggtcctgccgctgctctggtttgcagagagcggggccatggagggggagactcttcacacattctacactcagctggtgttgatgcccaaggtgatgcactatgcccagtacgtcctcctggcgctgggctgcgtcctgctgctggtccctgtcatctgccaaatccggagccaagagaaatgctatttattttggagtagtagtaaaaagggctcaaaggataaggaggccattcaggcctattctgaatccctgatgacatcagctcccaagggctctgtgctgcaggaagcaaaactgtagggtcctgaggacaccgtgagccagccaggcctggccgctgggcctgaccggccccccagcccctacaccccgcttctcccggactctcccagcggacagccccccagccccacagcctgagcctcccagctgccatgtgcctgttgcacacctgcacacacgccctggcacacatacacacatgcgtgcaggcttgtgcagacactcagggatggagctgctgctgaagggacttgtagggagaggctcgtcaacaagcactgttctggaaccttctctccacgtggcccacaggcctgaccacaggggctgtgggtcctgcgtccccttcctcgggtgagcctggcctgtcccgttcagccgttgggcccaggcttcctcccctccaaggtgaaacactgcagtcccggtgtggtggctccccatgcaggacgggccaggctgggagtgccgccttcctgtgccaaattcagtggggactcagtgcccaggccctggccacgagctttggccttggtctacctgccaggccaggcaaagcgcctttacacaggcctcggaaaacaatggagtgagcacaagatgccctgtgcagctgcccgagggtctccgcccaccccggccggactttgatccccccgaagtcttcacaggcactgcatcgggttgtctggcgcccttttcctccagcctaaactgacatcatcctatggactgagccggccactctctggccgaagtggccgcaggctgtgcccccgagctgcccccaccccctcacagggtccctcagattataggtgcccaggctgaggtgaagaggcctgggggccctgccttccgggcgctcctggaccctggggcaaacctgtgacccttttctactggaatagaaatgagttttatcatctttgaaaaataattcactcttgaagtaataaacgtttaaaaaaatggg

SEQ ID NO: 23148 - protein, 509 aa, Homo sapiens
MGCSAKARWAAGALGVAGLLCAVLGAVMIVMVPSLIKQQVLKNVRIDPSSLSFNMWKEIPIPFYLSVYFFDVMNPSEILKGEKPQVRERGPYVYREFRHKSNITFNNNDTVSFLEYRTFQFQPSKSHGSESDYIVMPNILVLGAAVMMENKPMTLKLIMTLAFTTLGERAFMNRTVGEIMWGYKDPLVNLINKYFPGMFPFKDKFGLFAELNNSDSGLFTVFTGVQNISRIHLVDKWNGLSKVDFWHSDQCNMINGTSGQMWPPFMTPESSLEFYSPEACRSMKLMYKESGVFEGIPTYRFVAPKTLFANGSIYPPNEGFCPCLESGIQNVSTCRFSAPLFLSHPHFLNADPVLAEAVTGLHPNQEAHSLFLDIHPVTGIPMNCSVKLQLSLYMKSVAGIGQTGKIEPVVLPLLWFAESGAMEGETLHTFYTQLVLMPKVMHYAQYVLLALGCVLLLVPVICQIRSQEKCYLFWSSSKKGSKDKEAIQAYSESLMTSAPKGSVLQEAKL

SEQ ID NO: 23149 - DNA, 2862 bp, Homo sapiens
gctcaggccccgcccctgccgccggaatcctgaagcccaaggctgcccgggggcggtccggcggcgccggcgatggggcataaaaccactggccacctgccgggctgctcctgcgtgcgctgccgtcccggatccaccgtgcctctgcggcctgcgtgcccggagtccccgcctgtgtcgtctctgtcgccgtccccgtctcctgccaggcgcggagccctgcgagccgcgggtgggccccaggcgcgcagacatgggctgctccgccaaagcgcgctgggctgccggggcgctgggcgtcgcggggctactgtgcgctgtgctgggcgctgtcatgatcgtgatggtgccgtcgctcatcaagcagcaggtccttaagaacgtgcgcatcgaccccagtagcctgtccttcaacatgtggaaggagatccctatccccttctatctctccgtctacttctttgacgtcatgaaccccagcgagatcctgaagggcgagaagccgcaggtgcgggagcgcgggccctacgtgtacagggagttcaggcacaaaagcaacatcaccttcaacaacaacgacaccgtgtccttcctcgagtaccgcaccttccagttccagccctccaagtcccacggctcggagagcgactacatcgtcatgcccaacatcctggtcttgggtgcggcggtgatgatggagaataagcccatgaccctgaagctcatcatgaccttggcattcaccaccctcggcgaacgtgccttcatgaaccgcactgtgggtgagatcatgtggggctacaaggacccccttgtgaatctcatcaacaagtactttccaggcatgttccccttcaaggacaagttcggattatttgctgagctcaacaactccgactctgggctcttcacggtgttcacgggggtccagaacatcagcaggatccacctcgtggacaagtggaacgggctgagcaaggttgacttctggcattccgatcagtgcaacatgatcaatggaacttctgggcaaatgtggccgcccttcatgactcctgagtcctcgctggagttctacagcccggaggcctgccgatccatgaagctaatgtacaaggagtcaggggtgtttgaaggcatccccacctatcgcttcgtggctcccaaaaccctgtttgccaacgggtccatctacccacccaacgaaggcttctgcccgtgcctggagtctggaattcagaacgtcagcacctgcaggttcagtgcccccttgtttctctcccatcctcacttcctcaacgctgacccggttctggcagaagcggtgactggcctgcaccctaaccaggaggcacactccttgttcctggacatccacccggtcacgggaatccccatgaactgctctgtgaaactgcagctgagcctctacatgaaatctgtcgcaggcattggacaaactgggaagattgagcctgtggtcctgccgctgctctggtttgcagagagcggggccatggagggggagactcttcacacattctacactcagctggtgttgatgcccaaggtgatgcactatgcccagtacgtcctcctggcgctgggctgcgtcctgctgctggtccctgtcatctgccaaatccggagccaagtaggtgctggccagagggcagcccgggctgacagccattcgcttgcctgctgggggaaaggggcctcagatcggaccctctggccaaccgcagcctggagcccacctccagcagcagtcctgcgtctctgccggagtgggagcggtcactgctgggggctgcgcagcacgcttgcgtcttttgcatgccgcgttgccactactctgcctgttctggaaggcctgggaccctcccttggagggggcacagggtcctgaggacaccgtgagccagccaggcctggccgctgggcctgaccggccccccagcccctacaccccgcttctcccggactctcccagcggacagccccccagccccacagcctgagcctcccagctgccatgtgcctgttgcacacctgcacacacgccctggcacacatacacacatgcgtgcaggcttgtgcagacactcagggatggagctgctgctgaagggacttgtagggagaggctcgtcaacaagcactgttctggaaccttctctccacgtggcccacaggcctgaccacaggggctgtgggtcctgcgtccccttcctcgggtgagcctggcctgtcccgttcagccgttgggcccaggcttcctcccctccaaggtgaaacactgcagtcccggtgtggtggctccccatgcaggacgggccaggctgggagtgccgccttcctgtgccaaattcagtggggactcagtgcccaggccctggccacgagctttggccttggtctacctgccaggccaggcaaagcgcctttacacaggcctcggaaaacaatggagtgagcacaagatgccctgtgcagctgcccgagggtctccgcccaccccggccggactttgatccccccgaagtcttcacaggcactgcatcgggttgtctggcgcccttttcctccagcctaaactgacatcatcctatggactgagccggccactctctggccgaagtggccgcaggctgtgcccccgagctgcccccaccccctcacagggtccctcagattataggtgcccaggctgaggtgaagaggcctgggggccctgccttccgggcgctcctggaccctggggcaaacctgtgacccttttctactggaatagaaatgagttttatcatctttgaaaaataattcactcttgaagtaataaacgtttaaaaaaatggg

SEQ ID NO: 23150 - protein, 552 aa, Homo sapiens
MGCSAKARWAAGALGVAGLLCAVLGAVMIVMVPSLIKQQVLKNVRIDPSSLSFNMWKEIPIPFYLSVYFFDVMNPSEILKGEKPQVRERGPYVYREFRHKSNITFNNNDTVSFLEYRTFQFQPSKSHGSESDYIVMPNILVLGAAVMMENKPMTLKLIMTLAFTTLGERAFMNRTVGEIMWGYKDPLVNLINKYFPGMFPFKDKFGLFAELNNSDSGLFTVFTGVQNISRIHLVDKWNGLSKVDFWHSDQCNMINGTSGQMWPPFMTPESSLEFYSPEACRSMKLMYKESGVFEGIPTYRFVAPKTLFANGSIYPPNEGFCPCLESGIQNVSTCRFSAPLFLSHPHFLNADPVLAEAVTGLHPNQEAHSLFLDIHPVTGIPMNCSVKLQLSLYMKSVAGIGQTGKIEPVVLPLLWFAESGAMEGETLHTFYTQLVLMPKVMHYAQYVLLALGCVLLLVPVICQIRSQVGAGQRAARADSHSLACWGKGASDRTLWPTAAWSPPPAAVLRLCRSGSGHCWGLRSTLASFACRVATTLPVLEGLGPSLGGGTGS

SEQ ID NO: 23151 - DNA, 2347 bp, Homo sapiens
aaatcggggcccatgtgtgccgttgggaatgtaggatggtgcagctgctgtgtggaggcccccccaaaatttaacatagaattaccatatggtggggcaaccccacttctgggtatcaaagaaatggaagtgggaacttgaagaggaatctggccaccgcgttcattgcagcgctgttcacgatggcccaacggtgggagcaacccgagtgtccgctgatgggtggtgggtaagaagctggggcccatccacacgttggaataggattcagcctggaaaaggaaggacgtttggacgcacgctgcgacatgcacgggccttgaggaagttatgcgagtgaaataagccacaacaggacaaataccgtacgattccatttgcatgagctccctagagtagccagatccacagagacagaaaagagaatgaacgtgcgcatcgaccccagtagcctgtccttcaacatgtggaaggagatccctatccccttctatctctccgtctacttctttgacgtcatgaaccccagcgagatcctgaagggcgagaagccgcaggtgcgggagcgcgggccctacgtgtacagggagttcaggcacaaaagcaacatcaccttcaacaacaacgacaccgtgtccttcctcgagtaccgcaccttccagttccagccctccaagtcccacggctcggagagcgactacatcgtcatgcccaacatcctggtcttgggtgcggcggtgatgatggagaataagcccatgaccctgaagctcatcatgaccttggcattcaccaccctcggcgaacgtgccttcatgaaccgcactgtgggtgagatcatgtggggctacaaggacccccttgtgaatctcatcaacaagtactttccaggcatgttccccttcaaggacaagttcggattatttgctgagctcaacaactccgactctgggctcttcacggtgttcacgggggtccagaacatcagcaggatccacctcgtggacaagtggaacgggctgagcaaggttgacttctggcattccgatcagtgcaacatgatcaatggaacttctgggcaaatgtggccgcccttcatgactcctgagtcctcgctggagttctacagcccggaggcctgccgatccatgaagctaatgtacaaggagtcaggggtgtttgaaggcatccccacctatcgcttcgtggctcccaaaaccctgtttgccaacgggtccatctacccacccaacgaaggcttctgcccgtgcctggagtctggaattcagaacgtcagcacctgcaggttcagtgcccccttgtttctctcccatcctcacttcctcaacgctgacccggttctggcagaagcggtgactggcctgcaccctaaccaggaggcacactccttgttcctggacatccacccggtcacgggaatccccatgaactgctctgtgaaactgcagctgagcctctacatgaaatctgtcgcaggcattggacaaactgggaagattgagcctgtggtcctgccgctgctctggtttgcagagagcggggccatggagggggagactcttcacacattctacactcagctggtgttgatgcccaaggtgatgcactatgcccagtacgtcctcctggcgctgggctgcgtcctgctgctggtccctgtcatctgccaaatccggagccaagtaggtgctggccagagggcagcccgggctgacagccattcgcttgcctgctgggggaaaggggcctcagatcggaccctctggccaaccgcagcctggagcccacctccagcagcagtcctgcgtctctgccggagtgggagcggtcactgctgggggctgcgcagcacgcttgcgtcttttgcatgccgcgttgccactactctgcctgttctggaaggcctgggaccctcccttggagggggcacaggtgggctttgagtaatgagacctggtacttgcatcatccattcatcaagtcagcacccggggatgccaggttctgttaggggcgaggggacgtacagcagtagaggagacagctgagatccctgctcagggggattgaggggggctggcatcccagccggggagacagatgaaaaccaagtaaatcagcagaaaagataatttcactcatgataggagctgtgaggggttagagccaaatagaaatacagcgtgagccacgtgtgaggttttcagtttaaattttctaatagccacttaacagtcaaaggaaacaggtggaattaattttaatcttatttaacccaaatatatgcaaagtattatcacttcaacatgtaatcagtataaacggc

SEQ ID NO: 23152 - protein, 512 aa, Homo sapiens
MNVRIDPSSLSFNMWKEIPIPFYLSVYFFDVMNPSEILKGEKPQVRERGPYVYREFRHKSNITFNNNDTVSFLEYRTFQFQPSKSHGSESDYIVMPNILVLGAAVMMENKPMTLKLIMTLAFTTLGERAFMNRTVGEIMWGYKDPLVNLINKYFPGMFPFKDKFGLFAELNNSDSGLFTVFTGVQNISRIHLVDKWNGLSKVDFWHSDQCNMINGTSGQMWPPFMTPESSLEFYSPEACRSMKLMYKESGVFEGIPTYRFVAPKTLFANGSIYPPNEGFCPCLESGIQNVSTCRFSAPLFLSHPHFLNADPVLAEAVTGLHPNQEAHSLFLDIHPVTGIPMNCSVKLQLSLYMKSVAGIGQTGKIEPVVLPLLWFAESGAMEGETLHTFYTQLVLMPKVMHYAQYVLLALGCVLLLVPVICQIRSQVGAGQRAARADSHSLACWGKGASDRTLWPTAAWSPPPAAVLRLCRSGSGHCWGLRSTLASFACRVATTLPVLEGLGPSLGGGTGGL

SEQ ID NO: 23153 - DNA, 1769 bp, Homo sapiens
aaaaatacagacagggtcttactatgttggctaggttggtcttgagctactggcctcaagcaatccttccgcctcggcctcccaaagcgctgggattacctgcgtgagccactgcgcccagctggctctcagtttcaatgtcaaggggatccctgaaaagccaggttctctgcatctctctgctctggcattttctgcagggcacagtggctgcctctgtctgggcatctcatccaacaggacacatgcaggaagcatctcttccttggtccatttttatcagcaatgaaacctttgcaagaattcccccagctcaccccctctcgtgtttttcaccagcatgtgctcacatgtccacccctaagccaatcgtagtgagaggaactgtattaccaagatggctgagaataatcaggatttcttccagatgggaaaatgaggtccccctctttgagcatctgtgactgccgggaagcagatagaccctctgccttcaagaaagaaggggtgagaaagcatgaatttcagaaaggcaccaatggtatctatcatcacacttgtttaatttcatcctcacaaaaactctctgaggtattacttgtccccatcagcatgtatcttgtatttgacctctgagtggatcatctttttaatttttaaaatttttgtgggtacacggtaggtgtatctatttatgggatacatgttttgatatgggcaagcaaagtgtaataatcatgtcatggagaatggggtgttcatcccctcaagcattcatcctttgtgttacaaacaatccaattctactcttttttttttttgagatggagttttgctcttgttgcccaggctggagtgcaatggtacgatctcagctcactgcaacctccgccgctcagattcaagtgattctcctgcctcagcctcctgagtagtgggactgcaggtgcctgccaccacacccagctaattttttttttgtatttttagtagagatggggtttcaccgtgttagccgggatggtcttgatctcctgaccttgtgatcttcccctctcggcctcccaaagtgctggaattacaggcgtgagccaccatgcccggccattatttttgttttaacagagaaaatgtatccacatgctacgtgtttgattaaaaattacaaggccaagcatggtggctcaaacttgcgatcccagcactttatggggctgaggtgggagggtcacttgaagccctgagtttaagactagcgtgggcaacatagtgagacccccatctctacaaaacaaaacaacaacaaaactaagctggtgcatggtggcatgcacctatagtcctagctacttgagaggctgaggtgggaggatatcttgagcccaggagctcgaggctgcagtgagctgtgtttgtgccactgtactccaacctgggcaacaaagtgaaatcccatctcttttttttttttttgagacggagtctggctctgtcgcccaggctggagtgcagtggtgcgatctcggctcactgcaagctccaccttccgggttcacgccattctcctgcctcagcctcctgagtagctgggactacaggcgcccgccaccgcacccacctagttttttgtatttttagtggagacggggtttcactgttttagccaggatggtctcaatctcctgacctcgtgatccgcccgtctcggcctcccaaagtgctgggattacaggtgtgagccaccgcgcccggccaaaatcccatctctt

SEQ ID NO: 23154 - protein, 108 aa, Homo sapiens [sequence omitted]

SEQ ID NO: 23155 - DNA, 473 bp, Homo sapiens
tccttctcaccctccaaattgctcctgcctcctctgctgcgtctctaggactctcctgattcactctcctcttctgatctgcctctcctggatcatccaagataatctctttattttcaggctcctctgtctccagcctggagggagggcgcagagggagctggtgagcctggctgcctgccttctgcagctgacctccagaagtgaccagggcagcatccagcactgggcccagctgactacagttccacaggaaaaggggctgtcttagtcacttttcatccacatagctgctaagttcatgaggggacccagctacgggctttaactgctgcctcccttgcagagggactaggacttaactgagaaagatggaaaaacaagccacggaagtaacttttcacataaaagtgaatttaaggcacctgagactttaatgtgtgggcagataataaaaattctgttgaaatgtt

SEQ ID NO: 23156 - protein, 89 aa, Homo sapiens
PSHPPNCSCLLCCVSRTLLIHSPLLICLSWIIQDNLFIFRLLCLQPGGRAQRELVSLAACLLQLTSRSDQGSIQHWAQLTTVPQEKGLS

SEQ ID NO: 23157 - DNA, 552 bp, Homo sapiens
ctgggctaggacaagaggcagaggcagagagacagagaggagccaccctaagaagagagaccagatacccttttctcatcctttgagttcaacagatgtctcttctggttgcaagtgacagaagcccacacagaaaaggctcagaccaaagagaaatttatgggctcctgaaacccctcacagtctcagacaggattctttcaagaattgcaaacttggctgaagaccttcctgtcccctttcttacctcccatgtacaggatgggggtgatgatcccacttctctgactctcacccagaagttaggaactccttaagcctcccttgcagagggactaggacttaactgagaaaggtgagtagaagccatatcaccacctcccagcctgacctataaaacgtctcatgggtagtcctgcatgctttgttgctgcaaatcagaagatgcttgttaaagatggagaagtcacaggatggaaaaagcctaggttcttgaattagttcttggtggatctactcacccatcaacaaaaatgaccagactggactttc

SEQ ID NO: 23158 - protein, 73 aa, Homo sapiens
MSLLVASDRSPHRKGSDQREIYGLLKPLTVSDRILSRIANLAEDLPVPFLTSHVQDGGDDPTSLTLTQKLGTP

SEQ ID NO: 23159 - DNA, 360 bp, Homo sapiens
cagggctgggatgtgaccccggctctttcttggtttctcctcgccgcttctctctctcctgcagcctcacagtctcagacaggattctttcaagaattgcaaacttggctgaagaccttcctgtcccctttcttacctcccatgtacaggatgggggtgatgatcccacttctctgactctcacccagaagttaggaactccttaaggtttattaatcatttttcagtacaccatcttctgtcccggaggggccatgctgaagtcaaccaagccccaggccagaccaagaacagaacaactttgtatgtggtcctggggatgggatgaaagttagtaaaggaaacattctgacatccaaa

SEQ ID NO: 23160 - protein, 67 aa, Homo sapiens
GLGCDPGSFLVSPRRFSLSCSLTVSDRILSRIANLAEDLPVPFLTSHVQDGGDDPTSLTLTQKLGTP

SEQ ID NO: 23161 - DNA, 549 bp, Homo sapiens
cagtctcagacaggattctttcaagaattgcaaacttggctgaagaccttcctgtcccctttcttacctcccatgtacaggatgggggtgatgatcccacttctctgactctcacccagaagttaggaactccttaaggctcctctgtctccagcctggagggagggcgcagagggagctggtgagcctggctgcctgccttctgcagctgacctccagaagtgaccagggcagcatccagcactgggcccagctgactacagttccacaggaaaaggggctgtcttagtcacttttcatccacatagctgctaagttcatgaggggacccagctacgggctttaactgctgccttctgccatgggatgatgcagtaagaaggccctcaccagatgccactgccatgctcttgtgttttccagcccccagaaccataggccaatgaatttctatgatttataaatgagctatctcaggtgttctgttatagcatcacaaacagactgagaaaaaaatgaataaataaagagatgtcgaaatcattcctc

SEQ ID NO: 23162 - protein, 64 aa, Homo sapiens
SHFSDSHPEVRNSLRLLCLQPGGRAQRELVSLAACLLQLTSRSDQGSIQHWAQLTTVPQEKGLS

SEQ ID NO: 23163 - DNA, 460 bp, Homo sapiens
caaagaaaattctgtgataaactcatccagtgtgactgtaatgtgggtatctatttgatacctccaagtaactgtttattcttgtgccagttgagtagatggtacgggccagttggtgttgattagtgaaccacggacaaagggcatatgtcacatgagttgctcctggataaagtcacccagtcacttcctgatgaatatcctgcataaactccaaagacaaaagagagttaaggttgtttttctcaccttagaccaggcagtgatagaagaactgggggaagagataattgtatttatcttggtgagggtgacaaatcatggcaaatgagcaaaatgaaaaaggatacaagacaccggactttcaaatcaacaattgtttcaaaagactcctactggattcctgctagtgatgggagaaaattatcattctgtgagttgtcaataaatgtttaaccac

SEQ ID NO: 23164 - protein, 42 aa, Homo sapiens
MSKMKKDTRHRTFKSTIVSKDSYWIPASDGRKLSFCELSINV

SEQ ID NO: 23165 - DNA, 637 bp, Homo sapiens
ttgatatcaaagcaaaaggctcattcatttacttgcatttgtggttgggagcatttcccgaagagaggtggggaattggtgatgggaaagcacaagtcaggctggatgcccggccctgggcactctcatgcctcttctggagcccttcagtttggatcatcgccctttcccacatgccacattgtttgtccaccctgatagcctctgtcatgacacaccagccctgggatatcacataagctacaggtcagacgctgctttccagacagaattatggagaagacaaccatcattttggttcagccaacccatattgcacatttaaagccattagttgttcccacctctaataggagctatagatagtggatttcaagagagtaccaaggttgctactccataatggccagaagagcaagccaaaaacatcagagtaaacacagaaacctcacatctcagggaggtttgcttaacaaacatatcaagacctgggatacctggaaaactgcagatgaaaagaatatgtctaagatcctgttaacagcagaacttagactgctagccctgctggaaattttccatgctcttcattcgttctcctgtatttcctaacgccaataaaagaggagatccctga

SEQ ID NO: 23166 - protein, 69 aa, Homo sapiens
MARRASQKHQSKHRNLTSQGGLLNKHIKTWDTWKTADEKNMSKILLTAELRLLALLEIFHALHSFSCIS

SEQ ID NO: 23167 - DNA, 1079 bp, Homo sapiens
gttgtcttgggggcagcgccagccaccagagcccgagtcagcgcggccaggactctgcaggggcaggtagcgacccttagagacgcaacgtggcgcagcggactcggctgcgtggggcaagggccggggccggacacaggagcagcggggatgccgggtgcgctccgagggtgtggcccccgggctgtgcggggctcagagctgcttgctgggcgcggtgcccgacaaagttatcctggatcctatctttggtaccaatgtgacccatcctgagtgaaggctccatttctggcctttggtctctttctcggaaagcaggcctcagtggcctcagtttcttcccagaacctgcaatgccccaccaaggtgacaagaagtgcaaggagtcggttttcactgccaaccaaagaggtgacccccgcaaagcaaccatgttgggacagtccatttgctgcgttttgattatttgctaagagcaaataccttttctgtttgggttttgcttttagaaaaaaaatgtggcagatggtggtggctttccccgtcattgaaagaagaaaggtagtaactctactggtgcactcctctgagttgtgctaacaaagaagaatgctgaaagaaaagggaaatgaacaccattttcaggcagcttctccaagtttttttgacagtgttataattttcctttagcgactgttgaagcaaatatctgtatttatgttcagattaaaccgagagagcaaagactgctaaagccagtaatttctgggctgcaaatgcaggatagctccagtgaatttcagattcttaaaggtttttgctgtagcgaattcatgacacaaagcatttggagggaaacctattagagaagaaacacatcctaaatgagaattactgaggacgggaggctcttgtcatttattggattagttatagcactttacacaagcctgtaatatttgttctgctgctgtggtgtgactggtaaaatgaaaaggtatgtcaagggagtgcttgactgacgttcttatttcttccgtcttcttatattgctgggaggattctaccactgcagggct

SEQ ID NO: 23168 - protein, 40 aa, Homo sapiens
MPGALRGCGPRAVRGSELLAGRGARQSYPGSYLWYQCDPS

SEQ ID NO: 23169 - DNA, 333 bp, Homo sapiens
gggtgtggcccccgggctgtgcggggctcagagctgcttgctgggcgcggtgcccgacaaaggacagagaggagtcctgggaggcggctcatcattgctgaagatcaaggcttggaggagctactggacttggaggtgcagtcccgatgcctggagtccattcttgctgttcttgctgagaagatgttagagcaccacaggcttgttggccaaggtcctggaaaggtcttgctctgacacccaggctggtgttcagtggtgtgatcacagctcactaccgcctccacctcctcaaactcaatcaatcctcctgcctcggccttctgatgttta

SEQ ID NO: 23170 - protein, 62 aa, Homo sapiens
GVAPGLCGAQSCLLGAVPDKGQRGVLGGGSSLLKIKAWRSYWTWRCSPDAWSPFLLFLLRRC

SEQ ID NO: 23171 - DNA, 1310 bp, Homo sapiens
ccagccagctactgaaccttatgtgtgcctaggggccattttgagacaatttgctgaatattaaaagtacaaccaataatgtttctctccacatccacaatagcgcttagaggaagcatctgggattgagccatctcacatctgtctaatcacattcattcaaatgtgatgggcccaactggcctacgtacatggctgcatatcaccatgggtggaaattaaatcagaatttggctcaggagagagatgaagagaaaatgcacgtagataattggctcagataacattctgtttctggaagtcacaaagagtggaaattggaatatgtaaattaaagaaaaacagtccttaagatcaagtccgcaatggaagaagagcattcatctggtacaggttgatgattgtgtaagcccaaggagtgatgtcaacactggggttcacctgagaacatggacatggttgatgagggtttaggagatgctcatacgaagtcttcatatgttccctggatcccagctctgccttcccaccagagaggatgtaattcagccgagatgcccagagtcagctctctgctcatatctgttccgcactgaagccaatcatctgagaaacctaagaagtgtttaatgtagttaggaaagtgagggatgaagaccataaattccttttcatgtagcagagtatatatgtgatactcattctgtggtatttggggcataaacaagagtcgatgaaggaatgtgaaagtactcgaaatcctgacttttatctctataaaaatggcatagggatgaaacacacttggttgttatgactgtactcttttcagatttactacttgcctttctactgatttttctgtgccacaggtcttgactcctgtaggctaaatttctcagcctcttctgctcactgatatatgggaaggtttggccaaaggtgggtgactggtggggagaaggatgagggaattcaggggattgctgagcccattctctagacagtgctgctggcactggctctgtcttctccgtttccatctcgcatcagacggttcttccctctatgggcctagtcctacctagacactttccagttggattccagttctggggatgctccctcctgcagggatctaagtccttcccattgtcttcggctcctgggctcagctagaaccatcttttcccattgtccctgtggtgctagggctttcagtggttattaacgtctgtgttgtatcatcttgcctgaatttcagctctctgtaaccagttccccaaataaaattccccccatttacctac

SEQ ID NO: 23172 - protein, 50 aa, Homo sapiens
MLIRSLHMFPGSQLCLPTREDVIQPRCPESALCSYLFRTEANHLRNLRSV

SEQ ID NO: 23173 - DNA, 1229 bp, Homo sapiens
ggaagcagccaccaccatcttgggagctctgggagcaaggacccctgtaacacattcatccttgaatgacaaaatgtctggtccagcatggtattataacataaacatgaagaggaagagacatgagagatacgcacagtgaagagaccaagctgggacacagtacgaaggtggcatctgcacgccaagcagagggacctcagaagaaactgagccagccagcaccccaccttcgtctttgacctccagcctccaaaggatagagctcttcatctctgttagaaacgaccatcaaaaagatacatcaattcattagaatcaaaaggacatgagttatcagaattctttctcctgaaagaaagtggagatcaaaggtaaaacttctagagaatgagatgaaggcagatgaaagaagttaacaagacattacatgacttgataatattgcatgtatgcaaaaaccttatgaaatcaactgtgttctagcgaccacttgtttttctttttgtcataatactttttattctcttgcaatgatattgattcatctgcacctgacatcaactctgcatttgtagaaggtgataagaatacagggaaatggaataagtggctttgcctgcaatcccgcagcagcagaaatgtccatttcctctctcctgaataatactacattctccactgggttccacaagtttcgaggtaaaagcatgaacatacacgaagtcaccatcactaccctcaccaccaccaccattatttccaccatattcacccttttaatacgcaaacttcctccaaggcttcctgaagtcacccagaaatgcatttccccaagagtgagttgtgctaacattgtatcctatggaactctgggaagctacccagatcctcaactcttggagtcttgctgactgcatgttccaggctccacatttaagctccagtgactgctgatgactgcatgacctaacacatgtcctcaatcctttcttggcctcagtttcttcaccagtgaattctgaatgctggaattggcaatatttcaggttctttccaactggaaatacccatgctaataattttagtaagtcaatagccatagaaacctactgacaaaatgagtattttaacagagacagttgtactttcttaatttttagcagaagggaatgcatatgtataatatctatgttgccttctatgtgtaaaaataaatacacagacac

SEQ ID NO: 23174 - protein, 90 aa, Homo sapiens
MSISSLLNNTTFSTGFHKFRGKSMNIHEVTITTLTTTTIISTIFTLLIRKLPPRLPEVTQKCISPRVSCANIVSYGTLGSYPDPQLLESC

SEQ ID NO: 23175 - DNA, 683 bp, Homo sapiens
caacaaatgaggcttcctgcagtcactaaggatcacgattctaaataaatctgagaagctcagcaatagaggtcgccccctcccccgggcggagtccttgatatctgaaacaaggcttcacatcatctggcattaaactatggggctgcttgaaggcagaatttgtcttattctgatgtaggatgaccaaaacatctggagaaacaaattggggtgagccctctccaagcgtgttaataaaatactagttgtcagcataagacagacaacaaggcaagacccagaagccacttgctccacatctgcagttacaaggcagaacaaatttgccagaaccaagctacagatggggaaactgaggcctggagtaaccagtcatattgcttccatgctgggaactctccaatgacatatcgcacaatacagagccaacctcaagttccccaccatagaccacaaggacttgcaagttctaaccttgcccaatctcccttatacgccctcagtccatgtgcctctgtgatgatggattgggtccttcttggcttcctccaaaggggcagaactgctctggaaggttcctcatggcattggcaatgatcttattctatgctgcttaaagagattaaattgactttgctcttgttacataattaatggttaagaataaaattctgaacatt

SEQ ID NO: 23176 - protein, 64 aa, Homo sapiens
MTYRTIQSQPQVPHHRPQGLASSNLAQSPLYALSPCASVMMDWVLLGFLQRGRTALEGSSWHWQ

SEQ ID NO: 23177 - DNA, 469 bp, Homo sapiens
cagaatttgtcttattctgatgtaggatgaccaaaacatctggagaaacaaattgggacccagaagccacttgctccacatctgcagttacaaggcagaacaaatttgccagaaccaagctacagatggggaaactgaggcctggagtaaccagtcatattgcttccatgctgggaactctccaatgacatatcgcacaatacagagccaacctcaagttccccaccatagaccacaaggacttgcaagttctaaccttgcccaatctcccttatacgccctcagtccatgtgcctctgtgatgatggattgggtccttcttggcttcctccaaaggggcagaactgctctggaaggttcctcatggcattggcaatgatcttattctatgctgcttaaagagattaaattgactttgctcttgttacataattaatggttaagaataaaattctgaacattttcaagg

SEQ ID NO: 23178 - protein, 53 aa, Homo sapiens
MTKTSGETNWDPEATCSTSAVTRQNKFARTKLQMGKLRPGVTSHIASMLGTLQ

SEQ ID NO: 23179 - DNA, 2632 bp, Homo sapiens
gggaataccaggggtgggcactgtcaagagacccagctttgacttcaaatgccacccagagggacaactgctcactttcagagcaggagcaggaggccagaggagagtgtgagtctaacatctgcacagtgagaagtccaggagaagcaaaaatgagatccaggctggagcggctgtgccagagggtccctatgatccagacctcaagagagggttcctggacctcccacagaaagggattcaagaccagctgaaactgattagagccaagatagccaaccaaatgacttcaggaagacctcaggcttcattatcatctcatttccatgctaaaaaaacccagctccctagaacaatgggaaatattgggcacttcatcaggcgagttcaggtgcatttctagagattgtccaggtgctggtaacaataatagagaaccatccatatccacaagaggcagaacctcttccagcaaaatggtgctgcctcacccaaaggtcacactggcattagcccctcatcctctggagttcatctcatccaggcgaagacagctggctggcctcagagggtgagacgcaactcgagggtaaaaacatttttacagggcatggacacaaaagtggcctttacctctggataagcttttaaaacttcccatttacatgtaaaggtgtactttctatgtgccaccaagaaacctaaagtgagtaaaaggtgtttcactttaatcaagttccccaatgagggggcacagctctgaaaagcactgtcacaacaggagattcgagggtgcatgcaaagcaatgtttctagaaaatgccaaaggaaacagacacaactccagtgtggactcccgcttccctgcactgctgctccatcctcagggcggaggccacatcgtccagctagctgtgagaacctcatcatgctccttgattgtgtgcagcaggtgtctgctgaagtcctccacactctgcctggccagattctcttcttgcaggattcctttgactaaactgtcaccttgtcaaagaggtctgatgccgactaaaagttctctgttactgggcgtgcagagagaagcctattgtggctgtaaggatgggtgaaggagaagggcacaaagtggacagcagaagcaggagctgtcacacaggcctggcccatcatggtggagagtttggatttcattctaagccaaatgggaagtctcatccgctgagcagtgcctcctcccgattcagcacgtccctggtgccgactttctgcacgtgttcactttgaggctgcattgtgggcctgcaagaaatgcaaagctggttgaggctttattcaattcaaattcaagctgttaaatcgaggctctcagactcctgctgcctggccagtggagaaattaactttcacatatggctttgggatttctctctgtcatcctggtcgacgtgttctctcatttttctgaagtctgggacctcaacacagacatctgggtgaaggccttgacagcagcgctggtgcaaaatgaattgtcacatcacacccaacgttctcaacctttagaatctgaaagtaagaaaaacacctcaaacaaaacattaaagattgaataattgaaggcactatgcttggtgctgaagaaggtctaaggaggtctacaccacagaggctgcacccactcctcagccttgctgagccacaccattctcatctctacagcatccacctctcttggctcttgtaaggattgagacatgccaccaggcttactattgattctgagtaatcagcacagatttctaaaagaaactttatgggatgctgagacatgaataaaaacaactttattcctttggaaaggacaacccacatgctaagaagatgacactacacgttgttatagcccgaaaggccctctttccacaggggagcagtgaaaagtagaggttgcccatgtggattcccaagtcagatagatgtggattcagatcccagctctgctgcttgctacccaagagaccatggactgtggactctttaggtctcagggtttttgtttgttgtctgtttttcacttccaaaaccagaaaatgagaagatattttccataagatggcggtggagaagagaacttgatggaccttgcttggacaaaatgccttcaccgctaactcagtcagctatggcgatgggtcaaggacctggtggttttacagagaagacccttggtcaaatctttgtgaatgaagcaaccattctgatgttcaataacaggaatgcaccagtttataccaaactatctgtactattgagaacagcaaaaatatctgaccaaaaacaccaaagagtgacattttaaaagacatcaaagaactctcaaggcttccagagttggaaagatcaagaaagagagaatgcaacttcattaagtgactcaactccaaataggagcatttcaagagtatgtatttcaacaaagaagtattagaagatgacagtgtccttgcagtatcttttaggggctatcagaacatgatttctgctatattctatcatcggagccttaataatgttaactataattcaagggaagatcaaataaacttcacctttcaaggaaaggagtaac

SEQ ID NO: 23180 - protein, 122 aa, Homo sapiens
MRGHSSEKHCHNRRFEGACKAMFLENAKGNRHNSSVDSRFPALLLHPQGGGHIVQLAVRTSSCSLIVCSRCLLKSSTLCLARFSSCRIPLTKLSPCQRGLMPTKSSLLLGVQREAYCGCKDG

SEQ ID NO: 23181 - DNA, 2452 bp, Homo sapiens
gggaataccaggggtgggcactgtcaagagacccagctttgacttcaaatgccacccagagggacaactgctcactttcagagcaggagcaggaggccagaggagagtgggtccctatgatccagacctcaagagagggttcctggacctcccacagaaagggattcaagaccagctgaaactgattagagccaagatagccaaccaaatgacttcaggaagacctcaggcttcattatcatctcatttccatgctaaaaaaacccagctccctagaacaatgggaaatattgggcacttcatcaggcgagttcaggtgcatttctagagattgtccaggtgctggtaacaataatagagaaccatccatatccacaagaggcagaacctcttccagcaaaatggtgctgcctcacccaaaggtggccgaggaggccgtcggaggaccacaaagctgcaagtggctttcctgcggcctgcagggaacaggtggaggacacttggaagggcacccaccccgggtctcacaggagtctgcacccgcaggtcacactggcattagcccctcatcctctggagttcatctcatccaggcgaagacagctggctggcctcagagggtgagacgcaactcgagggtaaaaacatttttacagggcatggacacaaaagtggcctttacctctggataagcttttaaaacttcccatttacatgtaaaggtgtactttctatgtgccaccaagaaacctaaagtgagtaaaaggtgtttcactttaatcaagttccccaatgagggggcacagctctgaaaagcactgtcacaacaggagattcgagggtgcatgcaaagcaatgtttctagaaaatgccaaaggaaacagacacaactccagtgtggactcccgcttccctgcactgctgctccatcctcagggcggaggccacatcgtccagctagctgtgagaacctcatcatgctccttgattgtgtgcagcaggtgtctgctgaagtcctccacactctgcctgtctcatccgctgagcagtgcctcctcccgattcagcacgtccctggtgccgactttctgcacgtgttcactttgaggctgcattgtgggcctgcaagaaatgcaaagctggttgaggctttattcaattcaaattcaagctgttaaatcgaggctctcagactcctgctgcctggccagtggagaaattaactttcacatatggctttgggatttctctctgtcatcctggtcgacgtgttctctcatttttctgaagtctgggacctcaacacagacatctgggtgaaggccttgacagcagcgctggtgcaaaatgaattgtcacatcacacccaacgttctcaacctttagaatctgaaagtaagaaaaacacctcaaacaaaacattaaagattgaataattgaaggcactatgcttggtgctgaagaaggtctaaggaggtctacaccacagaggctgcacccactcctcagccttgctgagccacaccattctcatctctacagcatccacctctcttggctcttgtaaggattgagacatgccaccaggcttactattgattctgagtaatcagcacagatttctaaaagaaactttatgggatgctgagacatgaataaaaacaactttattcctttggaaaggacaacccacatgctaagaagatgacactacacgttgttatagcccgaaaggccctctttccacaggggagcagtgaaaagtagaggttgcccatgtggattcccaagtcagatagatgtggattcagatcccagctctgctgcttgctacccaagagaccatggactgtggactctttaggtctcagggtttttgtttgttgtctgtttttcacttccaaaaccagaaaatgagaagatattttccataagatggcggtggagaagagaacttgatggaccttgcttggacaaaatgccttcaccgctaactcagtcagctatggcgatgggtcaaggacctggtggttttacagagaagacccttggtcaaatctttgtgaatgaagcaaccattctgatgttcaataacaggaatgcaccagtttataccaaactatctgtactattgagaacagcaaaaatatctgaccaaaaacaccaaagagtgacattttaaaagacatcaaagaactctcaaggcttccagagttggaaagatcaagaaagagagaatgcaacttcattaagtgactcaactccaaataggagcatttcaagagtatgtatttcaacaaagaagtattagaagatgacagtgtccttgcagtatcttttaggggctatcagaacatgatttctgctatattctatcatcggagccttaataatgttaactataattcaagggaagatcaaataaacttcacctttcaaggaaaggagtaac

SEQ ID NO: 23182 - protein, 146 aa, Homo sapiens; identical to SEQ ID NO: 3061

SEQ ID NO: 23183 - DNA, 2528 bp, Homo sapiens
gggaataccaggggtgggcactgtcaagagacccagctttgacttcaaatgccacccagagggacaactgctcactttcagagcaggagcaggaggccagaggagagtgtgagtctaacatctgcacagtgagaagtccaggagaagcaaaaatgagatccaggctggagcggctgtgccagagggtccctatgatccagacctcaagagagggttcctggacctcccacagaaagggattcaagaccagctgaaactgattagagccaagatagccaaccaaatgacttcaggaagacctcaggcttcattatcatctcatttccatgctaaaaaaacccagctccctagaacaatgggaaatattgggcacttcatcaggcgagttcaggtgcatttctagagattgtccaggtgctggtaacaataatagagaaccatccatatccacaagaggcagaacctcttccagcaaaatggtgctgcctcacccaaaggtggccgaggaggccgtcggaggaccacaaagctgcaagtggctttcctgcggcctgcagggaacaggtggaggacacttggaagggcacccaccccgggtctcacaggagtctgcacccgcaggtcacactggcattagcccctcatcctctggagttcatctcatccaggcgaagacagctggctggcctcagagggtgagacgcaactcgagggtaaaaacatttttacagggcatggacacaaaagtggcctttacctctggataagcttttaaaacttcccatttacatgtaaaggtgtactttctatgtgccaccaagaaacctaaagtgagtaaaaggtgtttcactttaatcaagttccccaatgagggggcacagctctgaaaagcactgtcacaacaggagattcgagggtgcatgcaaagcaatgtttctagaaaatgccaaaggaaacagacacaactccagtgtggactcccgcttccctgcactgctgctccatcctcagggcggaggccacatcgtccagctagctgtgagaacctcatcatgctccttgattgtgtgcagcaggtgtctgctgaagtcctccacactctgcctgtctcatccgctgagcagtgcctcctcccgattcagcacgtccctggtgccgactttctgcacgtgttcactttgaggctgcattgtgggcctgcaagaaatgcaaagctggttgaggctttattcaattcaaattcaagctgttaaatcgaggctctcagactcctgctgcctggccagtggagaaattaactttcacatatggctttgggatttctctctgtcatcctggtcgacgtgttctctcatttttctgaagtctgggacctcaacacagacatctgggtgaaggccttgacagcagcgctggtgcaaaatgaattgtcacatcacacccaacgttctcaacctttagaatctgaaagtaagaaaaacacctcaaacaaaacattaaagattgaataattgaaggcactatgcttggtgctgaagaaggtctaaggaggtctacaccacagaggctgcacccactcctcagccttgctgagccacaccattctcatctctacagcatccacctctcttggctcttgtaaggattgagacatgccaccaggcttactattgattctgagtaatcagcacagatttctaaaagaaactttatgggatgctgagacatgaataaaaacaactttattcctttggaaaggacaacccacatgctaagaagatgacactacacgttgttatagcccgaaaggccctctttccacaggggagcagtgaaaagtagaggttgcccatgtggattcccaagtcagatagatgtggattcagatcccagctctgctgcttgctacccaagagaccatggactgtggactctttaggtctcagggtttttgtttgttgtctgtttttcacttccaaaaccagaaaatgagaagatattttccataagatggcggtggagaagagaacttgatggaccttgcttggacaaaatgccttcaccgctaactcagtcagctatggcgatgggtcaaggacctggtggttttacagagaagacccttggtcaaatctttgtgaatgaagcaaccattctgatgttcaataacaggaatgcaccagtttataccaaactatctgtactattgagaacagcaaaaatatctgaccaaaaacaccaaagagtgacattttaaaagacatcaaagaactctcaaggcttccagagttggaaagatcaagaaagagagaatgcaacttcattaagtgactcaactccaaataggagcatttcaagagtatgtatttcaacaaagaagtattagaagatgacagtgtccttgcagtatcttttaggggctatcagaacatgatttctgctatattctatcatcggagccttaataatgttaactataattcaagggaagatcaaataaacttcacctttcaaggaaaggagtaaca

SEQ ID NO: 23184 - protein, 146 aa, Homo sapiens; identical to SEQ ID NO: 3061

SEQ ID NO: 23185 - DNA, 487 bp, Homo sapiens
tgagacaggctaccatctctgcgtgcagtccccgcggaatttacgcactttcgtcttgtgctcttagatgttctccagagactttgggagccgaggtgaagatggcgcaactaccagagggagagctggattctagagtccccacttgcttgcctggaaggagatctgctcagaactgccaggatgtcagaacacggctctgtacgagctcctgagatccagggctgtagttgtgagaatttgtcctaatgcctctggtctttgcctgtgcttcagcttatttgggggaacaaaaccaatctgattgctctcaacatccagttgtcactgattgggttcaaggaaattattttatcttcagaaaacattttgttatttgaagcagctatataagtgagataaatatatttgatacatatgtacagatttatatatatatagcaccaaacatacatatatattatatatatatatttcatataagcgt

SEQ ID NO: 23186 - protein, 43 aa, Homo sapiens
MPLVFACASAYLGEQNQSDCSQHPVVTDWVQGNYFIFRKHFVI

SEQ ID NO: 23187 - DNA, 632 bp, Homo sapiens
gggcagccggttgggctgggcccggaagggtgtgcagtagagcaagaggaggaagtggagggaaaggaaccagatgcttctgagacaggctaccatctctgcgtgcagtccccgcggaatttacgcactttcgtcttgtgctcttagatgttctccaggtagactgcaaccaacacctttagaataaacccacctgtgcttgggccagcctgagaggtcttcattccttgctgtccagaaaaccttcaaaggctgcagcataaccagcttctaacattgtccactggagcagagactttgggagccgaggtgaagatggcgcaactaccagagggagagctggattctagagtccccacttgcttgcctggaaggagatctgctcagaactgccaggatgtcagaacacggctctgtacgagctcctgagatccagggctgtagttgtgagaatttgtcctaatgcctctggtctttgcctgtgcttcagcttatttgggggaacaaaaccaatctgattgctctcaacatccagttgtcactgattgggttcaaggaaattattttatcttcagaaaacattttgttatttgaagcagctatataagtgagataaatatatttgatacata

SEQ ID NO: 23188 - protein, 43 aa, Homo sapiens; identical to SEQ ID NO: 23186

SEQ ID NO: 23189 - DNA, 1782 bp, Homo sapiens
ctttcctcaggcctggaatttgcatactcagctgcccccaagtccatgcagagtgccataatgggcttgttctttttcttctctggcgtcgggtcgttcgtgggttctggactgctggcactggtgtctatcaaagccatcggatggatgagcagtcacacagactttggtaagagccagcatcctgtcccttttgaaaatagccagtgagggggaggcgcaggcactcaggagatggctgagtgagcggaggtgttttcacgtggatggcctgtcccgagctgcctgtccaccgctccttccacagcactgctctgtgctgcttgcatcactgtgtttccttacatcatgaacggttttcaggagacaagcaggcctctcttctcatcccaggggccaagcctgccctggccacagcccagcgagcagctgctgcagccaccgctccttacggggacgtccttgacagacaagcaccttctccacgcccgtccagctcagtcttcgtgaggcagctgaatctgtaccccaagcttccctttctttaacttggtggtgtactttcgttttcttttcctaacagcaccttttctgatacgaaaaagacaagatagatagtaatattaacggctgctatttgaactattacttttttcttctggctgctattcaaggagctaccctcctgcttttcctcattatttctgtgaaatatgaccatcatcgagaccatcagcgatcaagagccaatggcgtgcccaccagcaggagggcctgaccttcctgaggccatgtgcggtttctgaggctgacatgtcagtaactgactggggtgcactgagaacaggcaagactttaaattcccataaaatgtctgacttcactgaaacttgcatgttgcctggattgatttcttctttccctctatccaaaggagcttggtaagtgccttactgcagcgtgtctcctggcacgctgggccctccgggaggagagctgcagatttcgagtatgtcgcttgtcattcaaggtctctgtgaatcctctagctgggttcccttttttacagaaactcacaaatggagattgcaaagtcttggggaactccacgtgttagttggcatcccagtttcttaaacaaatagtatcacctgcttcccatagccatatctcactgtaaaaaaaaaattaataaactgttacttatatttaagaaagtgaggatttttttttttttaaagataaaagcatggtcagatgctgcaaggattttacataaatgccatatttatggtttccttcctgagaacaatcttgctcttgccatgttctttgatttaggctggtagtaaacacatttcatctgctgcttcaaaaagtacttactttttaaaccatcaacattacttttctttcttaaggcaaggcatgcataagagtcatttgagaccatgtgtcccatctcaagccacagagcaactcacggggtacttcacaccttacctagtcagagtgcttatatatagctttattttggtacgattgagactaaagactgatcatggttgtatgtaaggaaaacattcttttgaacagaaatagtgtaattaaaaataattgaaagtgttaaatgtgaacttgagctgtttgaccagtcacatttttgtattgttactgtacgtgtatctggggcttctccgtttgttaatactttttctgtatttgttgctgtatttttggcataactttattataaaaagcatctcaaatgcgaaatccatg

SEQ ID NO: 23190 - protein, 93 aa, Homo sapiens
MACPELPVHRSFHSTALCCLHHCVSLHHERFSGDKQASLLIPGAKPALATAQRAAAAATAPYGDVLDRQAPSPRPSSSVFVRQLNLYPKLPFL

SEQ ID NO: 23191 - DNA, 2612 bp, Homo sapiens
ccaaaattacagtagcccagtttcactttgactagaaagtccctttgtcagctgtttcagtacattctgtgacatttagaaataatttaggtagctgtgttgggtgtgtacaattagtaagtgatggaatgagttgaagcagattcaatacagtgagctggtttcttacctccaaacttaatttgtgaccaaataattgattgctgggaggggaagaaaactaattccttcattttatttcccaaagtgaaggcattggagtctttcagcaatcttctaaacaaagtctgtttgattcatgtaagatgtctcatggtgggccatttacagaagagaaagtggaagatgtgaaagctctggtcaagattgtccctgttttcttggctttgataccttactggacagtgtatttccaagtgagtggtgacaaacaggtttaatttcctttatcttcctatgaagtcttaccctagcacttgttttggccatttctaaagtaggtaggactaggtgattttttttcccatgagtctacagaatcttggaatttttggttttagttatggagtcattttggctgctttaactatgtctaaagcctctctgaaaaagaagctgagaacaggtacgcttctggtttttcaggcccctcttgttaatgtaatttctcctttggataactggccattctttttcaaaattgatctccagaggactttacgatgaccaaatcattgacctgtctgttttcaaacttgagccattgtctatttctgggagtcactgtgtgtcgcatctgagtctagcttaggggaggggcaggatgcttagagtgtttgagagcacagttggtccacatataatgatactgttttttatacctagatgcagacaacatatgttttacagagtcttcatttgaggattccagaaatttcaaatattacaaccactcctcacacgctccctgcagcctggctgaccatgtttgatgctgtgctcatcctcctgctcatccctctgaaggacaaactggtcgatcccattttgagaagacatggcctgctcccatcctccctgaagaggatcgccgtgggcatgttctttgtcatgtgctcggcctttgctgcaggaattttggagagtaaaaggctgaaccttgttaaagagaaaaccattaatcagaccatcggcaacgtcgtctaccatgctgccgatctgtcgctgtggtggcaggtgccgcagtacttgctgattgggatcagcgagatctttgcaagtatcgcaggcctggaatttgcatactcagctgcccccaagtccatgcagagtgccataatgggcttgttctttttcttctctggcgtcgggtcgttcgtgggttctggactgctggcactggtgtctatcaaagccatcggatggatgagcagtcacacagactttggtaatattaacggctgctatttgaactattacttttttcttctggctgctattcaaggagctaccctcctgcttttcctcattatttctgtgaaatatgaccatcatcgagaccatcagcgatcaagagccaatggcgtgcccaccagcaggagggcctgaccttcctgaggccatgtgcggtttctgaggctgacatgtcagtaactgactggggtgcactgagaacaggcaagactttaaattcccataaaatgtctgacttcactgaaacttgcatgttgcctggattgatttcttctttccctctatccaaaggagcttggtaagtgccttactgcagcgtgtctcctggcacgctgggccctccgggaggagagctgcagatttcgagtatgtcgcttgtcattcaaggtctctgtgaatcctctagctgggttcccttttttacagaaactcacaaatggagattgcaaagtcttggggaactccacgtgttagttggcatcccagtttcttaaacaaatagtatcacctgcttcccatagccatatctcactgtaaaaaaaaaattaataaactgttacttatatttaagaaagtgaggatttttttttttttaaagataaaagcatggtcagatgctgcaaggattttacataaatgccatatttatggtttccttcctgagaacaatcttgctcttgccatgttctttgatttaggctggtagtaaacacatttcatctgctgcttcaaaaagtacttactttttaaaccatcaacattacttttctttcttaaggcaaggcatgcataagagtcatttgagaccatgtgtcccatctcaagccacagagcaactcacggggtacttcacaccttacctagtcagagtgcttatatatagctttattttggtacgattgagactaaagactgatcatggttgtatgtaaggaaaacattcttttgaacagaaatagtgtaattaaaaataattgaaagtgttaaatgtgaacttgagctgtttgaccagtcacatttttgtattgttactgtacgtgtatctggggcttctccgtttgttaatactttttctgtatttgttgctgtatttttggcataactttattataaaaagcatctcaaatgcgaaatccatg

SEQ ID NO: 23192 - protein, 240 aa, Homo sapiens
MQTTYVLQSLHLRIPEISNITTTPHTLPAAWLTMFDAVLILLLIPLKDKLVDPILRRHGLLPSSLKRIAVGMFFVMCSAFAAGILESKRLNLVKEKTINQTIGNVVYHAADLSLWWQVPQYLLIGISEIFASIAGLEFAYSAAPKSMQSAIMGLFFFFSGVGSFVGSGLLALVSIKAIGWMSSHTDFGNINGCYLNYYFFLLAAIQGATLLLFLIISVKYDHHRDHQRSRANGVPTSRRA

SEQ ID NO: 23193 - DNA, 2599 bp, Homo sapiens
gcggcggggcgaggcagctggcggcgtcgcatggagggctctgggggcggtgcgggcgagcgggcgccgctgctgggcgcgcggcgggcggcggcggccgcggcggcggctggggcgttcgcgggccggcgcgcggcgtgcggggccgtgctgctgacggagctgctggagcgcgccgctttctacggcatcacgtccaacctggtgctattcctgaacggggcgccgttctgctgggagggcgcgcaggccagcgaggcgctgctgctcttcatgggcctcacctacctgggctcgccgttcggaggctggctggccgacgcgcggctgggccgggcgcgcgccatcctgctgagcctggcgctctacctgctgggcatgctggccttcccgctgctggccgcgcccgccacgcgagccgcgctctgcggttccgcgcgcctgctcaactgcacggcgcctggtcccgacgccgccgcccgctgctgctcaccggccaccttcgcggggctggtgctggtgggcctgggcgtggccaccgtcaaggccaacatcacgcccttcggcgccgaccaggttaaagatcgaggtccggaagccactaggagattttttaattggttttattggagcattaacctgggagcgatcctgtcgttaggtggcattgcctatattcagcagaacgtcagctttgtcactggttatgcgatccccactgtctgcgtcggccttgcttttgtggtcttcctctgtggccagagcgttttcatcaccaagcctcctgatggcagtgccttcaccgacatgttcaagatactgacgtattcctgctgttcccagaagcgaagtggagagcgccagagtaatggatgcagacaacatatgttttacagagtcttcatttgaggattccagaaatttcaaatattacaaccactcctcacacgctccctgcagcctggctgaccatgtttgatgctgtgctcatcctcctgctcatccctctgaaggacaaactggtcgatcccattttgagaagacatggcctgctcccatcctccctgaagaggatcgccgtgggcatgttctttgtcatgtgctcggcctttgctgcaggaattttggagagtaaaaggctgaaccttgttaaagagaaaaccattaatcagaccatcggcaacgtcgtctaccatgctgccgatctgtcgctgtggtggcaggtgccgcagtacttgctgattgggatcagcgagatctttgcaagtatcgcaggcctggaatttgcatactcagctgcccccaagtccatgcagagtgccataatgggcttgttctttttcttctctggcgtcgggtcgttcgtgggttctggactgctggcactggtgtctatcaaagccatcggatggatgagcagtcacacagactttggtaatattaacggctgctatttgaactattacttttttcttctggctgctattcaaggagctaccctcctgcttttcctcattatttctgtgaaatatgaccatcatcgagaccatcagcgatcaagagccaatggcgtgcccaccagcaggagggcctgaccttcctgaggccatgtgcggtttctgaggctgacatgtcagtaactgactggggtgcactgagaacaggcaagactttaaattcccataaaatgtctgacttcactgaaacttgcatgttgcctggattgatttcttctttccctctatccaaaggagcttggtaagtgccttactgcagcgtgtctcctggcacgctgggccctccgggaggagagctgcagatttcgagtatgtcgcttgtcattcaaggtctctgtgaatcctctagctgggttcccttttttacagaaactcacaaatggagattgcaaagtcttggggaactccacgtgttagttggcatcccagtttcttaaacaaatagtatcacctgcttcccatagccatatctcactgtaaaaaaaaaattaataaactgttacttatatttaagaaagtgaggatttttttttttttaaagataaaagcatggtcagatgctgcaaggattttacataaatgccatatttatggtttccttcctgagaacaatcttgctcttgccatgttctttgatttaggctggtagtaaacacatttcatctgctgcttcaaaaagtacttactttttaaaccatcaacattacttttctttcttaaggcaaggcatgcataagagtcatttgagaccatgtgtcccatctcaagccacagagcaactcacggggtacttcacaccttacctagtcagagtgcttatatatagctttattttggtacgattgagactaaagactgatcatggttgtatgtaaggaaaacattcttttgaacagaaatagtgtaattaaaaataattgaaagtgttaaatgtgaacttgagctgtttgaccagtcacatttttgtattgttactgtacgtgtatctggggcttctccgtttgttaatactttttctgtatttgttgctgtatttttggcataactttattataaaaagcatctcaaatgcgaaatccatg

SEQ ID NO: 23194 - protein, 292 aa, Homo sapiens
MEGSGGGAGERAPLLGARRAAAAAAAAGAFAGRRAACGAVLLTELLERAAFYGITSNLVLFLNGAPFCWEGAQASEALLLFMGLTYLGSPFGGWLADARLGRARAILLSLALYLLGMLAFPLLAAPATRAALCGSARLLNCTAPGPDAAARCCSPATFAGLVLVGLGVATVKANITPFGADQVKDRGPEATRRFFNWFYWSINLGAILSLGGIAYIQQNVSFVTGYAIPTVCVGLAFVVFLCGQSVFITKPPDGSAFTDMFKILTYSCCSQKRSGERQSNGCRQHMFYRVFI

SEQ ID NO: 23195 - DNA, 2791 bp, Homo sapiens
tgggttctgggacaggtgacccggcggcggggcgaggcagctggcggcgtcgcatggagggctctgggggcggtgcgggcgagcgggcgccgctgctgggcgcgcggcgggcggcggcggccgcggcggcggctggggcgttcgcgggccggcgcgcggcgtgcggggccgtgctgctgacggagctgctggagcgcgccgctttctacggcatcacgtccaacctggtgctattcctgaacggggcgccgttctgctgggagggcgcgcaggccagcgaggcgctgctgctcttcatgggcctcacctacctgggctcgccgttcggaggctggctggccgacgcgcggctgggccgggcgcgcgccatcctgctgagcctggcgctctacctgctgggcatgctggccttcccgctgctggccgcgcccgccacgcgagccgcgctctgcggttccgcgcgcctgctcaactgcacggcgcctggtcccgacgccgccgcccgctgctgctcaccggccaccttcgcggggctggtgctggtgggcctgggcgtggccaccgtcaaggccaacatcacgcccttcggcgccgaccaggttaaagatcgaggtccggaagccactaggagattttttaattggttttattggagcattaacctgggagcgatcctgtcgttaggtggcattgcctatattcagcagaacgtcagctttgtcactggttatgcgatccccactgtctgcgtcggccttgcttttgtggtcttcctctgtggccagagcgttttcatcaccaagcctcctgatggcagtgccttcaccgacatgttcaagatactgacgtattcctgctgttcccagaagcgaagtggagagcgccagagtaatggtgaaggcattggagtctttcagcaatcttctaaacaaagtctgtttgattcatgtaagatgtctcatggtgggccatttacagaagagaaagtggaagatgtgaaagctctggtcaagattgtccctgttttcttggctttgataccttactggacagtgtatttccaaatgcagacaacatatgttttacagagtcttcatttgaggattccagaaatttcaaatattacaaccactcctcacacgctccctgcagcctggctgaccatgtttgatgctgtgctcatcctcctgctcatccctctgaaggacaaactggtcgatcccattttgagaagacatggcctgctcccatcctccctgaagaggatcgccgtgggcatgttctttgtcatgtgctcggcctttgctgcaggaattttggagagtaaaaggctgaaccttgttaaagagaaaaccattaatcagaccatcggcaacgtcgtctaccatgctgccgatctgtcgctgtggtggcaggtgccgcagtacttgctgattgggatcagcgagatctttgcaagtatcgcaggcctggaatttgcatactcagctgcccccaagtccatgcagagtgccataatgggcttgttctttttcttctctggcgtcgggtcgttcgtgggttctggactgctggcactggtgtctatcaaagccatcggatggatgagcagtcacacagactttggtaatattaacggctgctatttgaactattacttttttcttctggctgctattcaaggagctaccctcctgcttttcctcattatttctgtgaaatatgaccatcatcgagaccatcagcgatcaagagccaatggcgtgcccaccagcaggagggcctgaccttcctgaggccatgtgcggtttctgaggctgacatgtcagtaactgactggggtgcactgagaacaggcaagactttaaattcccataaaatgtctgacttcactgaaacttgcatgttgcctggattgatttcttctttccctctatccaaaggagcttggtaagtgccttactgcagcgtgtctcctggcacgctgggccctccgggaggagagctgcagatttcgagtatgtcgcttgtcattcaaggtctctgtgaatcctctagctgggttcccttttttacagaaactcacaaatggagattgcaaagtcttggggaactccacgtgttagttggcatcccagtttcttaaacaaatagtatcacctgcttcccatagccatatctcactgtaaaaaaaaaattaataaactgttacttatatttaagaaagtgaggatttttttttttttaaagataaaagcatggtcagatgctgcaaggattttacataaatgccatatttatggtttccttcctgagaacaatcttgctcttgccatgttctttgatttaggctggtagtaaacacatttcatctgctgcttcaaaaagtacttactttttaaaccatcaacattacttttctttcttaaggcaaggcatgcataagagtcatttgagaccatgtgtcccatctcaagccacagagcaactcacggggtacttcacaccttacctagtcagagtgcttatatatagctttattttggtacgattgagactaaagactgatcatggttgtatgtaaggaaaacattcttttgaacagaaatagtgtaattaaaaataattgaaagtgttaaatgtgaacttgagctgtttgaccagtcacatttttgtattgttactgtacgtgtatctggggcttctccgtttgttaatactttttctgtatttgttgctgtatttttggcataactttattataaaaagcatctcaaatgcgaaatccatg

SEQ ID NO: 23196 - protein, 577 aa, Homo sapiens; identical to SEQ ID NO: 3063

SEQ ID NO: 23197 - DNA, 989 bp, Homo sapiens
atacttggaaaaactctctagcatttgttggaatttagtgtaattaagtgaaacctacctagcaactgtagtaattaaaagcgtggggtgtgctttttgttgagatccgtgaatgtttctgtaaacacaattttgattgtgttgcgcttcttaaaggttgtgatgacaacggtaattttaaccacttgaccgtatatggttttcatccttgaagactgtcatatattttcaagtgtctttcctccctgttattttaggttaaagatcgaggtccggaagccactaggagattttttaattggttttattggagcattaacctgggagcgatcctgtcgttaggtggcattgcctatattcagcagaacgtcagctttgtcactggttatgcgatccccactgtctgcgtcggccttgcttttgtggtcttcctctgtggccagagcgttttcatcaccaagcctcctgatggcagtgccttcaccgacatgttcaagatactgacgtattcctgagaacaatcttgctcttgccatgttctttgatttaggctggtagtaaacacatttcatctgctgcttcaaaaagtacttactttttaaaccatcaacattacttttctttcttaaggcaaggcatgcataagagtcatttgagaccatgtgtcccatctcaagccacagagcaactcacggggtacttcacaccttacctagtcagagtgcttatatatagctttattttggtacgattgagactaaagactgatcatggttgtatgtaaggaaaacattcttttgaacagaaatagtgtaattaaaaataattgaaagtgttaaatgtgaacttgagctgtttgaccagtcacatttttgtattgttactgtacgtgtatctggggcttctccgtttgttaatactttttctgtatttgttgctgtatttttggcataactttattataaaaagcatctcaaatgcgaaatcca

SEQ ID NO: 23198 - protein, 48 aa, Homo sapiens
MVFILEDCHIFSSVFPPCYFRLKIEVRKPLGDFLIGFIGALTWERSCR

SEQ ID NO: 23199 - DNA, 1211 bp, Homo sapiens
ctttcctcaggcctggaatttgcatactcagctgcccccaagtccatgcagagtgccataatgggcttgttctttttcttctctggcgtcgggtcgttcgtgggttctggactgctggcactggtgtctatcaaagccatcggatggatgagcagtcacacagactttggtaagagccagcatcctgtcccttttgaaaatagccagtgagggggaggcgcaggcactcaggagatggctgagtgagcggaggtgttttcacgtggatggcctgtcccgagctgcctgtccaccgctccttccacagcactgctctgtgctgcttgcatcactgtgtttccttacatcatgaacggttttcaggagacaagcaggcctctcttctcatcccaggggccaagcctgccctggccacagcccagcgagcagctgctgcagccaccgctccttacggggacgtccttgacagacaagcaccttctccacgcccgtccagctcagtcttcgtgaggcagctgaatctgtaccccaagcttccctttctttaacttggtggtgtactttcgttttcttttcctaacagcaccttttctgatacgaaaaagacaagatagatagtaatattaacggctgctatttgaactattacttttttcttctggctgctattcaaggagctaccctcctgcttttcctcattatttctgtgaaatatgaccatcatcgagaccatcagcgatcaagagccaatggcgtgcccaccagcaggagggcctgaccttcctgaggccatgtgcggtttctgaggctgacatgtcagtaactgactggggtgcactgagaacaggcaagactttaaattcccataaaatgtctgacttcactgaaacttgcatgttgcctggattgatttcttctttccctctatccaaaggagcttggtaagtgccttactgcagcgtgtctcctggcacgctgggccctccgggaggagagctgcagatttcgagtatgtcgcttgtcattcaaggtctctgtgaatcctctagctgggttcccttttttacagaaactcacaaatggagattgcaaagtcttggggaactccacgtgttagttggcatcccagtttcttaaacaaatagtatcacctgcttcccatagccatatctcactgtaaaaaaaaaattaataaactgttacttatattt

SEQ ID NO: 23200 - protein, 93 aa, Homo sapiens; identical to SEQ ID NO: 23190

SEQ ID NO: 23201 - DNA, 2041 bp, Homo sapiens
ccaaaattacagtagcccagtttcactttgactagaaagtccctttgtcagctgtttcagtacattctgtgacatttagaaataatttaggtagctgtgttgggtgtgtacaattagtaagtgatggaatgagttgaagcagattcaatacagtgagctggtttcttacctccaaacttaatttgtgaccaaataattgattgctgggaggggaagaaaactaattccttcattttatttcccaaagtgaaggcattggagtctttcagcaatcttctaaacaaagtctgtttgattcatgtaagatgtctcatggtgggccatttacagaagagaaagtggaagatgtgaaagctctggtcaagattgtccctgttttcttggctttgataccttactggacagtgtatttccaagtgagtggtgacaaacaggtttaatttcctttatcttcctatgaagtcttaccctagcacttgttttggccatttctaaagtaggtaggactaggtgattttttttcccatgagtctacagaatcttggaatttttggttttagttatggagtcattttggctgctttaactatgtctaaagcctctctgaaaaagaagctgagaacaggtacgcttctggtttttcaggcccctcttgttaatgtaatttctcctttggataactggccattctttttcaaaattgatctccagaggactttacgatgaccaaatcattgacctgtctgttttcaaacttgagccattgtctatttctgggagtcactgtgtgtcgcatctgagtctagcttaggggaggggcaggatgcttagagtgtttgagagcacagttggtccacatataatgatactgttttttatacctagatgcagacaacatatgttttacagagtcttcatttgaggattccagaaatttcaaatattacaaccactcctcacacgctccctgcagcctggctgaccatgtttgatgctgtgctcatcctcctgctcatccctctgaaggacaaactggtcgatcccattttgagaagacatggcctgctcccatcctccctgaagaggatcgccgtgggcatgttctttgtcatgtgctcggcctttgctgcaggaattttggagagtaaaaggctgaaccttgttaaagagaaaaccattaatcagaccatcggcaacgtcgtctaccatgctgccgatctgtcgctgtggtggcaggtgccgcagtacttgctgattgggatcagcgagatctttgcaagtatcgcaggcctggaatttgcatactcagctgcccccaagtccatgcagagtgccataatgggcttgttctttttcttctctggcgtcgggtcgttcgtgggttctggactgctggcactggtgtctatcaaagccatcggatggatgagcagtcacacagactttggtaatattaacggctgctatttgaactattacttttttcttctggctgctattcaaggagctaccctcctgcttttcctcattatttctgtgaaatatgaccatcatcgagaccatcagcgatcaagagccaatggcgtgcccaccagcaggagggcctgaccttcctgaggccatgtgcggtttctgaggctgacatgtcagtaactgactggggtgcactgagaacaggcaagactttaaattcccataaaatgtctgacttcactgaaacttgcatgttgcctggattgatttcttctttccctctatccaaaggagcttggtaagtgccttactgcagcgtgtctcctggcacgctgggccctccgggaggagagctgcagatttcgagtatgtcgcttgtcattcaaggtctctgtgaatcctctagctgggttcccttttttacagaaactcacaaatggagattgcaaagtcttggggaactccacgtgttagttggcatcccagtttcttaaacaaatagtatcacctgcttcccatagccatatctcactgtaaaaaaaaaattaataaactgttacttatattt

SEQ ID NO: 23202 - protein, 240 aa, Homo sapiens; identical to SEQ ID NO: 23192

SEQ ID NO: 23203 - DNA, 2197 bp, Homo sapiens
gcggcggggcgaggcagctggcggcgtcgcatggagggctctgggggcggtgcgggcgagcgggcgccgctgctgggcgcgcggcgggcggcggcggccgcggcggcggctggggcgttcgcgggccggcgcgcggcgtgcggggccgtgctgctgacggagctgctggagcgcgccgctttctacggcatcacgtccaacctggtgctattcctgaacggggcgccgttctgctgggagggcgcgcaggccagcgaggcgctgctgctcttcatgggcctcacctacctgggctcgccgttcggaggctggctggccgacgcgcggctgggccgggcgcgcgccatcctgctgagcctggcgctctacctgctgggcatgctggccttcccgctgctggccgcgcccgccacgcgagccgcgctctgcggttccgcgcgcctgctcaactgcacggcgcctggtcccgacgccgccgcccgctgctgctcaccggccaccttcgcggggctggtgctggtgggcctgggcgtggccaccgtcaaggccaacatcacgcccttcggcgccgaccaggttaaagatcgaggtccggaagccactaggagattttttaattggttttattggagcattaacctgggagcgatcctgtcgttaggtggcattgcctatattcagcagaacgtcagctttgtcactggttatgcgatccccactgtctgcgtcggccttgcttttgtggtcttcctctgtggccagagcgttttcatcaccaagcctcctgatggcagtgccttcaccgacatgttcaagatactgacgtattcctgctgttcccagaagcgaagtggagagcgccagagtaatggtgaaggcattggagtctttcagcaatcttctaaacaaagtctgtttgattcatgtaagatgtctcatggtgggccatttacagaagagaaagtggaagatgtgaaagctctggtcaagattgtccctgttttcttggctttgataccttactggacagtgtatttccaaatgcagacaacatatgttttacagagtcttcatttgaggattccagaaatttcaaatattacaaccactcctcacacgctccctgcagcctggctgaccatgtttgatgctgtgctcatcctcctgctcatccctctgaaggacaaactggtcgatcccattttgagaagacatggcctgctcccatcctccctgaagaggatcgccgtgggcatgttctttgtcatgtgctcggcctttgctgcaggaattttggagagtaaaaggctgaaccttgttaaagagaaaaccattaatcagaccatcggcaacgtcgtctaccatgctgccgatctgtcgctgtggtggcaggtgccgcagtacttgctgattgggatcagcgagatctttgcaagtatcgcaggcctggaatttgcatactcagctgcccccaagtccatgcagagtgccataatgggcttgttctttttcttctctggcgtcgggtcgttcgtgggttctggactgctggcactggtgtctatcaaagccatcggatggatgagcagtcacacagactttggtaatattaacggctgctatttgaactattacttttttcttctggctgctattcaaggagctaccctcctgcttttcctcattatttctgtgaaatatgaccatcatcgagaccatcagcgatcaagagccaatggcgtgcccaccagcaggagggcctgaccttcctgaggccatgtgcggtttctgaggctgacatgtcagtaactgactggggtgcactgagaacaggcaagactttaaattcccataaaatgtctgacttcactgaaacttgcatgttgcctggattgatttcttctttccctctatccaaaggagcttggtaagtgccttactgcagcgtgtctcctggcacgctgggccctccgggaggagagctgcagatttcgagtatgtcgcttgtcattcaaggtctctgtgaatcctctagctgggttcccttttttacagaaactcacaaatggagattgcaaagtcttggggaactccacgtgttagttggcatcccagtttcttaaacaaatagtatcacctgcttcccatagccatatctcactgtaaaaaaaaaattaataaactgttacttatattt

SEQ ID NO: 23204 - protein, 577 aa, Homo sapiens; identical to SEQ ID NO: 3063

SEQ ID NO: 23205 - DNA, 1014 bp, Homo sapiens
gcggcggggcgaggcagctggcggcgtcgcatggagggctctgggggcggtgcgggcgagcgggcgccgctgctgggcgcgcggcgggcggcggcggccgcggcggcggctggggcgttcgcgggccggcgcgcggcgtgcggggccgtgctgctgacggagctgctggagcgcgccgctttctacggcatcacgtccaacctggtgctattcctgaacggggcgccgttctgctgggagggcgcgcaggccagcgaggcgctgctgctcttcatgggcctcacctacctgggctcgccgttcggaggctggctggccgacgcgcggctgggccgggcgcgcgccatcctgctgagcctggcgctctacctgctgggcatgctggccttcccgctgctggccgcgcccgccacgcgagccgcgctctgcggttccgcgcgcctgctcaactgcacggcgcctggtcccgacgccgccgcccgctgctgctcaccggccaccttcgcggggctggtgctggtgggcctgggcgtggccaccgtcaaggccaacatcacgcccttcggcgccgaccaggttaaagatcgaggtccggaagccactaggagattttttaattggttttattggagcattaacctgggagcgatcctgtcgttaggtggcattgcctatattcagcagaacgtcagctttgtcactggttatgcgatccccactgtctgcgtcggccttgcttttgtggtcttcctctgtggccagagcgttttcatcaccaagcctcctgatggcagtgccttcaccgacatgttcaagatactgacgtattcctgctgttcccagaagcgaagtggagagcgccagagtaatggatgcagacaacatatgttttacagagtcttcatttgaggattccagaaatttcaaatattacaaccactcctcacacgaaaagcaaatgcagattcatttggaaagaaatcttttcccagttccgttgtctctaaactgaag

SEQ ID NO: 23206 - protein, 292 aa, Homo sapiens; identical to SEQ ID NO: 23194

SEQ ID NO: 23207 - DNA, 1532 bp, Homo sapiens
tttatcgatctctttattaacatcctagcttcggtttgttgtgtgcttattgtgtgctgggcctgggctgagtggtttacatgtcttctctcctttaacactgcatttccccaaggaggcgggtgcggtcttattatcccatcttaaagacaggccagtggcctgattccagagctcatgctttaaccccacgttgcactttctctcactgctagtgtagacggaagctcctttggtgccagattataaaggtagaaatttgtggaggacatcgaggagacagaagacatgctttatacatgtttctttttattttaaaaagctttgaaatacatttgaatgaaaaactaagcagttgcttatgctgtcagtacctgtctctgctctttaaaaagtaagccactgcctcttacctaaaggtcagcatgggctccatcatacagcggtcaggtccatcatacggcggtcaggtccatcatacagcggtcaggtccatcatacggcggtcaggtccatcatacggcggtcaggtccatcatacggcggtcaggtctgtaactcttgacaggaaggtgcagtagcagaatggcgagatgcactgagggtaaccagatgatctcatgggacttacccagtgttagcaccaaagtcccatgaactgaggtgttaaaacagaaaggcctgtgtcctcagaacccctccaagtcactggccaactatgactcatgtttggtgatgttggatgccagttaataaagtccagaacttaagcccaagaagagagctcagaagtgtttgtgttactctttattgaggaataatttacagatagtaaaatttaccccttatatctgtacagttttgtgaattatgacaaacttactcaggttgtgtaaccaccagtgcagtcaaggcatagattatttccatccttccagagaagtctctgggaccttttgtagtcagtcccctcatggaatgttttgatcaacgtagaaatgcctggaggctgctgggtgggaggctgatcactcagccatcagagcgtcctgtgtctctgagccgtgcaccccattgtggcatggcactggttgctggacattcttctgcgggcccactcacacatctgcctgcctgcggcctgtctgtgtttgtcttactcatgctcttggagccgtagcgaatgtgtctaatattccttccacgtggtagattgaaacttcaccaaaatagccctgtgcgcctactttgctcctgaacatctctgatttctccggctgtccctgtgtggagttctggcagatctcaccagtctacatgacctattggaaatgccagtgggtcattgtggcattcagacacataattcaaaactgcaaatggtgggaccgcactaaagaatttttagtaattaaagtacaggaggctgaggtgggaggatcacttcagcccaggaggtcaggtcaaggcttcagtgagccatggttgcaccactacactgtagcctgggtgacaaagtgagaccctgtctc

SEQ ID NO: 23208 - protein, 68 aa, Homo sapiens [sequence omitted]

SEQ ID NO: 23209 - DNA, 729 bp, Homo sapiens
atggtgaccagttcaggaacgcagactctaacctttcaggacacgaaatttccctggtgcctgcggttactgacccagcagtggacaaatgagagccggaggaagggccactctgctgacaccgtgagcccggacgtctgtcttccagagccggaggaagggccactctgtgacaccgcgagcccggaagtctgtcctccagagccggaggaagggccactctgtgacaccagccggaggaagggcccctctgtgacaccgcgagcccggacgtctgtcctccagagccggaggaagggccactctgctgacaccgggatcccggacgtctgtcctccagaggcggaggaagggccactctgtgacaccgcgatcccggacgtctgtcctccagaggcagaggaagggccactctgtgacaccacgagcccggacagccggaggaagggaccctctgctgacaccgcgagcccggacgtctgtcctccagagccggaggaagggccactctgtgacaccgcgagcccggacgtctgtcctccagagccggaggaagggcccctctgtgacaccgcgagcccggacgtctgtcctccagagccggaggaagggcccctctgtgacaccgcgagcccggacgtctgtcctccagagccggaggaagggccactctgtgacaccgtgagccggacgtctgtcctccggagccggaggaagggccacttgtga

SEQ ID NO: 23210 - protein, 242 aa, Homo sapiens
MVTSSGTQTLTFQDTKFPWCLRLLTQQWTNESRRKGHSADTVSPDVCLPEPEEGPLCDTASPEVCPPEPEEGPLCDTSRRKGPSVTPRARTSVLQSRRKGHSADTGIPDVCPPEAEEGPLCDTAIPDVCPPEAEEGPLCDTTSPDSRRKGPSADTASPDVCPPEPEEGPLCDTASPDVCPPEPEEGPLCDTASPDVCPPEPEEGPLCDTASPDVCPPEPEEGPLCDTVSRTSVLRSRRKGHL

SEQ ID NO: 23211 - DNA, 2102 bp, Homo sapiens
cagagtggcccttcctccggctctggaggacagacgtccgggctcccggtgtcagcagaagtggcccttcctccggctctggaggacagacgtctgggctcgcggtgtcacagagtggcccttcctccggctctggagcacagacgtctgggatcgcagtgtcagcagagtggcccttcctccggctctggaggacagacgtccgggctcgcggtgtcacagagtggcccttcctccggctctggaggacagacgtccgggctcgcggtgtcacagagtggcccttcctccggctctggaggacagacgtccgggatcgcggtgtcagcagagtggcccttcctccggctctggaggacagacgtccgggctcgcggtgtcacagagtggcccttcctccggctctggaggacagacgtccgggatcgcggtgtcagcagagtggcccttcctccggctctggaggacagacgtccgggctcgcggtgtcacagagtggcccttcctccggctctggaggacagacgtccgggctcgcggtgtcagcagagtggcccttcctccggctctggaggacagacgtccgggctcgcggtgtcacagagtggcccttcctccggctctggaggacagacgtccgggctcgcggtgtcagcagagtggcccttcctccagctctggaggacagaagtctgggctcgcggtgtcacagagtggcccttcctccggctctggaggacagaagtctgggctcgcggtgtcagcagagtggcccttcctccggctctggaggacagacgtctgggctcgcggtgtcacagagtggcccttcctccggctctggaagacagacatctgggatcacggtgtcagcagagtggcccttcctctggctctggaggacagacgtctgggatcacggtgtcagtagaggggcccttcctctggagcctctagtggggaacctgttagttgcatcttttggcttctggtggctggtgtttcttttttcttttttcatctttttttttttttaatttaattagagacagggtctgcctgtgtagcccaggctggtctcaaactcctggcctcaagcagtcctcctgctctgtcctcacaaagtgctgtggttacaggcgtgagtcatggggcccagcctgttggtgtttcctgacttgtggccccatcactgcagtctctgccttcagggtcacatggccttctcctctgctggagcatcccctcctgtaagtttcttttttttttttttttttttgagatggagcctagctctgtcacccaggctggaatgctgtggcgggatcttggctcactgcaacctccacctccagggttcaagcaactctcgtgcctcagccccccaagtagctgggactaccagtgagcaccactacacctggctaatttttgtatttttagtagagatgaggtttcaccatgttggccaggctgatctcaaactcctaaccttaggtgatctgcttgcttcagcctctcaaaatgctgggattacaggcgtgggccagcacgcccagcctcctgtaagtttattgtaaaggcactcatcatgtgatttcgggcatgctgggcaatctaggatgatttcctcatcttaagatccctattttagttacaacaaaaatcactttttctcataatgtcactgttgtggtttgaatgatggtgtcctctctaaaactgatgctgaaactgaatcctcaatgcaacagcattaagaggtggggcctttaggtggtgattaggctattagagctctgccctcatggatatggttagtgtcttatcaaatgtcttcgggggtgagttcattccttctacctcctctgctatggaggatgcagcgttcatcccctcaaaggtcttcgggggtgagctcattccttctacctcctctgctatggaggacacagtgttcctcccctctggaagatgctgcaataaggcaacattgtggaagcagagagcagcctcacctgcccccaggtctgctgctgccttgatcttgaacttcccagcctctagaactgtgagaaataaattcccattgtttgaaaatc

SEQ ID NO: 23212 - protein, 143 aa, Homo sapiens
MGPSLLVFPDLWPHHCSLCLQGHMAFSSAGASPPVSFFFFFFFLRWSLALSPRLECCGGILAHCNLHLQGSSNSRASAPQVAGTTSEHHYTWLIFVFLVEMRFHHVGQADLKLLTLGDLLASASQNAGITGVGQHAQPPVSLL

SEQ ID NO: 23213 - DNA, 421 bp, Homo sapiens
gcctcaaaaaggtaaagtgggaatgaagaaagccatgacatgggataaccaccgtcagtggcaggtctccggcctccctacgcagcatggtgacccccaggcttatcaagatataaaagtccatcctggagggcacattcggctccgcaggcttctcccagtctctctacagcttatgagtggttgaaccagattcagaactgctctccagaggacttttggaaatttggggatggagaaggaaatttgttgtcagaatgattaaggaatgtcgtcaatatttcacaactaggcccagaagttttaacaccttgcaacgtataggacatccctgcctaaagaaaaaatgcttttccccaaatgccagtagatacctgtattagtcagggttctccaaggaaacagaactaatgggaaattc

SEQ ID NO: 23214 - protein, 54 aa, Homo sapiens
MKKAMTWDNHRQWQVSGLPTQHGDPQAYQDIKVHPGGHIRLRRLLPVSLQLMSG

SEQ ID NO: 23215 - DNA, 3012 bp, Homo sapiens
ggaacctgcgagctggggcgcggcctcggggaggggcgggcgggacagacccagccgccccggctcccccgccgtccgcgtctgcgccggccccggggcctggtcggcggcggcggggccggtcgatggcccgggcggcggcggcggcatgcggctcctgttcctggcggtgctgcggccacacaccggcaacgcggtcacggcccagcgcgttcgggcccatctagaggctgcagggcacgtgtgcgttttgaaggatgcctttgactttgaaagccgatctgagattgcaaacctcatcttggctgagaactgcgaggctgccctggctcttcatctctataggggaggcaggcttttgcaaggccaccgaatcccttttggagtcatctttggtggaactgatgtaaatgaagatgccaaccaggcggaaaaaaacacagtcatgggcagagttcttgaggaagccagccgcatgctaagggtaaggtctatgtccagagtcaaggaattgcaacaacaccaaacgccgcttttaactggaatacctttcttcaacgctctgagattaaccaaagtgctgataatttgcacatatttcttctgatatgtggacttcgacaagttaaggatcctctctatctggtggacgcattttcagcctggcatcaggaggagcccaatgtgcacctggtgattgtgggtcctgaagtcgatccagtgtttacaagggaagtgaaagccaaagtgaaaagagccgctggggtacgattgattggagagatgcctcaagaagatctgcacgcggtggtgaagaattgcttcgcggtggtgaatagctctgtctctgaaggcatgtcagctgcaattttggaggcaatggatttagaagtaccggtattggccaggaacatccccgggaatgctgccgtggtgaagcatgaagtcacagggctactgttttccaatcctcaggagtttgttcatctggcaaagagactggttagtgatcctgcattagaaaaggaaatcgtagtgaacggaagggaatacgtgagaatgtatcattcatggcaggtggaaagagacacctaccaacagctcatcaggaagctggaaggaagcactgaagattgagggccccgcctcatcagacacctgctctctgacacacagctctgggtgcacactcagagacagagttctggatcacgtgggcccagtgcagttcaaataaaaccagcctcagcggaatcctagaaaatgttagtcgtgagtccccagagccactgcattcatcccatatccttctgtgcgttcagatgctgtcccaggcgtgttcaccagccagtcctgatggaggtgcatgagtgactgggttgactgggacagggaaaggggaactggttttcagggaatttgggagagaatttgattacctgccttagggctttggtgtggacaatagaggcttattttcaagcagtcatggttcagactcctcccgcctgccttctgaccaacctctccccatcgttgccagtttgaaaggcaaaagcaaaacagacgtgtcagctgagccgagtcctcgcaggatttttgttgtgatctcaggactctgacaggcacgtgggtgacccgaggcttctctgaacactagaaagcgctgtgagtgagctcacgcccggcacagctcacttttcaatggtggaattgaaagttgtgctttttagaaaagtggccaggctgcccgcaggccccgcccacctcttggctgaatttgagtggaaaaccaggaaggaacaagcgccacgtcacgcatagcctgcaaatcgcccgcgtgaccctgagatggaggcctgaggctttgggtccagggtgggctcttccccttcccacatcagggacccggggatggatgtcggaagggtcaccagcctccagcctttggcaggatggagcttgggtctgcagggctttgcagccacacagcgaggtcagtccggggccagccgcgccatcatggtaatggtggcctcgccccatccatgtcatccatgtcacatgaggacgtgcagtcttccttgtcctctcctagtggaatttgcctgggagaacctccactgaatactgaaattgttgcatgcctgtggattccttacgacaatggggaacgcggtgtttcccacctcttgtgggtagaaagcagtctgctttgaggaggcgagaaggcaaagccagggcagggcgttgctgtgggaagcgttcggtgaaagcgggtttcgacgcttaggagggccgagggagaagattccaccagcattgtccttgcttcaagttttaggatgtctgaactttcagctttcatgttttcaaccatcatttttttaatggcacaacctacatcttgtttttaaaagaagtagcctcaaattaaactccttaaactctgatgccctggggatgagaacaactagcttggatctcgtgccgtgtaattcaatgtttcattccgctgcctccatcatgtaatagaatcgctttccagaaaggcagttaactggaagcagcagaggctcccagccgtgagaggactgctcaacaatgccccccatcgccgcccccccacccctcgcaccccttgtgttttccctctgaggggcccaagggttatggctttcatgtctaggtgtggggacagaggagggagaggcagatcctgggccgggagaggatggcctggtctgaatctggagtaattaatgccacccaaagaaaaggccctgccaggtccaatgttgtcttagatctgatgatgctgctatttacaaaacactgatcgtccgaaagcttgaatctgttcctcctcgaatgaccctgtagatgcctgacctccaccgtacctccacatcactattcatgtccttctaggaaaatgtgcacatgcctcacgcactatgtgggaagggcgtgtttttaaattaataaagtgtgtcaccattagccatacga

SEQ ID NO: 23216 - protein, 152 aa, Homo sapiens
MRLLFLAVLRPHTGNAVTAQRVRAHLEAAGHVCVLKDAFDFESRSEIANLILAENCEAALALHLYRGGRLLQGHRIPFGVIFGGTDVNEDANQAEKNTVMGRVLEEASRMLRVRSMSRVKELQQHQTPLLTGIPFFNALRLTKVLIICTYFF

SEQ ID NO: 23217 - DNA, 2722 bp, Homo sapiens
gtcggcggcggcggggccggtcgatggcccgggcggcggcggcggcatgcggctcctgttcctggcggtgctgcggccacacaccggcaacgcggtcacggcccagcgcgttcgggcccatctagaggctgcagggcacgtgtgcgttttgaaggatgcctttgactttgaaagccgatctgagattgcaaacctcatcttggctgagaactgcgaggctgccctggctcttcatctctataggggaggcaggcttttgcaaggccaccgaatcccttttggagtcatctttggtggaactgatgtaaatgaagatgccaaccaggcggaaaaaaacacagtcatgggcagagttcttgaggaagccagatttgctgtcgctttcacagagtcaatgaaggaaatggcacaagcgcagtgggtcgatccagtgtttacaagggaagtgaaagccaaagtgaaaagagccgctggggtacgattgattggagagatgcctcaagaagatctgcacgcggtggtgaagaattgcttcgcggtggtgaatagctctgtctctgaaggcatgtcagctgcaattttggaggcaatggatttagaagtaccggtattggccaggaacatccccgggaatgctgccgtggtgaagcatgaagtcacagggctactgttttccaatcctcaggagtttgttcatctggcaaagagactggttagtgatcctgcattagaaaaggaaatcgtagtgaacggaagggaatacgtgagaatgtatcattcatggcaggtggaaagagacacctaccaacagctcatcaggaagctggaaggaagcactgaagattgagggccccgcctcatcagacacctgctctctgacacacagctctgggtgcacactcagagacagagttctggatcacgtgggcccagtgcagttcaaataaaaccagcctcagcggaatcctagaaaatgttagtcgtgagtccccagagccactgcattcatcccatatccttctgtgcgttcagatgctgtcccaggcgtgttcaccagccagtcctgatggaggtgcatgagtgactgggttgactgggacagggaaaggggaactggttttcagggaatttgggagagaatttgattacctgccttagggctttggtgtggacaatagaggcttattttcaagcagtcatggttcagactcctcccgcctgccttctgaccaacctctccccatcgttgccagtttgaaaggcaaaagcaaaacagacgtgtcagctgagccgagtcctcgcaggatttttgttgtgatctcaggactctgacaggcacgtgggtgacccgaggcttctctgaacactagaaagcgctgtgagtgagctcacgcccggcacagctcacttttcaatggtggaattgaaagttgtgctttttagaaaagtggccaggctgcccgcaggccccgcccacctcttggctgaatttgagtggaaaaccaggaaggaacaagcgccacgtcacgcatagcctgcaaatcgcccgcgtgaccctgagatggaggcctgaggctttgggtccagggtgggctcttccccttcccacatcagggacccggggatggatgtcggaagggtcaccagcctccagcctttggcaggatggagcttgggtctgcagggctttgcagccacacagcgaggtcagtccggggccagccgcgccatcatggtaatggtggcctcgccccatccatgtcatccatgtcacatgaggacgtgcagtcttccttgtcctctcctagtggaatttgcctgggagaacctccactgaatactgaaattgttgcatgcctgtggattccttacgacaatggggaacgcggtgtttcccacctcttgtgggtagaaagcagtctgctttgaggaggcgagaaggcaaagccagggcagggcgttgctgtgggaagcgttcggtgaaagcgggtttcgacgcttaggagggccgagggagaagattccaccagcattgtccttgcttcaagttttaggatgtctgaactttcagctttcatgttttcaaccatcatttttttaatggcacaacctacatcttgtttttaaaagaagtagcctcaaattaaactccttaaactctgatgccctggggatgagaacaactagcttggatctcgtgccgtgtaattcaatgtttcattccgctgcctccatcatgtaatagaatcgctttccagaaaggcagttaactggaagcagcagaggctcccagccgtgagaggactgctcaacaatgccccccatcgccgcccccccacccctcgcaccccttgtgttttccctctgaggggcccaagggttatggctttcatgtctaggtgtggggacagaggagggagaggcagatcctgggccgggagaggatggcctggtctgaatctggagtaattaatgccacccaaagaaaaggccctgccaggtccaatgttgtcttagatctgatgatgctgctatttacaaaacactgatcgtccgaaagcttgaatctgttcctcctcgaatgaccctgtagatgcctgacctccaccgtacctccacatcactattcatgtccttctaggaaaatgtgcacatgcctcacgcactatgtgggaagggcgtgtttttaaattaataaagtgtgtcaccattagccatacga

SEQ ID NO: 23218 - protein, 266 aa, Homo sapiens; identical to SEQ ID NO: 3065

SEQ ID NO: 23219 - DNA, 5494 bp, Homo sapiens
ggccactcttcgctcgggtaaacaggaaaggaaataccccctgtggattaaaatttaaaaaaaattctgttggggtcgaaggagggaggtggggtttgcctgcgcgcgtgttggactccggagagcaactcaggagcccgcgcggtcgtcgcctcccggcctggccatggactggcgggaagagggagcagggcgcccgggctgctcgggcccctagccgggcgctccctcgccaccggccccgctgcgggcctctaggggactgagacggtctcttgttcgcctggacggcgccggggagcggaggatctgcgctccgggtctccaggatgtgcccgtctgagatggggacgctgtggcaccactggtcgccggtactcatcagcctggccgccctgttttccaaagtgacggaaggtcgagggatccttgagagcatccagaggttttccttgctgcccacctacctccccgtgacctaccacatcaacaacgcggacgtctccttcttcctgaaggaggccaaccaggatatcatgaggaactccagcctgcagtcccgggtggagtcatttctgatttacaaatccaggaggctgcctgtcctcaatgccagctacgggcctttctccatcgagcaagtggtgccccaggatttaatgctaccttccaacccatttggattcaccaacaaattttctcttaactggaaactaaaagcccacatcctgcgggacaaagtctacctgagccggcccaaagtgcaggttctgttccacatcatgggcagagactgggacgaccgcagcgccggggagaagctgccgtgcctgagggtctttgctttccgagagacccgagaggtgcggggcagctgccggctgcagggggacctggggctgtgcgtggccgagctggagctcctgtccagctggttcagcccccccacggtggttgccgggaggaggaagtccgtggaccagccggaggggacccccgtggagctctactacaccgtgcacccagggggtgagagaggggactgcgtcagggaagacgcgaggagaagcaatgggatccggacaggccacagtgacatcgatgagtccgggccccccttgcagaggatcgggagcatcttcctttatcagacacacaggaaaccctccctgagagaactgcgtctggacaacagcgtggccatccactatataccaaagaccgtgaggaaaggagacgtgctgacttttcctgtttccatctccagaaattccactgaagatcgcttcacgttgaggcagtgcggatggcgcctcctacgaggtcatgcagatcgatgtggaggtggaagagcctggtgacctgccagccacacagctggtcacgtggcaggtcgagtaccccggagagatcacgtctgacttgggagtgtccaagatctatgtgagcccaaaggacttgattggagttgtgccgctggctatggaggtttctgacagatgtgactacgtctttgtcaatgggaaagaaatgaaaggcaaggtcaacgtggtggtgaacttcacctaccagcacctgagcagccccctggagatgacggtgtgggtgccccggcttccgctgcagatcgaggtctccgacaccgagctcaatcagatcaagggttggagagtgcccatcgtctccagcaggaggcctgccggggacagtgaagaggaggaggatgatgagcggaggggccgcggctgcaccctgcagtaccagcacgccatggtgcgggtcctgacgcagtttgtggctgaggcggccggccctgggggacacctggcccacctgctgggctcagactggcaagtggacatcacggagctgataaatgacttcatgcaggtggaggagcccaggatcgccaagctgcaaggcggacagatcctgatggggcaggagcttgggatgaccaccattcagatcctgtctcctctgtcagacaccatcctcgctgaaaagaccatcactgtgctggacgagaaggtgaccatcacagacctcggggtgcagctggtgacagggctgtcactctccttgcagctcagcccaggaagcaacagggccatctttgccactgcagtggctcaggaacttctgcagaggccaaaacaggaagcagccatcagttgctgggtccagttcagtgatggctcagtcacgcccttggatatttacgatgggaaagacttctccttgatggccacatctttggatgagaaggtagtctccatccaccaagaccccaaattcaagtggcctatcattgctgcggaaacagaaggacaaggcaccctggtcaaggtggaaatggttattagtgaatcctgccagaaatccaagcggaagagtgtgttagctgttggaacggcaaacatcaaagttaaatttggccaaaacgatgctaaccccaacaccagtgacagcagacacacaggggcaggggttcacatggaaaacaatgtcagtgacagaaggcccaaaaaaccctcgcaggaatgggggagtcaggaaggacagtactatggcagttcttctatgggactcatggagggacggggcaccacgacagacaggtccatcctgcagaagaagaaaggccaggaaagccttttagatgacaacagccacttgcagaccatccccagcgacctcaccagcttcccagcccaggtggacctccccagaagcaatggggaaatggatgggaatgaccttatgcaggcatccaaagggctgagcgacttagaaattgggatgtatgctttgttgggagtcttctgtttggccattttggtcttcttgataaactgtgtgacctttgcattaaaatacagacacaaacaggttcccttcgaggagcaggaagggatgagtcactctcatgactgggttgggttaagcaaccggacagagctgttggagaatcacatcaactttgcctcctcgcaagatgagcaaatcactgccattgacaggggcatggatttcgaggaaagtaaatatctcctcagcacaaactcccaaaaaagcatcaatgggcagctgttcaaacctttgggacccatcatcattgatgggaaagatcagaaaagtgagcccccaacatcccctacctcaaaaaggaaaagggtaaaatttaccaccttcaccgccgtctcctcagacgacgagtaccccaccaggaactccatcgtgatgagtagcgaggatgacattaagtgggtctgccaggatctggaccctggggactgcaaagagctgcacaactacatggagaggttacatgaaaatgtgtaagccagacacacacagacattggttctcactcacctttcagcctttaattccaggatgtgtagcaacggtgcccccggaagagaaacaaagcagcaggacaaaataaggatgacactatccatacagcctcagccaatgaccccggctcggcggcgaggcctggagtccgcatcgacgcacacattccagagtacagtgtcttgcttaagaggtttatcatgcatggcaagatttttaagacttgaaacaaaaacgagttctgaatcactgagcgtctgagagcgtccaggaaagaacagcctctctctctcgaatcaaagcaatttggatattgtaaaatccacatggctccaatattcaatattgcagactatggaagaaaagtacaactcaggtggagcatccatggatcgcatccatggatcaatgggaggaagcgtgtcatcgaaactggagcagcacatcttgctgtgagcgcgatcacaggcagtccagtgccgccgtcagctgtgggaggcatgattgtgagtcattgtctctcaaaggctgggccagagctgtctcagatcatggacaggccaaggaagtggctgacaaggactgaaagggaacatgtgggctaacaggccacaaatacctttgtaactacatgccaaggacaaacacatggacgcaaatcctctgagcccttcagggtacttctttatttgtaaactaaggatactgggcatagaatttgaatcaggttcaaagaaccacgctcttttgattcatatcaagttcacaatgtatccatttctattcctccactgcattgccatcctccccaaagccgttggtcacctgtgggtgggggagggagagggcagtttgtagtatttgctgggtcttttttctccccctgggttttgtgtcaactcccaagtgacattctgtagagaagctccccccgcaacctgggcatatgtcccacgccgtccgtctttgaagaggctggtctctaggcatgggcggtagtcacggtgaattccataccaggggatatacattcccttgctttactagaaagaaaacagggccacttgggatgggtctttcactgttcatggcagatctcctgtccaaagatgtggcctcgaggctgttgagacaaatcggggtgcctgtgtggaacgtgcagggcgtgtggagttgggggggttctgggtgtgaaagtggtggatccagcaggaagcccagcctcacacacaccggacagcacagaaaccttcttcatcttggaggtgcgaagggataaggggcatcagtgcatgtggtgaagatgcaggtttgcaagcacttggtcctgcagtcagccccgaaaggttcagcattgcttaagaccagccatgactctggatatccctgaatcccttcacttatgaagcctatgaagatgggggcaaggatacatcagagaattcctgcctcatctcacgctcactccaaggtagagaatggtgtgttgggtgattgccagccagataggatcctgcaaaagatggtcgggggcagcgggtggtgggcagaagaggccgtgctgttgaattgatcttctatttttccctctggtcattttctctctctctctgctcttcagttgtctgttttccagtctctctgtgtgtctgtctctgtatctctctcctcctttgaacctatcttctccctgcttcctctccatctcatctctgtaattttgagtgtgtgtctttactccttcttcctctccatagaattgaattctctttagatcatgtgtgtgtaaatttcaccagtttaccctcccaaccttagccctctcccctgcaactgtggtgctcttgagactgaggtttctgcagccagtaagtcacctgctcctgtccgcaagcttacctaccttgtttggttgggtgattaagctgtcaccccttttcaatgagaatcctttgctttcagtaacgtcctcatatttctttccattcttacctgtgtcatgttctgttgaatactgcagccgctgcccgcttccaaatccatctgcgtgtagaatgtactgtagattgtaagaatgtaatatatatttataaacttactgactgtaaatataaagtttgcattcagtggc

SEQ ID NO: 23220 - protein, 672 aa, Homo sapiens
MQIDVEVEEPGDLPATQLVTWQVEYPGEITSDLGVSKIYVSPKDLIGVVPLAMEVSDRCDYVFVNGKEMKGKVNVVVNFTYQHLSSPLEMTVWVPRLPLQIEVSDTELNQIKGWRVPIVSSRRPAGDSEEEEDDERRGRGCTLQYQHAMVRVLTQFVAEAAGPGGHLAHLLGSDWQVDITELINDFMQVEEPRIAKLQGGQILMGQELGMTTIQILSPLSDTILAEKTITVLDEKVTITDLGVQLVTGLSLSLQLSPGSNRAIFATAVAQELLQRPKQEAAISCWVQFSDGSVTPLDIYDGKDFSLMATSLDEKVVSIHQDPKFKWPIIAAETEGQGTLVKVEMVISESCQKSKRKSVLAVGTANIKVKFGQNDANPNTSDSRHTGAGVHMENNVSDRRPKKPSQEWGSQEGQYYGSSSMGLMEGRGTTTDRSILQKKKGQESLLDDNSHLQTIPSDLTSFPAQVDLPRSNGEMDGNDLMQASKGLSDLEIGMYALLGVFCLAILVFLINCVTFALKYRHKQVPFEEQEGMSHSHDWVGLSNRTELLENHINFASSQDEQITAIDRGMDFEESKYLLSTNSQKSINGQLFKPLGPIIIDGKDQKSEPPTSPTSKRKRVKFTTFTAVSSDDEYPTRNSIVMSSEDDIKWVCQDLDPGDCKELHNYMERLHENV

SEQ ID NO: 23221 - DNA, 584 bp, Homo sapiens
gggattgggaatatgagaccagagggagcttatccctccccctagttccaacccaggcagagcccggttgctgacaaggctcatagtacccctggaagacagcagctgagcacataaaaaaatatctgcatgaaagtgaggttggggacagattcagagtttcctgcagctcccaatggcatagcagtgaaagtcctcacatctgtagatggcacagatctgaggtccagatgaacaccagctacgatccgggctgactaaaaaccgaagaccaggtggaacgattttcctggagatttggcaaccctctcctgacctccatgtgtggcaataagaaaactgcactgagtttatattcaatcctgaggcaagtgtgagtttggattttggatcatctgggagatgtcttttcgcctgaaactgagctattaaactgagaccgagtcctccatctcttccctctccacctggatgggtcaactttcaaggaacttaattacttttgtaacagaacaaaggctacggaaaatgtctgtaaaatttggaacacaggctatgaaattagaatccaagctctctgcaaa

SEQ ID NO: 23222 - protein, 36 aa, Homo sapiens
MGQLSRNLITFVTEQRLRKMSVKFGTQAMKLESKLS

SEQ ID NO: 23223 - DNA, 768 bp, Homo sapiens
taagacgtgacttgctcctccttgcctttgccgtgatcatgaggcctccccaaccatgtggaactgggagtccaattaaacctctttctcttctaaattgcctagtctcaggtacaactttatcagtggcatgagaacagactgatacaacagtgaatgttgctgtgaagaggtctaaagccagcatggatttctatctctgtctcagagtctcttacatggtctcccagaaaaacagctggatttctaatatgctggctcagagttccaagaccaagtgatcctggagatgctgggaaaaagtcaaagcttcctttgatctatcctcagaagctccagatcatcacttctgctacagtccactggtttaagtcagaggtaatctgctacttgtcaacatcagccctcttggaaaacgaatcaacactgcttagtttgaaatggccttaagtaatctgttcacatttcagctggtccctgatacatttcttggtagatggaattgatcatgtactgaagcaaatgtggtgccaccaagtgtgctcaaggttcaccttactctgtttatactccacaacacctggacaaggtaagaccccaggaactgaggcccagtgagcttcagtgaccctcccaagttgcataagtagtgaaagtgtcacgacaggtgcccagagctgcaactctgtgactctgggctcttcctcataaaccccatgtggtctccagcaggcaaacacagcccttttgttttgaaaatgccatttc

SEQ ID NO: 23224 - protein, 31 aa, Homo sapiens
MDFYLCLRVSYMVSQKNSWISNMLAQSSKTK

SEQ ID NO: 23225 - DNA, 541 bp, Homo sapiens
tggaaatcggatctagatccagctggccacaggtcctcaatgagattaagcttggtgctggggattaccagtgaataaagcacgctgccagggcctttcctgagtgactgatgctgtgaggatgagcatgtggtgtttgcattggagggacaaggtgccaacttaagtcagcgcttctgagagcggatcaagtgaagttgtatctaccatgaccaaaatctcatctccaggatcacttggtcttggaactctgagccagcatattagaaatccagctgtttttctgggagaccatgtaagagactctgagactacatggagaggaagaggaaccaggtgagctgtcttccagcctctcctgtcaggcaaccagacacttgggtaagactgtctttgatcctttaaaccagaccatccagcaactcaataccaccaagtgacctccgtcaagctccatgtgtagcagaagaatctcccaactgagccctgcccatatacctgctacacaaaattatgatatagaataaagctgtggcatttt

SEQ ID NO: 23226 - protein, 43 aa, Homo sapiens
MTKISSPGSLGLGTLSQHIRNPAVFLGDHVRDSETTWRGRGTR

SEQ ID NO: 23227 - DNA, 2475 bp, Homo sapiens
gtagatacgcatgtgagcgctggtgggagacgccaggctgggatttccgctcgatctgggaatgagcaatgcaacctaatgacacccggagctcctgaatcacctggggaagatgaagagagacactctctggtgggaacgtctcctagaaacaaggcctaagatggggcgaccacagccccacagctgtgtccagatgcagggagcactcgcctgtgctgtgagggacggccggtgtcatcgttggagcttcctaagactcccagaggctgatgcacctcccagacccgcctccgcccggctccctgggccctgctccaggggcttcattgctccctgccccgggtcacccctcggctcaccgtctctcaggtgtggaatatcctgctccaatcaaagccatgtcacctgcgttgtccagtgaaacgtcagcggacaggcgctgcccgggctccagggagctcctcactgaggctcactccctgtgcctctgccatcagcacagggggacatgcctggctgcctgtgggaccagggaggacgcgcggtgcgggagcagagccagccacactgccgctgctgcactgttcatctgagtggcgcaagaacttgtcagtgcctttaatctgagggatgagtcttcaggagagtttgttgtcaggatttaacacttactcttggaaaagcagtaatgtgtgctggaaatgaaccgggcagaccctgctcccatctccatctgcctcaatctcagtgccctccactccccaccagcagcgcctgttaccaagtcactgcacaacaaccacaaatggagagtggaggagcatcactttccaccccgggatcatgacgagggctctgtaacttcaacaaatgcgcagaagacgcctggcctcgagcttgtgcagcacctccggagcctgccttcccttgtcacccacggcaccatgactttggagggtctcagctcagtcctccctccagaggggctgtcagtgctgggcagaaaatcacccttcaacgaccgggcccagctgcgctctgtcagagagcagagaaagcaggcctccgggaggttctcactccaccaaggagacgtctccacccagcgctcatcctgagcaagggcactgggaggaagaaatgcaattttaaaacctgtgctgcgaatgatgacttctgctgcttccgtctctggagagctctgggcacttaacatccttccacccacatgcccgagtctgtgcagaaacctcacccacgcggaggagactgcatttcccagtagcagattcaagtcctgaacttcctgtaccacaaagtgttacccacactggtgggtgccagcctgagactcaactatcaggaaaaacatgaagaattcagtccatgccctcaaatgcacccatgtggctcccaaacggcaaatctcagcaatgagattctcagctaggaaagtccacactgaactcatgcagaggacaaagtacataggcctggggttcttggcacctgagatctctgagcagttttctgaattttcctatttcctgttgaagacataggaacacgtggcacagaggcacagagacctggaaaccaacaggtgacctcagggaggtttgtgaagcaccctgatgagaagacagttgggcagacgtggctggctattccccaagtccattttccctcctgggaccagagctgactccatttctcaatctgccttgcagtgagcatagtcagcttcctggcactgctggacctgtcttgaaggctcttttggccggaaatggatgggcagggatctgagagcacctgctatcgggtgagtcctgctttactcatgtcagagatttagactaaaacaaacacaaaatgcaacaaagacctaagtgtaagagctaaaagtataaaactcttataaaaaaagtaagtgtaaattttcatggtcttggattaggtagcactctcttagatgtgctatcagaagcacatacaaccacaggaaaaaaaatacataaattgaatttcatcaaaatttaaaacttttgtgcattaaagttcatgatcaaaaaagcgagaagaaaacccagagaatgagtgaaatatttgcaaatcatacatctgggacaagtatccagaatatataaaaattcttagaactcaacaatataaagaaaaataaccaaattaaacagtaggcaaaggattcgaagagacctttgtccaaagaagatacacaaatgaccaatgagtacgtgaaaagatactcagcagctactcattatggaagtaccactttccactcatgctgagggctataataaaaaacaaaacagaaatgacaagtgcagtgaagatgtggagaaactggatttctcatagattgctggtgggaaagtaacatggtgcaaccaatgtagaaacagtttggcagttccttaaaaaattaaacagagctaccatctgacc

SEQ ID NO: 23228 - protein, 107 aa, Homo sapiens
MHLPDPPPPGSLGPAPGASLLPAPGHPSAHRLSGVEYPAPIKAMSPALSSETSADRRCPGSRELLTEAHSLCLCHQHRGTCLAACGTREDARCGSRASHTAAAALFI

SEQ ID NO: 23229 - DNA, 1312 bp, Homo sapiens
gttcatcaacataacccagttagggtcgcactcatcacggggcccccattgcctctggcgcaccccacgactgacatctgcggggccttcgcgctaggcttcgagtttcagcttccgcaccaggcctgcctttctgcaggggccagggtgggggtcgtgtgctgattgggccctctgaaccgccaccgctgcagaggggctgttccttctgtcacatcccttgtgcccgaatccaccctgtgtcttctcttttctcagcaggacattttaaaagcccagaccccctccttacagagcaaatgtccaggcttcggaggtcactgtcacatcccaagaacccccttcaccaggtgccactcttgagactggactgaagccccctggagagttccacttgcctttgtcctgctgcctgaggtgaggacatggacggccgggtacaagacggggcaggcaacctcgcagtggtggtaaccctgtgcatgaaccctgggcctggcacgtggacctcctgtgaccgtccccacaggcccgtgaggctgagcttggcactgcccaagaccacacagtccatgcgcggtggagctggggtccaggctgcccaccagggcagtgactacaatggtggcagcaggggacggtcaccgtcatgagctcaagccaggcgctgcactgaccttgagggagggctccatgcttccccttcccacagctgcagtgaggcctagcagagcagggtcggctgcgggcttgagtcctggggtgcccctgggctgacgggccctgcctgacctgctcctccagtgccccagccctgccccacccacgtcccctcctctcactgccccctggcccactccgctgcggtctcagtgccttcccaggctgggcatcatctgatgggaggaaaatgagggccccagactctgtgtcatcctggcaggacccctcccctcccatggctttgagcccatgagatggccttggacaaagcggcaatgggcccttcctgagacacagtgcggccatctactggaaaactgcccagtgtgactctgatgactgtgatgtgaatcctacagcaaagttgagcagtgcgcaacctgggctactgcacctggcagccccggctcctcctcgtctgcctcttcctgctccttcattctcccccagagctctaattgtcactgagattttatgtttcatttaacaaatgactgtctccccgcttgaacagaacctccatggggggagggaagagtgtctgttgtataaatagttgtatttcagtgcataaaacagtgcctgcctc

SEQ ID NO: 23230 - protein, 75 aa, Homo sapiens [sequence omitted]

SEQ ID NO: 23231 - DNA, 1794 bp, Homo sapiens
caatctgcaggtgtccacggtgagtcctccccagtaggaggagacaggagtctctctggaaggcgaacgccacagctgcccagatgttctcctgcaggggaaccagacaccatcatgacccaaaagggctgcacttctcggggtttgcagaatgtggcagaggtggaaaaactcgaaagtccctaaacacagattttttggaattaattcgaagtacattgcaatcacgatggccttttacttctaaattctacactctgcacctctaaaatatacaagcatgtcccaggaccaccctcaactacttcaggtccctcggaaaagggtaaggtcagccaggctggacaccacgctgtgggtggccttaggtcctgcaagcaactgtggccaccagcgtcgcagcagcaaggaggcttgtgtcacttttacaaccagcgaagtcacgtgtaggttccgtgtccaggaagagaaccccaccgcctccttctggatggcaggtgtccctctcggctgagcaggtgtctgggaccatgacatccaacctgggctctcctggcccccagagaagagctgcccagtgcatgtgctggctgcaccgtgacgtcccctatgaacgaggcccacaggcagtggctggctggggggatgcccctgccctgagctggagtctccccaggtggctgcttcttccccaccccgagggtcacagcccagcccaagctccaagggaatggagcagctgcctgcaccaagcttccctcctctggagaaagcacctcctcttctccctcacgtgctccctgatgaccgccaggctccttgacatggttcccaggaccagcctctcccagggtccctactcccagtaccccagtcctcaccatttgtgacccttcagcccctgctgaaccctgccagccccaggacaggccacagctgtcatgccacctcccagccatgatgaatggggaacggggaactgtctgaccttgggctgggttcaaaagcagggtcagcccaggcacagagcctgtttgtttgagtgaattgagtgggaggctgctttctcatcgggctgaggagggttcagaggattgtggtctctttgttttcattcaaggctccatcagccggggccctggcaggaaccagagttcactcaaccgttcacagaagggtgccttgcagaggcgcaggcagggtgagcaaggatggcgtggaactcgagggggggtgccacagtggatgttgtcgccacctgtggcctgaggagcagggcaggagccatgctgctgggtcccagggaggccatgcggggcactccacagaagctgggtctggagactgggggtccccgtgaggccatatggggcactctacagaagctgggcctggagactgggggtccccgtgaggccatgcggggcactctacagaagctgggtctggagactgggggtccccgtgaggccatatggggcactctacagaagctgggtctggagactgggggtccccgtgaggccatgcggggcactctacagaagctgggcctggagactgggggtccccgtgaggccatgcggggcactccacagaagctgggcctggagactgggggtccccgtgaggccatgcggggcactccacagaagctgggcctggagactgggggtccccgtgaggccatgcggggcactccacagaagctgggtctggagactgggggtcccagctcttgccagcagcacagccccatgcagggagggcacgaggaataaatgccgcgacctc

SEQ ID NO: 23232 - protein, 189 aa, Homo sapiens
MAWNSRGGATVDVVATCGLRSRAGAMLLGPREAMRGTPQKLGLETGGPREAIWGTLQKLGLETGGPREAMRGTLQKLGLETGGPREAIWGTLQKLGLETGGPREAMRGTLQKLGLETGGPREAMRGTPQKLGLETGGPREAMRGTPQKLGLETGGPREAMRGTPQKLGLETGGPSSCQQHSPMQGGHEE

SEQ ID NO: 23233 - DNA, 2265 bp, Homo sapiens
caatctgcaggtgtccacggtgagtcctccccagtaggaggagacaggagtctctctggaaggcgaacgccacagctgcccagatgttctcctgcaggggaaccagacaccatcatgacccaaaagggctgcacttctcggggtttgcagaatgtggcagaggtggaaaaactcgaaagtccctaaacacagattttttggaattaattcgaagtacattgcaatcacgatggccttttacttctaaattctacactctgcacctctaaaatatacaagcatgtcccaggaccaccctcaactacttcaggtccctcggaaaagggtaaggtcagccaggctggacaccacgctgtgggtggccttaggtcctgcaagcaactgtggccaccagcgtcgcagcagcaaggaggcttgtgtcacttttacaaccagcgaagtcacgtgtaggttccgtgtccaggaagagaaccccaccgcctccttctggatggcaggtgtccctctcggctgagcaggtgtctgggaccatgacatccaacctgggctctcctggcccccagagaagagctgcccagtgcatgtgctggctgcaccgtgacgtcccctatgaacgaggcccacaggcagtggctggctggggggatgcccctgccctgagctggagtctccccaggtggctgcttcttccccaccccgagggtcacagcccagcccaagctccaagggaatggagcagctgcctgcaccaagcttccctcctctggagaaagcacctcctcttctccctcacgtgctccctgatgaccgccaggctccttgacatggttcccaggaccagcctctcccagggtccctactcccagtaccccagtcctcaccatttgtgacccttcagcccctgctgaaccctgccagccccaggacaggccacagctgtcatgccacctcccagccatgatgaatggggaacggggaactgtctgaccttgggctgggttcaaaagcagggtcagcccaggcacagagcctgtttgtttgagtgaattgagtgggaggctgctttctcatcgggctgaggagggttcagaggattgtggtctctttgttttcattcaaggctccatcagccggggccctggcaggaaccagagttcactcaaccgttcacagaagggtgccttgcagaggcgcaggcagggtgagcaaggatggcgtggaactcgagggggggtgccacagtggatgttgtcgccacctgtggcctgaggagcagggcaggagccatgctgctgggtcccagggaggccatgcggggcactccacagaagctgggtctggagactgggggtccccgtgaggccatatggggcactctacagaagctgggcctggagactgggggtccccgtgaggccatgcggggcactctacagaagctgggtctggagactgggggtccccgtgaggccatatggggcactctacagaagctgggtctggagactgggggtccccgtgaggccatgcggggcactctacagaagctgggcctggagactgggggtccccgtgaggccatgcggggcactccacagaagctgggcctggagactgggggtccccgtgaggccatgcggggcactccacagaagctgggcctggagactgggggtccccgtgaggccatgcggggcactccacagaagctgggtctggagactgggggtccccgtgaggccatgcggggcactccacagaagctgggcctggagactgggggtcccagctcttgccagcagcacagccccatgcagggagggcacgaggaataaatgccgcgacctcagcctgtctctccagcctgctctgtgccccaggggagactccattagtggagcccaactcaaaatagggagggaagggagcctggatggacagagggccccagtcatcttagggcgggtggagtggggtcgggggagccggatggggcctgcagggcagcgggtcccacccaggcccacctgcagacatcaggggcctcatctgggaatgcggggccaggatgctcttgaacaaatggaagttttggcaactctggactttgggtggatgccagcatcaaaccagcaggacaacaaaatgccggcatccgtgacaaggacctgggttgttggccatggaaacctaatcaatgtggagctgctcatggaacaatcctccacctccggcataatgagctttggtgtggatttaacctga

SEQ ID NO: 23234 - protein, 207 aa, Homo sapiens
MAWNSRGGATVDVVATCGLRSRAGAMLLGPREAMRGTPQKLGLETGGPREAIWGTLQKLGLETGGPREAMRGTLQKLGLETGGPREAIWGTLQKLGLETGGPREAMRGTLQKLGLETGGPREAMRGTPQKLGLETGGPREAMRGTPQKLGLETGGPREAMRGTPQKLGLETGGPREAMRGTPQKLGLETGGPSSCQQHSPMQGGHEE

SEQ ID NO: 23235 - DNA, 493 bp, Homo sapiens
gttttgtgctgtttccatgggaacacgcagcatttgtgtgaatgcggtgccctccctggctgaggtcctttcatgcctggctttgggttcttccaacgacgcccgagcccttctccggcaaagtgagtctctagtgagtggacgagtcgtctggtgcagcatctttcaagaccagcttcctggtgggtccacaggagttttgcctcaggaagctccgcactcagcctttgggggaaatagaacaggacaaaatagaacagagcagaacagtgtttcccgagatgcagtctggtgcgaggctttatatatctgcagtgaattggagcagactttccaatgagcagcctccaggagaattcagggctctgtgtccgttctcactcaatcagcaagaaacaccctgagttctaatgaacagagctcagatcagacgggacactggagagaaaaatccaagaaataaaccccatctgcggccatgtcgcacgcctca

SEQ ID NO: 23236 - protein, 107 aa, Homo sapiens [sequence omitted]

SEQ ID NO: 23237 - DNA, 1624 bp, Homo sapiens
gttgctgaagcttcatcctttgctctcattctgtaagtcatagaaaagtttgaaacattctgtctgtggtagagctcgggccagctgtagttcattcgccagtgtgcttttcttaatatctaagatggtgcgtgagcagtacactacagccacagaaggcatctgcatagagaggccagagaatcagtatgtctacaaaattggcatttatggctggagaaagcgctgtctctacttgtttgttcttcttttactcatcatcctcgttgtgaatttagctcttacaatttggattcttaaagtgatgtggttttctccagcaggaatgggccacttgtgtgtaacaaaagatggactgcgcttggaaggggaatcagaatttttattcccattgtatgccaaagaaatacactccagagtggactcatctctgcttctacaatcaacccagaatgtgactgtaaatgcgcgcaactcagaaggggaggtcacaggcaggttaaaagtcggtcccaaaatggtagaagtccagaatcaacagtttcagatcaactccaacgacggcaagccactatttactgtagatgagaaggaagttgtggttggtacagataaacttcgagtaactgggcctgaaggggctctttttgaacattcagtggagacaccccttgtcagagccgacccgtttcaagaccttagattagaatcccccactcggagtctaagcatggatgccccaaggggtgtgcatattcaagctcacgctgggaaaattgaggcgctttctcaaatggatattctttttcatagtagtgatggaatgcttgtgcttgatgctgaaactgtgtgcttacccaagctggtgcaggggacgtggggtccctctggcagctcacagagcctctacgaaatctgtgtgtgtccagatgggaagctgtacctgtctgtggccggtgtgagcaccacgtgccaggagcacaaccacatctgcctctgagctgcctgcgtcctctcggtgagctgtgcagtgccggccccagatcctcacacccagggagcagctgcacatcgtgaaagactgaggcagcgtggatgggaagtaaacgcttccagaggaactcagaaaaaattatgtgccagtgaaagtgtttggacaaaaactacatgatctcaaaatgcacgtggatgtgagacacaaaagttgacaaaatggaaaagcaatgtgtttttccactggattaattttcaccggaacaattgcgaattctctctgcctcgcctccccctatcttgtccgtgtgggcacacactgagtgttgagttgccgtgtggagttaatgtatgacgctccactgtggatatctaatgccctgttgagagtagccttgctcagtactaaaatgccccaaagttctatacagcatttcctttatagcattcaaacctcacatcctcccttcagtttaatgcaagtaagtcaggtttcacaagaaaattttcaagttttgaagggaatttgaggttgatctggttttcaagatgtagttaaaggaataaatcactcaaaattaaactttctgtatatagtcaataagcaataaaaacctcatttttcagagtt

SEQ ID NO: 23238 - protein, 291 aa, Homo sapiens
MVREQYTTATEGICIERPENQYVYKIGIYGWRKRCLYLFVLLLLIILVVNLALTIWILKVMWFSPAGMGHLCVTKDGLRLEGESEFLFPLYAKEIHSRVDSSLLLQSTQNVTVNARNSEGEVTGRLKVGPKMVEVQNQQFQINSNDGKPLFTVDEKEVVVGTDKLRVTGPEGALFEHSVETPLVRADPFQDLRLESPTRSLSMDAPRGVHIQAHAGKIEALSQMDILFHSSDGMLVLDAETVCLPKLVQGTWGPSGSSQSLYEICVCPDGKLYLSVAGVSTTCQEHNHICL

SEQ ID NO: 23239 - DNA, 421 bp, Homo sapiens
cttctacaccatcttcccgagagctttagtaagacctcagactggagtagagttgaaggagggaatgccagtctgaagaaggaaaggaagaggagagacagcaaggagaacttcagttgtcaagatggtgcgtgagcagtacactacagccacagaaggcatctgcatagagaggccagagaatcagtatgtctacaaaattggcatttatggctggagaaagcgctgtctctacttgtttgttcttcttttactcatcatcctcgttgtgaatttagctcttacaatttggattcttaaagtgatgtggttttctccagcaggaatgggccacttgtgtgtaacaaaagatggactgcgcttggaaggggaatcagaatttttattcccattgtatgccaaagaaatacactccagagtg

SEQ ID NO: 23240 - protein, 98 aa, Homo sapiens
MVREQYTTATEGICIERPENQYVYKIGIYGWRKRCLYLFVLLLLIILVVNLALTIWILKVMWFSPAGMGHLCVTKDGLRLEGESEFLFPLYAKEIHSR

SEQ ID NO: 23241 - DNA, 1943 bp, Homo sapiens
cagatgcagacacagtgctgctctttctgaaaagtgtgcaggatgtttccttatatgtccgagaggctgacggaacagagaaactggtgtttagagtgacttcgagtgagagtaaggcactgaaacatgagcggccgaattctataaagattctgggaactgctataagtaactattgtaaaaagactccaagcaataacatcacctgtgtaacatatcacgtaaatattgttttagaagaggagagtactaaggatgcacagaaaacatcttggttggtgtgtaacagtgtgggtgggcgagggatcagtagtaagcttgactctttagctgatgaactgaaatttgtcccaatcattggaatagccatgcctttatcaagcagagatgatgaagcaaaaggagcaacgtctgatttctcaggaaaagcattttgtttccttcctttaccacctggtgaggaaagcagcacaggcctcccagttcacatcagtgggttctttggccttactgataaccgcaggagcataaaatggagagagctggaccagtggagagacccggcagccttatggaatgagtttcttgtcatgaatgttgtccccaaagcttatgctactctgatcttagattcaataaaacgtctggagatggaaaagagctctgatttccccttgtcagttgatgttatctataagctttggccggaggcgagcaaagtcaaggtgcactggcaaccggtgttagagcctctattcagcgagctgttgcagaatgcagtgatttattcaattagctgtgactgggtcaggttggagcaggtgtacttctcagaacttgatgaaaatttagaatacacaaaaactgtgctcaactacctccagagctcagggaagcagattgccaaggtaccagggaatgtggatgctgctgttcagctcacagctgcctctggcacaacacctgtgaggaaggtgacgcccgcgtgggtgcggcaggtgctgcggaagtgtgcacacctgggctgtgctgaagaaaagcttcaccttctagaatttgtgctttctgaccaagcctacagtgagctgcttgggctggagctgctccctttacaaaatggcaattttgtccccttctcctcatctgtatcagaccaagatgtcatttatattacctcagcagaatatccaaggtcccttttcccaagtcttgaaggaagatttattttggataacttgaaacctcaccttgtggctgctttaaaggaagctgcccaaacccgaggcttcctgtttgatgaagatagcaacggaaaactcaaaatggtggcagttcttattaccagttgttagtattgtttctggaaactgcttgccaagacaacatttattaactgttagaacacttgctttatgtttgtgtgtacatattttccacaaatgttataatttatatagtgtggttgaacaggatgcaatcttttgttgtctaaaggtgctgcagttaaaaaaaaaacaaccttttctttcaatatggcatgtagtggagtttttttaactttaaaaacatcaaaaattgttaaaatcattgtgttatctagtagtttataattatcggcttatatttccccatgaatgatcagaactgacatttaattcatgtttgtctcgccatgcttctttactttaacatatttcttttgcagaatgtaaaaggtaatgataattagtttatataagtgtactggctgtaaatgatgctaaatatactttatgcaattaagggcttacagaacatgttgaaactttttttacttttattgggaataaggaatgtttgcacctccacattttattgcttctggatgtgaaatcatgtaattatttctgctgttatataaagtgccatacttttaataaaggaaaatgtacatatgaaatcat

SEQ ID NO: 23242 - protein, 327 aa, Homo sapiens
MPLSSRDDEAKGATSDFSGKAFCFLPLPPGEESSTGLPVHISGFFGLTDNRRSIKWRELDQWRDPAALWNEFLVMNVVPKAYATLILDSIKRLEMEKSSDFPLSVDVIYKLWPEASKVKVHWQPVLEPLFSELLQNAVIYSISCDWVRLEQVYFSELDENLEYTKTVLNYLQSSGKQIAKVPGNVDAAVQLTAASGTTPVRKVTPAWVRQVLRKCAHLGCAEEKLHLLEFVLSDQAYSELLGLELLPLQNGNFVPFSSSVSDQDVIYITSAEYPRSLFPSLEGRFILDNLKPHLVAALKEAAQTRGFLFDEDSNGKLKMVAVLITSC

SEQ ID NO: 23243 - DNA, 8192 bp, Homo sapiens
agttatctgactggatcaagattggagatctgacttccaaaaattgtcatctttttgtaaaccttcaatcaaaaggcttaaaagggggaggtcgatttggtcagacaacgccaccacttgttgattttctcaaggacattttgagaagatatccagaaggaggacagattcttaaggaattaattcagaatgcagaagatgctggggcgacagaagttaaatttttatatgatgaaactcaatacggaacagagactctttggtcaaaagatatggcgccatatcaggggccagctctctatgtgtacaacaacgcggttttcaccccagaggactggcacggcattcaagaaatagcaagaagcaggaaaaaggatgatcctctgaaggtcggaagatttggaattgggtttaattctgtctatcatataacagatgttccttgtatctttagtggtgaccaaatcgggatgctagatcctcatcaaacactttttggcccacatgaatcaggccaatgttggaatctcaaagatgacagcaaagaaattagtgaactttcagaccagtttgcaccatttgttggcatttttggaagcaccaaggaaacatttataaacggcaattttccaggaacatttttccgtttccctcttcgcctacaaccttcacaacttagtagtaacctctacaataagcagaaggttcttgagttgtttgagtcttttagggcagatgcagacacagtgctgctctttctgaaaagtgtgcaggatgtttccttatatgtccgagaggctgacggaacagagaaactggtgtttagagtgacttcgagtgagagtaaggcactgaaacatgagcggccgaattctataaagattctgggaactgctataagtaactattgtaaaaagactccaagcaataacatcacctgtgtaacatatcacgtaaatattgttttagaagaggagagtactaaggatgcacagaaaacatcttggttggtgtgtaacagtgtgggtgggcgagggatcagtagtaagcttgactctttagctgatgaactgaaatttgtcccaatcattggaatagccatgcctttatcaagcagagatgatgaagcaaaaggagcaacgtctgatttctcaggaaaagcattttgtttccttcctttaccacctggtgaggaaagcagcacaggcctcccagttcacatcagtgggttctttggccttactgataaccgcaggagcataaaatggagagagctggaccagtggagagacccggcagccttatggaatgagtttcttgtcatgaatgttgtccccaaagcttatgctactctgatcttagattcaataaaacgtctggagatggaaaagagctctgatttccccttgtcagttgatgttatctataagctttggccggaggcgagcaaagtcaaggtgcactggcaaccggtgttagagcctctattcagcgagctgttgcagaatgcagtgatttattcaattagctgtgactgggtcaggttggagcaggtgtacttctcagaacttgatgaaaatttagaatacacaaaaactgtgctcaactacctccagagctcagggaagcagattgccaaggtaccagggaatgtggatgctgctgttcagctcacagctgcctctggcacaacacctgtgaggaaggtgacgcccgcgtgggtgcggcaggtgctgcggaagtgtgcacacctgggctgtgctgaagaaaagcttcaccttctagaatttgtgctttctgaccaagcctacagtgagctgcttgggctggagctgctccctttacaaaatggcaattttgtccccttctcctcatctgtatcagaccaagatgtcatttatattacctcagcagaatatccaaggtcccttttcccaagtcttgaaggaagatttattttggataacttgaaacctcaccttgtggctgctttaaaggaagctgcccaaacccgaggaagaccatgtactcagctgcagcttctaaatccagaacgatttgcacgtcttatcaaggaagtaatgaatacattctggcctggcagagaattgattgttcaatggtatccatttgatgaaaacagaaatcacccatctgtttcatggcttaagatggtttggaaaaatctttatatacatttttcagaggatttgactttatttgatgagatgccacttatccccagaactatactagaggaaggtcagacatgtgtggaactcattagactcaggattccatcgttagtcattttagacgatgaatctgaagcacagcttccagaatttttagcagacattgtacaaaaacttggagggtttgtccttaaaaaattagatgcatctatacaacatccgcttattaaaaaatatattcattcaccattaccaagtgctgttttgcagataatggagaagatgccattgcagaaattgtgtaatcaaataacttcgctacttccaacacacaaagatgccctgaggaagttcttggctagtttaaccgatagcagtgagaaagagaaaagaattattcaagaattggcaatattcaagcgcattaaccattcttctgatcagggaatttcctcttatacaaaattgaaaggttgtaaagtcttacaccatactgccaaactcccagcagatctgcgactttctatttcagtaatagacagtagtgatgaagctactattcgtctggcaaacatgttgaaaatagaacagttaaagaccactagctgcttaaagcttgttttaaaagatattgaaaatgcattttattcacatgaagaggtaacacagcttatgttatgggtccttgagaatctatcttctcttaaaaatgagaatccaaatgtgcttgagtggttaacaccattaaaattcatccagatatcacaggaacagatggtatcagctggtgaactctttgaccctgatatagaagtactaaaggatctcttttgtaatgaagaaggaacctatttcccaccctcagtttttacctcaccagatattcttcactccttaagacagattggtttaaaaaacgaagccagtctcaaagaaaaggatgttgtgcaagtggcaaaaaaaattgaagccttacaggtcggtgcttgtcctgatcaagatgttcttctgaagaaagccaaaaccctcttactggttttaaataagaatcacacactgttgcaatcatctgaaggaaagatgacattgaagaaaataaaatgggttccagcctgcaaggaaaggcctccaaattatccaggctctttggtctggaaaggagatctctgtaatctctgtgcaccaccagatatgtgtgatgtaggccatgcaattctcattggctcctcacttcctcttgttgaaagtatccatgtaaacctggaaaaagcattagggatcttcacaaaacctagccttagtgctgtcttaaaacactttaaaattgttgttgattggtattcttcaaaaacctttagtgatgaagactactatcaattccagcatattttgcttgagatttacggattcatgcatgatcatctaaatgaagggaaagattcttttagagccttaaaatttccatgggtttggactggcaaaaagttttgtccacttgcccaggctgtgattaaaccaatccatgatcttgaccttcagccttatttgcataatgtacctaaaaccatggcaaaattccaccaactatttaaggtctgtggttcaatagaggagttgacatcagatcatatttccatggttattcagaagatatatctcaaaagtgaccaagatctcagtgaacaagaaagcaaacaaaatcttcatcttatgttgaatattatcagatggctgtatagcaatcagattccagcaagccccaacacaccagttcctatacatcatagcaaaaatccttctaaacttatcatgaagccaattcacgaatgctgttattgtgacattaaagttgatgaccttaatgacttacttgaagattctgtggaaccaatcattttggtgcatgaggacatacccatgaaaactgcagaatggctaaaagttccatgccttagtacaagactgataaatcctgaaaacatgggatttgagcagtcaggacaaagagagccacttactgtaagaattaaaaatattctggaagaatacccttcagtgtcagatatttttaaagaactacttcaaaacgctgatgatgcaaatgcaacagaatgcagtttcttgattgatatgagaagaaatatggacataagagagaatctcctagacccagggatggcagcttgtcatggacctgctttgtggtcattcaacaattctcaattctcagattcagattttgtgaacataactaggttaggagaatctttaaaaaggggagaagttgacaaagttggaaaatttggtcttggatttaattctgtgtaccatatcactgacattcccatcattatgagtcgggaattcatgataatgttcgatccaaacataaatcatatcagtaaacacattaaagacaaatccaatcctgggatcaaaattaattggagtaaacaacagaaaagacttagaaaatttcctaatcagttcaaaccatttatagatgtatttggctgtcagttacctttgactgtagaagcaccttacagctataatggaacccttttccgactgtcctttagaactcaacaggaagcaaaagtgagtgaagttagtagtacgtgctacaatacagcagatatttattctcttgtggatgaatttagtctctgtggacacaggcttatcattttcactcagagtgtaaagtcaatgtatttgaagtacttgaaaattgaggaaaccaaccccagtttagcacaagatacagtaataattaaaaaaaaatcctgctcttccaaagcattgaacacacctgtcttaagtgttttaaaagaggctgctaagctcatgaagacttgcagcagcagtaataaaaagcttcccagtgatgaaccaaagtcatcttgcattcttcagatcacagtggaagaatttcaccatgtgttcagaaggattgctgatttacagtcgccactttttagaggtccagatgatgacccagctgctctctttgaaatggctaagtctggccaatcaaaaaagccatcagatgagttgtcacagaaaacagtagagtgtaccacgtggcttctgtgtacttgcatggacacaggagaggctctgaagttttccctgagtgagagtggaagaagactaggactggttccatgtggggcagtaggagttcagctgtcagaaatccaggaccagaagtggacagtgaaaccacacattggagaggtgttttgctatttacctttacgaataaaaacaggcttgccagttcatatcaatgggtgctttgctgttacatcaaataggaaagaaatctggaaaacagatacaaaaggacgatggaataccacgttcatgagacatgttattgtgaaagcttacttacaggtactgagtgtcttacgggacctggccactagtggggagctaatggattatacttactatgcagtatggcccgatcctgatttagttcatgatgatttttctgtaatttgccaaggattttatgaagatatagctcatggaaaagggaaagaactgaccaaagtcttctctgatggatctacttgggtttccatgaagaacgtaagatttctagatgactctatacttaaaagaagagatgttggttcagcagccttcaagatatttttgaaatacctcaagaagactgggtccaaaaacctttgtgctgttgaacttccttcttcggtaaaattaggatttgaagaagctggctgcaaacagatactacttgaaaacacattttcagagaaacagtttttttctgaagtgttttttccaaatattcaagaaattgaagcagaacttagagatcctttaatgatctttgttctaaatgaaaaagttgatgagttctcgggagttcttcgtgttactccatgtattccttgttccttggaggggcatcctttggttttgccatcaagattgatccaccccgaaggacgagttgcaaagttatttgatattaaagatgggagattcccttatggttctactcaggattatctcaatcctattattttgattaaactagttcagttaggtatggcaaaagatgatattttatgggatgatatgctagaacgtgcagtgtcagtagctgaaattaataaaagtgatcatgttgctgcatgcctaagaagtagtatcttattgagtcttatcgatgagaaactaaaaataagggatcctagagcaaaggattttgctgcaaaatatcaaacaatccgcttccttccatttctgacaaaaccagcaggtttttctttggactggaaaggcaacagttttaagcctgaaaccatgtttgcagcaactgacctttatacagctgaacatcaagatatagtttgtcttttgcaaccaattctaaatgaaaattcccattcttttagaggttgtggttcagtgtcattggctgttaaagagtttttgggattactcaagaagccaacagttgatctggttataaaccaattgaaagaagtagcaaaatcagttgatgatggaattacactgtaccaggagaatatcaccaatgcttgctacaaataccttcatgaagccttgatgcaaaatgaaatcactaagatgtcaattattgataagttaaaaccctttagcttcattctagttgagaatgcatatgttgactcagaaaaggtttcttttcatttaaattttgaggcggcaccatacctttatcagttgcctaataagtataaaaataatttccgcgaactttttgaaaccgtgggtgtgaggcagtcatgcactgttgaagattttgctcttgttttggaatctattgatcaagaaagaggaacaaagcaaataacagaagagaattttcagctttgccgacgaataatcagtgaaggaatatggagtctcattagagaaaagaaacaagaattttgtgagaaaaattatggcaagatattattgccagatactaatcttatgcttctccctgctaaatcgttatgctacaatgattgcccttggataaaagtaaaggataccactgtaaaatattgtcatgctgacatacccagggaagtagcagtaaaactaggagcagtcccaaagcgacacaaagccttagaaagatatgcatccaatgtctgttttacaacacttggcacagaatttgggcagaaagaaaaattgaccagcagaattaagagcatccttaatgcatatccttctgaaaaggaaatgttgaaagagcttcttcaaaatgctgatgatgcaaaggcgacagaaatctgttttgtgtttgatcctagacagcatccagttgatagaatatttgatgataagtgggccccattgcaagggccagcactttgtgtgtacaacaaccagccatttacagaagatgatgttagaggaattcagaatcttggaaaaggcacgaaagagggaaatccttataaaactggacagtatggaataggattcaattctgtgtatcatatcacagactgcccatcttttatttctggcaatgacatcctgtgtatttttgatcctcatgccagatatgcaccaggggccacatccattagtcccggacgcatgtttagagatttggatgcagattttaggacacagttctcagatgttctggatctttatctgggaacccattttaaactggataattgcacaatgttcagatttcctcttcgtaatgcagaaatggcaaaagtttcggaaatttcgtctgttccagcatcagacagaatggtccagaatcttttggacaaactgcgctcagatggggcagaacttctaatgtttcttaatcacatggaaaaaatttctatttgtgaaatagataagagtactggagctctaaatgtgctgtattcagtaaagggcaaaatcacagatggagacagattgaaaaggaaacaatttcatgcatctgtaattgatagt

SEQ ID NO: 23244 - protein, 4000 aa, Homo sapiens
MAPYQGPALYVYNNAVFTPEDWHGIQEIARSRKKDDPLKVGRFGIGFNSVYHITDVPCIFSGDQIGMLDPHQTLFGPHESGQCWNLKDDSKEISELSDQFAPFVGIFGSTKETFINGNFPGTFFRFPLRLQPSQLSSNLYNKQKVLELFESFRADADTVLLFLKSVQDVSLYVREADGTEKLVFRVTSSESKALKHERPNSIKILGTAISNYCKKTPSNNITCVTYHVNIVLEEESTKDAQKTSWLVCNSVGGRGISSKLDSLADELKFVPIIGIAMPLSSRDDEAKGATSDFSGKAFCFLPLPPGEESSTGLPVHISGFFGLTDNRRSIKWRELDQWRDPAALWNEFLVMNVVPKAYATLILDSIKRLEMEKSSDFPLSVDVIYKLWPEASKVKVHWQPVLEPLFSELLQNAVIYSISCDWVRLEQVYFSELDENLEYTKTVLNYLQSSGKQIAKVPGNVDAAVQLTAASGTTPVRKVTPAWVRQVLRKCAHLGCAEEKLHLLEFVLSDQAYSELLGLELLPLQNGNFVPFSSSVSDQDVIYITSAEYPRSLFPSLEGRFILDNLKPHLVAALKEAAQTRGRPCTQLQLLNPERFARLIKEVMNTFWPGRELIVQWYPFDENRNHPSVSWLKMVWKNLYIHFSEDLTLFDEMPLIPRTILEEGQTCVELIRLRIPSLVILDDESEAQLPEFLADIVQKLGGFVLKKLDASIQHPLIKKYIHSPLPSAVLQIMEKMPLQKLCNQITSLLPTHKDALRKFLASLTDSSEKEKRIIQELAIFKRINHSSDQGISSYTKLKGCKVLHHTAKLPADLRLSISVIDSSDEATIRLANMLKIEQLKTTSCLKLVLKDIENAFYSHEEVTQLMLWVLENLSSLKNENPNVLEWLTPLKFIQISQEQMVSAGELFDPDIEVLKDLFCNEEGTYFPPSVFTSPDILHSLRQIGLKNEASLKEKDVVQVAKKIEALQVGACPDQDVLLKKAKTLLLVLNKNHTLLQSSEGKMTLKKIKWVPACKERPPNYPGSLVWKGDLCNLCAPPDMCDVGHAILIGSSLPLVESIHVNLEKALGIFTKPSLSAVLKHFKIVVDWYSSKTFSDEDYYQFQHILLEIYGFMHDHLNEGKDSFRALKFPWVWTGKKFCPLAQAVIKPIHDLDLQPYLHNVPKTMAKFHQLFKVCGSIEELTSDHISMVIQKIYLKSDQDLSEQESKQNLHLMLNIIRWLYSNQIPASPNTPVPIHHSKNPSKLIMKPIHECCYCDIKVDDLNDLLEDSVEPIILVHEDIPMKTAEWLKVPCLSTRLINPENMGFEQSGQREPLTVRIKNILEEYPSVSDIFKELLQNADDANATECSFLIDMRRNMDIRENLLDPGMAACHGPALWSFNNSQFSDSDFVNITRLGESLKRGEVDKVGKFGLGFNSVYHITDIPIIMSREFMIMFDPNINHISKHIKDKSNPGIKINWSKQQKRLRKFPNQFKPFIDVFGCQLPLTVEAPYSYNGTLFRLSFRTQQEAKVSEVSSTCYNTADIYSLVDEFSLCGHRLIIFTQSVKSMYLKYLKIEETNPSLAQDTVIIKKKSCSSKALNTPVLSVLKEAAKLMKTCSSSNKKLPSDEPKSSCILQITVEEFHHVFRRIADLQSPLFRGPDDDPAALFEMAKSGQSKKPSDELSQKTVECTTWLLCTCMDTGEALKFSLSESGRRLGLVPCGAVGVQLSEIQDQKWTVKPHIGEVFCYLPLRIKTGLPVHINGCFAVTSNRKEIWKTDTKGRWNTTFMRHVIVKAYLQVLSVLRDLATSGELMDYTYYAVWPDPDLVHDDFSVICQGFYEDIAHGKGKELTKVFSDGSTWVSMKNVRFLDDSILKRRDVGSAAFKIFLKYLKKTGSKNLCAVELPSSVKLGFEEAGCKQILLENTFSEKQFFSEVFFPNIQEIEAELRDPLMIFVLNEKVDEFSGVLRVTPCIPCSLEGHPLVLPSRLIHPEGRVAKLFDIKDGRFPYGSTQDYLNPIILIKLVQLGMAKDDILWDDMLERAVSVAEINKSDHVAACLRSSILLSLIDEKLKIRDPRAKDFAAKYQTIRFLPFLTKPAGFSLDWKGNSFKPETMFAATDLYTAEHQDIVCLLQPILNENSHSFRGCGSVSLAVKEFLGLLKKPTVDLVINQLKEVAKSVDDGITLYQENITNACYKYLHEALMQNEITKMSIIDKLKPFSFILVENAYVDSEKVSFHLNFEAAPYLYQLPNKYKNNFRELFETVGVRQSCTVEDFALVLESIDQERGTKQITEENFQLCRRIISEGIWSLIREKKQEFCEKNYGKILLPDTNLMLLPAKSLCYNDCPWIKVKDTTVKYCHADIPREVAVKLGAVPKRHKALERYASNVCFTTLGTEFGQKEKLTSRIKSILNAYPSEKEMLKELLQNADDAKATEICFVFDPRQHPVDRIFDDKWAPLQGPALCVYNNQPFTEDDVRGIQNLGKGTKEGNPYKTGQYGIGFNSVYHITDCPSFISGNDILCIFDPHARYAPGATSISPGRMFRDLDADFRTQFSDVLDLYLGTHFKLDNCTMFRFPLRNAEMAKVSEISSVPASDRMVQNLLDKLRSDGAELLMFLNHMEKISICEIDKSTGALNVLYSVKGKITDGDRLKRKQFHASVIDSVTKKRQLKDIPVQQITYTMDTEDSEGNLTTWLICNRSGFSSMEKVSKSVISAHKNQDITLFPRGGVAACITHNYKKPHRAFCFLPLSLETGLPFHVNGHFALDSARRNLWRDDNGVGVRSDWNNSLMTALIAPAYVELLIQLKKRYFPGSDPTLSVLQNTPIHVVKDTLKKFLSFFPVNRLDLQPDLYCLVKALYNCIHEDMKRLLPVVRAPNIDGSDLHSAVIITWINMSTSNKTRPFFDNLLQDELQHLKNADYNITTRKTVAENVYRLKHLLLEIGFNLVYNCDETANLYHCLIDADIPVSYVTPADIRSFLMTFSSPDTNCHIGKLPCRLQQTNLKLFHSLKLLVDYCFKDAEENEIEVEGLPLLITLDSVLQTFDAKRPKFLTTYHELIPSRKDLFMNTLYLKYSNILLNCKVAKVFDISSFADLLSSVLPREYKTKSCTKWKDNFASESWLKNAWHFISESVSVKEDQEETKPTFDIVVDTLKDWALLPGTKFTVSANQLVVPEGDVLLPLSLMHIAVFPNAQSDKVFHALMKAGCIQLALNKICSKDSAFVPLLSCHTANIESPTSILKALHYMVQTSTFRAEKLVENDFEALLMYFNCNLNHLMSQDDIKILKSLPCYKSISGRYVSIGKFGTCYVLTKSIPSAEVEKWTQSSSSAFLEEKIHLKELYEVIGCVPVDDLEVYLKHLLPKIENLSYDAKLEHLIYLKNRLSSAEELSEIKEQLFEKLESLLIIHDANSRLKQAKHFYDRTVRVFEVMLPEKLFIPNDFFKKLEQLIKPKNHVTFMTSWVEFLRNIGLKYILSQQQLLQFAKEISVRANTENWSKETLQNTVDILLHHIFQERMDLLSGNFLKELSLIPFLCPERAPAEFIRFHPQYQEVNGTLPLIKFNGAQVNPKFKQCDVLQLLWTSCPILPEKATPLSIKEQEGSDLGPQEQLEQVLNMLNVNLDPPLDKVINNCRNICNITTLDEEMVKTRAKVLRSIYEFLSAEKREFRFQLRGVAFVMVEDGWKLLKPEEVVINLEYESDFKPYLYKLPLELGTFHQLFKHLGTEDIISTKQYVEVLSRIFKNSEGKQLDPNEMRTVKRVVSGLFRSLQNDSVKVRSDLENVRDLALYLPSQDGRLVKSSILVFDDAPHYKSRIQGNIGVQMLVDLSQCYLGKDHGFHTKLIMLFPQKLRPRLLSSILEEQLDEETPKVCQFGALCSLQGRLQLLLSSEQFITGLIRIMKHENDNAFLANEEKAIRLCKALREGLKVSCFEKLQTTLRVKGFNPIPHSRSETFAFLKRFGNAVILLYIQHSDSKDINFLLALAMTLKSATDNLISDTSYLIAMLGCNDIYRIGEKLDSLGVKYDSSE

SEQ ID NO: 23245 - DNA, 8192 bp, Homo sapiens
ctgctcctcggccgccgcggcttcctctagcgtttcctcctcggcgcgggctgctgcgtacgggactgcgccatgcggatcccgccctcccggcccgcgcggggcctgtggacgcggtagggccggccgtgatcgggcgccggcgtcaggggcgggcgctaggggcgcctgccgcgccgcgatgtgggagaggtgggtcccggtgaccgtgctccccggctgcgtgggctgcaggaccgtcgcggcgctggcgtcctggaccgtgcgcgatgtgaaggaacgtatcttcgcggagactggcttcccggtgtcggagcagcggctgtggcgcggcggccgcgaggtcgatttggtcagacaacgccaccacttgttgattttctcaaggacattttgagaagatatccagaaggaggacagattcttaaggaattaattcagaatgcagaagatgctggggcgacagaagttaaatttttatatgatgaaactcaatacggaacagagactctttggtcaaaagatatggcgccatatcaggggccagctctctatgtgtacaacaacgcggttttcaccccagaggactggcacggcattcaagaaatagcaagaagcaggaaaaaggatgatcctctgaaggtcggaagatttggaattgggtttaattctgtctatcatataacagatgttccttgtatctttagtggtgaccaaatcgggatgctagatcctcatcaaacactttttggcccacatgaatcaggccaatgttggaatctcaaagatgacagcaaagaaattagtgaactttcagaccagtttgcaccatttgttggcatttttggaagcaccaaggaaacatttataaacggcaattttccaggaacatttttccgtttccctcttcgcctacaaccttcacaacttagtagtaacctctacaataagcagaaggttcttgagttgtttgagtcttttagggcagatgcagacacagtgctgctctttctgaaaagtgtgcaggatgtttccttatatgtccgagaggctgacggaacagagaaactggtgtttagagtgacttcgagtgagagtaaggcactgaaacatgagcggccgaattctataaagattctgggaactgctataagtaactattgtaaaaagactccaagcaataacatcacctgtgtaacatatcacgtaaatattgttttagaagaggagagtactaaggatgcacagaaaacatcttggttggtgtgtaacagtgtgggtgggcgagggatcagtagtaagcttgactctttagctgatgaactgaaatttgtcccaatcattggaatagccatgcctttatcaagcagagatgatgaagcaaaaggagcaacgtctgatttctcaggaaaagcattttgtttccttcctttaccacctggtgaggaaagcagcacaggcctcccagttcacatcagtgggttctttggccttactgataaccgcaggagcataaaatggagagagctggaccagtggagagacccggcagccttatggaatgagtttcttgtcatgaatgttgtccccaaagcttatgctactctgatcttagattcaataaaacgtctggagatggaaaagagctctgatttccccttgtcagttgatgttatctataagctttggccggaggcgagcaaagtcaaggtgcactggcaaccggtgttagagcctctattcagcgagctgttgcagaatgcagtgatttattcaattagctgtgactgggtcaggttggagcaggtgtacttctcagaacttgatgaaaatttagaatacacaaaaactgtgctcaactacctccagagctcagggaagcagattgccaaggtaccagggaatgtggatgctgctgttcagctcacagctgcctctggcacaacacctgtgaggaaggtgacgcccgcgtgggtgcggcaggtgctgcggaagtgtgcacacctgggctgtgctgaagaaaagcttcaccttctagaatttgtgctttctgaccaagcctacagtgagctgcttgggctggagctgctccctttacaaaatggcaattttgtccccttctcctcatctgtatcagaccaagatgtcatttatattacctcagcagaatatccaaggtcccttttcccaagtcttgaaggaagatttattttggataacttgaaacctcaccttgtggctgctttaaaggaagctgcccaaacccgaggaagaccatgtactcagctgcagcttctaaatccagaacgatttgcacgtcttatcaaggaagtaatgaatacattctggcctggcagagaattgattgttcaatggtatccatttgatgaaaacagaaatcacccatctgtttcatggcttaagatggtttggaaaaatctttatatacatttttcagaggatttgactttatttgatgagatgccacttatccccagaactatactagaggaaggtcagacatgtgtggaactcattagactcaggattccatcgttagtcattttagacgatgaatctgaagcacagcttccagaatttttagcagacattgtacaaaaacttggagggtttgtccttaaaaaattagatgcatctatacaacatccgcttattaaaaaatatattcattcaccattaccaagtgctgttttgcagataatggagaagatgccattgcagaaattgtgtaatcaaataacttcgctacttccaacacacaaagatgccctgaggaagttcttggctagtttaaccgatagcagtgagaaagagaaaagaattattcaagaattggcaatattcaagcgcattaaccattcttctgatcagggaatttcctcttatacaaaattgaaaggttgtaaagtcttacaccatactgccaaactcccagcagatctgcgactttctatttcagtaatagacagtagtgatgaagctactattcgtctggcaaacatgttgaaaatagaacagttaaagaccactagctgcttaaagcttgttttaaaagatattgaaaatgcattttattcacatgaagaggtaacacagcttatgttatgggtccttgagaatctatcttctcttaaaaatgagaatccaaatgtgcttgagtggttaacaccattaaaattcatccagatatcacaggaacagatggtatcagctggtgaactctttgaccctgatatagaagtactaaaggatctcttttgtaatgaagaaggaacctatttcccaccctcagtttttacctcaccagatattcttcactccttaagacagattggtttaaaaaacgaagccagtctcaaagaaaaggatgttgtgcaagtggcaaaaaaaattgaagccttacaggtcggtgcttgtcctgatcaagatgttcttctgaagaaagccaaaaccctcttactggttttaaataagaatcacacactgttgcaatcatctgaaggaaagatgacattgaagaaaataaaatgggttccagcctgcaaggaaaggcctccaaattatccaggctctttggtctggaaaggagatctctgtaatctctgtgcaccaccagatatgtgtgatgtaggccatgcaattctcattggctcctcacttcctcttgttgaaagtatccatgtaaacctggaaaaagcattagggatcttcacaaaacctagccttagtgctgtcttaaaacactttaaaattgttgttgattggtattcttcaaaaacctttagtgatgaagactactatcaattccagcatattttgcttgagatttacggattcatgcatgatcatctaaatgaagggaaagattcttttagagccttaaaatttccatgggtttggactggcaaaaagttttgtccacttgcccaggctgtgattaaaccaatccatgatcttgaccttcagccttatttgcataatgtacctaaaaccatggcaaaattccaccaactatttaaggtctgtggttcaatagaggagttgacatcagatcatatttccatggttattcagaagatatatctcaaaagtgaccaagatctcagtgaacaagaaagcaaacaaaatcttcatcttatgttgaatattatcagatggctgtatagcaatcagattccagcaagccccaacacaccagttcctatacatcatagcaaaaatccttctaaacttatcatgaagccaattcacgaatgctgttattgtgacattaaagttgatgaccttaatgacttacttgaagattctgtggaaccaatcattttggtgcatgaggacatacccatgaaaactgcagaatggctaaaagttccatgccttagtacaagactgataaatcctgaaaacatgggatttgagcagtcaggacaaagagagccacttactgtaagaattaaaaatattctggaagaatacccttcagtgtcagatatttttaaagaactacttcaaaacgctgatgatgcaaatgcaacagaatgcagtttcttgattgatatgagaagaaatatggacataagagagaatctcctagacccagggatggcagcttgtcatggacctgctttgtggtcattcaacaattctcaattctcagattcagattttgtgaacataactaggttaggagaatctttaaaaaggggagaagttgacaaagttggaaaatttggtcttggatttaattctgtgtaccatatcactgacattcccatcattatgagtcgggaattcatgataatgttcgatccaaacataaatcatatcagtaaacacattaaagacaaatccaatcctgggatcaaaattaattggagtaaacaacagaaaagacttagaaaatttcctaatcagttcaaaccatttatagatgtatttggctgtcagttacctttgactgtagaagcaccttacagctataatggaacccttttccgactgtcctttagaactcaacaggaagcaaaagtgagtgaagttagtagtacgtgctacaatacagcagatatttattctcttgtggatgaatttagtctctgtggacacaggcttatcattttcactcagagtgtaaagtcaatgtatttgaagtacttgaaaattgaggaaaccaaccccagtttagcacaagatacagtaataattaaaaaaaaatcctgctcttccaaagcattgaacacacctgtcttaagtgttttaaaagaggctgctaagctcatgaagacttgcagcagcagtaataaaaagcttcccagtgatgaaccaaagtcatcttgcattcttcagatcacagtggaagaatttcaccatgtgttcagaaggattgctgatttacagtcgccactttttagaggtccagatgatgacccagctgctctctttgaaatggctaagtctggccaatcaaaaaagccatcagatgagttgtcacagaaaacagtagagtgtaccacgtggcttctgtgtacttgcatggacacaggagaggctctgaagttttccctgagtgagagtggaagaagactaggactggttccatgtggggcagtaggagttcagctgtcagaaatccaggaccagaagtggacagtgaaaccacacattggagaggtgttttgctatttacctttacgaataaaaacaggcttgccagttcatatcaatgggtgctttgctgttacatcaaataggaaagaaatctggaaaacagatacaaaaggacgatggaataccacgttcatgagacatgttattgtgaaagcttacttacaggtactgagtgtcttacgggacctggccactagtggggagctaatggattatacttactatgcagtatggcccgatcctgatttagttcatgatgatttttctgtaatttgccaaggattttatgaagatatagctcatggaaaagggaaagaactgaccaaagtcttctctgatggatctacttgggtttccatgaagaacgtaagatttctagatgactctatacttaaaagaagagatgttggttcagcagccttcaagatatttttgaaatacctcaagaagactgggtccaaaaacctttgtgctgttgaacttccttcttcggtaaaattaggatttgaagaagctggctgcaaacagatactacttgaaaacacattttcagagaaacagtttttttctgaagtgttttttccaaatattcaagaaattgaagcagaacttagagatcctttaatgatctttgttctaaatgaaaaagttgatgagttctcgggagttcttcgtgttactccatgtattccttgttccttggaggggcatcctttggttttgccatcaagattgatccaccccgaaggacgagttgcaaagttatttgatattaaagatgggagattcccttatggttctactcaggattatctcaatcctattattttgattaaactagttcagttaggtatggcaaaagatgatattttatgggatgatatgctagaacgtgcagtgtcagtagctgaaattaataaaagtgatcatgttgctgcatgcctaagaagtagtatcttattgagtcttatcgatgagaaactaaaaataagggatcctagagcaaaggattttgctgcaaaatatcaaacaatccgcttccttccatttctgacaaaaccagcaggtttttctttggactggaaaggcaacagttttaagcctgaaaccatgtttgcagcaactgacctttatacagctgaacatcaagatatagtttgtcttttgcaaccaattctaaatgaaaattcccattcttttagaggttgtggttcagtgtcattggctgttaaagagtttttgggattactcaagaagccaacagttgatctggttataaaccaattgaaagaagtagcaaaatcagttgatgatggaattacactgtaccaggagaatatcaccaatgcttgctacaaataccttcatgaagccttgatgcaaaatgaaatcactaagatgtcaattattgataagttaaaaccctttagcttcattctagttgagaatgcatatgttgactcagaaaaggtttcttttcatttaaattttgaggcggcaccatacctttatcagttgcctaataagtataaaaataatttccgcgaactttttgaaaccgtgggtgtgaggcagtcatgcactgttgaagattttgctcttgttttggaatctattgatcaagaaagaggaacaaagcaaataacagaagagaattttcagctttgccgacgaataatcagtgaaggaatatggagtctcattagagaaaagaaacaagaattttgtgagaaaaattatggcaagatattattgccagatactaatcttatgcttctccctgctaaatcgttatgctacaatgattgcccttggataaaagtaaaggataccactgtaaaatattgtcatgctgacatacccagggaagtagcagtaaaactaggagcagtcccaaagcgacacaaagccttagaaagatatgcatccaatgtctgttttacaacacttggcacagaatttgggcagaaagaaaaattgaccagcagaattaagagcatccttaatgcatatccttctgaaaaggaaatgttgaaagagcttcttcaaaatgctgatgatgcaaaggcgacagaaatctgttttgtgtttgatcctagacagcatccagttgatagaatatttgatgataagtgggccccattgcaagggccagcactttgtgtgtacaacaaccagccatttacagaagatgatgttagaggaattcagaatcttggaaaaggcacgaaagagggaaatccttataaaactggacagtatggaataggattcaattctgtgtatcatatcacagactgcccatcttttatttctggcaatgacatcctgtgtatttttgatcctcatgccagatatgcaccaggggccacatccattagtcccggacgcatgtttagagatttggatgcagattttaggacacagttctcagatgttctggatctttatctgggaacccattttaaactggataattgcacaatgttcagatttcctcttcg

SEQ ID NO: 23246 - protein, 4000 aa, Homo sapiens; identical to SEQ ID NO: 23244

SEQ ID NO: 23247 - DNA, 677 bp, Homo sapiens
ggagatggaaaagagctctgatttccccttgtcagttgatgttatctataagctttggccggaggcgagcaaagtcaaggtgcactggcaaccggtgttagagcctctattcagcgagctgttgcagaatgcagtgatttattcaattagctgtgactgggtcaggttggagcaggtgtacttctcagaacttgatgaaaatttagaatacacaaaaactgtgctcaactacctccagagctcagggaagcagattgccaaggtaccagggaatgtggatgctgctgttcagctcacagctgcctctggcacaacacctgtgaggaaggtgacgcccgcgtgggtgcggcaggtgctgcggaagtgtgcacacctgggctgtgctgaagaaaagcttcaccttctagaatttgtgctttctgaccaagcctacagtgagctgcttgggctggagctgctccctttacaaaatggcaattttgtccccttctcctcatctgtatcagaccaagatgtcatttatattacctcagcagaatatccaaggtcccttttcccaagtcttgaaggaagatttattttggataacttgaaacctcaccttgtggctgctttaaaggaagctgcccaaacccgaggtattatagtttagtattcttttaaataaacttctatat

SEQ ID NO: 23248 - protein, 215 aa, Homo sapiens
MEKSSDFPLSVDVIYKLWPEASKVKVHWQPVLEPLFSELLQNAVIYSISCDWVRLEQVYFSELDENLEYTKTVLNYLQSSGKQIAKVPGNVDAAVQLTAASGTTPVRKVTPAWVRQVLRKCAHLGCAEEKLHLLEFVLSDQAYSELLGLELLPLQNGNFVPFSSSVSDQDVIYITSAEYPRSLFPSLEGRFILDNLKPHLVAALKEAAQTRGIIV

SEQ ID NO: 23249 - DNA, 289 bp, Homo sapiens
gtaaaccttcaatcaaaaggcttaaaagggggaggtcgatttggtcagacaacgccaccacttgttgattttctcaaggacattttgagaagatatccagaaggaggacagattcttaaggaattaattcagaatgcagaagatgctggggcgacagaagttaaatttttatatgatgaaactcaatacggaacagagactctttggtcaaaagatatggcgccatatcaggatgttccttgtatctttagtggtgaccaaatcgggatgctagatcctcatcaaacac

SEQ ID NO: 23250 - protein, 46 aa, Homo sapiens
MQKMLGRQKLNFYMMKLNTEQRLFGQKIWRHIRMFLVSLVVTKSGC

SEQ ID NO: 23251 - DNA, 2169 bp, Homo sapiens
cccattcttttttttttttttcagacggactctccttctattgctcaggctggagtgcagtggcgcaatctcagctcactgcaagctccttctcccaggttcacgccattcccctgcctcagcctcctgagtagctgggactacaggtgcccgccaccatacccagctaattttttgtattttttagtagagatggggttttaccgtgttagccaggatggatggtcttgatctcctgacctcgtgattcgcctgccttggcctcccaaagtgctgggattacaagtgtgggccaccacacccggcccccactcattcttataactagctccatccacgcttgtcttcctctggccctgatgtcccctcactctatcccaatgggatatgatttcatttcatttttaaaacataatctttaaaacagctttattgagtacaactcaaatacaaagcactgcagatatttattttgcaacttgatgcatttggagataagtacgtaccatgaaaccatcaaactatcattgtcagtgccataaacttatccatcatctccaaaagtttcctcccatctcttctgttgtgctttattaaacttttatggtaagagtaattaatatcagatctaccctacccacttagtaagtttttaagaatacaacacagtattgttattcatgggccctgtactgtatagaagatctccagatcttctttattcatatagcaaactttgtacctttggccaatgacaccccatttctccctgcccccaccctctggcaaccaccattctactccctgcttctttgttaaaactcaatctcggctgggagcggtggatcactatctagcagagactttagaattggttagaattagctttatcccattcatactagaaataggaaatcagtccccaatacatgaattaatttggcaactgttacatatacacaggcaggacaggaagtaggacctaaggcacccacctctccgcttcctagtttcctagatgctatgctgccttatgtctcaccaacagctgaactatatataaaagcaaactggtcatcatacttccccctctgtatgtgcttatctctgatgattacgtctttattttcttggtctgactcaaagcttgccaacgtccttggcaagaccttccaacttattctacacccatcccccacatccacatccatttggtaccaaattgtggcaattttgacttttgcaaagtctcttgtatatcctttcctttggtttcacctttacagctacagtccagaacctcattacctcataccaggacgaaagggtcctacttagacccctgtctacccacacccccaatcccaaacagtcaacacaccctgccactttcaccatcccatatccatgctttgcagggacaccctgcaaaagcacttctaaatggcagggctagccacaacggaggctttcagtgtgaccacatctaggggacaagatgatcaagtagaaccagaggaggaaccaaagaagtgggtatagacccaggagaggaaggttaagagatgtcggcaggcatagagaaaggagtaagaatgacaaactgctccttcacaagtctgcctaaagtcctcaatcagcctctccaactgccaccaagaggtccattccttccaaagaagctaaggctatgctggggtgaggccctcacttcatccagcaactagcacccggtgcagcagcacaagcccggcactcaaatgcctctgtctcagcggttgtagacttcactaggccttcattctacactacgatgaggtgtccatcatggaggttaagatcaatgccctcattaaagcagtcggggggctgagcgcagtggctcacgcctataatcccaacactttgagaggccgaggcaggcggatcatgaggtcgagagactgagaccatcctggccaacatggtgaacaccgtccccccgccccgcgccgcctcccatctctactaaaaatacaaaaattagctgggcgtggtggcacacgcctgtagtcccagctactcgggaggctgaggcaggagaatcgcttgaaccagggaagcggaggttgcagtgagccgagtgttgcaggcactccagcctggcgacagagcgagactccgtctcac

SEQ ID NO: 23252 - protein, 75 aa, Homo sapiens [sequence omitted]

SEQ ID NO: 23253 - DNA, 2157 bp, Homo sapiens
ttttttttttttttgagacggagtcttgcactgtctcctgggctggagtgcaatggagcgatctcagctcactgcaacctctgccttccaggttcaagcgattcttctgcctcagcttcccaagtggctgggagtacaggtgcgtgccactacacctggctaattttttctatttttagtagagacagggtttcactgtgttagccaggatggtcttgatctcctgacctcgtgattcgcctgccttggcctcccaaagtgctgggattacaagtgtgggccaccacacccggcccccactcattcttataactagctccatccacgcttgtcttcctctggccctgatgtcccctcactctatcccaatgggatatgatttcatttcatttttaaaacataatctttaaaacagctttattgagtacaactcaaatacaaagcactgcagatatttattttgcaacttgatgcatttggagataagtacgtaccatgaaaccatcaaactatcattgtcagtgccataaacttatccatcatctccaaaagtttcctcccatctcttctgttgtgctttattaaacttttatggtaagagtaattaatatcagatctaccctacccacttagtaagtttttaagaatacaacacagtattgttattcatgggccctgtactgtatagaagatctccagatcttctttattcatatagcaaactttgtacctttggccaatgacaccccatttctccctgcccccaccctctggcaaccaccattctactccctgcttctttgttaaaactcaatctcggctgggagcggtggatcactatctagcagagactttagaattggttagaattagctttatcccattcatactagaaataggaaatcagtccccaatacatgaattaatttggcaactgttacatatacacaggcaggacaggaagtaggacctaaggcacccacctctccgcttcctagtttcctagatgctatgctgccttatgtctcaccaacagctgaactatatataaaagcaaactggtcatcatacttccccctctgtatgtgcttatctctgatgattacgtctttattttcttggtctgactcaaagcttgccaacgtccttggcaagaccttccaacttattctacacccatcccccacatccacatccatttggtaccaaattgtggcaattttgacttttgcaaagtctcttgtatatcctttcctttggtttcacctttacagctacagtccagaacctcattacctcataccaggacgaaagggtcctacttagacccctgtctacccacacccccaatcccaaacagtcaacacaccctgccactttcaccatcccatatccatgctttgcagggacaccctgcaaaagcacttctaaatggcagggctagccacaacggaggctttcagtgtgaccacatctaggggacaagatgatcaagtagaaccagaggaggaaccaaagaagtgggtatagacccaggagaggaaggttaagagatgtcggcaggcatagagaaaggagtaagaatgacaaactgctccttcacaagtctgcctaaagtcctcaatcagcctctccaactgccaccaagaggtccattccttccaaagaagctaaggctatgctggggtgaggccctcacttcatccagcaactagcacccggtgcagcagcacaagcccggcactcaaatgcctctgtctcagcggttgtagacttcactaggccttcattctacactacgatgaggtgtccatcatggaggttaagatcaatgccctcattaaagcagtcggggggctgagcgcagtggctcacgcctataatcccaacactttgagaggccgaggcaggcggatcatgaggtcgagagactgagaccatcctggccaacatggtgaacaccgtccccccgccccgcgccgcctcccatctctactaaaaatacaaaaattagctgggcgtggtggcacacgcctgtagtcccagctactcgggaggctgaggcaggagaatcgcttgaaccagggaagcggaggttgcagtgagccgagtgttgcaggcactccagcctggcgacagagcgagactccgtctcac

SEQ ID NO: 23254 - protein, 75 aa, Homo sapiens [sequence omitted]

SEQ ID NO: 23255 - DNA, 473 bp, Homo sapiens
agccaaaaacctttagcgaatccacactgttttatcctgagaacttccatgggtcgctggatcagcaggcaaccattatcagactggagagtcatactttaaggaatacaaatgcaacacacgacaatgtttcctgacatcagatgatgaatggacactgaagggaaaaacaggctttttttccacctggcaggaagagctgaacttggagtacacatttaaaggaagcacagagggaagacttaaacagaagaaagaagcgtactttcatggttttcacaaacaaatatcccaggagaagtgatcatggagaccaaggagaacaggtgggtcccggtgaccgtgctccccggctgcgtgggctgcaggaccgtcgcggcgctggcgtcctggaccgtgcgcgatgtgaaggaacgtatcttcgcggagactggcttcccggtgtcggagcagcggctgtggcgcggcggccg

SEQ ID NO: 23256 - protein, 67 aa, Homo sapiens
MVFTNKYPRRSDHGDQGEQVGPGDRAPRLRGLQDRRGAGVLDRARCEGTYLRGDWLPGVGAAAVARR

SEQ ID NO: 23257 - DNA, 346 bp, Homo sapiens
ctgatggcactggaggaaaacaaaggccgagagaccctgatgcccacagcccccagatcacagaagtgaggccaagatgcccatgtcaccagagccagaagaaaggctcctaccaaagaatattttacatctgctgagatgagggtgagaaacaaaatccaagaatttctgcgacgttttccccaagaaccttcaaaaagaaatacagaaaattctcagatgaaaataaattgattttgctctgggggaaagccaaaaacctttagcgaatccacactgttttatcctgagaacttccatgggtcgctggatcagcaggcaaccattatcagactggagagtcata

SEQ ID NO: 23258 - protein, 31 aa, Homo sapiens
MRVRNKIQEFLRRFPQEPSKRNTENSQMKIN

SEQ ID NO: 23259 - DNA, 2228 bp, Homo sapiens
ggcccagttggtgctgagtaagatgttctcgcttctctgctcagggcatgaagatctggggcaggtgcaggacttggggccccagagagtgccacaatcgactgcccgtgggagtgggctggtgcctgggagcaagagcgcggccgtccggcgcctgtgtgagccgacagggcagctccgccagggaaccaggggcccgtccctctggggtcatgggcggacaggcacgggagctgagagaggggaccgggcctaggccacaggccctccaaggaagccacagagccagctagtggcacccagggactgcgggaagcttcggcaagaagaggaacgctgcttctaccctaccatttggggagtagcaccacctgatggaagagaacattcttcggtcttctcctcaccatggcttgagaatcgcataatctcgctgtgcccaactttcctcatccctaaacagggccagcttgccttatccatgaactgtatcaccgcaacaccaaactgagctgtgttctaacagcatttagtcaactgcagacggtttttgcaaatattagatgctactacttttgctgatctaatattttttaacacatgaagtgacatgaaatgtgttcatgatactctctgcccactgattcatgacctcctctcatgcttcaggggtcaaaacaatcagtgctgtccagcagctgttagggacaggggctcccctcctccccagcttggaacctcaagccactgcccacagctagcaagcagatgtgccacgcagtgacctcttggccttcccagcaaaaatatcctattttggcatatgggcttgacccacagtaggaaaacttggcactactgtacatatgatctcatttaaggagtaggaagataaacatgccagctgcacttactcactgatgggaaaagttctttgagttacacagtttcaaacaggaacagccaggagactggggacttaaatcataactattgtataaataatgggagctgttccctgagctaaacgccgccctttggcagaggtagagccttttggcagagggaggcaggagaagagtgtgggaagtgaagaagttcctgaggtgacaaagtgaattgcaccggagagaaggggggataaagctgcttcccagaaactaggacagcaacacctggctggtccccgaggacgaggacgggacaagaaaggcctctcctgcaggaatgaggttaaaatacaatcaggaaccacacgaatactctatctcctctgatatgctgtcttgtctgtttgtttaagagtgtctttgggactagtaaagcccctcttccctgaaggattccttcgcttttcatagttttcagtgctgccgtgttcacagacacgcctctgcagctgcacctggcagaacagcttgagtttccctagaaacgctctttgagaaaggaatagaggcagaattgcccttggtgatctcctaagaaatggggtccatgttcatctgaagatgggaatgaaaaattcatccttttggttcaaccaaattcatacatggccaaatcctctggaatatggtgaaagctgacccttgaaagccgctatcattacaaaaacaaggagccaaatgcagacagacttcaggcccacagaacgcctccatgggaattatcagcgaagtaatcatctcactctcctaacttcaggagaaaatatgagtcagcaaagactaaattggtttaaaaatagaatatttgcaaaatggaaaagtcggatgaattcacgctataaatcaatagacctttaaaggtaaggcacagcaagcattttggatgacattaatgaaagacctgtgttggcatagtgtgctgcaggaaaggtcgggggtcaccacagccagtaccagaccttaaatataatcctgaaattaaatatgtacgtaaaatagtttctagagcacaaaaggtgaaggtaaaggagagtgctactgatcttttgtgtgtgtgtaataaagatttcgatgtaaaatgtacaacagaaaaaatactgtatttcaataataagaaaaatatataaattattcccccagtgctccaaatcccttctgtgtcatacaaatctttctcatctactttgctgaaagttgctcaagaatatcttattcacctttgactctcctacttaggtttatggatacagaaagtattcaataaagagtgaataattt

SEQ ID NO: 23260 - protein, 81 aa, Homo sapiens
MKIWGRCRTWGPRECHNRLPVGVGWCLGARARPSGACVSRQGSSAREPGARPSGVMGGQARELREGTGPRPQALQGSHRAS

SEQ ID NO: 23261 - DNA, 313 bp, Homo sapiens
agtcacgctgggaactgctgatggcactggaggaaaacaaaggccgagagaccctgatgcccacagcccccagagtattctttggaagaaggaaggccgattctctttgtacaactcttcctaaatcctttaagacagcagcagtgatgatgatattgaccactcccaccatgagcctacatgaggactactaaatgtgattgatgcagaggatgccaaattggaagtcaggacaattcccattgctattctgatcttggacagcctgggtggcaatttgctctttgcaatgacaatcctgttactattttaa

SEQ ID NO: 23262 - protein, 57 aa, Homo sapiens
MALEENKGRETLMPTAPRVFFGRRKADSLCTTLPKSFKTAAVMMILTTPTMSLHEDY

SEQ ID NO: 23263 - DNA, 2086 bp, Homo sapiens
caagtaacacttgtgtaccagtttctaatcagtttctaatgtgcctggaacttgctgggctacaaagaaaaggatcaactattttttttcctgcacccaaagatattgcaatcttatcggagaagggaaactgaggcatgtgttacagttagaggactaggaagcactaatctgtgtcagactccaaagtgcaaattcaaaggaaagaccattgttggagggagtgatccggaagaattcctagcccttacctgtctcagtcatgcttcttgccaaagaaaaagagaaatctccaagtatcttaatgctttcagcgcttctccaatctgacaaatatttattcagattcgaactgactgcccaagcttcactgcagctcctcgtttcctgttagatctttttaaaaatctttgcttaaaacattgaaggctgaacgatgagcaagaaaatcttgcctgtgaataagacactgggaactgcacagaatcaacatcagctcacaagctcatcatctcacgcacggattcctgagcacattctcgcattcttgctcttaatcctcccttggcgaccttctactcagacatcatcttttatgcagagaagcaggcacgtttctcatcattaattctgttctcagccaggtgtgtagccacagagcatacagaccacaggatgattgaaagcatattgactttcctgacttcttatgaccacatttgaggaaaggagtaagcactggaatcaccaacacagcatgcttacggagggtggtcaccagcttcatcagcctcccaattccacggagccccttgaaaatccaggagcgcagactggcaacagtagagatttaataggagtttactggaggttatactccagtcaaagaagatggaaaccaagaaaggacacattttggagattagcactggctccaggaacccagtgaacagaagactcaggctgaaggcttgtgcattcagcccagagaaaatccacttaaattcagaacaattaaggactctggggaagaaggacttcacatggtagtgtgattggaaggcagataaattttaggacacaatggaagttcctaagattttttatccttttccaataggaaggataaaaaaatcatctaaaactagaggaaaaatcatctaaaacaaggtataaagaaatggctcacgtgtgacccttattttactgtgacatggagcatttgatgaaggatgtgggaagggagcctgcttaactatgaagtgagtagcatcgccccaggagcaccatgacagatgcacaggacatggagggaaggaaatggcatcctggcacagccctggctctacattgagcaatgtagacaaaatcataaaggctgctctagttttctacttttagaatcaacctacagacatgtaagacttaattgtagttgtagaataaaagataaaagattattggctttcataacaataaagtcctaacaatgattcacagttattccatgaataagggtaggggaaaagagggaggaatgtaaggcattttatatggagcaagggaggcaaaagacgttgacagaggcttatggaacaacacacacacgcacacaaatagaaggaatatattgcttaaaatgacaaaaatagccaacataggctgggtgcggtggctcatgcctgtaatcccagcactttgggaggctgaggcggacggatcacttgaagccaggagttcaagaccagcctggccaacatggtgaaaccccgtctctactaaaaatacaaaaattgactgggcgcagtggtgtgcatctgtagttccaactacttgggaggctgaggcaggagaatcacttgaatccgggaggcggaggttgcagtgagccgagatcacgccactgcatcctagcctgggtgacagagtgagaccgtctgaaaaagaaaaaagccaacataggaatttttaaaataatatataattaccaaaaattggggaaaatagagacagggaaggcagttctataagcgagataaatctttatcttttgtatcagaaagtcaataaatattgtctgaatttg

SEQ ID NO: 23264 - protein, 79 aa, Homo sapiens
MTTFEERSKHWNHQHSMLTEGGHQLHQPPNSTEPLENPGAQTGNSRDLIGVYWRLYSSQRRWKPRKDTFWRLALAPGTQ

SEQ ID NO: 23265 - DNA, 552 bp, Homo sapiens
acttgatttggagcctgcctgaaattgatttttcagaagctgaaaaagctggagtgcaatggcaccatctcagctcactgcgacctccacctcccatgttcaagtgattctcctgcctcagcctcccaagtaactgggattacaggcatgcgccaccatgccccactaattctgtatttttagtagagatggggtttctccatgttggtcaggctggtcttgaactcctgacctcaggtgatccgcccccccttgacctcccaaagtgctgggattacaggcgtgagccaccatgctgggataattttgtatttgtagtagagatggggtttcactatgttggtcaggccggtcttgaactcctgacctcaagtgatccacccacctcagcctctcaaagtgctgggattacaggcgtgagccaccacgcccagcccactttctttaactttaatagaatgaaaatacaaatcaaaccaatccaatttcttgagaataaattttgaacttgtaacaccatttcaatataaaaatgacactttgttgccttta

SEQ ID NO: 23266 - protein, 105 aa, Homo sapiens
MGFLHVGQAGLELLTSGDPPPLDLPKCWDYRREPPCWDNFVFVVEMGFHYVGQAGLELLTSSDPPTSASQSAGITGVSHHAQPTFFNFNRMKIQIKPIQFLENKF

SEQ ID NO: 23267 - DNA, 3225 bp, Homo sapiens
agcttccaacacacagtccacaacacagcttgggaaccaaaaaagctacagatccagccactcagcccaagcatgggagaactaccagcattgcctcattgcaaaaaagaggaggaaaacaacgtgatccatgtttaacaaaagagtctgtggactaggaggtgggagggtaactacctgctgaaagtgaactttctttgatatccatgcatatatataaactcagccctgcctttgatgttcagcaactgattcactgatcagattacaggcatttcatctccctgctcgtctgcctttgatctgcatggttaattttattttcctggatttgaagtttcgtctgggcttgtgctgacatacatttttgggaaggtagaagcatttggcacagaagtgctgccaggagaaactaagttgctgaacggaactctccaacaataaatacatttgataagaaagatggctttaaaagtgctactagaacaagagaaaacgtttttcactcttttagtattactaggctatttgtcatgtaaagtgacttgtgaatcaggagactgtagacagcaagaattcagggatcggtctggaaactgtgttccctgcaaccagtgtgggccaggcatggagttgtctaaggaatgtggcttcggctatggggaggatgcacagtgtgtgacgtgccggctgcacaggttcaaggaggactggggcttccagaaatgcaagccctgtctggactgcgcagtggtgaaccgctttcagaaggcaaattgttcagccaccagtgatgccatctgcggggactgcttgccaggattttataggaagacgaaacttgtcggctttcaagacatggagtgtgtgccttgtggagaccctcctcctccttacgaaccgcactgtgccagcaaggtcaacctcgtgaagatcgcgtccacggcctccagcccacgggacacggcgctggctgccgttatctgcagcgctctggccaccgtcctgctggccctgctcatcctctgtgtcatctattgtaagagacagtttatggagaagaaacccagctggtctctgcggtcacaggacattcagtacaacggctctgagctgtcgtgttttgacagacctcagctccacgaatatgcccacagagcctgctgccagtgccgccgtgactcagtgcagacctgcgggccggtgcgcttgctcccatccatgtgctgtgaggaggcctgcagccccaacccggcgactcttggttgtggggtgcattctgcagccagtcttcaggcaagaaacgcaggcccagccggggagatggtgccgactttcttcggatccctcacgcagtccatctgtggcgagttttcagatgcctggcctctgatgcagaatcccatgggtggtgacaacatctctttttgtgactcttatcctgaactcactggagaagacattcattctctcaatccagaacttgaaagctcaacgtctttggattcaaatagcagtcaagatttggttggtggggctgttccagtccagtctcattctgaaaactttacagcagctactgatttatctagatataacaacacactggtagaatcagcatcaactcaggatgcactaactatgagaagccagctagatcaggagagtggtgctgtcatccacccagccactcagacgtccctccaggaagcttaaagaacctgcttctttctgcagtagaagcgtgtgctggaacccaaagagtactcctttgttaggcttatggactgagcagtctggaccttgcatggcttctggggcaaaaataaatctgaaccaaactgacggcatttgaagcctttcagccagttgcttctgagccagaccagctgtaagctgaaacctcaatgaataacaagaaaagactccaggccgactcatgatactctgcatctttcctacatgagaagcttctctgccacaaaagtgacttcaaagacggatgggttgagctggcagcctatgagattgtggacatataacaagaaacagaaatgccctcatgcttattttcatggtgattgtggttttacaagactgaagacccagagtatactttttctttccagaaataatttcataccgcctatgaaatatcagataaattaccttagcttttatgtagaatgggttcaaaagtgagtgtttctatttgagaaggacactttttcatcatctaaactgattcgcataggtggttagaatggccctcatattgcctgcctaaatcttgggtttattagatgaagtttactgaatcagaggaatcagacagaggaggatagctctttccagaatccacacttctgacctcagcctcggtctcatgaacacccgctgatctcaggagaacacctgggctagggaatgtggtcgagaaagggcagcccattgcccagaattaacacatattgtagagacttgtatgcaaaggttggcatatttatatgaaaattagttgctatagaaacatttgttgcatctgtccctctgcctgagcttagaaggttatagaaaaagggtatttataaacataaatgaccttttacttgcattgtatcttatactaaaggctttagaaattacaacatatcaggttcccctactactgaagtagccttccgtgagaacacaccacatgttaggactagaagaaaatgcacaatttgtaggggtttggatgaagcagctgtaactgccctagtgtagtttgaccaggacattgtcgtgctccttccaattgtgtaagattagttagcacatcatctcctactttagccatccggtgttggatttaagaggacggtgcttctttctattaaagtgctccatcccctaccatctacacattagcattgtctctagagctaagacagaaattaaccccgttcagtcacaaagcagggaatggttcatttactcttaatctttatgccctggagaagacctacttgaacagggcatattttttagacttctgaacatcagtatgttcgagggtactatgatattttggtttggaattgccctgcccaagtcactgtcttttaacttttaaactgaatattaaaatgtatctgtctttcctagtatgtttttatcttctcatgtattatccatggttttctctgtttgtgacagattagtaaaatttaatgagccctc

SEQ ID NO: 23268 - protein, 417 aa, Homo sapiens; identical to SEQ ID NO: 3077

SEQ ID NO: 23269 - DNA, 4440 bp, Homo sapiens
agcttccaacacacagtccacaacacagcttgggaaccaaaaaagctacagatccagccactcagcccaagcatgggagaactaccagcattgcctcattgcaaaaaagaggaggaaaacaacgtgatccatgtttaacaaaagagtctgtggactaggaggtgggagggtaactacctgctgaaagtgaactttctttgatatccatgcatatatataaactcagccctgcctttgatgttcagcaactgattcactgatcagattacaggcatttcatctccctgctcgtctgcctttgatctgcatggttaattttattttcctggatttgaagtttcgtctgggcttgtgctgacatacatttttgggaaggtagaagcatttggcacagaagtgctgccaggagaaactaagttgctgaacggaactctccaacaataaatacatttgataagaaagatggctttaaaagtgctactagaacaagagaaaacgtttttcactcttttagtattactaggctatttgtcatgtaaagtgacttgtgaatcaggagactgtagacagcaagaattcagggatcggtctggaaactgtgttccctgcaaccagtgtgggccaggcatggagttgtctaaggaatgtggcttcggctatggggaggatgcacagtgtgtgacgtgccggctgcacaggttcaaggaggactggggcttccagaaatgcaagccctgtctggactgcgcagtggtgaaccgctttcagaaggcaaattgttcagccaccagtgatgccatctgcggggactgcttgccaggattttataggaagacgaaacttgtcggctttcaagacatggagtgtgtgccttgtggagaccctcctcctccttacgaaccgcactgtgccagcaaggtcaacctcgtgaagatcgcgtccacggcctccagcccacgggacacggcgctggctgccgttatctgcagcgctctggccaccgtcctgctggccctgctcatcctctgtgtcatctattgtaagagacagtttatggagaagaaacccagctggtctctgcggtcacaggacattcagtacaacggctctgagctgtcgtgttttgacagacctcagctccacgaatatgcccacagagcctgctgccagtgccgccgtgactcagtgcagacctgcgggccggtgcgcttgctcccatccatgtgctgtgaggaggcctgcagccccaacccggcgactcttggttgtggggtgcattctgcagccagtcttcaggcaagaaacgcaggcccagccggggagatggtgccgactttcttcggatccctcacgcagtccatctgtggcgagttttcagatgcctggcctctgatgcagaatcccatgggtggtgacaacatctctttttgtgactcttatcctgaactcactggagaagacattcattctctcaatccagaacttgaaagctcaacgtctttggattcaaatagcagtcaagatttggttggtggggctgttccagtccagtctcattctgaaaactttacagcagctactgatttatctagatataacaacacactggtagaatcagcatcaactcaggatgcactaactatgagaagccagctagatcaggagagtggtgctgtcatccacccagccactcagacgtccctccaggaagcttaaagaacctgcttctttctgcagtagaagcgtgtgctggaacccaaagagtactcctttgttaggcttatggactgagcagtctggaccttgcatggcttctggggcaaaaataaatctgaaccaaactgacggcatttgaagcctttcagccagttgcttctgagccagaccagctgtaagctgaaacctcaatgaataacaagaaaagactccaggccgactcatgatactctgcatctttcctacatgagaagcttctctgccacaaaagtgacttcaaagacggatgggttgagctggcagcctatgagattgtggacatataacaagaaacagaaatgccctcatgcttattttcatggtgattgtggttttacaagactgaagacccagagtatactttttctttccagaaataatttcataccgcctatgaaatatcagataaattaccttagcttttatgtagaatgggttcaaaagtgagtgtttctatttgagaaggacactttttcatcatctaaactgattcgcataggtggttagaatggccctcatattgcctgcctaaatcttgggtttattagatgaagtttactgaatcagaggaatcagacagaggaggatagctctttccagaatccacacttctgacctcagcctcggtctcatgaacacccgctgatctcaggagaacacctgggctagggaatgtggtcgagaaagggcagcccattgcccagaattaacacatattgtagagacttgtatgcaaaggttggcatatttatatgaaaattagttgctatagaaacatttgttgcatctgtccctctgcctgagcttagaaggttatagaaaaagggtatttataaacataaatgaccttttacttgcattgtatcttatactaaaggctttagaaattacaacatatcaggttcccctactactgaagtagccttccgtgagaacacaccacatgttaggactagaagaaaatgcacaatttgtaggggtttggatgaagcagctgtaactgccctagtgtagtttgaccaggacattgtcgtgctccttccaattgtgtaagattagttagcacatcatctcctactttagccatccggtgttggatttaagaggacggtgcttctttctattaaagtgctccatcccctaccatctacacattagcattgtctctagagctaagacagaaattaaccccgttcagtcacaaagcagggaatggttcatttactcttaatctttatgccctggagaagacctacttgaacagggcatattttttagacttctgaacatcagtatgttcgagggtactatgatattttggtttggaattgccctgcccaagtcactgtcttttaacttttaaactgaatattaaaatgtatctgtctttcctagtatgtttttatcttctcatgtattatccatggttttctctgtttgtgacagattagtaaaatttaatgagccctctttcttgtggccgtttctccatagttttaggttttgatatgtgtttactagcttgcctgtgtctggtacatctcatgacctcaattccctcacctgaaataggaaatgagaatgtttcattgtagccccaagcggtcatgtcaacctagtgcctagtcataattaattgacttttcctgtattacttctttttttaagtataaaccaatgatcctttggtagtcaagaactcttaggaacattgccttttggacatgtaaaatatttaggatttgaccacacaatggctatgaaaatgcaagtagtttcctcgcgtgacctcaccatgattcacatacgtgccactgtttgaaatctggtctgtttgcatttctgttatgacagagagatgatgtttgcatttctgttatgacagagagatgatgaaagtaggcagggctgtgttcctttgtgtagcctgtatatattttccatatgtagagccctgattaacttcaaggacaaacactggctggagaaagccagactgatgggaatgagactttggccaaaaatcccaaaacatcattttcaatcagtagagaagtgcttagggttgaaaattgatttcatttgctactgaatttggtaaatcctgggtaacttttatcaagatgaagacattttaccctacctactctagaaatatacaacaatgttatattttacactccttggaaacatttgaggaaaaaaatgcaatttgcacttcactttgttggaatatcccatagcactcaataaactcagctgctagagtgccgatgtcaggagggctgtgtcgggtaatgcgtgtggctgaatgggcataaccactgtggcttcttgtgctgcagaagctcgttgacaagactgaggaggatttcaagagcaaccaagtaaagtcatgaattttctaattttgtgtatatggaatatatttttaaatagagatttttctactttagataatgtgttaatattgctattacctaggttaagcactattgtctgtgctagtaagaaaaagaaaggaaaaccatcattgctttatagtagcttatatcaatttagatttcatcattactattttgcatactggaatttataaatgtgtaaattatcattttcttagttttgtaataccttttttatttgtgaataaaattatcacctggtattcttatttatgtgttc

SEQ ID NO: 23270 - protein, 417 aa, Homo sapiens; identical to SEQ ID NO: 3077

SEQ ID NO: 23271 - DNA, 1807 bp, Homo sapiens
cgttgccgggctacgggagagcgcggagccctgcgctgggaggtgcacggtgtgcacgctggactggacccccatgcaaccccgcgccctgcgccttaaccaggactgctccgcgcgcccctgagcctcgggctccggcccggacctgcagcctcccaggtggctgggaagtgattcttgtctgtattagagcactaccttcaagaaatggggttctgacctggatttgtgctaccacagtgacttgcatttcaacctcagaactctccaacaataaatacatttgataagaaagatggctttaaaagtgctactagaacaagagaaaacgtttttcactcttttagtattactaggctatttgtcatgtaaagtgacttgtgaatcaggagactgtagacagcaagaattcagggatcggtctggaaactgtgttccctgcaaccagtgtgggccaggcatggagttgtctaagtggcatctggaacaccagcgagacagaaccattcactcccctggaaagggggatgaagccagggagacaaatggtctagctcagcagatccaactcccatggagcccagcaagctaagatccactggcttgaaattctcactgccagcacagcagtgtgaagtccacctgggacactcaagcatggtgaggggaggggcgtctgccattactgaggattgagtaggtggttttcccctcacagtgtaaacaaagccacctggaagttcaaactgggtggatcccgccacagcttggcaaagccactgtagccagactgcctttctagattcctcctctctggggagggcatccctgaaagaaagggaaagaaaggcagcagccccagtgaggggcttatagataaactcccatctccctggaacagagcacttcagggaaggggtggctgtgggtgcagcttcagcagacttaaacgttcctgcctgccagttctgaagaaagcagcagatctcccagcaaagcactcgagctctgctaagggacagactgcctcctcaagtgggtcgctgaccccccagcctcccgattgggagacacctcccagcaggggtcgccagacacctcatacaggagagctctggctggcatctggtgggtgcccctttgggacgaagcttccagaggaaggaacaggcagcagtctttgctgttctgcagcctctgccaatgatacccaggcaaacagggtctggagtggacctccaacaaactccagcagacctgaagcaaagggcctgactgtttgtaggaaaactaacacacagaaaggaatagcatcaacaaaaagggcatctacacaaaaaccccatccaaaggtcaccagcatcaaagactaaaggtagataaatccacaaagatgaggaaaaaccagtgcaaaaaggctgaaaattccaaaaaccagaacatctcttctcctccaaaggatcacaactccttgccagcaagagaacaaaactggcagagaatgagtttgacaaattgacagaagtaggcttcagaaggtgggtaataacaaacgtcaccaagctaaaggagcatgttctaacccaatgcaaggaagctaagaatcttgaaaaaaggttagaggaattgctgactagaataaccagtttagagaagaacataaatgacctgatggagctgaaaaacacagcacaagaacttcatgaagcatacacaagtatcaatagctgaatcaatcaggcagaagaaaggatatcagagattgaaaatcaacttaatgaaataaagcgtgaagacaagattagag

SEQ ID NO: 23272 - protein, 98 aa, Homo sapiens
MALKVLLEQEKTFFTLLVLLGYLSCKVTCESGDCRQQEFRDRSGNCVPCNQCGPGMELSKWHLEHQRDRTIHSPGKGDEARETNGLAQQIQLPWSPAS

SEQ ID NO: 23273 - DNA, 2947 bp, Homo sapiens
cgcggagccctgcgctgggaggtgcacggtgtgcacgctggactggacccccatgcaaccccgcgccctgcgccttaaccaggactgctccgcgcgcccctgagcctcgggctccggcccggacctgcagcctcccaggtggctgggaagaactctccaacaataaatacatttgataagaaagatggctttaaaagtgctactagaacaagagaaaacgtttttcactcttttagtattactaggctatttgtcatgtaaagtgacttgtgaatcaggagactgtagacagcaagaattcagggatcggtctggaaactgtgttccctgcaaccagtgtgggccaggcatggagttgtctaaggaatgtggcttcggctatggggaggatgcacagtgtgtgacgtgccggctgcacaggttcaaggaggactggggcttccagaaatgcaagccctgtctggactgcgcagtggtgaaccgctttcagaaggcaaattgttcagccaccagtgatgccatctgcggggactgcttgccaggattttataggaagacgaaacttgtcggctttcaagacatggagtgtgtgccttgtggagaccctcctcctccttacgaaccgcactgtgccagcaaggtcaacctcgtgaagatcgcgtccacggcctccagcccacgggacacggcgctggctgccgttatctgcagcgctctggccaccgtcctgctggccctgctcatcctctgtgtcatctattgtaagagacagtttatggagaagaaacccagctggtctctgcggtcacaggacattcagtacaacggctctgagctgtcgtgttttgacagacctcagctccacgaatatgcccacagagcctgctgccagtgccgccgtgactcagtgcagacctgcgggccggtgcgcttgctcccatccatgtgctgtgaggaggcctgcagccccaacccggcgactcttggttgtggggtgcattctgcagccagtcttcaggcaagaaacgcaggcccagccggggagatggtgccgactttcttcggatccctcacgcagtccatctgtggcgagttttcagatgcctggcctctgatgcagaatcccatgggtggtgacaacatctctttttgtgactcttatcctgaactcactggagaagacattcattctctcaatccagaacttgaaagctcaacgtctttggattcaaatagcagtcaagatttggttggtggggctgttccagtccagtctcattctgaaaactttacagcagctactgatttatctagatataacaacacactggtagaatcagcatcaactcaggatgcactaactatgagaagccagctagatcaggagagtggtgctgtcatccacccagccactcagacgtccctccaggaagcttaaagaacctgcttctttctgcagtagaagcgtgtgctggaacccaaagagtactcctttgttaggcttatggactgagcagtctggaccttgcatggcttctggggcaaaaataaatctgaaccaaactgacggcatttgaagcctttcagccagttgcttctgagccagaccagctgtaagctgaaacctcaatgaataacaagaaaagactccaggccgactcatgatactctgcatctttcctacatgagaagcttctctgccacaaaagtgacttcaaagacggatgggttgagctggcagcctatgagattgtggacatataacaagaaacagaaatgccctcatgcttattttcatggtgattgtggttttacaagactgaagacccagagtatactttttctttccagaaataatttcataccgcctatgaaatatcagataaattaccttagcttttatgtagaatgggttcaaaagtgagtgtttctatttgagaaggacactttttcatcatctaaactgattcgcataggtggttagaatggccctcatattgcctgcctaaatcttgggtttattagatgaagtttactgaatcagaggaatcagacagaggaggatagctctttccagaatccacacttctgacctcagcctcggtctcatgaacacccgctgatctcaggagaacacctgggctagggaatgtggtcgagaaagggcagcccattgcccagaattaacacatattgtagagacttgtatgcaaaggttggcatatttatatgaaaattagttgctatagaaacatttgttgcatctgtccctctgcctgagcttagaaggttatagaaaaagggtatttataaacataaatgaccttttacttgcattgtatcttatactaaaggctttagaaattacaacatatcaggttcccctactactgaagtagccttccgtgagaacacaccacatgttaggactagaagaaaatgcacaatttgtaggggtttggatgaagcagctgtaactgccctagtgtagtttgaccaggacattgtcgtgctccttccaattgtgtaagattagttagcacatcatctcctactttagccatccggtgttggatttaagaggacggtgcttctttctattaaagtgctccatcccctaccatctacacattagcattgtctctagagctaagacagaaattaaccccgttcagtcacaaagcagggaatggttcatttactcttaatctttatgccctggagaagacctacttgaacagggcatattttttagacttctgaacatcagtatgttcgagggtactatgatattttggtttggaattgccctgcccaagtcactgtcttttaacttttaaactgaatattaaaatgtatctgtctttcctagtatgtttttatcttctcatgtattatccatggttttctctgtttgtgacagattagtaaaatttaatgagccctc

SEQ ID NO: 23274 - protein, 417 aa, Homo sapiens; identical to SEQ ID NO: 3077

SEQ ID NO: 23275 - DNA, 4162 bp, Homo sapiens
cgcggagccctgcgctgggaggtgcacggtgtgcacgctggactggacccccatgcaaccccgcgccctgcgccttaaccaggactgctccgcgcgcccctgagcctcgggctccggcccggacctgcagcctcccaggtggctgggaagaactctccaacaataaatacatttgataagaaagatggctttaaaagtgctactagaacaagagaaaacgtttttcactcttttagtattactaggctatttgtcatgtaaagtgacttgtgaatcaggagactgtagacagcaagaattcagggatcggtctggaaactgtgttccctgcaaccagtgtgggccaggcatggagttgtctaaggaatgtggcttcggctatggggaggatgcacagtgtgtgacgtgccggctgcacaggttcaaggaggactggggcttccagaaatgcaagccctgtctggactgcgcagtggtgaaccgctttcagaaggcaaattgttcagccaccagtgatgccatctgcggggactgcttgccaggattttataggaagacgaaacttgtcggctttcaagacatggagtgtgtgccttgtggagaccctcctcctccttacgaaccgcactgtgccagcaaggtcaacctcgtgaagatcgcgtccacggcctccagcccacgggacacggcgctggctgccgttatctgcagcgctctggccaccgtcctgctggccctgctcatcctctgtgtcatctattgtaagagacagtttatggagaagaaacccagctggtctctgcggtcacaggacattcagtacaacggctctgagctgtcgtgttttgacagacctcagctccacgaatatgcccacagagcctgctgccagtgccgccgtgactcagtgcagacctgcgggccggtgcgcttgctcccatccatgtgctgtgaggaggcctgcagccccaacccggcgactcttggttgtggggtgcattctgcagccagtcttcaggcaagaaacgcaggcccagccggggagatggtgccgactttcttcggatccctcacgcagtccatctgtggcgagttttcagatgcctggcctctgatgcagaatcccatgggtggtgacaacatctctttttgtgactcttatcctgaactcactggagaagacattcattctctcaatccagaacttgaaagctcaacgtctttggattcaaatagcagtcaagatttggttggtggggctgttccagtccagtctcattctgaaaactttacagcagctactgatttatctagatataacaacacactggtagaatcagcatcaactcaggatgcactaactatgagaagccagctagatcaggagagtggtgctgtcatccacccagccactcagacgtccctccaggaagcttaaagaacctgcttctttctgcagtagaagcgtgtgctggaacccaaagagtactcctttgttaggcttatggactgagcagtctggaccttgcatggcttctggggcaaaaataaatctgaaccaaactgacggcatttgaagcctttcagccagttgcttctgagccagaccagctgtaagctgaaacctcaatgaataacaagaaaagactccaggccgactcatgatactctgcatctttcctacatgagaagcttctctgccacaaaagtgacttcaaagacggatgggttgagctggcagcctatgagattgtggacatataacaagaaacagaaatgccctcatgcttattttcatggtgattgtggttttacaagactgaagacccagagtatactttttctttccagaaataatttcataccgcctatgaaatatcagataaattaccttagcttttatgtagaatgggttcaaaagtgagtgtttctatttgagaaggacactttttcatcatctaaactgattcgcataggtggttagaatggccctcatattgcctgcctaaatcttgggtttattagatgaagtttactgaatcagaggaatcagacagaggaggatagctctttccagaatccacacttctgacctcagcctcggtctcatgaacacccgctgatctcaggagaacacctgggctagggaatgtggtcgagaaagggcagcccattgcccagaattaacacatattgtagagacttgtatgcaaaggttggcatatttatatgaaaattagttgctatagaaacatttgttgcatctgtccctctgcctgagcttagaaggttatagaaaaagggtatttataaacataaatgaccttttacttgcattgtatcttatactaaaggctttagaaattacaacatatcaggttcccctactactgaagtagccttccgtgagaacacaccacatgttaggactagaagaaaatgcacaatttgtaggggtttggatgaagcagctgtaactgccctagtgtagtttgaccaggacattgtcgtgctccttccaattgtgtaagattagttagcacatcatctcctactttagccatccggtgttggatttaagaggacggtgcttctttctattaaagtgctccatcccctaccatctacacattagcattgtctctagagctaagacagaaattaaccccgttcagtcacaaagcagggaatggttcatttactcttaatctttatgccctggagaagacctacttgaacagggcatattttttagacttctgaacatcagtatgttcgagggtactatgatattttggtttggaattgccctgcccaagtcactgtcttttaacttttaaactgaatattaaaatgtatctgtctttcctagtatgtttttatcttctcatgtattatccatggttttctctgtttgtgacagattagtaaaatttaatgagccctctttcttgtggccgtttctccatagttttaggttttgatatgtgtttactagcttgcctgtgtctggtacatctcatgacctcaattccctcacctgaaataggaaatgagaatgtttcattgtagccccaagcggtcatgtcaacctagtgcctagtcataattaattgacttttcctgtattacttctttttttaagtataaaccaatgatcctttggtagtcaagaactcttaggaacattgccttttggacatgtaaaatatttaggatttgaccacacaatggctatgaaaatgcaagtagtttcctcgcgtgacctcaccatgattcacatacgtgccactgtttgaaatctggtctgtttgcatttctgttatgacagagagatgatgtttgcatttctgttatgacagagagatgatgaaagtaggcagggctgtgttcctttgtgtagcctgtatatattttccatatgtagagccctgattaacttcaaggacaaacactggctggagaaagccagactgatgggaatgagactttggccaaaaatcccaaaacatcattttcaatcagtagagaagtgcttagggttgaaaattgatttcatttgctactgaatttggtaaatcctgggtaacttttatcaagatgaagacattttaccctacctactctagaaatatacaacaatgttatattttacactccttggaaacatttgaggaaaaaaatgcaatttgcacttcactttgttggaatatcccatagcactcaataaactcagctgctagagtgccgatgtcaggagggctgtgtcgggtaatgcgtgtggctgaatgggcataaccactgtggcttcttgtgctgcagaagctcgttgacaagactgaggaggatttcaagagcaaccaagtaaagtcatgaattttctaattttgtgtatatggaatatatttttaaatagagatttttctactttagataatgtgttaatattgctattacctaggttaagcactattgtctgtgctagtaagaaaaagaaaggaaaaccatcattgctttatagtagcttatatcaatttagatttcatcattactattttgcatactggaatttataaatgtgtaaattatcattttcttagttttgtaataccttttttatttgtgaataaaattatcacctggtattcttatttatgtgttc

SEQ ID NO: 23276 - protein, 417 aa, Homo sapiens; identical to SEQ ID NO: 3077

SEQ ID NO: 23277 - DNA, 1794 bp, Homo sapiens
gaggtgcacggtgtgcacgctggactggacccccatgcaaccccgcgccctgcgccttaaccaggactgctccgcgcgcccctgagcctcgggctccggcccggacctgcagcctcccaggtggctgggaagaactctccaacaataaatacatttgataagaaagatggctttaaaagtgctactagaacaagagaaaacgtttttcactcttttagtattactaggctatttgtcatgtaaagtgacttgtgaatcaggagactgtagacagcaagaattcagggatcggtctggaaactgtgttccctgcaaccagtgtgggccaggcatggagttgtctaaggaatgtggcttcggctatggggaggatgcacagtgtgtgacgtgccggctgcacaggttcaaggaggactggggcttccagaaatgcaagccctgtctggactgcgcagtggtgaaccgctttcagaaggcaaattgttcagccaccagtgatgccatctgcggggactgcttgccaggattttataggaagacgaaacttgtcggctttcaagacatggagtgtgtgccttgtggagaccctcctcctccttacgaaccgcactgtgccagcaaggtcaacctcgtgaagatcgcgtccacggcctccagcccacgggacacggcgctggctgccgttatctgcagcgctctggccaccgtcctgctggccctgctcatcctctgtgtcatctattgtaagagacagtttatggagaagaaacccagctggtctctgcggtcacaggacattcagtacaacggctctgagctgtcgtgttttgacagacctcagctccacgaatatgcccacagagcctgctgccagtgccgccgtgactcagtgcagacctgcgggccggtgcgcttgctcccatccatgtgctgtgaggaggcctgcagccccaacccggcgactcttggttgtggggtgcattctgcagccagtcttcaggcaagaaacgcaggcccagccggggagatggtgccgactttcttcggatccctcacgcagtccatctgtggcgagttttcagatgcctggcctctgatgcagaatcccatgggtggtgacaacatctctttttgtgactcttatcctgaactcactggagaagacattcattctctcaatccagaacttgaaagctcaacgtctttggattcaaatagcagtcaagatttggttggtggggctgttccagtccagtctcattctgaaaactttacagcagctactgatttatctagatataacaacacactggtagaatcagcatcaactcaggatgcactaactatgagaagccagctagatcaggagagtggtgctgtcatccacccagccactcagacgtccctccaggtaaggcagcgactgggttccctgtgaacacagcactgacttacagtagatcagaactctgttcccagcataagatttgggggaacctgatgagttttttttttgcatctttaataatttcttgtatgttgtagagtatgttttaaaataaatttcaagtatttttttaaaaaactaacacagctaatatataagagcaaagtggacagctgcattcttttattcctctttgtaagtacaaccacttagcacagcacctgctgcctccttccctggttgagagaggtgagtcgggtatgggagcatcttgcagacaattcctgaccttcatttcttcctgttatatatacttattattatatatatattacttatgcccaata

SEQ ID NO: 23278 - protein, 423 aa, Homo sapiens; identical to SEQ ID NO: 3075

SEQ ID NO: 23279 - DNA, 1824 bp, Homo sapiens
atggaagggcatagggacaaaaacacacaaacaaaaactttcaccgatatcattggaaccacagcaaaaacaaatacaaagcacctaccgtatgcaggaaacctgctgggccctgggaagcagcctctccccagccgcagcaaggccagcagggccagcacggggccatctgagtcctcaggagagggctaccagcagggacttgtgggcctcatccaggtggccaccagggtgttggccaccagaaggtgcgatacgtcctccacatccaactcattggcagtgtggccagctggtgcacgccgtggggcttccctgtggggagagtgcctcaggatgggctggccccttccccacaccgcctcacctacccagctgattgggccacagcctccatgcagtgacacagtccagtgtgcccagaacacagtccggccagcacctgcagcagcccgaagctgcacagttacacacagctgtctgggtgtggcgccccctgttccaccacctcttggaagtcttcctggatgcaccaggaatttcctgctggccagcaacgtcctcggcctttgggtgcacctagatgaagtcctggagggtgctggccacatcaggagacaggcgctctcgcctgtggctctgaggctgagccggctttgccttggtgaaggacaaggccctggcgacccagattctctcgtgggtggctggggacagaagggcggtggcgcgctgggctggctggagggctcaggctccggcgcgagtcctgcaaggatgctgcctccaagtgtgcttggttccggaggcggcgaaaagtccagcgggtctccgaagccggtagacggagccatgaagaagacgtcgggcttcaggagggggaagggcgggctgccctggggctcggtcagcagccccgggaaggtgggcgcgggcgccgggagtgagagtgcggaccacgcctcctcccagcccaggcgccacgacccggacaaggggttcgacaggctccgcagagctgccggccgacaccggacagagacgatgcggcggatcctttctctgccgaagagtggcgtggatgacagagacgagaagaacaggctgtccaacgaacagagttctggtgactcatggctttcaatagatgatgaactctttgattctggtaccaagactacctttgagaatgttccacagaaatatgatagtcacttaactggagctgatgatggtcaaagaggaaaaattacaataaaggaacaagaagatgtgtttaacacagcccctgctggtaaccaaggtcctcctccaatgacgggtatgaatatgaacaacagagcaactatacctggcccaccagtgggtcctggtcctgccatgggaccagaaggagccgcaaatatgggaactccaatgatgccagataatggagcagtggaagacactttagatggtgccagagttgaggatttggcctgcgacttattgcagttgccgcactgcagtttccacactgtggccttagaagagtcttatccagacctgaaatcccagtgccttggaaacatcaggactggtcagaaggacagaagaaccggaactatgatttgtgccttccttattgcctccgaaatatttttaactgcagaggaaagcctgtattattttggagaaaggcgaacagataaaacgcacagcagtaaatttcagggactagaaactccttctcaggagaaggaagcgtgggagcacaagcagcttgagggccctggtgttttacagcccttagggaaaggtggagaatctagtggcagaagctaa

SEQ ID NO: 23280 - protein, 607 aa, Homo sapiens [sequence omitted]

SEQ ID NO: 23281 - DNA, 1706 bp, Homo sapiens
ggtccccatgaagcaataaacataggaggacctcactctgttgtgcatgctggagtacagtggcgcagtctctgctccctgaaacctcgacttccagggctcaagagatccttccatcttaccaagtagctgggactacagatgtatagttattttccaaacccaccattgtaaaattacattctattaaagagaaaaagaagaaaaagaaacttaatttgttttttgggggatagttgagatgtgtttaacacagcccctgctggtaaccaaggtcctcctccaatgacgggtatgaatatgaacaacagagcaactatacctggcccaccagtgggtcctggtcctgccatgggaccagaaggagccgcaaatatgggaactccaatgatgccagataatggagcagtggaagaaccggaactatgatttgtgccttccttattgcctccgaaatatttttaactgcagaggaaagcctgtattattttggagaaaggcgaacagataaaacgcacagcagtaaatttcagggactagaaactccttctcagtagagacaaggtttcaccctgttggcgaggctggtctcaaactcctgacgcccagtgatctgcccacctcggcctcccaaagtgctgggattacaggcgggagccaccatgatggccaacttttgaattctgaaccagttgattgagtaccagagctcttcaataccttgaagaaagattcaggggagagccgttgtgaacagcttgccccagggaaaggacaaggctgagagaattccagggcttccttgagaaaacagaattgaggaaatgcaaagtgaagaattctagcatcaggaacaagagaagaatgatggaaaacctgctactgagatatgttggatattttgcacaagtgaaacatctctacaactggaatctccctccaagacggatactctttataataagattcattatttattcgattcgtggtgttggaacaggcgatgtatgtgatctaaaattccaaatagtaatggagaaaaaggttgtcttttccagtacttcattaggaaattgttcaatactgcatgacattgaaacagctggtgtattaactaatgtatatgacagtccatctctgtacgatgatgtgaaagtgcagtttttctcttcgaatcttcctaaatactatgacaattgttcatttttcttctggttcaacacatcttttattcaaaataacagagagaaatttagatattttattaaacttggaagtcattaatgccatataaagcaatgctaagagagtcagcatgtgttactgatgtgttgctgaagattaaagtatttttaagtctcaccaaaaaggtggaaggagccaactgagacacaaaaaaggggctgaggttctattcacggctttatctaccaagaaatgaattggataatccacatcaacaaaaagcatggaaaatttatccaccagaatttgccgtggagatactttttggcgagaaatgacttccaatgacgtagctggatccgattaagtatagtttccccttccccttctgggaaagaattaatgttctttccaacccctgccatgtgcatgttcatatgtcctaagtcttccttgatgatgtatctatatttatatatgtttatatatgttcttcataaatctattaaatatatatagat

SEQ ID NO: 23282 - protein, 139 aa, Homo sapiens [sequence omitted]

SEQ ID NO: 23283 - DNA, 2748 bp, Homo sapiens
cattgccagagagctagtgtgatcctttggtagtgtcactacattcagatttctcatggtgctagaattcttgtgtgggtccttctcatctggagatgctagcacttctaatttgtgtaattatttttgtttgggtaggattttttctttttctttccttttctataatattattgttatttttttcttctttccctttccctcctccctaggggtgtggctgtagagcatgctgggtagggtcttttggctttgcttctgtagccctaatgcacttctgccagcaggttttatattgggtgtgtggtttgacctacaagccagtagatggcgccatgggtaagagctggctgttgccagtgctgctggctgtgtacttgatccttgtttattgggaggagctctctcctgccccaggcaaagggctgatttcctgagtacacattaatctgagctccctcagccctaggggtagggggattgggggcacaagatgggtggagccagatagggaagattcccccagtgttgtcctgctcccagtccaggtttgggacaatgccggcagcgtttccctgtgtctttcccccacaaagtctccaagtctctcctcaaatgagctccaaggcttgggagaaacaatctcttcctctgcccgggttgcgtggatctccagtggaaaggtgagacagagggatgctgtctgcctctctcacttactgaggcttcactcacttctatcagtcgaatgctgtcctgagggctgcttgcctgcaatgtcctccgcaagatctgggatgtccttcataattccggggaattgccatttcctttcttgaattaaagctcacagagttggtctttatgtacttgcttgctatttccaaatgactgaggcatgctaaaagcctgtaatctgccatcttggaaaaaacatccttgcatccttaagagaaatggcacttggtgttgatacatggtgtttctacattgctgaattcactttgaaaatatatgtatattttaaaatctacatttatatgtgagactggtgtaaaaatatcttttattctactgtatttgtgcaattttggaatcagttatattaatatactaaatgagttggcaatttttcttttttactattatccaaaaaaattataaaagacataattgttgctttcttatagatttagtaaaaacctcatcgtgtccttttgtggagcgatggtgagagatatttttactgtaaatgtaacttgcgtatttttcacctgtgaggcagaggttgcaatgagccaagattgtgccactgcactccagcctgcgtgacacagcaagaccctgtctcaaaaaaaagaaagaaaatcaacttaaaatgcactccttgaatatttctgagtgtatttttataccacgtatgttccttgaactaacttcttttcttttctaggaagaaccggaactatgatttgtgccttccttattgcctccgaaatatttttaactgcagaggaaagcctgtattattttggagaaaggcgaacagataaaacgcacagcagtaaatttcagggactagaaactccttctcagtagagacaaggtttcaccctgttggcgaggctggtctcaaactcctgacgcccagtgatctgcccacctcggcctcccaaagtgctgggattacaggcgggagccaccatgatggccaacttttgaattctgaaccagttgattgagtaccagagctcttcaataccttgaagaaagattcaggggagagccgttgtgaacagcttgccccagggaaaggacaaggctgagagaattccagggcttccttgagaaaacagaattgaggaaatgcaaagtgaagaattctagcatcaggaacaagagaagaatgatggaaaacctgctactgagatatgttggatattttgcacaagtgaaacatctctacaactggaatctccctccaagacggatactctttataataagattcattatttattcgattcgtggtgttggaacaggcgatgtatgtgatctaaaattccaaatagtaatggagaaaaaggttgtcttttccagtacttcattaggaaattgttcaatactgcatgacattgaaacagctggtgtattaactaatgtatatgacagtccatctctgtacgatgatgtgaaagtgcagtttttctcttcgaatcttcctaaatactatgacaattgttcatttttcttctggttcaacacatcttttattcaaaataacagagagaaatttagatattttattaaacttggaagtcattaatgccatataaagcaatgctaagagagtcagcatgtgttactgatgtgttgctgaagattaaagtatttttaagtctcaccaaaaaggtggaaggagccaactgagacacaaaaaaggggctgaggttctattcacggctttatctaccaagaaatgaattggataatccacatcaacaaaaagcatggaaaatttatccaccagaatttgccgtggagatactttttggcgagaaatgacttccaatgacgtagctggatccgattaagtatagtttccccttccccttctgggaaagaattaatgttctttccaacccctgccatgtgcatgttcatatgtcctaagtcttccttgatgatgtatctatatttatatatgtttatatatgttcttcataaatctattaaatatatatagat

SEQ ID NO: 23284 - protein, 139 aa, Homo sapiens [sequence omitted]

SEQ ID NO: 23285 - DNA, 2712 bp, Homo sapiens
cattgccagagagctagtgtgatcctttggtagtgtcactacattcagatttctcatggtgctagaattcttgtgtgggtccttctcatctggagatgctagcacttctaatttgtgtaattatttttgtttgggtaggattttttctttttctttccttttctataatattattgttatttttttcttctttccctttccctcctccctaggggtgtggctgtagagcatgctgggtagggtcttttggctttgcttctgtagccctaatgcacttctgccagcaggttttatattgggtgtgtggtttgacctacaagccagtagatggcgccatgggtaagagctggctgttgccagtgctgctggctgtgtacttgatccttgtttattgggaggagctctctcctgccccaggcaaagggctgatttcctgagtacacattaatctgagctccctcagccctaggggtagggggattgggggcacaagatgggtggagccagatagggaagattcccccagtgttgtcctgctcccagtccaggtttgggacaatgccggcagcgtttccctgtgtctttcccccacaaagtctccaagtctctcctcaaatgagctccaaggcttgggagaaacaatctcttcctctgcccgggttgcgtggatctccagtggaaaggtgagacagagggatgctgtctgcctctctcacttactgaggcttcactcacttctatcagtcgaatgctgtcctgagggctgcttgcctgcaatgtcctccgcaagatctgggatgtccttcataattccggggaattgccatttcctttcttgaattaaagctcacagagttggtctttatgtacttgcttgctatttccaaatgactgaggcatgctaaaagcctgtaatctgccatcttggaaaaaacatccttgcatccttaagagaaatggcacttggtgttgatacatggtgtttctacattgctgaattcactttgaaaatatatgtatattttaaaatctacatttatatgtgagactggtgtaaaaatatcttttattctactgtatttgtgcaattttggaatcagttatattaatatactaaatgagttggcaatttttcttttttactattatccaaaaaaattataaaagacataattgttgctttcttatagatttagtaaaaacctcatcgtgtccttttgtggagcgatggtgagagatatttttactgtaaatgtaacttgcgtatttttcacctgtgaggcagaggttgcaatgagccaagattgtgccactgcactccagcctgcgtgacacagcaagaccctgtctcaaaaaaaagaaagaaaatcaacttaaaatgcactccttgaatatttctgagtgtatttttataccacgtatgttccttgaactaacttcttttcttttctaggaagaaccggaactatgatttgtgccttccttattgcctccgaaatatttttaactgcagaggaaagcctgtattattttggagaaaggcgaacagataaaacgcacagcagtaaatttcagggactagaaactccttctcagtagagacaaggtttcaccctgttggcgaggctggtctcaaactcctgacgcccagtgatctgcccacctcggcctcccaaagtgctgggattacaggcgggagccaccatgatggccaacttttgaattctgaaccagttgattgagtaccagagctcttcaataccttgaagaaagattcaggggagagccgttgtgaacagcttgccccagggaaaggacaaggctgagagaattccagggcttccttgagaaaacagaattgaggaaatgcaaagtgaagaattctagcatcaggaacaagagaagaatgatggaaaacctgctactgagatatgttggatattttgcacaagtgaaacatctctacaactggaatctccctccaagacggatactctttataataagattcattatttattcgattcgtggtgttggaacaggcgatgtatgtgatctaaaattccaaatagtaatggagaaaaagatactgcatgacattgaaacagctggtgtattaactaatgtatatgacagtccatctctgtacgatgatgtgaaagtgcagtttttctcttcgaatcttcctaaatactatgacaattgttcatttttcttctggttcaacacatcttttattcaaaataacagagagaaatttagatattttattaaacttggaagtcattaatgccatataaagcaatgctaagagagtcagcatgtgttactgatgtgttgctgaagattaaagtatttttaagtctcaccaaaaaggtggaaggagccaactgagacacaaaaaaggggctgaggttctattcacggctttatctaccaagaaatgaattggataatccacatcaacaaaaagcatggaaaatttatccaccagaatttgccgtggagatactttttggcgagaaatgacttccaatgacgtagctggatccgattaagtatagtttccccttccccttctgggaaagaattaatgttctttccaacccctgccatgtgcatgttcatatgtcctaagtcttccttgatgatgtatctatatttatatatgtttatatatgttcttcataaatctattaaatatatatagat

SEQ ID NO: 23286 - protein, 127 aa, Homo sapiens
MMENLLLRYVGYFAQVKHLYNWNLPPRRILFIIRFIIYSIRGVGTGDVCDLKFQIVMEKKILHDIETAGVLTNVYDSPSLYDDVKVQFFSSNLPKYYDNCSFFFWFNTSFIQNNREKFRYFIKLGSH

SEQ ID NO: 23287 - DNA, 1271 bp, Homo sapiens
agcaacaaagggattcagctgcacgtttgagagctgttggcaagacctcaggacagagtgccctctgtgtctggtggtgattctcagacaccatcacattctgatcctgcattgttagccattctactgactacatctactcctaagttaaggactttcttgagcctatctcatgactggccctttctgaagggaagtatggcagctagttactttaatgagcatttcccaatgggtaaggaacagtctgtgaacctatgagttttgttttgttttgttttgtttttaatttttgagacagagtctcgctctgtcgcccagactagagtgcagtggtgcaatctcagctcactgcaacctcgacgtcttgggttcaagcgattctcctgcctcagcctcccaagtggctgggattataggtgcccatcaccacgcatggcctatttttgtatttttagtagagacaaggtttcaccctgttggcgaggctggtctcaaactcctgacgcccagtgatctgcccacctcggcctcccaaagtgctgggattacaggcgggagccaccatgatggccaacttttgaattctgaaccagttgattgagtaccagagctcttcaataccttgaagaaagattcaggggagagccgttgtgaacagcttgccccagggaaaggacaaggctgagagaattccagggcttccttgagaaaacagaattgaggaaatgcaaagtgaagaattctagcatcaggaacaagagaagaatgatggaaaacctgctactgagatatgttggatattttgcacaagtgaaacatctctacaactggaatctccctccaagacggatactctttataataagattcattatttattcgattcgtgatactgcatgacattgaaacagctggtgtattaactaatgtatatgacagtccatctctgtacgatgatgtgaaagtgcagtttttctcttcggctttatctaccaagaaatgaattggataatccacatcaacaaaaagcatggaaaatttatccaccagaatttgccgtggagatactttttggcgagaaatgacttccaatgacgtagctggatccgattaagtatagtttccccttccccttctgggaaagaattaatgttctttccaacccctgccatgtgcatgttcatatgtcctaagtcttccttgatgatgtatctatatttatatatgtttatatatgttcttcataaatctattaaatatatatagat

SEQ ID NO: 23288 - protein, 44 aa, Homo sapiens
MMENLLLRYVGYFAQVKHLYNWNLPPRRILFIIRFIIYSIRDTA

SEQ ID NO: 23289 - DNA, 767 bp, Homo sapiens
aggatattcagcaattctttactggatgtgatcagcaaagacaagacatctgcagctgatgggatcacctagatttggaggttggggaacagggaagatctaaacacccttgttttcttggcctctttggtctcagccacatggaatcagattatttgactaggactattaatgcataagaagggagaaacacaaaaaggtgatttcttgaggtttcagcttaccttgtcaatgattctgcaactgtgtgccatgaattcttagtcctgcaacatggtcataaagacagaaacattccacaaagttgtatatgatggtcttctcctcctacttggagagttccctgctattgttagcccttctagggccccctactctccctcaaaagagcattttctcaaacagaagtgcccactctagaagaccactttgtttttgatttggaaaatcaagcttggctttgcctgaaggttctttcatagatggcctgctttgggaactcggtggagacccagtattacacacacgccaggaagcccgggaggaccttcatctcacccttgccacgtgcccctcaggcaggaggtcaggtggagccacgtcggggccttggagactcggctgagaggtgtgatggaagatggggcgtgatggaagatgggacatgaaagtgctgcggctgcactgacattcttatggccctcactccaagcacttctcaccactcaaaccagcggccccaagtaaagcttttgggggcactgaga

SEQ ID NO: 23290 - protein, 61 aa, Homo sapiens
MACFGNSVETQYYTHARKPGRTFISPLPRAPQAGGQVEPRRGLGDSAERCDGRWGVMEDGT

SEQ ID NO: 23291 - DNA, 3568 bp, Homo sapiens
ccggtgcagcggctggcgatcggccgcggaggtgcgtgcagggcccgcgccgccgccggtatctccaccgccaacacctcagccactgccactgccacagccacacgaggccccccaccgtgcgctccgccgctgcggtcccggatccgcgctccacgcccgcagcccgcggcgccaccagcccagcatgcaccagaaaaccccagaaatttactccgtggagctcagcggaactaaggacatcgtgaaaacagacaagggggatggcaaggagaagtataggggtctgaagaacaactgcctggaactcaaaaagaaaaatcacaaagaggagtttcagaaagaactccatctggatgaccacaaactcagcaatagggaattggaagagaaatatggcacagacatcattatgggtctctccagcaccagagctgccgagctcctggcccgggatgggcccaactccctcacccctcccaagcagacgcctgagatcgtcaagttcctcaagcagatggtgggggggttctctatcctcctgtgggtgggcgcctttctctgttggattgcatatgggattcagtactccagcgacaagtctgcatccctgaacaacgtgtacttgggctgtgtgcttggtctggtggtcattttaacggggatctttgcttattaccaagaggcaaaaagcaccaacatcatgtccagcttcaataagatgatccctcagcaagctctcgtcatccgagattccgagaagaagaccatcccttcagagcagctggtggtgggggacattgtggaggtcaaaggaggagaccagatccctgcagacatcagggtgctgtcttctcaggggtgtcgggtggataactcatctctcacgggggagtctgagccccagccccgctcctctgagtttacccatgaaaaccccctggaaacaaagaacatctgcttctattccacaacgtgtctggaaggcactgtcaccggcatggttatcaacacgggtgaccgcaccatcattggccatattgcctcattggcctcaggagttggaaatgagaagacgcccattgccattgagatcgagcactttgttcacattgtggcaggagtggctgtctccatcggcatccttttcttcatcatcgctgtgtccctgaagtatcaagtcctggactccatcatcttcctcattggcatcattgtggccaatgtgcccgagggcctcctggccactgtcactgtgaccctgtcgctgacagcaaaacggatggccaagaagaactgcctggtgaagaacctggaggctgtggagaccctcggctccacctccatcatctgctcggacaagactgggacactgacccagaacaggatgacagtggcccatctgtggttcgacaatcagatctttgtggctgacaccagtgaggaccattcaaaccaagtctttgaccaaagctctaggacttgggcctccttatccaagataataacattgtgtaaccgagcagagttcaagccaggacaggaaaatgtccccatcatgaagaaagctgtgattggagatgcctcagaaactgctcttttaaaattctcagaggtcattttgggtgatgtgatggaaattagaaaaagaaaccgcaaagtagctgaaatcccttttaactctactaataaatttcagctctccatccacgagatggatgacccccacggcaagcgcttcctcatggtgatgaagggggcccctgagcgcatcctagagaaatgcagcaccatcatgatcaacggcgaggagcacccactggacaagagcactgccaagaccttccacacagcctacatggagctgggcgggttgggcgagcgtgtgctgggtttctgtcatctctacctgccagcagacgagtttccagaaacctactcatttgacatagacgctatgaactttccgacctccaacctctgttttgtgggactcttgtcaatgatcgatccccctcggtccaccgtgccagatgcagtcaccaaatgccggagtgcagggatcaaggttattatggttactggtgatcatcccatcacagccaaagctattgccaagagtgtggggatcatttcagccaacagtgaaacagtggaagacattgcacatcgcctcaacattgctgtggagcaagttaacaaacgggatgccaaggccgctgtggtgactggcatggagctgaaggacatgagctcagaacagctggatgagatcttagccaactaccaggagattgtctttgcccggacatccccccagcagaagctgatcattgtggagggctgtcagaggcaggatgctgttgttgctgtgaccggggatggagttaatgactctccggctctaaagaaggcagacattgggattgccatggggatagcaggttctgatgcagccaaaaatgcagccgacatggtcttgctggacgacaacttcgcatccatcgtcacaggggtggaggaaggtcgcctgatctttgacaacctcaagaagactattgcttattccctgaccaagaacattgccgagctgtgcccctttctgatctacatcattgtcgggctccccctgcccattggcaccatcaccattctgttcattgacttggggacagacattatcccctccattgccttggcgtacgagaaagctgaaagtgacatcatgaacaggaagcctcgccacaagaataaggacaggctggtgaaccagccgctcgctgtgtactcatacctgcacattggcctcatgcaagccctgggagctttccttgtgtatttcaccgtctatgcacaagagggctttctgccccgcactctcattaacctgcgggtagaatgggagaaggactacgtgaatgacttgaaagacagctatgggcaggaatggacaaggtaccagagggaatacctagaatggacgggctacacggctttctttgttggcatcctagtccagcaaatagcagatctgatcatcaggaaaacccggaggaattccatcttccagcagggtctcttcagaaataaagtcatctgggtggggatcacctcacagatcatcattggtctgatcctctcctatggcctcggaagtgtcacagccttgagtttcaccatgcttagggctcagtactggtttgtggctgtgccgcacgccatcctgatctgggtgtatgatgaggtgcggaagctcttcatcaggctctaccctggaagctggtgggataagaacatgtattattaagaccacctcccttcctatgtctctcagcagcacgttggggcacacttgttcatcttctgaccgtttgctgggctattcccctgcagtgcagacatcgtcaaaattcagacaagaggaaattttcatgcagaaagctgtatgcaggatgctcactgatgttttgcactttaaaactgaaattcaactctttatataggattttcttttctatctccatctcctcattaaaaaatacgtacatttcgaggtaatggtataggg

SEQ ID NO: 23292 - protein, 1039 aa, Homo sapiens; identical to SEQ ID NO: 3080

SEQ ID NO: 23293 - DNA, 1528 bp, Homo sapiens
ggactcgcactcggcggttgttccagaagaaagagacagcgatggcggcagaggcttcgaagactgggccttctaggtcttcctaccagcgaatggggaggaagagtcagccctggggtgccgctgaaatccagtgcaccaggtgtggaaggagggtatccagatcatccggtcaccattgtgaacttcaatgtggacatgctttttgtgaactatgcttgttaatgactgaagaatgcaccacaattatatgccctgattgtgaggttgctacagctgtaaatactagacaacgctactacccaatggctggatatattaaggaagactccataatggaaaaactgcagcctaagacgataaagaattgttctcaggactttaagaagactgctgatcagctaactactggtttagaacgttcagcctccacagacaagactcttttgaactcatcagctgtaatgttggacactaatactgcagaagaaattgatgaagcattgaatacagcacaccatagtttcgaacagttaagcattgctggaaaagcacttgaacacatgcagaagcaaacgatagaggaaagagaaagagttatagaagttgtggagaaacagtttgaccaacttttggctttttttgattccaggaaaaagaacctgtgtgaagaatttgcaagaactactgatgattatctatcaaatttaataaaggctaaaagctacattgaagagaaaaaaaataatttgaatgcagctatgaacatagcaagagcattacaattatcgccttctctaagaacatactgtgacctgaatcagattatccggactttgcagttaacttcagatagtgaattagcacaagttagttctccacaactaaggaaccctcccaggttgagtgtgaattgcagtgagatcatctgtatgttcaacaatatgggaaagattgaatttagggactcaacaaaatgttatccccaagaaaatgaaattagacagaatgttcaaaagaaatataataacaaaaaggaactttcttgttacgatacatacccaccgctagaaaagaaaaaggttgacatgtctgtcctaaccagtgaagcaccaccacctcctttgcaacctgagacaaatgatgtacatttagaagcaaaaaacttccagccacagaaagacgttgcaacagcatcccctaaaaccattgctgtgttacctcagatgggatctagccctgatgtgataattgaagaaattattgaagacaacgtggaaacatgcggcacagatgatcttggggagacacctagatatccaaaaaagcctcttcagaaaaactcatctgttccttttggatcaaaagcagatactgtaacaactgtctgagcttgatgtagtggagtttactgtatgtgtagttctgcagagctagtttttgtaagccatgtaatagatccttgccatttctacattcggaagtattcacaaataaaagacgccaaagtactggagaagaaggtgaa

SEQ ID NO: 23294 - protein, 449 aa, Homo sapiens
MAAEASKTGPSRSSYQRMGRKSQPWGAAEIQCTRCGRRVSRSSGHHCELQCGHAFCELCLLMTEECTTIICPDCEVATAVNTRQRYYPMAGYIKEDSIMEKLQPKTIKNCSQDFKKTADQLTTGLERSASTDKTLLNSSAVMLDTNTAEEIDEALNTAHHSFEQLSIAGKALEHMQKQTIEERERVIEVVEKQFDQLLAFFDSRKKNLCEEFARTTDDYLSNLIKAKSYIEEKKNNLNAAMNIARALQLSPSLRTYCDLNQIIRTLQLTSDSELAQVSSPQLRNPPRLSVNCSEIICMFNNMGKIEFRDSTKCYPQENEIRQNVQKKYNNKKELSCYDTYPPLEKKKVDMSVLTSEAPPPPLQPETNDVHLEAKNFQPQKDVATASPKTIAVLPQMGSSPDVIIEEIIEDNVETCGTDDLGETPRYPKKPLQKNSSVPFGSKADTVTTV

SEQ ID NO: 23295 - DNA, 2169 bp, Homo sapiens
ggactcgcactcggcggttgttccagaagaaagagacagcgatggcggcagaggcttcgaagactgggccttctaggtcttcctaccagcgaatggggaggaagagtcagccctggggtgccgctgaaatccagtgcaccaggtgtggaaggagggtatccagatcatccggtcaccattgtgaacttcaatgtggacatgctttttgtgaactatgcttgttaatgactgaagaatgcaccacaattatatgccctgattgtgaggttgctacagctgtaaatactagacaacgctactacccaatggctggatatattaaggaagactccataatggaaaaactgcagcctaagacgataaagaattgttctcaggactttaagaagactgctgatcagctaactactggtttagaacgttcagcctccacagacaagactcttttgaactcatcagctgtaatgttggacactaatactgcagaagaaattgatgaagcattgaatacagcacaccatagtttcgaacagttaagcattgctggaaaagcacttgaacacatgcagaagcaaacgatagaggaaagagaaagagttatagaagttgtggagaaacagtttgaccaacttttggctttttttgattccaggaaaaagaacctgtgtgaagaatttgcaagaactactgatgattatctatcaaatttaataaaggctaaaagctacattgaagagaaaaaaaataatttgaatgcagctatgaacatagcaagagcattacaattatcgccttctctaagaacatactgtgacctgaatcagattatccggactttgcagttaacttcagatagtgaattagcacaagttagttctccacaactaaggaaccctcccaggttgagtgtgaattgcagtgagatcatctgtatgttcaacaatatgggaaagattgaatttagggactcaacaaaatgttatccccaagaaaatgaaattagacagaatgttcaaaagaaatataataacaaaaaggaactttcttgttacgatacatacccaccgctagaaaagaaaaaggttgacatgtctgtcctaaccagtgaagcaccaccacctcctttgcaacctgagacaaatgatgtacatttagaagcaaaaaacttccagccacagaaagacgttgcaacagcatcccctaaaaccattgctgtgttacctcagatgggatctagccctgatgtgataattgaagaaattattgaagacaacgtggaaagttctgcagagctagtttttgtaagccatgtaatagatccttgccatttctacattcggaagtattcacaaataaaagacgccaaagtactggagaagaaggtgaatgaattttgcaataggagttcacaccttgatccttcagacattttggaactaggtgcaagaatatttgtcagcagtattaaaaatggaatgtggtgtcgaggaactatcacagaattaattccaatagagggtagaaataccagaaaaccttgtagtccaaccagattatttgtccatgaagttgcactaatacaaatattcatggtagattttggaaattctgaagtcctgattgtcactggagttgttgatacccatgtgagaccagaacactctgctaagcaacatattgcactaaatgatttatgtctggttctaaggaaatctgaaccatatactgaagggctgctaaaagacatccagccattagcacaaccatgctcattgaaagacattgttccacagaattcaaatgaaggctgggaagaggaagctaaagtggaatttttgaaaatggtaaataacaaggctgtttcaatgaaagtttttagagaagaagatggtgtgcttattgtagatctgcaaaaaccaccaccgaataaaataagcagtgatatgcctgtgtctcttagagatgcgctagtttttatggaactagcaaaagatctgatctaataaagttggttgagacactttctcattttttcaatgtttctgtattggaagaagaacttaaagcttcctaatctattttgttggcgtcattcctctgctgaatttttaaatgttcactctggcttacctgttaatggaagaatttgcataatatctacttagaaag

SEQ ID NO: 23296 - protein, 653 aa, Homo sapiens
MAAEASKTGPSRSSYQRMGRKSQPWGAAEIQCTRCGRRVSRSSGHHCELQCGHAFCELCLLMTEECTTIICPDCEVATAVNTRQRYYPMAGYIKEDSIMEKLQPKTIKNCSQDFKKTADQLTTGLERSASTDKTLLNSSAVMLDTNTAEEIDEALNTAHHSFEQLSIAGKALEHMQKQTIEERERVIEVVEKQFDQLLAFFDSRKKNLCEEFARTTDDYLSNLIKAKSYIEEKKNNLNAAMNIARALQLSPSLRTYCDLNQIIRTLQLTSDSELAQVSSPQLRNPPRLSVNCSEIICMFNNMGKIEFRDSTKCYPQENEIRQNVQKKYNNKKELSCYDTYPPLEKKKVDMSVLTSEAPPPPLQPETNDVHLEAKNFQPQKDVATASPKTIAVLPQMGSSPDVIIEEIIEDNVESSAELVFVSHVIDPCHFYIRKYSQIKDAKVLEKKVNEFCNRSSHLDPSDILELGARIFVSSIKNGMWCRGTITELIPIEGRNTRKPCSPTRLFVHEVALIQIFMVDFGNSEVLIVTGVVDTHVRPEHSAKQHIALNDLCLVLRKSEPYTEGLLKDIQPLAQPCSLKDIVPQNSNEGWEEEAKVEFLKMVNNKAVSMKVFREEDGVLIVDLQKPPPNKISSDMPVSLRDALVFMELAKDLI

SEQ ID NO: 23297 - DNA, 5105 bp, Homo sapiens
ggactcgcactcggcggttgttccagaagaaagagacagcgatggcggcagaggcttcgaagactgggccttctaggtcttcctaccagcgaatggggaggaagagtcagccctggggtgccgctgaaatccagtgcaccaggtgtggaaggagggtatccagatcatccggtcaccattgtgaacttcaatgtggacatgctttttgtgaactatgcttgttaatgactgaagaatgcaccacaattatatgccctgattgtgaggttgctacagctgtaaatactagacaacgctactacccaatggctggatatattaaggaagactccataatggaaaaactgcagcctaagacgataaagaattgttctcaggactttaagaagactgctgatcagctaactactggtttagaacgttcagcctccacagacaagactcttttgaactcatcagctgtaatgttggacactaatactgcagaagaaattgatgaagcattgaatacagcacaccatagtttcgaacagttaagcattgctggaaaagcacttgaacacatgcagaagcaaacgatagaggaaagagaaagagttatagaagttgtggagaaacagtttgaccaacttttggctttttttgattccaggaaaaagaacctgtgtgaagaatttgcaagaactactgatgattatctatcaaatttaataaaggctaaaagctacattgaagagaaaaaaaataatttgaatgcagctatgaacatagcaagagcattacaattatcgccttctctaagaacatactgtgacctgaatcagattatccggactttgcagttaacttcagatagtgaattagcacaagttagttctccacaactaaggaaccctcccaggttgagtgtgaattgcagtgagatcatctgtatgttcaacaatatgggaaagattgaatttagggactcaacaaaatgttatccccaagaaaatgaaattagacagaatgttcaaaagaaatataataacaaaaaggaactttcttgttacgatacatacccaccgctagaaaagaaaaaggttgacatgtctgtcctaaccagtgaagcaccaccacctcctttgcaacctgagacaaatgatgtacatttagaagcaaaaaacttccagccacagaaagacgttgcaacagcatcccctaaaaccattgctgtgttacctcagatgggatctagccctgatgtgataattgaagaaattattgaagacaacgtggaaagttctgcagagctagtttttgtaagccatgtaatagatccttgccatttctacattcggaagtattcacaaataaaagacgccaaagtactggagaagaaggtgaatgaattttgcaataggagttcacaccttgatccttcagacattttggaactaggtgcaagaatatttgtcagcagtattaaaaatggaatgtggtgtcgaggaactatcacagaattaattccaatagagggtagaaataccagaaaaccttgtagtccaaccagattatttgtccatgaagttgcactaatacaaatattcatggtagattttggaaattctgaagtcctgattgtcactggagttgttgatacccatgtgagaccagaacactctgctaagcaacatattgcactaaatgatttatgtctggttctaaggaaatctgaaccatatactgaagggctgctaaaagacatccagccattagcacaaccatgctcattgaaagacattgttccacagaattcaaatgaaggctgggaagaggaagctaaagtggaatttttgaaaatggtaaataacaaggctgtttcaatgaaagtttttagagaagaagatggtgtgcttattgtagatctgcaaaaaccaccaccgaataaaataagcagtgatatgcctgtgtctcttagagatgcgctagtttttatggaactagcaaagtttaagtcacaatcactaagaagtcactttgaaaaaaatactactttacactatcatccacctattttgcctaaagaaatgacagatgtttcagtaacggtttgtcatataaatagtcctggagatttctatcttcagttgatagagggcctggatattttatttctattaaagacaatcgaggaattctataaaagtgaagatggagaaaatctggaaatcctctgtccagttcaagatcaagcctgtgtagctaaatttgaagatggaatttggtaccgagcaaaagttatcggattgcctggacatcaggaagttgaagttaaatatgtggactttggtaatactgcaaaaataacaatcaaagacgtgcgtaaaataaaggatgagtttctgaatgccccagagaaggcaattaaatgtaagttggcctatattgaaccatataaaaggacaatgcagtggtccaaagaagctaaagaaaaatttgaagaaaaggctcaagataaatttatgacatgttcagttatcaaaattctggaagataatgtgctcttagttgagcttttcgattctcttggtgctcctgaaatgactactactagtattaatgaccagctagttaaagagggcctagcatcttatgaaataggatacatcctcaaagataattctcaaaagcatattgaagtttgggatccttctccagaagaaattatttcaaatgaagtacacaacttaaatcctgtgtctgcaaaatctctacctaatgagaattttcagtcactttataataaggaattgcctgtgcatatctgtaatgtaatatctcctgagaagatttatgttcagtggttgttaactgaaaacttacttaatagtttagaagaaaagatgatagctgcttatgaaaactcaaaatgggaacctgttaaatgggaaaatgatatgcactgtgctgttaagatccaagataaaaatcagtggcgaagaggccagatcatcagaatggttacagacacattggtagaggtcttgctgtatgatgtgggtgttgaactagtagtgaatgttgactgtttaagaaaacttgaagaaaatctaaagacaatgggaagactctctttggaatgttctctggttgacataagaccagctggtgggagtgacaagtggacagcaacagcttgtgactgtctttcattgtacctgactggagctgtagcaactataatcttacaggtggatagtgaggaaaacaacacaacatggccattacctgtgaaaattttctgcagagatgaaaaaggagagcgtgttgatgtttctaaatatttgattaaaaagggtttggctttgagagaaaggagaattaataacttagataacagccattcattatctgagaagtctctggaagtccccctggaacaggaagattcagtagttactaactgtattaaaactaactttgaccctgacaagaaaactgctgacataatcagtgaacagaaagtgtctgaatttcaggagaaaattctagaaccaagaaccactagagggtataagccaccagctattcctaacatgaacgtatttgaggcaacagtcagctgtgttggtgatgatggaactatatttgtagtacctaaactatcagaatttgagctaataaaaatgacaaatgaaattcaaagtaatttaaaatgccttggtcttttggagccttatttctggaaaaaaggagaagcatgtgcagtaagaggatccgatactctgtggtatcgtggcaaggtgatggaggttgtaggtggcgctgtcagagtacaatatttagatcatggattcactgaaaagattccgcagtgccatctttaccctattttgctgtatcctgatataccccagttttgtattccttgtcagctccataataccacacctgttgggaatgtctggcaaccagatgcaatagaagttcttcaacaactgctttcaaagagacaggtggacattcacattatggagttacctaaaaatccatgggagaaattgtctattcacctctattttgatggaatgtcactttcttattttatggcatactataaatactgtacttctgaacatactgaggagatgttgaaagaaaaaccaagatcagatcatgataaaaagtatgaagaggaacaatgggaaataaggtttgaggaattgctttcggctgaaacagacactcctcttttaccaccatatttgtcttcatctctgccttccccaggagaactctatgctgttcaagttaagcacgttgtctcacctaatgaagtgtatatttgccttgattctatagaaacttctaaccagtctaaccagcatagtgacacagatgatagtggagtcagcggggaatcagaatccgagagccttgatgaagcactgcagagggttaataagaaggtagaggcgcttcctcctctgacggattttagaacagaaatgccttgccttgcagaatatgatgatggcttatggtatagagcgaagattgttgccattaaagaatttaatcctttatctatcttagtacaatttgttgattatggatcaactgcaaagctgacattaaacagactgtgccaaattccttctcatcttatgcggtatccagctcgagccataaaggttctcttggcagggtttaaacctcccttaagggatctaggggagacaagaataccatattgtcccaaatggagcatggaggcactgtgggctatgatagactgtcttcaaggaaaacaactctatgctgtgtccatggctccagcaccagaacagatagtgacattatatgacgatgaacagcatccagttcatatgccgttggtagaaatggggcttgcagataaagatgaataagtgcctaagtgtatacagtgagagcatctatagaagcctagaagaattctgttatgtttagactatgtcttatctttagactatttcaggcttaattttcctaacttgttcagcactagtgctttacctctcatttttaattgaactgttaggaattgtgtggggaaaaaaagtaaataaatgttcgcttcc

SEQ ID NO: 23298 - protein, 1623 aa, Homo sapiens; identical to SEQ ID NO: 3086

SEQ ID NO: 23299 - DNA, 3404 bp, Homo sapiens
ataacaaggctgtttcaatgaaagtttttagagaagaagatggtgtgcttattgtagatctgcaaaaaccaccaccgaataaaataagcagtgatatgcctgtgtctcttagagatgcgctagtttttatggaactagcaaagtttaagtcacaatcactaagaagtcactttgaaaaaaatactactttacactatcatccacctattttgcctaaagaaatgacagatgtttcagtaacggtttgtcatataaatagtcctggagatttctatcttcagttgatagagggcctggatattttatttctattaaagacaatcgaggaattctataaaagtgaagatggagaaaatctggaaatcctctgtccagttcaagatcaagcctgtgtagctaaatttgaagatggaatttggtaccgagcaaaagttatcgaacttaaccattgggaatcttgctggaaaagttgtatagatagaacaaagcaacagaaattaattattcaaaaaccggtgaactctagtttgatgttgactgtttgtctgtcccatgctattttgattgtcaaggtacaaattaaaggattgcctggacatcaggaagttgaagttaaatatgtggactttggtaatactgcaaaaataacaatcaaagacgtgcgtaaaataaaggatgagtttctgaatgccccagagaaggcaattaaatgtaagttggcctatattgaaccatataaaaggacaatgcagtggtccaaagaagctaaagaaaaatttgaagaaaaggctcaagataaatttatgacatgttcagttatcaaaattctggaagataatgtgctcttagttgagcttttcgattctcttggtgctcctgaaatgactactactagtattaatgaccagctagttaaagagggcctagcatcttatgaaataggatacatcctcaaagataattctcaaaagcatattgaagtttgggatccttctccagaagaaattatttcaaatgaagtacacaacttaaatcctgtgtctgcaaaatctctacctaatgagaattttcagtcactttataataaggaattgcctgtgcatatctgtaatgtaatatctcctgagaagatttatgttcagtggttgttaactgaaaacttacttaatagtttagaagaaaagatgatagctgcttatgaaaactcaaaatgggaacctgttaaatgggaaaatgatatgcactgtgctgttaagatccaagataaaaatcagtggcgaagaggccagatcatcagaatggttacagacacattggtagaggtcttgctgtatgatgtgggtgttgaactagtagtgaatgttgactgtttaagaaaacttgaagaaaatctaaagacaatgggaagactctctttggaatgttctctggttgacataagaccagctggtgggagtgacaagtggacagcaacagcttgtgactgtctttcattgtacctgactggagctgtagcaactataatcttacaggtggatagtgaggaaaacaacacaacatggccattacctgtgaaaattttctgcagagatgaaaaaggagagcgtgttgatgtttctaaatatttgattaaaaagggtttggctttgagagaaaggagaattaataacttagataacagccattcattatctgagaagtctctggaagtccccctggaacaggaagattcagtagttactaactgtattaaaactaactttgaccctgacaagaaaactgctgacataatcagtgaacagaaagtgtctgaatttcaggagaaaattctagaaccaagaaccactagagggtataagccaccagctattcctaacatgaacgtatttgaggcaacagtcagctgtgttggtgatgatggaactatatttgtagtacctaaactatcagaatttgagctaataaaaatgacaaatgaaattcaaagtaatttaaaatgccttggtcttttggagccttatttctggaaaaaaggagaagcatgtgcagtaagaggatccgatactctgtggtatcgtggcaaggtgatggaggttgtaggtggcgctgtcagagtacaatatttagatcatggattcactgaaaagattccgcagtgccatctttaccctattttgctgtatcctgatataccccagttttgtattccttgtcagctccataataccacacctgttgggaatgtctggcaaccagatgcaatagaagttcttcaacaactgctttcaaagagacaggtggacattcacattatggagttacctaaaaatccatgggagaaattgtctattcacctctattttgatggaatgtcactttcttattttatggcatactataaatactgtacttctgaacatactgaggagatgttgaaagaaaaaccaagatcagatcatgataaaaagtatgaagaggaacaatgggaaataaggtttgaggaattgctttcggctgaaacagacactcctcttttaccaccatatttgtcttcatctctgccttccccaggagaactctatgctgttcaagttaagcacgttgtctcacctaatgaagtgtatatttgccttgattctatagaaacttctaaccagtctaaccagcatagtgacacagatgatagtggagtcagcggggaatcagaatccgagagccttgatgaagcactgcagagggttaataagaaggtagaggcgcttcctcctctgacggattttagaacagaaatgccttgccttgcagaatatgatgatggcttatggtatagagcgaagattgttgccattaaagaatttaatcctttatctatcttagtacaatttgttgattatggatcaactgcaaagctgacattaaacagactgtgccaaattccttctcatcttatgcggtatccagctcgagccataaaggttctcttggcagggtttaaacctcccttaagggatctaggggagacaagaataccatattgtcccaaatggagcatggaggcactgtgggctatgatagactgtcttcaaggaaaacaactctatgctgtgtccatggctccagcaccagaacagatagtgacattatatgacgatgaacagcatccagttcatatgccgttggtagaaatggggcttgcagataaagatgaataagtgcctaagtgtatacagtgagagcatctatagaagcctagaagaattctgttatgtttagactatgtcttatctttagactatttcaggcttaattttcctaacttgttcagcactagtgctttacctctcatttttaattgaactgttaggaattgtgtggggaaaaaaagtaaataaatgttcgcttcc

SEQ ID NO: 23300 - protein, 1064 aa, Homo sapiens
MKVFREEDGVLIVDLQKPPPNKISSDMPVSLRDALVFMELAKFKSQSLRSHFEKNTTLHYHPPILPKEMTDVSVTVCHINSPGDFYLQLIEGLDILFLLKTIEEFYKSEDGENLEILCPVQDQACVAKFEDGIWYRAKVIELNHWESCWKSCIDRTKQQKLIIQKPVNSSLMLTVCLSHAILIVKVQIKGLPGHQEVEVKYVDFGNTAKITIKDVRKIKDEFLNAPEKAIKCKLAYIEPYKRTMQWSKEAKEKFEEKAQDKFMTCSVIKILEDNVLLVELFDSLGAPEMTTTSINDQLVKEGLASYEIGYILKDNSQKHIEVWDPSPEEIISNEVHNLNPVSAKSLPNENFQSLYNKELPVHICNVISPEKIYVQWLLTENLLNSLEEKMIAAYENSKWEPVKWENDMHCAVKIQDKNQWRRGQIIRMVTDTLVEVLLYDVGVELVVNVDCLRKLEENLKTMGRLSLECSLVDIRPAGGSDKWTATACDCLSLYLTGAVATIILQVDSEENNTTWPLPVKIFCRDEKGERVDVSKYLIKKGLALRERRINNLDNSHSLSEKSLEVPLEQEDSVVTNCIKTNFDPDKKTADIISEQKVSEFQEKILEPRTTRGYKPPAIPNMNVFEATVSCVGDDGTIFVVPKLSEFELIKMTNEIQSNLKCLGLLEPYFWKKGEACAVRGSDTLWYRGKVMEVVGGAVRVQYLDHGFTEKIPQCHLYPILLYPDIPQFCIPCQLHNTTPVGNVWQPDAIEVLQQLLSKRQVDIHIMELPKNPWEKLSIHLYFDGMSLSYFMAYYKYCTSEHTEEMLKEKPRSDHDKKYEEEQWEIRFEELLSAETDTPLLPPYLSSSLPSPGELYAVQVKHVVSPNEVYICLDSIETSNQSNQHSDTDDSGVSGESESESLDEALQRVNKKVEALPPLTDFRTEMPCLAEYDDGLWYRAKIVAIKEFNPLSILVQFVDYGSTAKLTLNRLCQIPSHLMRYPARAIKVLLAGFKPPLRDLGETRIPYCPKWSMEALWAMIDCLQGKQLYAVSMAPAPEQIVTLYDDEQHPVHMPLVEMGLADKDE

SEQ ID NO: 23301 - DNA, 425 bp, Homo sapiens
gttttaggaattgctttcggctgaaacagacactcctcttttaccaccatatttgtcttcatctctgccttccccaggcactgtgggctatgatagactgtcttcaaggaaaacaactctatgctgtgtccatggctccagcaccagaacagatagtgacattatatgacgatgaacagcatccagttcatatgccgttggtagaaatggggcttgcagataaagatgaataagtgcctaagtgtatacagtgagagcatctatagaagcctagaagaattctgttatgtttagactatgtcttatctttagactatttcaggcttaattttcctaacttgttcagcactagtgctttacctctcatttttaattgaactgttaggaattgtgtggggaaaaaaagtaaataaatgttcgcttcc

SEQ ID NO: 23302 - protein, 47 aa, Homo sapiens
MIDCLQGKQLYAVSMAPAPEQIVTLYDDEQHPVHMPLVEMGLADKDE

SEQ ID NO: 23303 - DNA, 1578 bp, Homo sapiens
gaatgggtgccgtgttatactgtttcccaatggaactcgaaaggaagtgagtgcagatgggaagaccatcactgtcactttctttaatggtgacgtgaagcaggtcatgccagaccaaagagtggtatgtttccagaggtgttctcctccatagtttaaccatctctggagaaaaggcagactgactgtgtgtctttacagatctactactatgcagctgcccagaccactcacacgacatacccggagggactggaagtcttacatttctcaagtggacaaataggtacaaacttgctccaccctctcattaaattcttcccttccttcaaaaaatatttactgtaacaactttttaaacagaaaaacattacccagatggaagaaaagaaatcacgtttcctgaccagactgttaaaaacttatttcctgatggacaagaagaaagcattttcccagatggtacaattgtcagagtacaacgtgatggcaacaaactcatagagtttaataatggccaaagagaactacatactgcccagttcaagagacgggaatacccagatggcactgttaaaaccgtatatgcaaacggtcatcaagaaacgaagtacagatccggtcggataagagttaaggacaaggagggtaatgtgctaatggacacggagctgtgacgatcctcatgtgatcatgaagtaacagtaactgactttttatgttaaaaaatgtacatttactgtggattctgtttaatttattgtgtatgtgtggggaaaagattagattctaaaataaaagtttaccctgtggcatcttcatttttatattctttgaaatgcaatgatagctctcatttataattcactaccctgtctttcaatagactaaggaaagcattttgactgtttagaaattgtgtacaggtttttacagtaagtgggtgtgtttattggttagaaatggctataaaaaaaaaccaagaagtacaggaagtacatcacctagatgtcccacagacacatcagccgtagagcactggacttgtacagaaggtgtactcaaggagtaaacacgtgtctctgtagccaaaatattactatgttcagttagtaccaaaattagaccatttgatcttctacagaggatcattaattattataacagaatgggaagttacaacagtggatgaatataaataggtcacacacaacaggtagtaatcatggtgaagagaaagcagttataacaaggctgactttgtaatgtaatgtctcaaaatgggatacttgagagtggaggggggcatgaacgatgactagccagtgttaacccatggaccacagctaccctgatgttaccacagtgagattactgtagcctcatggaagcaagatgtccctgaaggatgggcaagtcacttacttacttacttgtaaatttatataataaataattacagattggtctagatagaccttacctgtcacatatactatgaatcaggttttgttaatgaaatctatcaattccaggtgacttaactgaatatgaaaaataaaactttttgaagaatat

SEQ ID NO: 23304 - protein, 41 aa, Homo sapiens
MEEKKSRFLTRLLKTYFLMDKKKAFSQMVQLSEYNVMATNS

SEQ ID NO: 23305 - DNA, 2501 bp, Homo sapiens
ctgttatccttcaccatccactcccagtagtccctagactgatccctctgatgttattttctggatctattagttacattgaatcatatgaaattgctgatgtgtggcagtttgggacctataaatcagtgatttcccatggtgtaatggaaccattcctgtctcacaggcacagcacagccgcctcacacgcccagcagcttgttggctgaccacctgcctccgctctcctccttcaggccattctcccgtaacatccagctctgttacactttttaacatggaggtcagattctggcacttgctcgagacccttccaagttgagtgtttacaatatgatccattggcacataggatgaaaatactggcacttcagtgtatttttagagagagattcacctcactttgttgttggtgggggcgtgtttattttgtaatgtatatgttgctggtacagtatgtgattggtgtgctggacatattacaaaaagtttataccatagccacaagggcatttatgttttaactaaatacccagttatttggtgaagccaaattccacaggtcttagatgcctcttttatctgcaccttacaccttgtgattgtctctgaaatacatttgggtctgtcaggctgtttcatcacctgtctcttccccaggattgtaaactctgagacaagatactgtctttcttggacatctaggacttaagtacctgtgtcggagaactacaaattagtaaagaaaaatattaagacatccttaactaatggataaaggacagcagttcacaggatatgaactaaggaaatgtgtgatcatactaataaaattttcaattaaatattaaatctaactcttgacaattttattctaataggcaatccacctcgaagatccaagtctgcacctcctcgtgatttaggcaatttggataagggacaagctgcctctcccagggagccacttgaaccactgaacttcccagatcctgaatataaagaggaggaggaagaccaagacatacagggagaaatcagtcatcctgatggaaaggtggaaaaggtttataagaatgggtgccgtgttatactgtttcccaatggaactcgaaaggaagtgagtgcagatgggaagaccatcactgtcactttctttaatggtgacgtgaagcaggtcatgccagaccaaagagtgatctactactatgcagctgcccagaccactcacacgacatacccggagggactggaagtcttacatttctcaagtggacaaatagaaaaacattacccagatggaagaaaagaaatcacgtttcctgaccagactgttaaaaacttatttcctgatggacaagaagaaagcattttcccagatggtacaattgtcagagtacaacgtgatggcaacaaactcatagagtttaataatggccaaagagaactacatactgcccagttcaagagacgggaatacccagatggcactgttaaaaccgtatatgcaaacggtcatcaagaaacgaagtacagatccggtcggataagagttaaggacaaggagggtaatgtgctaatggacacggagctgtgacgatcctcatgtgatcatgaagtaacagtaactgactttttatgttaaaaaatgtacatttactgtggattctgtttaatttattgtgtatgtgtggggaaaagattagattctaaaataaaagtttaccctgtggcatcttcatttttatattctttgaaatgcaatgatagctctcatttataattcactaccctgtctttcaatagactaaggaaagcattttgactgtttagaaattgtgtacaggtttttacagtaagtgggtgtgtttattggttagaaatggctataaaaaaaaaccaagaagtacaggaagtacatcacctagatgtcccacagacacatcagccgtagagcactggacttgtacagaaggtgtactcaaggagtaaacacgtgtctctgtagccaaaatattactatgttcagttagtaccaaaattagaccatttgatcttctacagaggatcattaattattataacagaatgggaagttacaacagtggatgaatataaataggtcacacacaacaggtagtaatcatggtgaagagaaagcagttataacaaggctgactttgtaatgtaatgtctcaaaatgggatacttgagagtggaggggggcatgaacgatgactagccagtgttaacccatggaccacagctaccctgatgttaccacagtgagattactgtagcctcatggaagcaagatgtccctgaaggatgggcaagtcacttacttacttacttgtaaatttatataataaataattacagattggtctagatagaccttacctgtcacatatactatgaatcaggttttgttaatgaaatctatcaattccaggtgacttaactgaatatgaaaaataaaactttttgaagaatat

SEQ ID NO: 23306 - protein, 138 aa, Homo sapiens
MPDQRVIYYYAAAQTTHTTYPEGLEVLHFSSGQIEKHYPDGRKEITFPDQTVKNLFPDGQEESIFPDGTIVRVQRDGNKLIEFNNGQRELHTAQFKRREYPDGTVKTVYANGHQETKYRSGRIRVKDKEGNVLMDTEL

SEQ ID NO: 23307 - DNA, 4337 bp, Homo sapiens
ggacgggggcggggctccgacagaggcggcgattgtggcggcccatttgtaaatgctgcggagattgaggtgtcggttcgtgctgctgagctgcccaggcttcacggagcggtgttggaaatcaatagctcttctagcctttgcattgtttaaatataatagtgtcattggactaagatgttcctgatgccaacctcttcagagttaaacagtgggcagaacttcctaacccagtggatgaccaatccttctcgggctggggtcatattaaatcgtggatttcctattttggaagcagacaaagagaagcgagcagctgtggacatttctaccagctttcctattaaaggcacacatttttctgatagcttcagctttataaatgaagaagattcacttcttgaagaacagaagttggagtcaaacaacccttacaaaccacagtcagataaatctgaaacccatacagcctttccttgcattaaaaagggaccacaggtagcggcatgtcacagtgctcctggacaccaggaagaaaacaaaaatgacttcatcccagatcttgcgagtgaattcaaagaaggggcttataaagacccactttttaaaaaacttgaacagctgaaagaagtacaacagaagaagcaggaacaattgaagaggcaacagttggagcaactacagagactcatggaagaacaagagaagctgctcaccatggtgtctgggcagtgcacacttccaggtttgagtttactgcctgatgatcagagccagaagcacaggtctccaggaaataccaccactggagagagagccacatgctgcttcccatcatatgtctacccggacccaacccaggaagaaacatacccgtccaacattttatcccatgagcaaagcaacttctgtagaactgctcatggagattttgtcttaacttcaaaacgtgcgtctcctaatttattttctgaggcacagtatcaagaagcacctgtggaaaaaaataatttaaaagaagaaaaccgtaaccatcctacaggagaaagtatcttatgttgggagaaagtgacagaacagattcaggaagcaaatgataagaacttacaaaaacatgatgattcctcagaagtggctaatattgaagaaaggcccattaaagctgctattggagaaaggaaacagacctttgaagattacttagaagaacaaattcagttggaagagcaagaactgaagcaaaaacagctgaaggaagcagaaggaccattgccaatcaaagcaaaaccaaaacaaccatttttaaaacgaggagaaggtttagctagatttactaatgccaaatctaagtttcaaaaaggcaaagaaagtaaactagtgactaaccagagcacttccgaggaccagccgctgtttaaaatggatagacagcaactccagcggaaaaccgctcttaaaaataaagagctgtgtgcagacaaccctatccttaaaaaggacagtaaagctagaaccaagagtggttctgtcaccctcagtcagaagccgaaaatgctgaagtgtagtaacaggaaaagtctttctccgtcaggattgaaaatacagacggggaagaaatgtgatgggcagtttagagaccagatcaaatttgaaaacaaagtcacatctaataataaagaaaatgtaactgagtgtccaaaaccttgcgatactggctgcacagggtggaataagacacaaggtaaagacagacttcctctttcaacagggccggccagccggctggctgctaagagccccataagggagaccatgaaagagtctgaatcttctcttgacgtttctcttcagaaaaagttagagacttgggaacgagaaaaggaaaaggaaaatttggaattagatgaatttttgtttttagaacaagctgctgatgaaatatcattttctagtaattcctcatttgtactgaaaatcttagaaagggatcaacagatctgcaaaggtcaccggatgtcttccacccctgtcaaagctgtgccacagaagacaaatccggcagatcccattagtcattgtaaccgcagtgaggatttggaccacactgcacgtgagaaggagagtgagtgtgaagtcgcacccaaacaacttcattcattgtcctcagctgatgaattgagggaacagccttgtaaaatcaggaaagccgtccaaaagagcacttctgaaaatcagactgaatggaatgcacgtgacgatgaaggtgttccaaatagtgacagtagcactgactctgaggaacagcttgatgttaccataaaaccatcgactgaggatagagagaggggcatcagcagcagagaggatagcccacaagtctgtgatgataaggggccttttaaggacaccaggacccaagaagataaaaggagagatgttgatctggatttgtctgataaagattacagtagcgatgagtctatcatggaaagcataaaacataaagtgtctgagccctcgagatcctcatccctaagtctgagtaaaatggactttgatgatgaaagaacttggactgaccttgaagagaatttgtgtaaccatgatgttgttcttgggaatgaatccacttatgggacgccgcagacatgctaccctaataatgaaataggtatcctggacaaaacaataaaaaggaagattgcaccagtcaagaggggagaagacttgagcaagtccaggaggagcagaagtcctcctacatcggagctgatgatgaaattctttccttctttgaaaccaaaaccaaagtcagattcacacttgggaaatgaactcaagttaaacataagtcaagaccaaccacctggtgacaatgctcgatcccaggttttgagagagaaaattattgaattggaaacagaaatagaaaagtttaaagctgagaacgcatctttagctaaacttcgcattgaacgagaaagtgccttggaaaaactcaggaaagaaattgcagacttcgaacaacagaaagcaaaagaattagctcgaatagaagagtttaaaaaggaggagatgaggaagctacaaaaggaacgtaaagtttttgaaaagtatactacagctgcaagaacttttccagataaaaaggaacgtgaagaaatacagactttaaaacagcaaatagcagatttacgggaagatttgaaaagaaaggaaaccaaatggtcaagtacacacagccgtctcagaagccagatacaaatgttagtcagagagaacacagacctccgggaagaaataaaagtgatggaaagattccgactggatgcctggaagagagcagaagccatagagagcagcctcgaggtggagaagaaggacaagcttgcgaacacatctgttcgatttcaaaacagtcagatttcttcaggaacccaggtagaaaaatacaagaaaaattatcttccaatgcaaggcaatccacctcgaagatccaagtctgcacctcctcgtgatttaggcaatttggataagggacaagctgcctctcccagggagccacttgaaccactgaacttcccagatcctgaatataaagaggaggaggaagaccaagacatacagggagaaatcagtcatcctgatggaaaggtggaaaaggtttataagaatgggtgccgtgttatactgtttcccaatggaactcgaaaggaagtgagtgcagatgggaagaccatcactgtcactttctttaatggtgacgtgaagcaggtcatgccagaccaaagagtgatctactactatgcagctgcccagaccactcacacgacatacccggagggactggaagtcttacatttctcaagtggacaaatagaaaaacattacccagatggaagaaaagaaatcacgtttcctgaccagactgttaaaaacttatttcctgatggacaagaagaaagcattttcccagatggtacaattgtcagagtacaacgtgatggcaacaaactcatagagtttaataatggccaaagagaactacatactgcccagttcaagagacgggaatacccagatggcactgttaaaaccgtatatgcaaacggtcatcaagaaacgaagtacagatccggtcggataagagttaaggacaaggagggtaatgtgctaatggacacggagctgtgacgatcctcatgtgatcatgaagtaacagtaactgactttttatgttaaaaaatgtacatttactgtggattctgtttaatttattgtgtatgtgtggggaaaagattagattctaaaataaaagtttaccctgtggcatcttc

SEQ ID NO: 23308 - protein, 1338 aa, Homo sapiens
MFLMPTSSELNSGQNFLTQWMTNPSRAGVILNRGFPILEADKEKRAAVDISTSFPIKGTHFSDSFSFINEEDSLLEEQKLESNNPYKPQSDKSETHTAFPCIKKGPQVAACHSAPGHQEENKNDFIPDLASEFKEGAYKDPLFKKLEQLKEVQQKKQEQLKRQQLEQLQRLMEEQEKLLTMVSGQCTLPGLSLLPDDQSQKHRSPGNTTTGERATCCFPSYVYPDPTQEETYPSNILSHEQSNFCRTAHGDFVLTSKRASPNLFSEAQYQEAPVEKNNLKEENRNHPTGESILCWEKVTEQIQEANDKNLQKHDDSSEVANIEERPIKAAIGERKQTFEDYLEEQIQLEEQELKQKQLKEAEGPLPIKAKPKQPFLKRGEGLARFTNAKSKFQKGKESKLVTNQSTSEDQPLFKMDRQQLQRKTALKNKELCADNPILKKDSKARTKSGSVTLSQKPKMLKCSNRKSLSPSGLKIQTGKKCDGQFRDQIKFENKVTSNNKENVTECPKPCDTGCTGWNKTQGKDRLPLSTGPASRLAAKSPIRETMKESESSLDVSLQKKLETWEREKEKENLELDEFLFLEQAADEISFSSNSSFVLKILERDQQICKGHRMSSTPVKAVPQKTNPADPISHCNRSEDLDHTAREKESECEVAPKQLHSLSSADELREQPCKIRKAVQKSTSENQTEWNARDDEGVPNSDSSTDSEEQLDVTIKPSTEDRERGISSREDSPQVCDDKGPFKDTRTQEDKRRDVDLDLSDKDYSSDESIMESIKHKVSEPSRSSSLSLSKMDFDDERTWTDLEENLCNHDVVLGNESTYGTPQTCYPNNEIGILDKTIKRKIAPVKRGEDLSKSRRSRSPPTSELMMKFFPSLKPKPKSDSHLGNELKLNISQDQPPGDNARSQVLREKIIELETEIEKFKAENASLAKLRIERESALEKLRKEIADFEQQKAKELARIEEFKKEEMRKLQKERKVFEKYTTAARTFPDKKEREEIQTLKQQIADLREDLKRKETKWSSTHSRLRSQIQMLVRENTDLREEIKVMERFRLDAWKRAEAIESSLEVEKKDKLANTSVRFQNSQISSGTQVEKYKKNYLPMQGNPPRRSKSAPPRDLGNLDKGQAASPREPLEPLNFPDPEYKEEEEDQDIQGEISHPDGKVEKVYKNGCRVILFPNGTRKEVSADGKTITVTFFNGDVKQVMPDQRVIYYYAAAQTTHTTYPEGLEVLHFSSGQIEKHYPDGRKEITFPDQTVKNLFPDGQEESIFPDGTIVRVQRDGNKLIEFNNGQRELHTAQFKRREYPDGTVKTVYANGHQETKYRSGRIRVKDKEGNVLMDTEL

SEQ ID NO: 23309 - DNA, 1739 bp, Homo sapiens
ctgttatccttcaccatccactcccagtagtccctagactgatccctctgatgttattttctggatctattagttacattgaatcatatgaaattgctgatgtgtggcagtttgggacctataaatcagtgatttcccatggtgtaatggaaccattcctgtctcacaggcacagcacagccgcctcacacgcccagcagcttgttggctgaccacctgcctccgctctcctccttcaggccattctcccgtaacatccagctctgttacactttttaacatggaggtcagattctggcacttgctcgagacccttccaagttgagtgtttacaatatgatccattggcacataggatgaaaatactggcacttcagtgtatttttagagagagattcacctcactttgttgttggtgggggcgtgtttattttgtaatgtatatgttgctggtacagtatgtgattggtgtgctggacatattacaaaaagtttataccatagccacaagggcatttatgttttaactaaatacccagttatttggtgaagccaaattccacaggtcttagatgcctcttttatctgcaccttacaccttgtgattgtctctgaaatacatttgggtctgtcaggctgtttcatcacctgtctcttccccaggattgtaaactctgagacaagatactgtctttcttggacatctaggacttaagtacctgtgtcggagaactacaaattagtaaagaaaaatattaagacatccttaactaatggataaaggacagcagttcacaggatatgaactaaggaaatgtgtgatcatactaataaaattttcaattaaatattaaatctaactcttgacaattttattctaataggcaatccacctcgaagatccaagtctgcacctcctcgtgatttaggcaatttggataagggacaagctgcctctcccagggagccacttgaaccactgaacttcccagatcctgaatataaagaggaggaggaagaccaagacatacagggagaaatcagtcatcctgatggaaaggtggaaaaggtttataagaatgggtgccgtgttatactgtttcccaatggaactcgaaaggaagtgagtgcagatgggaagaccatcactgtcactttctttaatggtgacgtgaagcaggtcatgccagaccaaagagtgatctactactatgcagctgcccagaccactcacacgacatacccggagggactggaagtcttacatttctcaagtggacaaatagaaaaacattacccagatggaagaaaagaaatcacgtttcctgaccagactgttaaaaacttatttcctgatggacaagaagaaagcattttcccagatggtacaattgtcagagtacaacgtgatggcaacaaactcatagagtttaataatggccaaagagaactacatactgcccagttcaagagacgggaatacccagatggcactgttaaaaccgtatatgcaaacggtcatcaagaaacgaagtacagatccggtcggataagagttaaggacaaggagggtaatgtgctaatggacacggagctgtgacgatcctcatgtgatcatgaagtaacagtaactgactttttatgttaaaaaatgtacatttactgtggattctgtttaatttattgtgtatgtgtggggaaaagattagattctaaaataaaagtttaccctgtggcat

SEQ ID NO: 23310 - protein, 138 aa, Homo sapiens; identical to SEQ ID NO: 23306

SEQ ID NO: 23311 - DNA, 815 bp, Homo sapiens
gaatgggtgccgtgttatactgtttcccaatggaactcgaaaggaagtgagtgcagatgggaagaccatcactgtcactttctttaatggtgacgtgaagcaggtcatgccagaccaaagagtggtatgtttccagaggtgttctcctccatagtttaaccatctctggagaaaaggcagactgactgtgtgtctttacagatctactactatgcagctgcccagaccactcacacgacatacccggagggactggaagtcttacatttctcaagtggacaaataggtacaaacttgctccaccctctcattaaattcttcccttccttcaaaaaatatttactgtaacaactttttaaacagaaaaacattacccagatggaagaaaagaaatcacgtttcctgaccagactgttaaaaacttatttcctgatggacaagaagaaagcattttcccagatggtacaattgtcagagtacaacgtgatggcaacaaactcatagagtttaataatggccaaagagaactacatactgcccagttcaagagacgggaatacccagatggcactgttaaaaccgtatatgcaaacggtcatcaagaaacgaagtacagatccggtcggataagagttaaggacaaggagggtaatgtgctaatggacacggagctgtgacgatcctcatgtgatcatgaagtaacagtaactgactttttatgttaaaaaatgtacatttactgtggattctgtttaatttattgtgtatgtgtggggaaaagattagattctaaaataaaagtttaccctgtggca

SEQ ID NO: 23312 - protein, 41 aa, Homo sapiens; identical to SEQ ID NO: 23304

SEQ ID NO: 23313 - DNA, 4243 bp, Homo sapiens
gggggcggggctccgacagaggcggcgattgtggcggcccatttgtaaatgctgcggagattgaggtgtcggttcgtgctgctgagctgcccaggcttcacggagcggtgttggaaatcaatagctcttctagcctttgcattgtttaaatataatagtgtcattggactaagatgttcctgatgccaacctcttcagagttaaacagtgggcagaacttcctaacccagtggatgaccaatccttctcgggctggggtcatattaaatcgtggatttcctattttggaagcagacaaagagaagcgagcagctgtggacatttctaccagctttcctattaaaggcacacatttttctgatagcttcagctttataaatgaagaagattcacttcttgaagaacagaagttggagtcaaacaacccttacaaaccacagtcagataaatctgaaacccatacagcctttccttgcattaaaaagggaccacaggtagcggcatgtcacagtgctcctggacaccaggaagaaaacaaaaatgacttcatcccagatcttgcgagtgaattcaaagaaggggcttataaagacccactttttaaaaaacttgaacagctgaaagaagtacaacagaagaagcaggaacaattgaagaggcaacagttggagcaactacagagactcatggaagaacaagagaagctgctcaccatggtgtctgggcagtgcacacttccaggtttgagtttactgcctgatgatcagagccagaagcacaggtctccaggaaataccaccactggagagagagccacatgctgcttcccatcatatgtctacccggacccaacccaggaagaaacatacccgtccaacattttatcccatgagcaaagcaacttctgtagaactgctcatggagattttgtcttaacttcaaaacgtgcgtctcctaatttattttctgaggcacagtatcaagaagcacctgtggaaaaaaataatttaaaagaagaaaaccgtaaccatcctacaggagaaagtatcttatgttgggagaaagtgacagaacagattcaggaagcaaatgataagaacttacaaaaacatgatgattcctcagaagtggctaatattgaagaaaggcccattaaagctgctattggagaaaggaaacagacctttgaagattacttagaagaacaaattcagttggaagagcaagaactgaagcaaaaacagctgaaggaagcagaaggaccattgccaatcaaagcaaaaccaaaacaaccatttttaaaacgaggagaaggtttagctagatttactaatgccaaatctaagtttcaaaaaggcaaagaaagtaaactagtgactaaccagagcacttccgaggaccagccgctgtttaaaatggatagacagcaactccagcggaaaaccgctcttaaaaataaagagctgtgtgcagacaaccctatccttaaaaaggacagtaaagctagaaccaagagtggttctgtcaccctcagtcagaagccgaaaatgctgaagtgtagtaacaggaaaagtctttctccgtcaggattgaaaatacagacggggaagaaatgtgatgggcagtttagagaccagatcaaatttgaaaacaaagtcacatctaataataaagaaaatgtaactgagtgtccaaaaccttgcgatactggctgcacagggtggaataagacacaaggtaaagacagacttcctctttcaacagggccggccagccggctggctgctaagagccccataagggagaccatgaaagagtctgaatcttctcttgacgtttctcttcagaaaaagttagagacttgggaacgagaaaaggaaaaggaaaatttggaattagatgaatttttgtttttagaacaagctgctgatgaaatatcattttctagtaattcctcatttgtactgaaaatcttagaaagggatcaacagatctgcaaaggtcaccggatgtcttccacccctgtcaaagctgtgccacagaagacaaatccggcagatcccattagtcattgtaaccgcagtgaggatttggaccacactgcacgtgagaaggagagtgagtgtgaagtcgcacccaaacaacttcattcattgtcctcagctgatgaattgagggaacagccttgtaaaatcaggaaagccgtccaaaagagcacttctgaaaatcagactgaatggaatgcacgtgacgatgaaggtgttccaaatagtgacagtagcactgactctgaggaacagcttgatgttaccataaaaccatcgactgaggatagagagaggggcatcagcagcagagaggatagcccacaagtctgtgatgataaggggccttttaaggacaccaggacccaagaagataaaaggagagatgttgatctggatttgtctgataaagattacagtagcgatgagtctatcatggaaagcataaaacataaagtgtctgagccctcgagatcctcatccctaagtctgagtaaaatggactttgatgatgaaagaacttggactgaccttgaagagaatttgtgtaaccatgatgttgttcttgggaatgaatccacttatgggacgccgcagacatgctaccctaataatgaaataggtatcctggacaaaacaataaaaaggaagattgcaccagtcaagaggggagaagacttgagcaagtccaggaggagcagaagtcctcctacatcggagctgatgatgaaattctttccttctttgaaaccaaaaccaaagtcagattcacacttgggaaatgaactcaagttaaacataagtcaagaccaaccacctggtgacaatgctcgatcccaggttttgagagagaaaattattgaattggaaacagaaatagaaaagtttaaagctgagaacgcatctttagctaaacttcgcattgaacgagaaagtgccttggaaaaactcaggaaagaaattgcagacttcgaacaacagaaagcaaaagaattagctcgaatagaagagtttaaaaaggaggagatgaggaagctacaaaaggaacgtaaagtttttgaaaagtatactacagctgcaagaacttttccagataaaaaggaacgtgaagaaatacagactttaaaacagcaaatagcagatttacgggaagatttgaaaagaaaggaaaccaaatggtcaagtacacacagccgtctcagaagccagatacaaatgttagtcagagagaacacagacctccgggaagaaataaaagtgatggaaagattccgactggatgcctggaagagagcagaagccatagagagcagcctcgaggtggagaagaaggacaagcttgcggcaatccacctcgaagatccaagtctgcacctcctcgtgatttaggcaatttggataagggacaagctgcctctcccagggagccacttgaaccactgaacttcccagatcctgaatataaagaggaggaggaagaccaagacatacagggagaaatcagtcatcctgatggaaaggtggaaaaggtttataagaatgggtgccgtgttatactgtttcccaatggaactcgaaaggaagtgagtgcagatgggaagaccatcactgtcactttctttaatggtgacgtgaagcaggtcatgccagaccaaagagtgatctactactatgcagctgcccagaccactcacacgacatacccggagggactggaagtcttacatttctcaagtggacaaatagaaaaacattacccagatggaagaaaagaaatcacgtttcctgaccagactgttaaaaacttatttcctgatggacaagaagaaagcattttcccagatggtacaattgtcagagtacaacgtgatggcaacaaactcatagagtttaataatggccaaagagaactacatactgcccagttcaagagacgggaatacccagatggcactgttaaaaccgtatatgcaaacggtcatcaagaaacgaagtacagatccggtcggataagagttaaggacaaggagggtaatgtgctaatggacacggagctgtgacgatcctcatgtgatcatgaagtaacagtaactgactttttatgttaaaaaatgtacatttactgtggattctgtttaatttattgtgtatgtgtggggaaaagattagattctaaaataaaagtttaccctgtggca

SEQ ID NO: 23314 - protein, 1086 aa, Homo sapiens
MFLMPTSSELNSGQNFLTQWMTNPSRAGVILNRGFPILEADKEKRAAVDISTSFPIKGTHFSDSFSFINEEDSLLEEQKLESNNPYKPQSDKSETHTAFPCIKKGPQVAACHSAPGHQEENKNDFIPDLASEFKEGAYKDPLFKKLEQLKEVQQKKQEQLKRQQLEQLQRLMEEQEKLLTMVSGQCTLPGLSLLPDDQSQKHRSPGNTTTGERATCCFPSYVYPDPTQEETYPSNILSHEQSNFCRTAHGDFVLTSKRASPNLFSEAQYQEAPVEKNNLKEENRNHPTGESILCWEKVTEQIQEANDKNLQKHDDSSEVANIEERPIKAAIGERKQTFEDYLEEQIQLEEQELKQKQLKEAEGPLPIKAKPKQPFLKRGEGLARFTNAKSKFQKGKESKLVTNQSTSEDQPLFKMDRQQLQRKTALKNKELCADNPILKKDSKARTKSGSVTLSQKPKMLKCSNRKSLSPSGLKIQTGKKCDGQFRDQIKFENKVTSNNKENVTECPKPCDTGCTGWNKTQGKDRLPLSTGPASRLAAKSPIRETMKESESSLDVSLQKKLETWEREKEKENLELDEFLFLEQAADEISFSSNSSFVLKILERDQQICKGHRMSSTPVKAVPQKTNPADPISHCNRSEDLDHTAREKESECEVAPKQLHSLSSADELREQPCKIRKAVQKSTSENQTEWNARDDEGVPNSDSSTDSEEQLDVTIKPSTEDRERGISSREDSPQVCDDKGPFKDTRTQEDKRRDVDLDLSDKDYSSDESIMESIKHKVSEPSRSSSLSLSKMDFDDERTWTDLEENLCNHDVVLGNESTYGTPQTCYPNNEIGILDKTIKRKIAPVKRGEDLSKSRRSRSPPTSELMMKFFPSLKPKPKSDSHLGNELKLNISQDQPPGDNARSQVLREKIIELETEIEKFKAENASLAKLRIERESALEKLRKEIADFEQQKAKELARIEEFKKEEMRKLQKERKVFEKYTTAARTFPDKKEREEIQTLKQQIADLREDLKRKETKWSSTHSRLRSQIQMLVRENTDLREEIKVMERFRLDAWKRAEAIESSLEVEKKDKLAAIHLEDPSLHLLVI

SEQ ID NO: 23315 - DNA, 957 bp, Homo sapiens
acaggtgttggaaatcaatagctcttctagcctttgcattgtttaaatataatagtgtcattggactaagatgttcctgatgccaacctcttcagagttaaacagtgggcagaacttcctaacccagtggatgaccaatccttctcgggctggggtcatattaaatcagcactcctgctatccccagagccttgtctgccatctgcccctttgctcaagcctaaacccctgtgtactcccagtactttttctgttatccttcaccatccactcccagtagtccctagactgatccctctgatgttattttctggatctattagttacattgaatcatatgaaattgctgatgtgtggcagtttgggacctataaatcagtgatttcccatggtgtaatggaaccattcctgtctcacaggcacagcacagccgcctcacacgcccagcagcttgttggctgaccacctgcctccgctctcctccttcaggccattctcccgtaacatccagctctgttacactttttaacatggaggtcagattctggcacttgctcgagacccttccaagttgagtgtttacaatatgatccattggcacataggatgaaaatactggcacttcagtgtatttttagagagagattcacctcactttgttgttggtgggggcgtgtttattttgtaatgtatatgttgctggtacagtatgtgattggtgtgctggacatattacaaaaagtttataccatagccacaagggcatttatgttttaactaaatacccagttatttggtgaagccaaattccacaggtcttagatgcctcttttatctgcaccttacaccttgtgattgtctctgaaatacatttgggtctgtcaggctgtttcatcacctgtctcttccccaggattgtaaactctgagacaagatactgtctttcttggacatcta

SEQ ID NO: 23316 - protein, 69 aa, Homo sapiens [sequence omitted]

SEQ ID NO: 23317 - DNA, 420 bp, Homo sapiens
agactttaaaacagcaaatagcagatttacgggaagatttgaaaagaaaggaaaccaaatggtcaagtacacacagccgtctcagaagccagatacaaatgttagtcagagagaacacagacctccgggaagaaataaaagtgatggaaagattccgactggatgcctggaagagagcagaagccatagagagcagcctcgaggtggagaagaaggacaagcttgcgaacacatctgttcgatttcaaaacagtcagatttcttcaggaacccaggtagaaaaatacaagaaaaattatcttccaatgcaaggtaagaggctgcatgatctttttataaaacatttcagaatgtaaggaataaacaatttatacccaacttaataaaacatttcttaataaatgtttttgaacatttgaa

SEQ ID NO: 23318 - protein, 85 aa, Homo sapiens [sequence omitted]

SEQ ID NO: 23319 - DNA, 653 bp, Homo sapiens
gtttaaagctgagaacgcatctttagctaaacttcgcattgaacgagaaagtgccttggaaaaactcaggaaagaaattgcagacttcgaacaacagaaagcaaaagaattagctcgaatagaagagtttaaaaaggaggagatgaggaagctacaaaaggaacgtaaagtttttgaaaagtatactacagctgcaagaacttttccagataaaaaggaacgtgaagaaatacagactttaaaacagcaaatagcagatttacgggaagatttgaaaagaaaggaaaccaaatggtcaagtacacacagccgtctcagaagccagatacaaatgttagtcagagagaacacagacctccgggaagaaataaaagtgatggaaagattccgactggatgcctggaagagagcagaagccatagagagcagcctcgaggtggagaagaaggacaagcttgcgaacacatctgttcgatttcaaaacagtcagatttcttcaggaacccaggtagaaaaatacaagaaaaattatcttccaatgcaaggtaagaggctgcatgatctttttataaaacatttcagaatgtaaggaataaacaatttatacccaacttaataaaacatttcttaataaatgtttttgaacatttgaa

SEQ ID NO: 23320 - protein, 148 aa, Homo sapiens
MRKLQKERKVFEKYTTAARTFPDKKEREEIQTLKQQIADLREDLKRKETKWSSTHSRLRSQIQMLVRENTDLREEIKVMERFRLDAWKRAEAIESSLEVEKKDKLANTSVRFQNSQISSGTQVEKYKKNYLPMQGKRLHDLFIKHFRM

SEQ ID NO: 23321 - DNA, 711 bp, Homo sapiens
ccaaatttctgtgaaatagttttgtctttagcagtcgtttgtttcagttataacggttataaatggcacttcatttgatttctttaaacattttacttggcctgctgtttaatcagacatggaagccaggacctcgggacgggggcggggctccgacagaggcggcgattgtggcggcccatttgtaaatgctgcggagattgaggtgtcggttcgtgctgctgagctgcccaggcttcacggagcgagctggggaagccggcctctctggggtgtctgtctctctgacctggctgtggcggaacttgagttcctgtgggcagcgcggcagccgcagtccgctggagcagggtggtgaagtagcgttgctggctgtcctaagggccggtcttgccccagctttgtcaagggcttctctcttgaagcttcgtgtggattcatggctttcaagaacgtgttgtattttaggggactgctaaatcacttcccagaccaactagttacttctcacggtctaagagtggctttgaatttgctgtttgtatccactctcctccctcaccgtgcagagaatttatctttttttcaatactgctttaaagaatgtttacatagcactttctggagatttcaaggctgtcagtttgttacattttttaaaagttttattgaggtataattgctatacaataaaaatggcacatgtttaaa

SEQ ID NO: 23322 - protein, 96 aa, Homo sapiens
MLRRLRCRFVLLSCPGFTERAGEAGLSGVSVSLTWLWRNLSSCGQRGSRSPLEQGGEVALLAVLRAGLAPALSRASLLKLRVDSWLSRTCCILGDC

SEQ ID NO: 23323 - DNA, 514 bp, Homo sapiens
tcaaatgatcgtcaaggtttgggagaaacaatctcttcctctgcccgggttgcgtggatctccagtggaaaggaagaaccggaactatggtttgtgcctgccttattgcctccaaaatatttttaactgcagaggctttatctaccaagaaatgaattggataatccacataaacaaaaagcttggaaaatttatccaccagaatttgccgtggagatactttttggaacctggcttaccagtatatcaccccagcgttgacacactgggaacgggtcacgcatgtggatgatcaaaggtcagctcctggtcaatatgagaagactggtttcagaaaagttgagtgctgaagactacaaagctgtttgtaagttatcaagctaggatttgatcccaggtctgcctgataaatcctggactcttaaccatgacataggagtgccctcttgactcctatgatggcataaagaattgtatcagaacgggtaatctggcattaaaacccctgtgccac

SEQ ID NO: 23324 - protein, 95 aa, Homo sapiens
MIVKVWEKQSLPLPGLRGSPVERKNRNYGLCLPYCLQNIFNCRGFIYQEMNWIIHINKKLGKFIHQNLPWRYFLEPGLPVYHPSVDTLGTGHACG

SEQ ID NO: 23325 - DNA, 3814 bp, Homo sapiens
aaatacgactagagggtaattaacatcgctgacctccggagtagagagcagtcatgcacctgcaaatgatcaaaggtcttaggaccacatgagtaaacaagctatttagataaaatcctctacattcctatgtatctatgccctaagcttttaagagagttcagctgtcttcagccaaaacttttactgaagctacgcaaacctcccagccttccaagaagttttgtgtctatttcctacatcttaatttttataatttctcccacaaccctgacagatcccctacaaaagaccatgtttcttctcagcttgctcagtccagctgagccagctttccactggactcctgaatgtgagaaggacacaggctcccaggactatccagaagcatgcctcatcaccataaagctctgaaacaccggctgggtgcagaggctcacacccgtaatcccaacacattcagaggctgagttcctttctgcagaggcacctgctgtcacttgctcctcacgaattctgctagagctacactatgtgtagacatatggcagcgtgctcctcagcctcttccgtgctggtttgtccactgaatttatcttggcgatttttcctcgtgattacatgtagagctgcctcattatctacagtagctgggatgcacatttcacatgtttatgtacactgacttccaaaaggttgcacttacagtatgtgagtttctaaaaaggagagaccatgttggcagttctccacacagaagacaaactgagaagggagagcgggcacgaattactcatctgtccacagagatggtgagacagctcagtgtgggaagctgtataagggaagtatatacaattctacctgaattggaagtaaacagggacattgcatttctggtattcagctggagttgaacacgcttcacagatgaggctcactatggccaagtcccagggctgaggtccagggaggggcaggctgagtcagcccatcaattcatcaacagagggaacaggagaggacaggggcaggccagcctggaacctagagcctttggatttctatttttacttcttacaacgaggtggtttaaaaaaagaggagggggccaggcacggtggttcatgcctgtattcccggccctttgggaggccgagacaggcggatgacatgaggtcaggagtttaagaccagcctggccaacatggcaaaaatcctgtctctactaaaagtacaaaaattagccaggcgtggtggcaggcacctataatcccagccactcaggaggctgaggcaggagaattgcttgaactcaggaggcggaagttgcagtgagctgagatcgcaccactgcactccagcctgggcaacagagtgagactccatctaaaaaaaaaaaaagaagaagaggttagacttaactgtttccaagatttcatccagttgtgaaatcctgttatctgaactgccaggcctacaagttcaattcaaaagatggaatgtagcttcctgcagtctttaaatgaacaaaacaaacagcacaagctacactgcgaagatgagtctgcactacatatctttctttttgcccccaggaacctggcttaccagtatatcaccccagcgttgacacactggtgagtgacgacagtgcgctttttgcaaatcctgtgcactatgacttttttccttcaagaatagatttgactggtctgaaattctattttcatatttggctgtgctctagtaatatcctgcctcactggacatgtggaattgtcctgcggttcagggaacagggagagaacagggctggtcctcctctgcctctgggggcccagcctcccaaccggccaagtcacagtctctcctgatgagcttccagtagctcactctctcctgctgctaatctctgtttcctcttctaaccatgaccctgttgttccctgaatgcgcgatgttttatcacactgtagtttatgacatttggaaatacctgaggatttaatgaaaaggaaaactttccgccattttccttaatgtcagtttgtagctttttcttctgctgccgaggtaagtacttcactttcaaacagaagatacaatttgcaaagattcccatcaccatcctgtaggaaacaaagtttttaaggaccctctcttaagtcaatatgacagtgaatttagaattgttatacatacaaactggaaaaattaggcattaccttaagaaacattgtaatcatgttgtaaattgaacacattgtaaaaattgaatatcatagcttgcaacatgtgtgttggtttaagaatgatttctagcttttgtggctgatattacaacacccaaaatccctttgtacaggcttataatatacatcttaataaaaacatgacagattttagttacagattgtgtgactcaagaacatagaagcatttatttctaaattaaaaattaacattatgtgatagtgaaacatgggtttttgtatataattctatgcattcaaaaagactcattatgtgggtttctgttaagacattctggagaaaaaccgaacaattggtaataaaaatatacaactatgtttaaatggaatatgtatatgtgtatatacacatatatattctgcatttgggtgtttttgggagggagatggagtctcactctgacacccaggctggagtacagtggtgtgatctcagctggttgcaacctccgcctcccggttcaagtgattctcctgcctcagcctccagcgtagctgggattacaggcgcccaccaccatgcctggctaatttttttctatttttactagaaatgggtttttgtcatgttgcccaggctggtatttgtccatttttagaaacaaggagtcacgtctaacagcctccctcaaagaaagctgccctttggagatagcggttcccgagtcccgtgtcggtttgggggtcgctgttccgggtcccttgtcagtttggggatcgcgggtccgggttcagtgttagtttggggattgcggttctgcgtgctttatcagtttggcgaaaactcgcactcggagagcgcagcgtccctagcagggaccgtcgccagaaggcgcccagaattgggtccctccaggtggggagcgggacccggcctcaggcggggtttgtcttttcagcctgagggggttcagggctttgtttcagtttcatgtttcaggagggatttagccaatgaggataaatccaaagctcggctttgggagaggtgggtggatggtgctgtcctttaactgagaaatgcaagggattcgcaagggcgggaaagaagaaaatttcgggaaagttcgtggaaacaggagagtgagataataaatttactttaagacttcctgagtttgaaattcgtgatagtgtttgtaactagttagaaatatatttttgtaactagttagaaatacatttatctgccactcaagagaggcgagggctggagatacagatctgagattcactgaaatgggaataaagcaatggggaagatccagatttttagggtactgaataaaatgagaatagaaaggatagagtagagaatacagtggaaaaggtatggctttgaatcctgactccacaatttattaccaaggggattggggacaccgtaatttaccaagtttcataattacaacctactctatagtgttgtctaagaaacaacaagagattttgggggaggagagagactctggtttccagagttaccacattataatgctcaaaatgtccaatcttcaacaaaaaattatgaggcatgc

SEQ ID NO: 23326 - protein, 94 aa, Homo sapiens [sequence omitted]

SEQ ID NO: 23327 - DNA, 1708 bp, Homo sapiens
aggaatgggctgatttcctgagtacacattaatctgagctccctcagccctaggggtagggggattgggggcacaagatgggtggagccagatagggaagattcccccagtgttgtcctgctcccagtccaggtttgggacaatgccggcagcgtttccctgtgtctttcccccacaaagtctccaagtctttcctcaaatgatcgtcaaggtttgggagaaacaatctcttcctctgcccgggttgcgtggatctccagtggaaaggctttatctaccaagaaatgaattggataatccacataaacaaaaagcttggaaaatttatccaccagaatttgccgtggagatactttttggtggattctcactctgtcacccaggctggagtgtagtggcacaatctttgctcacttcaacctctgccttctgcgttcgagcaattctcctgcctcagcctcccgagtaactgggattacaggcattaagtggtgtttcctgggagatgctacggtgttatttttgcactacaagggctctgaagactgccaggcttgaagtgaagaaccacgtcacctgcctatcccagccaggtgacagtggacaaggggcttcacctctgagctgttttccagctgtactgggcacattcctcctctcaccctgactcacaaggtgttagcaataatggacactcctctatcttctgccacactctgaacaatacttcacttccatcaaatggattcatcccaaaggtaatgcccatcgcttctggagggagaaagttcctttctgcagaggcacctgctgtcacttgctcctcacgaattctgctagagctacactatgtgtagacatatggcagcgtgctcctcagcctcttccgtgctggtttgtccactgaatttatcttggcgatttttcctcgtgattacatgtagagctgcctcattatctacagtagctgggatgcacatttcacatgtttatgtacactgacttccaaaaggttgcacttacagtatgtgagtttctaaaaaggagagaccatgttggcagttctccacacagaagacaaactgagaagggagagcgggcacgaattactcatctgtccacagagatggtgagacagctcagtgtgggaagctgtataagggaagtatatacaattctacctgaattggaagtaaacagggacattgcatttctggtattcagctggagttgaacacgcttcacagatgaggctcactatggccaagtcccagggctgaggtccagggaggggcaggctgagtcagcccatcaattcatcaacagagggaacaggagaggacaggggcaggccagcctggaacctagagcctttggatttctatttttacttcttacaacgaggtggtttaaaaaaagaggagggggccaggcacggtggttcatgcctgtattcccggccctttgggaggccgagacaggcggatgacatgaggtcaggagtttaagaccagcctggccaacatggcaaaaatcctgtctctactaaaagtacaaaaattagccaggcgtggtggcaggcacctataatcccagccactcaggaggctgaggcaggagaattgcttgaactcaggaggcggaagttgcagtgagctgagatcgcaccactgcactccagcctgggcaacagagtgagactccatct

SEQ ID NO: 23328 - protein, 108 aa, Homo sapiens
MPAAFPCVFPPQSLQVFPQMIVKVWEKQSLPLPGLRGSPVERLYLPRNELDNPHKQKAWKIYPPEFAVEILFGGFSLCHPGWSVVAQSLLTSTSAFCVRAILLPQPPE

SEQ ID NO: 23329 - DNA, 621 bp, Homo sapiens
aacaatacttcacttccatcaaatggattcatcccaaaggtaatgcccatcgcttctggagggagaaagatcccctacaaaagaccatgtttcttctcagcttgctcagtccagctgagccagctttccactggactcctgaatgtgagaaggacacaggctcccaggactatccagaagcatgcctcatcaccataaagctctgaaacaccggctgggtgcagaggctcacacccgtaatcccaacacattcagaggctgagttcctttctgcagaggcacctgctgtcacttgctcctcacgaattctgctagagctacactatgtgtagacatatggcagcgtgctcctcagcctcttccgtgctggtttgtccactgaatttatcttggcgatttttcctcgtgattacatgtagagctgcctcattatctacagtagctgggatgcacatttcacatgtttatgtacactgacttccaaaaggttgcacttacagtatgtgagtttctaaaaaggagagaccatgttggcagttctccacacagaagacaaactgagaagggagagcgggcacgaattactcatctgtccacagagatggtgagacagctcagtgt

SEQ ID NO: 23330 - protein, 51 aa, Homo sapiens
MPIASGGRKIPYKRPCFFSACSVQLSQLSTGLLNVRRTQAPRTIQKHASSP

SEQ ID NO: 23331 - DNA, 768 bp, Homo sapiens
gctctctgctgccccaggaatgggctgatttcctgagtacacattaatctgagctccctcagccctaggggtagggggattgggggcacaagatgggtggagccagatagggaagattcccccagtgttgtcctgctcccagtccaggtttgggacaatgccggcagcgtttccctgtgtctttcccccacaaagtctccaagtctttcctcaaatgatcgtcaaggtttgggagaaacaatctcttcctctgcccgggttgcgtggatctccagtggaaaggctttatctaccaagaaatgaattggataatccacataaacaaaaagcttggaaaatttatccaccagaatttgccgtggagatactttttggtatggtttctgtggattctctgctctttgtgctctcctccccacattggtggctccatctggcacagggaagcttctggatgtcagaaggtggattctcactctgtcacccaggctggagtgtagtggcacaatctttgctcacttcaacctctgccttctgcgttcgagcaattctcctgcctcagcctcccgagtaactgggattacaggcattaagtggtgtttcctgggagatgctacggtgttatttttgcactacaagggctctgaagactgccaggcttgaagtgaagaaccacgtcacctgcctatcccagccaggtgacagtggacaaggggcttcacctctgagctgttttccagctgtactgggcacattcctcctctcacc

SEQ ID NO: 23332 - protein, 138 aa, Homo sapiens
MPAAFPCVFPPQSLQVFPQMIVKVWEKQSLPLPGLRGSPVERLYLPRNELDNPHKQKAWKIYPPEFAVEILFGMVSVDSLLFVLSSPHWWLHLAQGSFWMSEGGFSLCHPGWSVVAQSLLTSTSAFCVRAILLPQPPE

SEQ ID NO: 23333 - DNA, 491 bp, Homo sapiens
ctctgctgccccaggaatgggctgatttcctgagtacacattaatctgagctccctcagccctaggggtagggggattgggggcacaagatgggtggagccagatagggaagattcccccagtgttgtcctgctcccagtccaggtttgggacaatgccggcagcgtttccctgtgtctttcccccacaaagtctccaagtctttcctcaaatgatcgtcaaggtttgggagaaacaatctcttcctctgcccgggttgcgtggatctccagtggaaaggaagaaccggaactatggtttgtgcctgccttattgcctccaaaatatttttaactgcagaggtatgaaagatgttctacaaaatttgtcttatgatgattgagtttgctagttctgaaacatcgctggtaggacgttaagatgattatttgattcatggtgcttagtaaaactgtaattagagaagcagtttttagaaagtctgtttttga

SEQ ID NO: 23334 - protein, 75 aa, Homo sapiens
MPAAFPCVFPPQSLQVFPQMIVKVWEKQSLPLPGLRGSPVERKNRNYGLCLPYCLQNIFNCRGMKDVLQNLSYDD

SEQ ID NO: 23335 - DNA, 498 bp, Homo sapiens
aggcgcggagaggcgcacaggagacctcaggcccaggctccactccccagctgtgaaaggaccgctggccggacccccaagctagcccgccaggcctccatagagctgcccagcatggccgtggccagtaccaagagtcggtgggagacgggtgaggtacaggctcagtctgcgaccaagactccgtcctgcaaggcccagattgccttcctacagggagaaaggaaggaccaagaaaatttgaagaaggatcttgtgaggaagatcaaaatgttggagtatgctcttaaacagaaaagagccaaataccacaagttgaaatatgggagagaattgaatcagggagatatgaagcctccaagctatgactctgattccacattaacaaaacagccagttaatgtgaaaacaaggtcgacaactactcagacaaaggtagttcagtttctccagattaccacagaagacagctctgtggatcctcctcagatgagatga

SEQ ID NO: 23336 - protein, 127 aa, Homo sapiens [sequence omitted]

SEQ ID NO: 23337 - DNA, 2440 bp, Homo sapiens
gcgctctactcctgtaacggaaaggtcgcggcttgtgtgcctgcgggcagccgtgccgagaatgaaccccagcacccccagctacccaacggcctcgctctacgtgggggacctccaccccgacgtgactgaggcgatgctctacgagaagttcagcccggcagggcccatcctctccatccggatctgcagggacttgatcaccagcggctcctccaactacgcgtatgtgaacttccagcatacgaaggacgcggagcatgctctggacaccatgaattttgatgttataaagggcaagccagtacgcatcatgtggtctcagcgtgatccatcacttcgaaaaagtggagtgggcaacatattcgttaaaaatctggataagtccattaataataaagcactgtatgatacagtttctgcttttggtaacatcctttcgtgtaacgtggtttgtgatgaaaatggttccaagggttatggatttgtacactttgagacacacgaagcagctgaaagagctattaaaaaaatgaacggaatgctcctaaatggtcgcaaagtatttgttggacaatttaagtctcgtaaagaacgagaagctgaacttggagctagggcaaaagagttccccaatgtttacatcaagaattttggagaagacatggatgatgagcgccttaaggatctctttggcaagttcgggcccgccttaagtgtgaaagtaatgaccgatgaaagtggaaaatccaaaggatttggatttgtaagctttgaaaggcatgaagatgcacagaaagctgtagatgagatgaatggaaaggagctcaatggaaaacaaatttacgttggtcgagctcagaaaaaagtggaacggcagacggaacttaagcgcacatttgaacagatgaagcaagataggatcaccagataccaggttgttaatctttatgtgaaaaatcttgatgatggtattgatgatgaacgtctccggaaagcgttttctccatttggtacaatcactagtgcaaaggttatgatggaaggtggtcgcagcaaagggtttggttttgtatgtttctcctccccagaagaagccactaaagcagttacagaaatgaacggtagaattgtggccacaaagccattgtatgtagctttagctcagcgcaaagaagagcgccaggcttacctcactaacgagtatatgcagagaatggcaagtgtacgagctgtgcccaaccagcgagcacctccttcaggttacttcatgacagctgtcccacagactcagaaccatgctgcatactatcctcctagccaaattgctcgactaagaccaagtcctcgctggactgctcagggtgccagacctcatccattccaaaataagcccagtgctatccgcccaggtgctcctagagtaccatttagtactatgagaccagcttcttcacaggttccacgagtcatgtcaacgcagcgtgttgctaacacatcaacacagacagtgggtccacgtcctgcagctgctgctgctgctgcagctacccctgctgtgcgcacggttccacggtataaatatgctgcgggagttcgcaatcctcagcaacatcgtaatgcacagccacaagttacaatgcaacagcttgctgttcatgtacaaggtcaggaaactttgactgcctccaggttggcatctgcccctcctcaaaagcaaaagcaaatgttaggtgaacggctctttcctcttattcaagccatgcaccctactcttgctgggaaaatcactggcatgttgttggagattgataattcagaacttctttatatgctcgagtctccagagtcactccgttctaaggttgatgaagctgtagctgtactacaagcccaccaagctaaagaggctacccagaaagcagttaacagtgctaccggtgttccaactgtttaaaattgatcagagaccacgaaaagaaatttgtgcttcaccgaagaaaaatatctaaacatcgagaaactatgggaaaaaaaattgcaaaatctaaaataaaaaatgcaaaatctaaaataaaaaatggaaaggaaactttgaaccttatgtaccgagcaaatgcaaggtctagcaaatataatgctagtcctagattacttattgatttaaaaacaaaaaaaagattacttaattttgatttaaaaacaaaaaatcgtaaaatacaaaaaccagttaatgttttgtagaccctgggaaaagaattttcagcaaagtacaaaaatttaaagcattcctttaattttttaattctttactgtggaatagctcaaaatgtccattctgttttaagtaacagaattgataactgagcaaggaaacatggtttggattataaaattcttgctttaataaaaatttcttaaacagtgaaaaaaagaaaaa

SEQ ID NO: 23338 - protein, 631 aa, Homo sapiens; identical to SEQ ID NO: 3091

SEQ ID NO: 23339 - DNA, 4884 bp, Homo sapiens
atggatggaggtgctttaactgatacaagtctcacagattcctattttagcaccagctttattggagtcaatggatttggaagccctgtagaaacaaaatatcccctgatgcagagaatgactaatagtagcagctccccaagccttctaaatgacagtgccaagccatattcagcccatgatcctctaacatcacctgcttcatccttgtttaatgactttggtgccctcaacatctctcagagacgaaagacaccaaatcctactgcaagcgagtttattcctaaaggaggatcaacctccaggctgagtaacgtgtcccagtcaaatatgtctgccttctctcaagttttctctcacccatccatgggaagccctgctactgctggattagcgccaggaatgtcgttgtctgctgggtcttcccctcttcattcccccaagattactccacatacttctcctgctcccagaagaagaagtcacactccaaatccagcaagttacatggtgccttctagtgcctctacatctgttaataatcctgtttctcagactccgtcttctggtcaggtgatccaaaaggaaactgttggtgggacgacttacttctatacagacacaactccagcacctttgactggaatggtgtttccaaactatcatatttatcctccaactgcacctcacgttgcttatatgcaaccgaaagcaaacgcaccttccttcttcatggctgatgaactccgacaggagctgatcaacagacatttaataacaatggctcaaattgatcaagcagatatgccagcagttcctacagaggttgacagctaccatagcctattccctctagaaccactgccacctcccaaccggatacagaaatcaagtaattttggatatattacatcttgctacaaagctgtaaacagcaaagatgatctgccatattgccttcggaggatacatggttttcgtcttgttaacacaaagtgcatggtgttggtcgacatgtggaagaaaattcaacactcaaatatcgtaactttgcgtgaagtatttaccactaaagcatttgctgagccctctcttgtgtttgcatatgatttccatgctggaggagaaactatgatgagcagacactttaatgaccctaatgctgatgcctacttcaccaagagaaagtggggtcagcacgagggaccattgcccaggcagcatgctggattattgccagaatctcttatttgggcatatattgtccaactaagttctgcattgcgtaccattcatacagcaggtttggcatgtcgagttatggatccaacaaagattctgataactggcaaaacaaggttgcgagtaaattgtgttggagtttttgatgttttaacatttgataacagtcaaaataataatccattggcattaatggcccagtaccagcaagcagatctgatatcattaggaaaagttgtgttggctttggcttgcaactctttggcaggaattcagcgagagaatttacagaaagccatggaactggtgacaatcaactattcctctgacctgaagaatctgattttgtatttgttgactgaccaaaacaggatgcgaagtgtaaatgacatcatgcccatgattggtgctcgattttatactcaattggatgctgctcaaatgagaaatgatgtcatagaggaagaccttgcaaaggaggttcaaaatggaagactgtttaggctcctagcaaaattgggaacaatcaatgagaggccggagtttcagaaggatcccacttggtcagagactggagaccgttatctgttgaaactctttagggatcatctttttcatcaggtgacagaagcaggtgctccctggattgacctcagtcatataatttcttgtcttaacaagctagatgctggtgtgccagaaaaaataagcctgatttccagagatgagaagagtgtacttgtggtgacctacagtgacttaaagcgctgctttgaaaatacttttcaagaactgattgcagctgcaaatggtcagttgtagtatttgctaaaaaagcacgcaggacatggctaaagaccttaaccaatagcaaattgcactacagctgaacttttcatcatctcattcacatttgggaaacgaacaggagatgagcaaagctgcttgcacttcagtcaggtacactgttacttgaaaggaagaatgtttcacttacccaagagctatggctgccattggaggctgttatctgtgaagaatttattttagatttaggagcaccatcaggtgaatgatgttcctgcttttgttttttccacttgtatatgcactaattttaattttttaaagactttttctgatctttgaacttttgccacattgtatacttataatgggaaactttgcaaggacatttttgggaagcaatgctgggcagcgtttttgccattgagggttgcagaatttgctctttttgggatgggttgccctgaataacattacggaccaggtaaataatttcatagaagttcagtatagtacgtaattcttgtaagagtatcgtatgcaagctctctgtatgccacccactgttagttcaaattgagatttttgttttgttttgttcttaagaacataccaagaaaataccagtgaattgttggatatgaattccctgttagttgatttaaatcctttctgaataaagatcagataaacagtaactgaaggagcatgtatagctctttccttcaaattcaactagagcctttttaaaaagacatttgcctgctagtcagatacatttacatttatgcaaattttttaaataggagaaaattaagaaattgtgttaaaggcctaaagttcaggagtgtattactttaggttctttccagtttgctggtttttttttttttttttttttttttttttgggcgggggggaggtttatgaagttttgctctttgaaccacagctttattatggtcctttacactggagacagacacagagacactgttcagaagatgaactaaactcagcagtggtctggtatcaagagctttctgatgttttacagcctgaatttggagggataacgatctgctgtgcctttgcagtcactgcttagcccaaagtaatagtacttttgataataactcactctgtgcgatattcctgaataagtccatctcaaaagtttgggattttcctcctcttaactttcttaatatttggacatgcagttgtcgccaaacttgggtattcatggaatttctagtaaatgaaatacctatactttgatactgaagactgccaaatacataggaattttctttcttaaaaaacagtaatgaagactatatctcctttcccagcactgaatgttttactagcactgggtgctcaccatgcaactgaagaaaatgtggaaactcaaaaggtcaggacagacttccaagcacttgcaactgatgttactgtcttcaattttaataattacacatatttgtatatttcagagaagtttttaatatttctctgtccactttttataagctttaaaatgattttctctgccttgagatttgcatcaagaaaaagcacctctcttcacctgaaagctttgaagactagagacacgctttacacgttttaacaagtatattgagtccacgtttggtagcatcagttgttgagttaaaaagaaaattattgcatttgatctggatggattttaaaagaatataatgttcaatattaaaaggataattcacatttgccaccataatgttcttttttatgtaaaaagaagaacttggagacattaacatgaaaaagtcttttatcattagctcatgtatttgaggaagagcagctgtctttttatatgttttttgacaaatcatattgtattcttttgtacaaaaaagaactacttgtattctagaagaaatatgaaatgcttaatttataagcgggctggagattttttccaatattgttttctttgaaaatgaaaggggatcatctattttagttttggggtctgggaactttttgaaaatttaatttgtggaccaatgttttgtgaaagctaaagagggcaggggttaaaatagggcttgaatttctcattctgtatagaccagcaaacttccctgtgcaaggcaagtttacatcacaaatccaagaatgtttgcatcctaaatgctagtttgcttcagcccctagttaacctcaggacttggtttgcatataaaaggtagacagctgatatgttttcatgaataaatattgtcagccagaaaaggttggtgtcaggtaatgcatatttttttaagctttgttttatatttatttttcatttagtttttattgggaatggttttcaaagaactctcagttctgcctaggtgtttttgggggagccctgttttccatagtgtaattccatttaagaggttgtctaaaagtctttttaattaatagaaagattttaatatccaagagtagtcaaattaaggatataaactttccacaccttcctgtcgtgacagataaaagcacagaaaggacaacccttgaaatcatgtaacgttggtcatttcaatattttgtacctgttttaaattctgttagtgtatttacttcattgtaaatatttttgagggtacctttgtattttgcttttgaccttggttctgtgatttggatgtcaacaacttccctaaaaagcaccagtgtgttaggttctaatgtcatgacccaatttgtgttattcatctttaatcctgttttcagtctctatgtgtacagcagtatttttaataaagaattacagagataaatttgtcc

SEQ ID NO: 23340 - protein, 687 aa, Homo sapiens; identical to SEQ ID NO: 3093

SEQ ID NO: 23341 - DNA, 693 bp, Homo sapiens
aaaggcacgaaaagcaaagaaccctattggctgccttgctgacaggtgtaaatcaggagtacccatcaatatggtttggtggaacagagtcacagaaaacaatttacagacaccaaatcctactgcaagcgagtttattcctaaaggaggatcaacctccaggctgagtaacgtgtcccagtcaaatatgtctgccttctctcaagttttctctcacccatccatgggaagccctgctactgctggattagcgccagggaacaagctaccctctgagtcagcactggacttgaagataaatcctacaattcatgaaactgactgattcgactaaaggatggatagtttgggcagcgttggacagctctatgaggggtctgtttgtttaactgaagggattgttgagttcagcaacttttaattcccctaatcataaggggttgctgttgtgaaaacagggtttgtgaaggaatcagttctggcaattaacatcagtattcttactgacttcgtttttattttattgtcaaacttctttaaagtggataaattttactgctttttttgccagcaagaatttgtatgcactgagaggtcagcatagaagctttgcagtctacttatgaatccaagtttctttttttaaaatatatgaggttataaacatttctctcaagtaaactttttgacact

SEQ ID NO: 23342 - protein, 84 aa, Homo sapiens
MVWWNRVTENNLQTPNPTASEFIPKGGSTSRLSNVSQSNMSAFSQVFSHPSMGSPATAGLAPGNKLPSESALDLKINPTIHETD

SEQ ID NO: 23343 - DNA, 388 bp, Homo sapiens
tggaacagagtcacagaaaacaatttacagggtcttgctctgtcatccaggctggagggtactggtgtagagatggctcactgcagccttcacctcctgggctcaagcagttctcctgaatagctgggaccacagacaccaaatcctactgcaagcgagtttattcctaaaggaggatcaacctccaggctgagtaacgtgtcccagtcaaatatgtctgccttctctcaagttttctctcacccatccatgggaagccctgctactgctggattagcgccaggaatgtcgttgtctgctgggtcttcccctcttcattcccccaagattactccacatacttctcctgctcccagaagaagaagtcacactccaaatccagcaagtt

SEQ ID NO: 23344 - protein, 57 aa, Homo sapiens
MSAFSQVFSHPSMGSPATAGLAPGMSLSAGSSPLHSPKITPHTSPAPRRRSHTPNPA

SEQ ID NO: 23345 - DNA, 549 bp, Homo sapiens
tttctctataatattaaatttttggtttctgtaaaatatacagatatgcactcatttatattcataattaaaaccctaatttacgtttatattttaaatagttctaagtggacattttaaaaaaattaatgttcattcaatagtctaagattctcatacactcaaatttaccccacaattttttttttgttttttttttgttttttgagacagaatctcactctgttgccaggctggagtgcagtggcacaaccttcactcactgcaacttccgcctcgcaggttcaagtgattgtcctgcctcagtcaccctagtagcagggattacaggtgtgtgtcaccaagcctggctaatttttatatttttggtagaggcaatgtttcatcatgttggccaagttggtctcaaactcctggcctcaagtgatctgcccacctcagcctcccaaaagtagctgggattacaggcgcccgccaccgcacccggctaatttttgtttttagtggagatggggtttcaccatgttggctgggctggtctcgaactcc

SEQ ID NO: 23346 - protein, 38 aa, Homo sapiens [sequence omitted]

SEQ ID NO: 23347 - DNA, 697 bp, Homo sapiens
gttggttgttttctctagggaacaagctaccctctgagtcagcactggacttgaagataaatcctacaattcatgaaactgactgattcgactaaaggatggatagtttgggcagcgttggacagctctatgaggggtctgtttgtttaactgaagggattgttgagttcagcaacttttaattcccctaatcataaggggttgctgttgtgaaaacagggtttgtgaaggaatcagttctggcaattaacatcagtattcttactgacttcgtttttattttattgtcaaacttctttaaagtggataaattttactgctttttttgccagcaagaatttgtatgcactgagaggtcagcatagaagctttgcagtctacttatgaatccaagtttctttttttaaaatatatgaggttataaacatttctctcaagtaaactttttgacacttggattatttcatctttacaaaggaatgtcgttgtctgctgggtcttcccctcttcattcccccaagattactccacatacttctcctgctcccagaagaagaagtcacactccaaatccagcaagttacatggtgccttctagtgcctctacatctgttaataatcctgtttctcagactccgtcttctggtcaggtgatccaaaaggaaactgttggtgggacgacttacttctatacaga

SEQ ID NO: 23348 - protein, 71 aa, Homo sapiens
MSLSAGSSPLHSPKITPHTSPAPRRRSHTPNPASYMVPSSASTSVNNPVSQTPSSGQVIQKETVGGTTYFY

SEQ ID NO: 23349 - DNA, 455 bp, Homo sapiens
gggtgtaagctccagaagatgggaattttgttcacctcattcaaagtatcctgcatttggcatatagtagtcatcatttttgtggataaatgaatagctatacccatgtgaataaactatatcttagcaattcatcccttacaaatgaattcaaagttacagaagttcttctggatggaatatatgaaaaggcagaattaaaacaatcatgttttgtttactaagctgtcaaagagacacttttgctacattgcccaggctgatctccaactcctgggctcaaatgatctacctgcctcagcctccctaagtgctgagattgcaagcatgagtccctacaccctgctgatcttatattcatattgttgtaaaacaaccttttgtgaatcagttataaaaagcaacataattaaatggttaattatgtacttataataaatagcaaatatgtactt

SEQ ID NO: 23350 - protein, 44 aa, Homo sapiens
MNSYTHVNKLYLSNSSLTNEFKVTEVLLDGIYEKAELKQSCFVY

SEQ ID NO: 23351 - DNA, 407 bp, Homo sapiens
gttccgcaaaggctctgaaacattcccttacctggaatactttaccaccagacatacacatggcagaccccttatgctttctccccatcaaattgacagtaaatacctaaaaaagggtataaacacaaggacaaagggatcagaaaaagcaacaatagtgaacaagagataatcatgaacatctggaatgcagaggcagatagaaaaattattagggaagacactaaatgagtctttcgactttgaagaaaagcaagtggacttgaattccatgggtgtaagctccagaagatgggaattttgttcacctcattcaaagtatcctgcatttggcatatagtagtcatcatttttgtggataaatgaatagctatacccatgtgaataaactatatcttagcaattca

SEQ ID NO: 23352 - protein, 50 aa, Homo sapiens [sequence omitted]

SEQ ID NO: 23353 - DNA, 1477 bp, Homo sapiens
aagatatttaaagatatttttaccttttccattttatctaatggtaggggctgaaataaggaggtaatgtaaaataggaatgcataagggatgatttccccctgacatttgctaactgaaaactggaattcatagacttactagttcagttagattattttttaaaaacactgtaccagactccctcccaattttttgtttattgggaaaaagtaaaactagtttggagtctaaaaaatagacatatggccacagaccatacagcatgagttactgaggtaaaatgttcatttcccccaggtttcagaaggatcccacttggtcagagactggagaccgttatctgttgaaactctttagggatcatctttttcatcaggtgacagaagcaggtgctccctggattgacctcagtcatataatttcttgtcttaacaagctagatgctggtgtgccagaaaaaataagcctgatttccagagatgagaagagtgtacttgtggtgacctacagtgacttaaagcgctgctttgaaaatacttttcaagaactgattgcagctgcaaatggtcagttgtagtatttgctaaaaaagcacgcaggacatggctaaagaccttaaccaatagcaaattgcactacagctgaacttttcatcatctcattcacatttgggaaacgaacaggagatgagcaaagctgcttgcacttcagtcaggtacactgttacttgaaaggaagaatgtttcacttacccaagagctatggctgccattggaggctgttatctgtgaagaatttattttagatttaggagcaccatcaggtgaatgatgttcctgcttttgttttttccacttgtatatgcactaattttaattttttaaagactttttctgatctttgaacttttgccacattgtatacttataatgggaaactttgcaaggacatttttgggaagcaatgctgggcagcgtttttgccattgagggttgcagaatttgctctttttgggatgggttgccctgaataacattacggaccaggtaaataatttcatagaagttcagtatagtacgtaattcttgtaagagtatcgtatgcaagctctctgtatgccacccactgttagttcaaattgagatttttgttttgttttgttcttaagaacataccaagaaaataccagtgaattgttggatatgaattccctgttagttgatttaaatcctttctgaataaagatcagataaacagtaactgaaggagcatgtatagctctttccttcaaattcaactagagcctttttaaaaagacatttgcctgctagtcagatacatttacatttatgcaaattttttaaataggagaaaattaagaaattgtgttaaaggcctaaagttcaggagtgtattactttaggttctttccagtttgctggtttttttttttttttttttttttttttttggg

SEQ ID NO: 23354 - protein, 98 aa, Homo sapiens [sequence omitted]

SEQ ID NO: 23355 - DNA, 1325 bp, Homo sapiens
gtgggcacgtcagcgaaggcaagcgcaggttcacctacgaccacgctgagctggaaaggaaaatcgcgtgctgctccccgcccccagactacaactcggtgttagttgtgaaagaaagctgagaagaatgaaaatgcagtcctgaggagaggagttttctccatatcaaaacgagggctgatggaggaaaaaggctctctgtatgaagagatgggaccgtcatcagcacattccctagtgagcctactggctcctggcagcggcttttgtggaagactcactagccagaagagaggagtgggacagtcctctccaccaagatctaaatccaaacaaaagcaggctagagccagaagagaggacaaatctttgttcttcctcttctttacatacgcaaaccacctgtgacagctggcaattttataaatcaggtaactggaaggaggttaaacacagaaaaaagaagacctcagtcaattctctacttttttttttttttccaaatcagataatagcccagcaaatagtgataacaaataaaaccttagctattcatgtcttgatttcaataattaattcttaatcattaagagaccataataaatactccttttcaagagaaaagcaaaaccattagaattgttactcagctccttcaaactcaggtttgtagcatacatgagtccatccatcagtcaaagaatggttccatctggagtcttaatgtagaaagaaaaatggagacttgtaataatgagctagttacaaagtgcttgttcattaaaatagcactgaaaattgaaacatgaattaactgataatattccaatcatttgccatttatgacaaaaatggttggcactaacaaagaacgagcacttcctttcagagtttctgagataatgtacgtggaacagtctgggtggaatggggctgaaaccatgtgcaagtctgtgtcttgtcagtccaagaagtgacaccgagatgttaattttagggacccgtgccttgtttcctagcccacaagaatgcaaacatcaaacagatactcgctagcctcatttaaattgattaaaggaggagtgcatctttggccgacagtggtgtaactgtatgtgtgtgtgtgtgtgtgtgtgtgtgtgtgtgtgtgggtgtatgtgtgttttgtgcataactatttaaggaaactggaattttaaagttacttttatacaaaccaagaatatatgctacagatataagacagacatggtttggtcctatatttctagtcatgatgaatgtattttgtataccatcttcatataataaacttccaaaaacac

SEQ ID NO: 23356 - protein, 75 aa, Homo sapiens [sequence omitted]

SEQ ID NO: 23357 - DNA, 1455 bp, Homo sapiens
atcacaatgggagaagctaaccagtatagcctggcaaacaagaggactaccagggcgacagcagcactctgttggcctctcccatgctgaagcgcttcacctggactgacagcaaacccaaggcctcgctcaagattgacttgagagtaaccagtaaaagtaaggagtcggggctgtctgatgtcagcaggcccagtttctgccattccagctgtgggcacgtcagcgaagttagttgtgaaagaaagctgagaagaatgaaaatgcagtcctgaggagaggagttttctccatatcaaaacgagggctgatggaggaaaaaggctctctgtatgaagagatgggaccgtcatcagcacattccctagtgagcctactggctcctggcagcggcttttgtggaagactcactagccagaagagaggagtgggacagtcctctccaccaagatctaaatccaaacaaaagcaggctagagccagaagagaggacaaatctttgttcttcctcttctttacatacgcaaaccacctgtgacagctggcaattttataaatcaggtaactggaaggaggttaaacacagaaaaaagaagacctcagtcaattctctacttttttttttttttccaaatcagataatagcccagcaaatagtgataacaaataaaaccttagctattcatgtcttgatttcaataattaattcttaatcattaagagaccataataaatactccttttcaagagaaaagcaaaaccattagaattgttactcagctccttcaaactcaggtttgtagcatacatgagtccatccatcagtcaaagaatggttccatctggagtcttaatgtagaaagaaaaatggagacttgtaataatgagctagttacaaagtgcttgttcattaaaatagcactgaaaattgaaacatgaattaactgataatattccaatcatttgccatttatgacaaaaatggttggcactaacaaagaacgagcacttcctttcagagtttctgagataatgtacgtggaacagtctgggtggaatggggctgaaaccatgtgcaagtctgtgtcttgtcagtccaagaagtgacaccgagatgttaattttagggacccgtgccttgtttcctagcccacaagaatgcaaacatcaaacagatactcgctagcctcatttaaattgattaaaggaggagtgcatctttggccgacagtggtgtaactgtatgtgtgtgtgtgtgtgtgtgtgtgtgtgtgtgtgtgggtgtatgtgtgttttgtgcataactatttaaggaaactggaattttaaagttacttttatacaaaccaagaatatatgctacagatataagacagacatggtttggtcctatatttctagtcatgatgaatgtattttgtataccatcttcatataataaacttccaaaaacac

SEQ ID NO: 23358 - protein, 75 aa, Homo sapiens [sequence omitted]

SEQ ID NO: 23359 - DNA, 3444 bp, Homo sapiens
tgtaatcacacacacacacaaaatacaagcctggcgctagcactcgattatgccattaaataatatttagccgtgtagccatgccaggtcactttgccacctcacatccttttcagagcacctgataaagtcataccacttccctgcacatcatttctctcctgtgccattgggcactcagacgagatgatgcctccagtctctcctatgtctggcattctctgatttcacaacggaccagaatacgtaaatgctttcaagttcatgagcctggaaagaatcaaaacctttgaagaacttttaccgaatgccacctccatgtttgatgactaccagggcgacagcagcactctgttggcctctcccatgctgaagcgcttcacctggactgacagcaaacccaaggcctcgctcaagattgacttgagagtaaccagtaaaagtaaggagtcggggctgtctgatgtcagcaggcccagtttctgccattccagctgtgggcacgtcagcgaaggcaagcgcaggttcacctacgaccacgctgagctggaaaggaaaatcgcgtgctgctccccgcccccagactacaactcggtggtcctgtactccaccccacccatctagagtttgacacgaagccttatttctagaagcacatgtgtatttatacccccaggaaactagcttttgccagtattatgcatatataagtttacacctttatctttccatgggagccagctgctttttgtgatttttttaatagtgcttttttttttttgactaacaagaatgtaactccagatagagaaatagtgacaagtgaagaacactactgctaaatcctcatgttactcagtgttagagaaatccttcctaaacccaatgacttccctgctccaacccccgccacctcagggcacgcaggaccagtttgattgaggagctgcactgatcacccaatgcatcacgtaccccactgggccagccctgcagcccaaaacccagggcaacaagcccgttagccccagggatcactggctggcctgagcaacatctcgggagtcctctagcaggcctaagacatgtgaggaggaaaaggaaaaaaagcaaaaagcaagggagaaaagagaaaccgggagaaggcatgagaaagaatttgagacgcaccatgtgggcacggagggggacggggctcagcaatgccatttcagtggcttcccagctctgacccttctacatttgagggcccagccaggagcagatggacagcgatgaggggacattttctggattctgggaggcaagaaaaggacaaatatcttttttggaactaaagcaaattttagaactttacctatggaagtggttctatgtccattctcattcgtggcatgttttgatttgtagcactgagggtggcactcaactctgagcccatacttttggctcctctagtaagatgcactgaaaacttagccagagttaggttgtctccaggccatgatggccttacactgaaaatgtcacattctattttgggtattaatatatagtccagacacttaactcaatttcttggtattattctgttttgcacagttagttgtgaaagaaagctgagaagaatgaaaatgcagtcctgaggagaggagttttctccatatcaaaacgagggctgatggaggaaaaaggtcaataaggtcaagggaaaaccccgtctctataccaaccaaaccaattcaccaacacagttgggacccaaaacacaggaagtcagtcacgtttccttttcatttaatggggattccactatctcacactaatctgaaaggatgtggaagagcattagctggcgcatattaagcactttaagctccttgagtaaaaaggtggtatgtaatttatgcaaggtatttctccagttgggactcaggatattagttaatgagccatcactagaagaaaagcccattttcaactgctttgaaacttgcctggggtctgagcatgatgggaatagggagacagggtaggaaagggcgcctactcttcagggtctaaagatcaagtgggccttggatcgctaagctggctctgtttgatgctatttatgcaagttagggtctatgtatttatgatgtctgcaccttctgcagccagtcagaagctggagaggcaacagtggattgctgcttcttggggagaagagtatgcttccttttatccatgtaatttaactgtagaacctgagctctaagtaaccgaagaatgtatgcctctgttcttatgtgccacatccttgtttaaaggctctctgtatgaagagatgggaccgtcatcagcacattccctagtgagcctactggctcctggcagcggcttttgtggaagactcactagccagaagagaggagtgggacagtcctctccaccaagatctaaatccaaacaaaagcaggctagagccagaagagaggacaaatctttgttcttcctcttctttacatacgcaaaccacctgtgacagctggcaattttataaatcaggtaactggaaggaggttaaacacagaaaaaagaagacctcagtcaattctctacttttttttttttttccaaatcagataatagcccagcaaatagtgataacaaataaaaccttagctattcatgtcttgatttcaataattaattcttaatcattaagagaccataataaatactccttttcaagagaaaagcaaaaccattagaattgttactcagctccttcaaactcaggtttgtagcatacatgagtccatccatcagtcaaagaatggttccatctggagtcttaatgtagaaagaaaaatggagacttgtaataatgagctagttacaaagtgcttgttcattaaaatagcactgaaaattgaaacatgaattaactgataatattccaatcatttgccatttatgacaaaaatggttggcactaacaaagaacgagcacttcctttcagagtttctgagataatgtacgtggaacagtctgggtggaatggggctgaaaccatgtgcaagtctgtgtcttgtcagtccaagaagtgacaccgagatgttaattttagggacccgtgccttgtttcctagcccacaagaatgcaaacatcaaacagatactcgctagcctcatttaaattgattaaaggaggagtgcatctttggccgacagtggtgtaactgtatgtgtgtgtgtgtgtgtgtgtgtgtgtgtgtgtgtgggtgtatgtgtgttttgtgcataactatttaaggaaactggaattttaaagttacttttatacaaaccaagaatatatgctacagatataagacagacatggtttggtcctatatttctagtcatgatgaatgtattttgtataccatcttcatataataaacttccaaaaacac

SEQ ID NO: 23360 - protein, 119 aa, Homo sapiens [sequence omitted]

SEQ ID NO: 23361 - DNA, 7122 bp, Homo sapiens
atcgaggtccgcgggaggctcggagcgcgccaggcggacactcctctcggctcctccccggcagcggcggcggctcggagcgggctccggggctcgggtgcagcggccagcgggcgcctggcggcgaggattacccggggaagtggttgtctcctggctggagccgcgagacgggcgctcagggcgcggggccggcggcggcgaacgagaggacggactctggcggccgggtcgttggccgcggggagcgcgggcaccgggcgagcaggccgcgtcgcgctcaccatggtcagctactgggacaccggggtcctgctgtgcgcgctgctcagctgtctgcttctcacaggatctagttcaggttcaaaattaaaagatcctgaactgagtttaaaaggcacccagcacatcatgcaagcaggccagacactgcatctccaatgcaggggggaagcagcccataaatggtctttgcctgaaatggtgagtaaggaaagcgaaaggctgagcataactaaatctgcctgtggaagaaatggcaaacaattctgcagtactttaaccttgaacacagctcaagcaaaccacactggcttctacagctgcaaatatctagctgtacctacttcaaagaagaaggaaacagaatctgcaatctatatatttattagtgatacaggtagacctttcgtagagatgtacagtgaaatccccgaaattatacacatgactgaaggaagggagctcgtcattccctgccgggttacgtcacctaacatcactgttactttaaaaaagtttccacttgacactttgatccctgatggaaaacgcataatctgggacagtagaaagggcttcatcatatcaaatgcaacgtacaaagaaatagggcttctgacctgtgaagcaacagtcaatgggcatttgtataagacaaactatctcacacatcgacaaaccaatacaatcatagatgtccaaataagcacaccacgcccagtcaaattacttagaggccatactcttgtcctcaattgtactgctaccactcccttgaacacgagagttcaaatgacctggagttaccctgatgaaaaaaataagagagcttccgtaaggcgacgaattgaccaaagcaattcccatgccaacatattctacagtgttcttactattgacaaaatgcagaacaaagacaaaggactttatacttgtcgtgtaaggagtggaccatcattcaaatctgttaacacctcagtgcatatatatgataaagcattcatcactgtgaaacatcgaaaacagcaggtgcttgaaaccgtagctggcaagcggtcttaccggctctctatgaaagtgaaggcatttccctcgccggaagttgtatggttaaaagatgggttacctgcgactgagaaatctgctcgctatttgactcgtggctactcgttaattatcaaggacgtaactgaagaggatgcagggaattatacaatcttgctgagcataaaacagtcaaatgtgtttaaaaacctcactgccactctaattgtcaatgtgaaaccccagatttacgaaaaggccgtgtcatcgtttccagacccggctctctacccactgggcagcagacaaatcctgacttgtaccgcatatggtatccctcaacctacaatcaagtggttctggcacccctgtaaccataatcattccgaagcaaggtgtgacttttgttccaataatgaagagtcctttatcctggatgctgacagcaacatgggaaacagaattgagagcatcactcagcgcatggcaataatagaaggaaagaataagatggctagcaccttggttgtggctgactctagaatttctggaatctacatttgcatagcttccaataaagttgggactgtgggaagaaacataagcttttatatcacagatgtgccaaatgggtttcatgttaacttggaaaaaatgccgacggaaggagaggacctgaaactgtcttgcacagttaacaagttcttatacagagacgttacttggattttactgcggacagttaataacagaacaatgcactacagtattagcaagcaaaaaatggccatcactaaggagcactccatcactcttaatcttaccatcatgaatgtttccctgcaagattcaggcacctatgcctgcagagccaggaatgtatacacaggggaagaaatcctccagaagaaagaaattacaatcagagatcaggaagcaccatacctcctgcgaaacctcagtgatcacacagtggccatcagcagttccaccactttagactgtcatgctaatggtgtccccgagcctcagatcacttggtttaaaaacaaccacaaaatacaacaagagcctggaattattttaggaccaggaagcagcacgctgtttattgaaagagtcacagaagaggatgaaggtgtctatcactgcaaagccaccaaccagaagggctctgtggaaagttcagcatacctcactgttcaaggaacctcggacaagtctaatctggagctgatcactctaacatgcacctgtgtggctgcgactctcttctggctcctattaaccctctttatccgaaaaatgaaaaggtcttcttctgaaataaagactgactacctatcaattataatggacccagatgaagttcctttggatgagcagtgtgagcggctcccttatgatgccagcaagtgggagtttgcccgggagagacttaaactgggcaaatcacttggaagaggggcttttggaaaagtggttcaagcatcagcatttggcattaagaaatcacctacgtgccggactgtggctgtgaaaatgctgaaagagggggccacggccagcgagtacaaagctctgatgactgagctaaaaatcttgacccacattggccaccatctgaacgtggttaacctgctgggagcctgcaccaagcaaggagggcctctgatggtgattgttgaatactgcaaatatggaaatctctccaactacctcaagagcaaacgtgacttattttttctcaacaaggatgcagcactacacatggagcctaagaaagaaaaaatggagccaggcctggaacaaggcaagaaaccaagactagatagcgtcaccagcagcgaaagctttgcgagctccggctttcaggaagataaaagtctgagtgatgttgaggaagaggaggattctgacggtttctacaaggagcccatcactatggaagatctgatttcttacagttttcaagtggccagaggcatggagttcctgtcttccagaaagtgcattcatcgggacctggcagcgagaaacattcttttatctgagaacaacgtggtgaagatttgtgattttggccttgcccgggatatttataagaaccccgattatgtgagaaaaggagatactcgacttcctctgaaatggatggctcctgaatctatctttgacaaaatctacagcaccaagagcgacgtgtggtcttacggagtattgctgtgggaaatcttctccttaggtgggtctccatacccaggagtacaaatggatgaggacttttgcagtcgcctgagggaaggcatgaggatgagagctcctgagtactctactcctgaaatctatcagatcatgctggactgctggcacagagacccaaaagaaaggccaagatttgcagaacttgtggaaaaactaggtgatttgcttcaagcaaatgtacaacaggatggtaaagactacatcccaatcaatgccatactgacaggaaatagtgggtttacatactcaactcctgccttctctgaggacttcttcaaggaaagtatttcagctccgaagtttaattcaggaagctctgatgatgtcagatacgtaaatgctttcaagttcatgagcctggaaagaatcaaaacctttgaagaacttttaccgaatgccacctccatgtttgatgactaccagggcgacagcagcactctgttggcctctcccatgctgaagcgcttcacctggactgacagcaaacccaaggcctcgctcaagattgacttgagagtaaccagtaaaagtaaggagtcggggctgtctgatgtcagcaggcccagtttctgccattccagctgtgggcacgtcagcgaaggcaagcgcaggttcacctacgaccacgctgagctggaaaggaaaatcgcgtgctgctccccgcccccagactacaactcggtggtcctgtactccaccccacccatctagagtttgacacgaagccttatttctagaagcacatgtgtatttatacccccaggaaactagcttttgccagtattatgcatatataagtttacacctttatctttccatgggagccagctgctttttgtgatttttttaatagtgcttttttttttttgactaacaagaatgtaactccagatagagaaatagtgacaagtgaagaacactactgctaaatcctcatgttactcagtgttagagaaatccttcctaaacccaatgacttccctgctccaacccccgccacctcagggcacgcaggaccagtttgattgaggagctgcactgatcacccaatgcatcacgtaccccactgggccagccctgcagcccaaaacccagggcaacaagcccgttagccccagggatcactggctggcctgagcaacatctcgggagtcctctagcaggcctaagacatgtgaggaggaaaaggaaaaaaagcaaaaagcaagggagaaaagagaaaccgggagaaggcatgagaaagaatttgagacgcaccatgtgggcacggagggggacggggctcagcaatgccatttcagtggcttcccagctctgacccttctacatttgagggcccagccaggagcagatggacagcgatgaggggacattttctggattctgggaggcaagaaaaggacaaatatcttttttggaactaaagcaaattttagaactttacctatggaagtggttctatgtccattctcattcgtggcatgttttgatttgtagcactgagggtggcactcaactctgagcccatacttttggctcctctagtaagatgcactgaaaacttagccagagttaggttgtctccaggccatgatggccttacactgaaaatgtcacattctattttgggtattaatatatagtccagacacttaactcaatttcttggtattattctgttttgcacagttagttgtgaaagaaagctgagaagaatgaaaatgcagtcctgaggagaggagttttctccatatcaaaacgagggctgatggaggaaaaaggtcaataaggtcaagggaaaaccccgtctctataccaaccaaaccaattcaccaacacagttgggacccaaaacacaggaagtcagtcacgtttccttttcatttaatggggattccactatctcacactaatctgaaaggatgtggaagagcattagctggcgcatattaagcactttaagctccttgagtaaaaaggtggtatgtaatttatgcaaggtatttctccagttgggactcaggatattagttaatgagccatcactagaagaaaagcccattttcaactgctttgaaacttgcctggggtctgagcatgatgggaatagggagacagggtaggaaagggcgcctactcttcagggtctaaagatcaagtgggccttggatcgctaagctggctctgtttgatgctatttatgcaagttagggtctatgtatttatgatgtctgcaccttctgcagccagtcagaagctggagaggcaacagtggattgctgcttcttggggagaagagtatgcttccttttatccatgtaatttaactgtagaacctgagctctaagtaaccgaagaatgtatgcctctgttcttatgtgccacatccttgtttaaaggctctctgtatgaagagatgggaccgtcatcagcacattccctagtgagcctactggctcctggcagcggcttttgtggaagactcactagccagaagagaggagtgggacagtcctctccaccaagatctaaatccaaacaaaagcaggctagagccagaagagaggacaaatctttgttcttcctcttctttacatacgcaaaccacctgtgacagctggcaattttataaatcaggtaactggaaggaggttaaacacagaaaaaagaagacctcagtcaattctctacttttttttttttttccaaatcagataatagcccagcaaatagtgataacaaataaaaccttagctattcatgtcttgatttcaataattaattcttaatcattaagagaccataataaatactccttttcaagagaaaagcaaaaccattagaattgttactcagctccttcaaactcaggtttgtagcatacatgagtccatccatcagtcaaagaatggttccatctggagtcttaatgtagaaagaaaaatggagacttgtaataatgagctagttacaaagtgcttgttcattaaaatagcactgaaaattgaaacatgaattaactgataatattccaatcatttgccatttatgacaaaaatggttggcactaacaaagaacgagcacttcctttcagagtttctgagataatgtacgtggaacagtctgggtggaatggggctgaaaccatgtgcaagtctgtgtcttgtcagtccaagaagtgacaccgagatgttaattttagggacccgtgccttgtttcctagcccacaagaatgcaaacatcaaacagatactcgctagcctcatttaaattgattaaaggaggagtgcatctttggccgacagtggtgtaactgtatgtgtgtgtgtgtgtgtgtgtgtgtgtgtgtgtgtgggtgtatgtgtgttttgtgcataactatttaaggaaactggaattttaaagttacttttatacaaaccaagaatatatgctacagatataagacagacatggtttggtcctatatttctagtcatgatgaatgtattttgtataccatcttcatataataaacttccaaaaacac

SEQ ID NO: 23362 - protein, 1338 aa, Homo sapiens
MVSYWDTGVLLCALLSCLLLTGSSSGSKLKDPELSLKGTQHIMQAGQTLHLQCRGEAAHKWSLPEMVSKESERLSITKSACGRNGKQFCSTLTLNTAQANHTGFYSCKYLAVPTSKKKETESAIYIFISDTGRPFVEMYSEIPEIIHMTEGRELVIPCRVTSPNITVTLKKFPLDTLIPDGKRIIWDSRKGFIISNATYKEIGLLTCEATVNGHLYKTNYLTHRQTNTIIDVQISTPRPVKLLRGHTLVLNCTATTPLNTRVQMTWSYPDEKNKRASVRRRIDQSNSHANIFYSVLTIDKMQNKDKGLYTCRVRSGPSFKSVNTSVHIYDKAFITVKHRKQQVLETVAGKRSYRLSMKVKAFPSPEVVWLKDGLPATEKSARYLTRGYSLIIKDVTEEDAGNYTILLSIKQSNVFKNLTATLIVNVKPQIYEKAVSSFPDPALYPLGSRQILTCTAYGIPQPTIKWFWHPCNHNHSEARCDFCSNNEESFILDADSNMGNRIESITQRMAIIEGKNKMASTLVVADSRISGIYICIASNKVGTVGRNISFYITDVPNGFHVNLEKMPTEGEDLKLSCTVNKFLYRDVTWILLRTVNNRTMHYSISKQKMAITKEHSITLNLTIMNVSLQDSGTYACRARNVYTGEEILQKKEITIRDQEAPYLLRNLSDHTVAISSSTTLDCHANGVPEPQITWFKNNHKIQQEPGIILGPGSSTLFIERVTEEDEGVYHCKATNQKGSVESSAYLTVQGTSDKSNLELITLTCTCVAATLFWLLLTLFIRKMKRSSSEIKTDYLSIIMDPDEVPLDEQCERLPYDASKWEFARERLKLGKSLGRGAFGKVVQASAFGIKKSPTCRTVAVKMLKEGATASEYKALMTELKILTHIGHHLNVVNLLGACTKQGGPLMVIVEYCKYGNLSNYLKSKRDLFFLNKDAALHMEPKKEKMEPGLEQGKKPRLDSVTSSESFASSGFQEDKSLSDVEEEEDSDGFYKEPITMEDLISYSFQVARGMEFLSSRKCIHRDLAARNILLSENNVVKICDFGLARDIYKNPDYVRKGDTRLPLKWMAPESIFDKIYSTKSDVWSYGVLLWEIFSLGGSPYPGVQMDEDFCSRLREGMRMRAPEYSTPEIYQIMLDCWHRDPKERPRFAELVEKLGDLLQANVQQDGKDYIPINAILTGNSGFTYSTPAFSEDFFKESISAPKFNSGSSDDVRYVNAFKFMSLERIKTFEELLPNATSMFDDYQGDSSTLLASPMLKRFTWTDSKPKASLKIDLRVTSKSKESGLSDVSRPSFCHSSCGHVSEGKRRFTYDHAELERKIACCSPPPDYNSVVLYSTPPI

SEQ ID NO: 23363 - DNA, 4413 bp, Homo sapiens
atcgaggtccgcgggaggctcggagcgcgccaggcggacactcctctcggctcctccccggcagcggcggcggctcggagcgggctccggggctcgggtgcagcggccagcgggcgcctggcggcgaggattacccggggaagtggttgtctcctggctggagccgcgagacgggcgctcagggcgcggggccggcggcggcgaacgagaggacggactctggcggccgggtcgttggccgcggggagcgcgggcaccgggcgagcaggccgcgtcgcgctcaccatggtcagctactgggacaccggggtcctgctgtgcgcgctgctcagctgtctgcttctcacaggatctagttcaggttcaaaattaaaagatcctgaactgagtttaaaaggcacccagcacatcatgcaagcaggccagacactgcatctccaatgcaggggggaagcagcccataaatggtctttgcctgaaatggtgagtaaggaaagcgaaaggctgagcataactaaatctgcctgtggaagaaatggcaaacaattctgcagtactttaaccttgaacacagctcaagcaaaccacactggcttctacagctgcaaatatctagctgtacctacttcaaagaagaaggaaacagaatctgcaatctatatatttattagtgatacaggtagacctttcgtagagatgtacagtgaaatccccgaaattatacacatgactgaaggaagggagctcgtcattccctgccgggttacgtcacctaacatcactgttactttaaaaaagtttccacttgacactttgatccctgatggaaaacgcataatctgggacagtagaaagggcttcatcatatcaaatgcaacgtacaaagaaatagggcttctgacctgtgaagcaacagtcaatgggcatttgtataagacaaactatctcacacatcgacaaaccaatacaatcatagatgtccaaataagcacaccacgcccagtcaaattacttagaggccatactcttgtcctcaattgtactgctaccactcccttgaacacgagagttcaaatgacctggagttaccctgatgaaaaaaataagagagcttccgtaaggcgacgaattgaccaaagcaattcccatgccaacatattctacagtgttcttactattgacaaaatgcagaacaaagacaaaggactttatacttgtcgtgtaaggagtggaccatcattcaaatctgttaacacctcagtgcatatatatgataaagcattcatcactgtgaaacatcgaaaacagcaggtgcttgaaaccgtagctggcaagcggtcttaccggctctctatgaaagtgaaggcatttccctcgccggaagttgtatggttaaaagatgggttacctgcgactgagaaatctgctcgctatttgactcgtggctactcgttaattatcaaggacgtaactgaagaggatgcagggaattatacaatcttgctgagcataaaacagtcaaatgtgtttaaaaacctcactgccactctaattgtcaatgtgaaaccccagatttacgaaaaggccgtgtcatcgtttccagacccggctctctacccactgggcagcagacaaatcctgacttgtaccgcatatggtatccctcaacctacaatcaagtggttctggcacccctgtaaccataatcattccgaagcaaggtgtgacttttgttccaataatgaagagtcctttatcctggatgctgacagcaacatgggaaacagaattgagagcatcactcagcgcatggcaataatagaaggaaagaataagatggctagcaccttggttgtggctgactctagaatttctggaatctacatttgcatagcttccaataaagttgggactgtgggaagaaacataagcttttatatcacagatgtgccaaatgggtttcatgttaacttggaaaaaatgccgacggaaggagaggacctgaaactgtcttgcacagttaacaagttcttatacagagacgttacttggattttactgcggacagttaataacagaacaatgcactacagtattagcaagcaaaaaatggccatcactaaggagcactccatcactcttaatcttaccatcatgaatgtttccctgcaagattcaggcacctatgcctgcagagccaggaatgtatacacaggggaagaaatcctccagaagaaagaaattacaatcagagatcaggaagcaccatacctcctgcgaaacctcagtgatcacacagtggccatcagcagttccaccactttagactgtcatgctaatggtgtccccgagcctcagatcacttggtttaaaaacaaccacaaaatacaacaagagcctggaattattttaggaccaggaagcagcacgctgtttattgaaagagtcacagaagaggatgaaggtgtctatcactgcaaagccaccaaccagaagggctctgtggaaagttcagcatacctcactgttcaaggaacctcggacaagtctaatctggagctgatcactctaacatgcacctgtgtggctgcgactctcttctggctcctattaaccctctttatccgaaaaatgaaaaggtcttcttctgaaataaagactgactacctatcaattataatggacccagatgaagttcctttggatgagcagtgtgagcggctcccttatgatgccagcaagtgggagtttgcccgggagagacttaaactgggcaaatcacttggaagaggggcttttggaaaagtggttcaagcatcagcatttggcattaagaaatcacctacgtgccggactgtggctgtgaaaatgctgaaagagggggccacggccagcgagtacaaagctctgatgactgagctaaaaatcttgacccacattggccaccatctgaacgtggttaacctgctgggagcctgcaccaagcaaggagggcctctgatggtgattgttgaatactgcaaatatggaaatctctccaactacctcaagagcaaacgtgacttattttttctcaacaaggatgcagcactacacatggagcctaagaaagaaaaaatggagccaggcctggaacaaggcaagaaaccaagactagatagcgtcaccagcagcgaaagctttgcgagctccggctttcaggaagataaaagtctgagtgatgttgaggaagaggaggattctgacggtttctacaaggagcccatcactatggaagatctgatttcttacagttttcaagtggccagaggcatggagttcctgtcttccagaaagtgcattcatcgggacctggcagcgagaaacattcttttatctgagaacaacgtggtgaagatttgtgattttggccttgcccgggatatttataagaaccccgattatgtgagaaaaggagatactcgacttcctctgaaatggatggctcctgaatctatctttgacaaaatctacagcaccaagagcgacgtgtggtcttacggagtattgctgtgggaaatcttctccttaggtgggtctccatacccaggagtacaaatggatgaggacttttgcagtcgcctgagggaaggcatgaggatgagagctcctgagtactctactcctgaaatctatcagatcatgctggactgctggcacagagacccaaaagaaaggccaagatttgcagaacttgtggaaaaactaggtgatttgcttcaagcaaatgtacaacaggatggtaaagactacatcccaatcaatgccatactgacaggaaatagtgggtttacatactcaactcctgccttctctgaggacttcttcaaggaaagtatttcagctccgaagtttaattcaggaagctctgatgatgtcagatacgtaaatgctttcaagttcatgagcctggaaagaatcaaaacctttgaagaacttttaccgaatgccacctccatgtttgatgactaccagggcgacagcagcactctgttggcctctcccatgctgaagcgcttcacctggactgacagcaaacccaaggcctcgctcaagattgacttgagagtaaccagtaaaagtaaggagtcggggctgtctgatgtcagcaggcccagtttctgccattccagctgtgggcacgtcagcgaaggcaagcgcaggttcacctacgaccacgctgagctggaaaggaaaatcgcgtgctgctccccgcccccagactacaactcggtggtcctgtactccaccccacccatctagagtttgacacgaagccttatttctagaagcacatgtgtatttatacccccaggaaactagcttttgccagtattatgcatatataagtttacacctttatctttccatggg

SEQ ID NO: 23364 - protein, 1338 aa, Homo sapiens; identical to SEQ ID NO: 23362

SEQ ID NO: 23365 - DNA, 382 bp, Homo sapiens
gatgatgacagccctccctttgtagtacgtaaggcaatgcataggatgatcactgctctccaactatttctgttgctgttttccccaccagctatcagatcatgctggactgctggcacagagacccaaaagaaaggccaagatttgcagaacttgtggaaaaactaggtgatttgcttcaagcaaatgtacaacaggatggtaaagactacatcccaatcaatgccatactgacaggaaatagtgggtttacatactcaactcctgccttctctgaggacttcttcaaggaaagtatttcagctccgaagtttaattcaggaagctctgatgatgtcaggtaagatttctttctcaaactttatatcacagaattttccaa

SEQ ID NO: 23366 - protein, 80 aa, Homo sapiens
MLDCWHRDPKERPRFAELVEKLGDLLQANVQQDGKDYIPINAILTGNSGFTYSTPAFSEDFFKESISAPKFNSGSSDDVR

SEQ ID NO: 23367 - DNA, 767 bp, Homo sapiens
gaagaaaccacatggtcaccattcagaagcactgaaatcactcatctttttagtgtcatttatggattaatcgtttttcattttccttttcttttttggagatggagtctcgttctgtcatccatgctggagtacagtggcatgatcttggctcactgcgacctccatctcctgggttcaagcaattctcctgcctcagcctcccaaagtgttggaactataagcgtgagccaccgtgcctggccttcattttccaattttgtcagcctttgccattttactcaacttgaatttatgttcctcagacatagttttccaaaaatccaaagtttgactggatatataaaatctcctttgtggaaagtcaatctgacatcttgcctctagctttcctgggtcacttttagccatttctatattttggctcttctggttcttagttcggacactgctcttagctaatcaattaaaggctgccaatctagccaggcacagtggctcacacctgtaatcccagcactttgggaggctgaggctggtggatcacctgaggtcaggagttggagaccagcctggccaacgtggtgaaaccccatctcaactaaaaacacaaaaattagccgggtatggtggtgggcacctgtaatcccagctactcaggaggctgaggcagaagaatcgcttgaacccggaaggtggagattgcagtgcgcagagattgcaccattgcactccagcctgggcaacaagagcaaaactctgtctca

SEQ ID NO: 23368 - protein, 87 aa, Homo sapiens [sequence omitted]

SEQ ID NO: 23369 - DNA, 6502 bp, Homo sapiens
atcgaggtccgcgggaggctcggagcgcgccaggcggacactcctctcggctcctccccggcagcggcggcggctcggagcgggctccggggctcgggtgcagcggccagcgggcgcctggcggcgaggattacccggggaagtggttgtctcctggctggagccgcgagacgggcgctcagggcgcggggccggcggcggcgaacgagaggacggactctggcggccgggtcgttggccgcggggagcgcgggcaccgggcgagcaggccgcgtcgcgctcaccatggtcagctactgggacaccggggtcctgctgtgcgcgctgctcagctgtctgcttctcacaggatctagttcaggttcaaaattaaaagatcctgaactgagtttaaaaggcacccagcacatcatgcaagcaggccagacactgcatctccaatgcaggggggaagcagcccataaatggtctttgcctgaaatggtgagtaaggaaagcgaaaggctgagcataactaaatctgcctgtggaagaaatggcaaacaattctgcagtactttaaccttgaacacagctcaagcaaaccacactggcttctacagctgcaaatatctagctgtacctacttcaaagaagaaggaaacagaatctgcaatctatatatttattagtgatacaggtagacctttcgtagagatgtacagtgaaatccccgaaattatacacatgactgaaggaagggagctcgtcattccctgccgggttacgtcacctaacatcactgttactttaaaaaagtttccacttgacactttgatccctgatggaaaacgcataatctgggacagtagaaagggcttcatcatatcaaatgcaacgtacaaagaaatagggcttctgacctgtgaagcaacagtcaatgggcatttgtataagacaaactatctcacacatcgacaaaccaatacaatcatagatgtccaaataagcacaccacgcccagtcaaattacttagaggccatactcttgtcctcaattgtactgctaccactcccttgaacacgagagttcaaatgacctggagttaccctgatgaaaaaaataagagagcttccgtaaggcgacgaattgaccaaagcaattcccatgccaacatattctacagtgttcttactattgacaaaatgcagaacaaagacaaaggactttatacttgtcgtgtaaggagtggaccatcattcaaatctgttaacacctcagtgcatatatatgataaagcattcatcactgtgaaacatcgaaaacagcaggtgcttgaaaccgtagctggcaagcggtcttaccggctctctatgaaagtgaaggcatttccctcgccggaagttgtatggttaaaagatgggttacctgcgactgagaaatctgctcgctatttgactcgtggctactcgttaattatcaaggacgtaactgaagaggatgcagggaattatacaatcttgctgagcataaaacagtcaaatgtgtttaaaaacctcactgccactctaattgtcaatgtgaaaccccagatttacgaaaaggccgtgtcatcgtttccagacccggctctctacccactgggcagcagacaaatcctgacttgtaccgcatatggtatccctcaacctacaatcaagtggttctggcacccctgtaaccataatcattccgaagcaaggtgtgacttttgttccaataatgaagagtcctttatcctggatgctgacagcaacatgggaaacagaattgagagcatcactcagcgcatggcaataatagaaggaaagaataagatggctagcaccttggttgtggctgactctagaatttctggaatctacatttgcatagcttccaataaagttgggactgtgggaagaaacataagcttttatatcacagatgtgccaaatgggtttcatgttaacttggaaaaaatgccgacggaaggagaggacctgaaactgtcttgcacagttaacaagttcttatacagagacgttacttggattttactgcggacagttaataacagaacaatgcactacagtattagcaagcaaaaaatggccatcactaaggagcactccatcactcttaatcttaccatcatgaatgtttccctgcaagattcaggcacctatgcctgcagagccaggaatgtatacacaggggaagaaatcctccagaagaaagaaattacaatcagaggtgagcactgcaacaaaaaggctgttttctctcggatctccaaatttaaaagcacaaggaatgattgtaccacacaaagtaatgtaaaacattaaaggactcattaaaaagtaacagttgtctcatatcatcttgatttattgtcactgttgctaactttcaggctcggaggagatgctcctcccaaaatgagttcggagatgatagcagtaataatgagacccccgggccccagctctgggccccccattcaggccgagggggctgctccggggggccgacttggtgcacgtttggatttggaggatccctgcactgccttctctgtgtttgttgctcttgctgttttctcctgcctgataaacaacaacttgggatgatcctttccttccattttgatgccaacctctttttatttttaagtgttgaagctgcacaaactgaataatttaaacaaatgctggtttctgccaaagatggacacgaataagttaattttccagctcagaatgagtacagttgaatttgagactctgtcggacttctgcctggttttatttgggactatttcatctgctcttgatttgtaaatagcacctggatagcaagttataatgcttatttatttgaaaatgctttttttttttttacgttaagcacatttatcttgaactggagcttctaaaatgggccccaggggtgcaagatgttggtgtaattcagagatagtaaaggtttatcgcagtgtgaattataagagtccatccaaatcaacgtcccctccctcctctcatgcgatccaggtaattatgcagttagtgccacagtagactagcctagcaaagggtttgctccttgctgtctctgactgcaccacacagctattgatggcagctgaaagaaagtggatcatgccttaattttaaatattcctgtcctctggttattattttaaggaacttcatcatgttaaaatgacagcattcaaaggtgtaccacaatcaatttatcaaggaaataaaggctattgtaaccagagatttaatgcattcttctaaatgtaaatttaaaatttgccctttaaaaaagtccactttccccatatgcaaatgttaataggatttttatggggattaagaagcggcaaaactacagaagcagaattcaaagtaatttaaaaaatacacaccagttttaaatcaagagaagttgtaatctcttgttttaagcttgcgtttgagggaaaatgactttttcaccaatttaatatgcattgttctgttgtttttatttatgattgatcattatatgtgacttgcataaactatttaaaaaaaaaaactataatgaccaaaatagccatggctgagaaacacagtggctgggcagttcaataggaggtgacaatatgacaacttctcaagcttgggaactcaccagactgtttcctcctttaggtaacagattctgtcccacggctaaacttgtctttcacgtgggaattgcttttgtcaaacgtgaaagagtaaacaatagcatttccccagaatgccagttttatggagccccaaatgctctgaaaacaattagtaacctggaagttgtcagcccaaaggaaagaaaaatcaattgtatcttgaaattttacctatggctctttggcctggcttctttgttcattataagttagtgtgttccttcaggaaacaatgccttaataccatagaacatgggggccttaatagttgctaacattaaaaaagcaaacagaatgattgagggatccttatgaaaacaaaatggtgaattggacatgcagaacctaccatttccttcccctgtttgcaatttttgtggggaggggaggatgttagtatttacaaaagatgattttaagaacttccaagagatgagtttaagaattccatagagtattagttgttcactgtgtaattaatccttccggagagtctttttttttttttttaaagaaacttttgggtgggttttgttttttattagttaccctaggggtatgttaccctggggtatgaagggaggtgaagataacggaggggggagaaaaaaaaaaggagaaaaaaggagcctaaaatggggaataattgaaatggaacagggggtgtgaggctggttcctcagtccccattccaaacggaggatagaagctgtgtatttatgtgacctggcagatctctggggccataacactgaaaagtgaaagaacctggtgggcagctatctttggctactgataaccagcagaaatgtctgttaattctgattttctcaatttgaagggatcagctacactgttaaattttggaaagccactacctacttccatcaagtaacttaggtttcgaaatatgggttcaacgcacctcccttattcaaaatgtcaaaatagattattataatgtataaagtaagaattgacaaaatatgattcttgggttgattggtcatttagaaactagccaaaagtgagacttttaatgtagaacatttttcagaaatgggtacaaagaaaaatgcatattactgtatatttcagagtgtttatgtgaaccttgtatttaattgagagtcccatgtacgttctgcagcctttttgctgcttctatcatctgaagtttgtgtagtacaaataaggcctttgggattcttaatgacatttatgttaaaatgttctcttctctttaaacaccgttttccaatccacctgtcagggagtccaaatcgtgtctgtgttgatgatgctatactttgtagctagaaaaacaattttagtgttgtgggctctgtattcagacttcctttttacaagaccgatgggcagtgatagattattttatcatatttaatgcatgggaaatagtgtgctgaggaagctattaaaagtataactcagtgaattgggtctgagttttaaatgagatatttcaaaattggcttgccactgtaaaagcgactaaataataatatgatactgttctttatgatcttgtcatgtttcactgatatgtttggggtcttcactatgtaaaaaatgtcaaaattgtaatgagcaagcatgtacaagtagtcgtaaatcaaaggttttaaacaggactgcattttcaattaggaaaagctgtttggcagatagcatccaatgcaaaaacagaaatatcgtaacgttctgcttagtgggcaagataagataggaaagacatgctcaaagaggcaaaagaatcattgctatcattcattctacactagtttgaagaagtttttgtacatcagagcacttccttcagcacacttttttgccttcagatttcattttttataaaatgagaagactaatgataaactgtagaaatcaaaatttattgagaaatctgtttctcctaacagatagtaaccctgccatgatatactacttcaacaatgttataaaatttatgtgataatatacattttaacctgggatttctaaattgctttaacaaatgctaatcctgagagttgccctgcaggactcaaaagggaaaggttttgggacgtggcagaaccctgcagggacatggaattaaggccattgcaatgtatcatctttgtagcattgtcatcactcctaagctgccttcacagttttagtacactaagatgaggaaatcgaaaatgggcagagaaagctcatactgtataattgaagacagtgacagagaacgtgtcagttatgccaaaactcttttgatttctgttccaggatttccaacaagaggggaaaggaatgacttgggagggtgggaaagacattaggagttgtttttattttttaccttggaagctttagctaccaatccagtaccctcctaactagaatgtatacacatcagcaggactgactgactacttcattagagatatactgtactcattgggggccttgggggtactgctgttcttatgtgggattttaatgttgtaatgtattgcatcttaatgtattgaattcattttgttgtactatattggttggcattttattaaaataaattgtattgtatcatatttgtatgttttaagagaaaataatataaaatacaatatttgtactattatatagtgcaaaaactacaaatctgtgcctctgcctcttgaattaattctttggttgcttgcatttgggaagggaatggagaaaggaaagaaccaataaagctttcaaagttcaagaaa

SEQ ID NO: 23370 - protein, 687 aa, Homo sapiens
MVSYWDTGVLLCALLSCLLLTGSSSGSKLKDPELSLKGTQHIMQAGQTLHLQCRGEAAHKWSLPEMVSKESERLSITKSACGRNGKQFCSTLTLNTAQANHTGFYSCKYLAVPTSKKKETESAIYIFISDTGRPFVEMYSEIPEIIHMTEGRELVIPCRVTSPNITVTLKKFPLDTLIPDGKRIIWDSRKGFIISNATYKEIGLLTCEATVNGHLYKTNYLTHRQTNTIIDVQISTPRPVKLLRGHTLVLNCTATTPLNTRVQMTWSYPDEKNKRASVRRRIDQSNSHANIFYSVLTIDKMQNKDKGLYTCRVRSGPSFKSVNTSVHIYDKAFITVKHRKQQVLETVAGKRSYRLSMKVKAFPSPEVVWLKDGLPATEKSARYLTRGYSLIIKDVTEEDAGNYTILLSIKQSNVFKNLTATLIVNVKPQIYEKAVSSFPDPALYPLGSRQILTCTAYGIPQPTIKWFWHPCNHNHSEARCDFCSNNEESFILDADSNMGNRIESITQRMAIIEGKNKMASTLVVADSRISGIYICIASNKVGTVGRNISFYITDVPNGFHVNLEKMPTEGEDLKLSCTVNKFLYRDVTWILLRTVNNRTMHYSISKQKMAITKEHSITLNLTIMNVSLQDSGTYACRARNVYTGEEILQKKEITIRGEHCNKKAVFSRISKFKSTRNDCTTQSNVKH

SEQ ID NO: 23371 - DNA, 6401 bp, Homo sapiens
atcgaggtccgcgggaggctcggagcgcgccaggcggacactcctctcggctcctccccggcagcggcggcggctcggagcgggctccggggctcgggtgcagcggccagcgggcgcctggcggcgaggattacccggggaagtggttgtctcctggctggagccgcgagacgggcgctcagggcgcggggccggcggcggcgaacgagaggacggactctggcggccgggtcgttggccgcggggagcgcgggcaccgggcgagcaggccgcgtcgcgctcaccatggtcagctactgggacaccggggtcctgctgtgcgcgctgctcagctgtctgcttctcacaggatctagttcaggttcaaaattaaaagatcctgaactgagtttaaaaggcacccagcacatcatgcaagcaggccagacactgcatctccaatgcaggggggaagcagcccataaatggtctttgcctgaaatggtgagtaaggaaagcgaaaggctgagcataactaaatctgcctgtggaagaaatggcaaacaattctgcagtactttaaccttgaacacagctcaagcaaaccacactggcttctacagctgcaaatatctagctgtacctacttcaaagaagaaggaaacagaatctgcaatctatatatttattagtgatacaggtagacctttcgtagagatgtacagtgaaatccccgaaattatacacatgactgaaggaagggagctcgtcattccctgccgggttacgtcacctaacatcactgttactttaaaaaagtttccacttgacactttgatccctgatggaaaacgcataatctgggacagtagaaagggcttcatcatatcaaatgcaacgtacaaagaaatagggcttctgacctgtgaagcaacagtcaatgggcatttgtataagacaaactatctcacacatcgacaaaccaatacaatcatagatgtccaaataagcacaccacgcccagtcaaattacttagaggccatactcttgtcctcaattgtactgctaccactcccttgaacacgagagttcaaatgacctggagttaccctgatgaaaaaaataagagagcttccgtaaggcgacgaattgaccaaagcaattcccatgccaacatattctacagtgttcttactattgacaaaatgcagaacaaagacaaaggactttatacttgtcgtgtaaggagtggaccatcattcaaatctgttaacacctcagtgcatatatatgataaagcattcatcactgtgaaacatcgaaaacagcaggtgcttgaaaccgtagctggcaagcggtcttaccggctctctatgaaagtgaaggcatttccctcgccggaagttgtatggttaaaagatgggttacctgcgactgagaaatctgctcgctatttgactcgtggctactcgttaattatcaaggacgtaactgaagaggatgcagggaattatacaatcttgctgagcataaaacagtcaaatgtgtttaaaaacctcactgccactctaattgtcaatgtgaaaccccagatttacgaaaaggccgtgtcatcgtttccagacccggctctctacccactgggcagcagacaaatcctgacttgtaccgcatatggtatccctcaacctacaatcaagtggttctggcacccctgtaaccataatcattccgaagcaaggtgtgacttttgttccaataatgaagagtcctttatcctggatgctgacagcaacatgggaaacagaattgagagcatcactcagcgcatggcaataatagaaggaaagaataagatggctagcaccttggttgtggctgactctagaatttctggaatctacatttgcatagcttccaataaagttgggactgtgggaagaaacataagcttttatatcacagatgtgccaaatgggtttcatgttaacttggaaaaaatgccgacggaaggagaggacctgaaactgtcttgcacagttaacaagttcttatacagagacgttacttggattttactgcggacagttaataacagaacaatgcactacagtattagcaagcaaaaaatggccatcactaaggagcactccatcactcttaatcttaccatcatgaatgtttccctgcaagattcaggcacctatgcctgcagagccaggaatgtatacacaggggaagaaatcctccagaagaaagaaattacaatcagaggtgagcactgcaacaaaaaggctgttttctctcggatctccaaatttaaaagcacaaggaatgattgtaccacacaaagtaatgtaaaacattaaaggactcattaaaaagtaacagttgtctcatatcatcttgatttattgtcactgttgctaactttcaggctcggaggagatgctcctcccaaaatgagttcggagatgatagcagtaataatgagacccccgggccccagctctgggccccccattcaggccgagggggctgctccggggggccgacttggtgcacgtttggatttggaggatccctgcactgccttctctgtgtttgttgctcttgctgttttctcctgcctgataaacaacaacttgggatgatcctttccttccattttgatgccaacctctttttatttttaagtgttgaagctgcacaaactgaataatttaaacaaatgctggtttctgccaaagatggacacgaataagttaattttccagctcagaatgagtacagttgaatttgagactctgtcggacttctgcctggttttatttgggactatttcatctgctcttgatttgtaaatagcacctggatagcaagttataatgcttatttatttgaaaatgctttttttttttttacgttaagcacatttatcttgaactggagcttctaaaatgggccccaggggtgcaagatgttggtgtaattcagagatagtaaaggtttatcgcagtgtgaattataagagtccatccaaatcaacgtcccctccctcctctcatgcgatccaggtaattatgcagttagtgccacagtagactagcctagcaaagggtttgctccttgctgtctctgactgcaccacacagctattgatggcagctgaaagaaagtggatcatgccttaattttaaatattcctgtcctctggttattattttaaggaacttcatcatgttaaaatgacagcattcaaaggtgtaccacaatcaatttatcaaggaaataaaggctattgtaaccagagatttaatgcattcttctaaatgtaaatttaaaatttgccctttaaaaaagtccactttccccatatgcaaatgttaataggatttttatggggattaagaagcggcaaaactacagaagcagaattcaaagtaatttaaaaaatacacaccagttttaaatcaagagaagttgtaatctcttgttttaagcttgcgtttgagggaaaatgactttttcaccaatttaatatgcattgttctgttgtttttatttatgattgatcattatatgtgacttgcataaactatttaaaaaaaaaaactataatgaccaaaatagccatggctgagaaacacagtggctgggcagttcaataggaggtgacaatatgacaacttctcaagcttgggaactcaccagactgtttcctcctttaggtaacagattctgtcccacggctaaacttgtctttcacgtgggaattgcttttgtcaaacgtgaaagagtaaacaatagcatttccccagaatgccagttttatggagccccaaatgctctgaaaacaattagtaacctggaagttgtcagcccaaaggaaagaaaaatcaattgtatcttgaaattttacctatggctctttggcctggcttctttgttcattataagttagtgtgttccttcaggaaacaatgccttaataccatagaacatgggggccttaatagttgctaacattaaaaaagcaaacagaatgattgagggatccttatgaaaacaaaatggtgaattggacatgcagaacctaccatttccttcccctgtttgcaatttttgtggggaggggaggatgttagtatttacaaaagatgattttaagaacttccaagagatgagtttaagaattccatagagtattagttgttcactgtgtaattaatccttccggagagtctttttttttttttttaaagaaacttttgggtgggttttgttttttattagttaccctaggggtatgttaccctggggtatgaagggaggtgaagataacggaggggggagaaaaaaaaaaggagaaaaaaggagcctaaaatggggaataattgaaatggaacagggggtgtgaggctggttcctcagtccccattccaaacggaggatagaagctgtgtatttatgtgacctggcagatctctggggccataacactgaaaagtgaaagaacctggtgggcagctatctttggctactgataaccagcagaaatgtctgttaattctgattttctcaatttgaagggatcagctacactgttaaattttggaaagccactacctacttccatcaagtaacttaggtttcgaaatatgggttcaacgcacctcccttattcaaaatgtcaaaatagattattataatgtataaagtaagaattgacaaaatatgattcttgggttgattggtcatttagaaactagccaaaagtgagacttttaatgtagaacatttttcagaaatgggtacaaagaaaaatgcatattactgtatatttcagagtgtttatgtgaaccttgtatttaattgagagtcccatgtacgttctgcagcctttttgctgcttctatcatctgaagtttgtgtagtacaaataaggcctttgggattcttaatgacatttatgttaaaatgttctcttctctttaaacaccgttttccaatccacctgtcagggagtccaaatcgtgtctgtgttgatgatgctatactttgtagctagaaaaacaattttagtgttgtgggctctgtattcagacttcctttttacaagaccgatgggcagtgatagattattttatcatatttaatgcatgggaaatagtgtgctgaggaagctattaaaagtataactcagtgaattgggtctgagttttaaatgagatatttcaaaattggcttgccactgtaaaagcgactaaataataatatgatactgttctttatgatcttgtcatgtttcactgatatgtttggggtcttcactatgtaaaaaatgtcaaaattgtaatgagcaagcatgtacaagtagtcgtaaatcaaaggttttaaacaggactgcattttcaattaggaaaagctgtttggcagatagcatccaatgcaaaaacagaaatatcgtaacgttctgcttagtgggcaagataagataggaaagacatgctcaaagaggcaaaagaatcattgctatcattcattctacactagtttgaagaagtttttgtacatcagagcacttccttcagcacacttttttgccttcagatttcattttttataaaatgagaagactaatgataaactgtagaaatcaaaatttattgagaaatctgtttctcctaacagatagtaaccctgccatgatatactacttcaacaatgttataaaatttatgtgataatatacattttaacctgggatttctaaattgctttaacaaatgctaatcctgagagttgccctgcaggactcaaaagggaaaggttttgggacgtggcagaaccctgcagggacatggaattaaggccattgcaatgtatcatctttgtagcattgtcatcactcctaagctgccttcacagttttagtacactaagatgaggaaatcgaaaatgggcagagaaagctcatactgtataattgaagacagtgacagagaacgtgtcagttatgccaaaactcttttgatttctgttccaggatttccaacaagaggggaaaggaatgacttgggagggtgggaaagacattaggagttgtttttattttttaccttggaagctttagctaccaatccagtaccctcctaactagaatgtatacacatcagcaggactgactgactacttcattagagatatactgtactcattgggggccttgggggtactgctgttcttatgtgggattttaatgttgtaatgtattgcatcttaatgtattgaattcattttgttgtactatattggttggcattttattaaaataaattgtattgtatcatatttgtatgttttaagagaaaataatataaaatacaatatttgtactattatatagtgcaaaaactac

SEQ ID NO: 23372 - protein, 687 aa, Homo sapiens; identical to SEQ ID NO: 23370

SEQ ID NO: 23373 - DNA, 2366 bp, Homo sapiens
atcgaggtccgcgggaggctcggagcgcgccaggcggacactcctctcggctcctccccggcagcggcggcggctcggagcgggctccggggctcgggtgcagcggccagcgggcgcctggcggcgaggattacccggggaagtggttgtctcctggctggagccgcgagacgggcgctcagggcgcggggccggcggcggcgaacgagaggacggactctggcggccgggtcgttggccgcggggagcgcgggcaccgggcgagcaggccgcgtcgcgctcaccatggtcagctactgggacaccggggtcctgctgtgcgcgctgctcagctgtctgcttctcacaggatctagttcaggttcaaaattaaaagatcctgaactgagtttaaaaggcacccagcacatcatgcaagcaggccagacactgcatctccaatgcaggggggaagcagcccataaatggtctttgcctgaaatggtgagtaaggaaagcgaaaggctgagcataactaaatctgcctgtggaagaaatggcaaacaattctgcagtactttaaccttgaacacagctcaagcaaaccacactggcttctacagctgcaaatatctagctgtacctacttcaaagaagaaggaaacagaatctgcaatctatatatttattagtgatacaggtagacctttcgtagagatgtacagtgaaatccccgaaattatacacatgactgaaggaagggagctcgtcattccctgccgggttacgtcacctaacatcactgttactttaaaaaagtttccacttgacactttgatccctgatggaaaacgcataatctgggacagtagaaagggcttcatcatatcaaatgcaacgtacaaagaaatagggcttctgacctgtgaagcaacagtcaatgggcatttgtataagacaaactatctcacacatcgacaaaccaatacaatcatagatgtccaaataagcacaccacgcccagtcaaattacttagaggccatactcttgtcctcaattgtactgctaccactcccttgaacacgagagttcaaatgacctggagttaccctgatgaaaaaaataagagagcttccgtaaggcgacgaattgaccaaagcaattcccatgccaacatattctacagtgttcttactattgacaaaatgcagaacaaagacaaaggactttatacttgtcgtgtaaggagtggaccatcattcaaatctgttaacacctcagtgcatatatatgataaagcattcatcactgtgaaacatcgaaaacagcaggtgcttgaaaccgtagctggcaagcggtcttaccggctctctatgaaagtgaaggcatttccctcgccggaagttgtatggttaaaagatgggttacctgcgactgagaaatctgctcgctatttgactcgtggctactcgttaattatcaaggacgtaactgaagaggatgcagggaattatacaatcttgctgagcataaaacagtcaaatgtgtttaaaaacctcactgccactctaattgtcaatgtgaaaccccagatttacgaaaaggccgtgtcatcgtttccagacccggctctctacccactgggcagcagacaaatcctgacttgtaccgcatatggtatccctcaacctacaatcaagtggttctggcacccctgtaaccataatcattccgaagcaaggtgtgacttttgttccaataatgaagagtcctttatcctggatgctgacagcaacatgggaaacagaattgagagcatcactcagcgcatggcaataatagaaggaaagaataagatggctagcaccttggttgtggctgactctagaatttctggaatctacatttgcatagcttccaataaagttgggactgtgggaagaaacataagcttttatatcacagatgtgccaaatgggtttcatgttaacttggaaaaaatgccgacggaaggagaggacctgaaactgtcttgcacagttaacaagttcttatacagagacgttacttggattttactgcggacagttaataacagaacaatgcactacagtattagcaagcaaaaaatggccatcactaaggagcactccatcactcttaatcttaccatcatgaatgtttccctgcaagattcaggcacctatgcctgcagagccaggaatgtatacacaggggaagaaatcctccagaagaaagaaattacaatcagaggtgagcactgcaacaaaaaggctgttttctctcggatctccaaatttaaaagcacaaggaatgattgtaccacacaaagtaatgtaaaacattaaaggactcattaaaaagt

SEQ ID NO: 23374 - protein, 687 aa, Homo sapiens; identical to SEQ ID NO: 23370

SEQ ID NO: 23375 - DNA, 1113 bp, Homo sapiens
cgggaggctcggagcgcgccaggcggacactcctctcggctcctccccggcagcggcggcggctcggagcgggctccggggctcgggtgcagcggccagcgggcgcctggcggcgaggattacccggggaagtggttgtctcctggctggagccgcgagacgggcgctcagggcgcggggccggcggcggcgaacgagaggacggactctggcggccgggtcgttggccgcggggagcgcgggcaccgggcgagcaggccgcgtcgcgctcaccatggtcagctactgggacaccggggtcctgctgtgcgcgctgctcagctgtctgcttctcacaggatctagttcaggttcaaaattaaaagatcctgaactgagtttaaaaggcacccagcacatcatgcaagcaggccagacactgcatctccaatgcaggggggaagcagcccataaatggtctttgcctgaaatggtgagtaaggaaagcgaaaggctgagcataactaaatctgcctgtggaagaaatggcaaacaattctgcagtactttaaccttgaacacagctcaagcaaaccacactggcttctacagctgcaaatatctagctgtacctacttcaaagaagaaggaaacagaatctgcaatctatatatttattagtggtaagacttccattttctacattctgtttgcttttgctttgcaaatgagtcataaatctaccctgatccattggaaaggttgctttcctagtgagtatgaaagaaacgggttaggaaagagattccatcctagttgtagacactttcgtggatgtcaattttaaccagaattgtcaaggcccagttagtcactatgtgctccacaaagagagagactggtctgtataggtcacctctgtacccacagctcctagcacagtatgtggcccatagttggatgaataagtgaataaaaggattttagttctatttcttagttattgagaagcccaaaatagaatacatgatttttgtcatttaacacagctgcattctcttatatgttggaactgtaaaatactgttgtttctactaaattaataaacgcaatgttgctgttatctcgagtgtt

SEQ ID NO: 23376 - protein, 183 aa, Homo sapiens
MVSYWDTGVLLCALLSCLLLTGSSSGSKLKDPELSLKGTQHIMQAGQTLHLQCRGEAAHKWSLPEMVSKESERLSITKSACGRNGKQFCSTLTLNTAQANHTGFYSCKYLAVPTSKKKETESAIYIFISGKTSIFYILFAFALQMSHKSTLIHWKGCFPSEYERNGLGKRFHPSCRHFRGCQF

SEQ ID NO: 23377 - DNA, 626 bp, Homo sapiens
ggatgtgggggccagccctcggaaacggaagtgagcggcggggtcgactgacggtaacggggcagagaggctgttcgcagagctgcggaagatgaatgccagaggacttggatctgagctaaaggacagtattccagttactgaactttcagcaagtggaccttttgaaagtcatgatcttcttcggaaaggtttttcttgtgtgaaaaatgaacttttgcctagtcatccccttgaattatcagaaaaaaatttccagctcaaccaagataaaatgaatttttccacactgagaaacattcagggtctatttgctccgctaaaattacagatggaattcaaggcagtgcagcaggttcagcgtcttccatttctttcaagctcaaatctttcactggatgttttgaggggtaatgatgagactattggatttgaggatattcttaatgatccatcacaaagcgaagtcatgggagagccacacttgatggtggaatataaacttggtttactgtaatagtgtgctgttcatggaaaccgagggctgcatcttgtttatagtcatctttgtactgtaatttgatgtacacaacattaaaagtactgacacctgagaatttctgctc

SEQ ID NO: 23378 - protein, 141 aa, Homo sapiens; identical to SEQ ID NO: 3097

SEQ ID NO: 23379 - DNA, 708 bp, Homo sapiens
ggatgtgggggccagccctcggaaacggaagtgagcggcggggtcgactgacggtaacggggcagagaggctgttcgcagagctgcggaagatgaatgccagaggacttggatctgagctaaaggacagtattccagttactgaactttcagcaagtggaccttttgaaagtcatgatcttcttcggaaaggtttttcttgtgtgaaaaatgaacttttgcctagtcatccccttgaattatcagaaaaaaatttccagctcaaccaagataaaatgaatttttccacactgagaaacattcagggtctatttgctccgctaaaattacagatggaattcaaggcagtgcagcaggttcagcgtcttccatttctttcaagctcaaatctttcactggatgttttgaggggtaatgatgagactattggatttgaggatattcttaatgatccatcacaaagcgaagtcatgggagagccacacttgatggtggaatataaacttggtttactgtaatagtgtgctgttcatggaaaccgagggctgcatcttgtttatagtcatctttgtactgtaatttgatgtacacaacattaaaagtactgacacctgagaatttctgctcaagtagtatcagtgatcatttaaaatttggaggggtctttggtttacagccatgtgacaattaaaagcactaaagggagatc

SEQ ID NO: 23380 - protein, 141 aa, Homo sapiens; identical to SEQ ID NO: 3097

SEQ ID NO: 23381 - DNA, 753 bp, Homo sapiens
ggatgtgggggccagccctcggaaacggaagtgagcggcggggtcgactgacggtaacggggcagagaggctgttcgcagagctgcggaagatgaatgccagaggacttggatctgagctaaaggacagtattccagttactgaactttcagcaagtggaccttttgaaagtcatgatcttcttcggaaaggtttttcttgtgtgaaaaatgaacttttgcctagtcatccccttgaattatcagaaaaaaatttccagctcaaccaagataaaatgaatttttccacactgagaaacattcagggtctatttgctccgctaaaattacagatggaattcaaggcagtgcagcaggttcagcgtcttccatttctttcaagctcaaatctttcactggatgttttgaggggtaatgatgagactattggatttgaggatattcttaatgatccatcacaaagcgaagtcatgggagagccacacttgatggtggaatataaacttggtttactgtaatagtgtgctgttcatggaaaccgagggctgcatcttgtttatagtcatctttgtactgtaatttgatgtacacaacattaaaagtactgacacctgagaatttctgctcaagtagtatcagtgatcatttaaaatttggaggggtctttggtttacagccatgtgacaattaaaagcactaaagggagatcatgttaaagctcttaatttatattaaaacagtagcctttgtcttt

SEQ ID NO: 23382 - protein, 141 aa, Homo sapiens; identical to SEQ ID NO: 3097

SEQ ID NO: 23383 - DNA, 915 bp, Homo sapiens
ggatgtgggggccagccctcggaaacggaagtgagcggcggggtcgactgacggtaacggggcagagaggctgttcgcagagctgcggaagatgaatgccagaggacttggatctgagctaaaggacagtattccagttactgaactttcagcaagtggaccttttgaaagtcatgatcttcttcggaaaggtttttcttgtgtgaaaaatgaacttttgcctagtcatccccttgaattatcagaaaaaaatttccagctcaaccaagataaaatgaatttttccacactgagaaacattcagggtctatttgctccgctaaaattacagatggaattcaaggcagtgcagcaggttcagcgtcttccatttctttcaagctcaaatctttcactggatgttttgaggggtaatgatgagactattggatttgaggatattcttaatgatccatcacaaagcgaagtcatgggagagccacacttgatggtggaatataaacttggtttactgtaatagtgtgctgttcatggaaaccgagggctgcatcttgtttatagtcatctttgtactgtaatttgatgtacacaacattaaaagtactgacacctgagaatttctgctcaagtagtatcagtgatcatttaaaatttggaggggtctttggtttacagccatgtgacaattaaaagcactaaagggagatcatgttaaagctcttaatttatattaaaacagtagcctttgtctttaaaaaagttgttgctcatgaatattataaaatgatctacaggtttcaattcaacctgtttctaggtttttttgtaaatttagttttgattaagcattataagcatttgagtctataaactttatagtagcatctttcagaataaacatttttaattgatttc

SEQ ID NO: 23384 - protein, 141 aa, Homo sapiens; identical to SEQ ID NO: 3097

SEQ ID NO: 23385 - DNA, 1282 bp, Homo sapiens
ggatgtgggggccagccctcggaaacggaagtgagcggcggggtcgactgacggtaacggggcagagaggctgttcgcagagctgcggaagatgaatgccagaggacttggatctgagctaaaggacagtattccagttactgaactttcagcaagtggaccttttgaaagtcatgatcttcttcggaaaggtttttcttgtgtgaaaaatgaacttttgcctagtcatccccttgaattatcagaaaaaaatttccagctcaaccaagataaaatgaatttttccacactgagaaacattcagggtctatttgctccgctaaaattacagatggaattcaaggcagtgcagcaggttcagcgtcttccatttctttcaagctcaaatctttcactggatgttttgaggggtaatgatgagactattggatttgaggatattcttaatgatccatcacaaagcgaagtcatgggagagccacacttgatggtggaatataaacttggtttactgtaatagtgtgctgttcatggaaaccgagggctgcatcttgtttatagtcatctttgtactgtaatttgatgtacacaacattaaaagtactgacacctgagaatttctgctcaagtagtatcagtgatcatttaaaatttggaggggtctttggtttacagccatgtgacaattaaaagcactaaagggagatcatgttaaagctcttaatttatattaaaacagtagcctttgtctttaaaaaagttgttgctcatgaatattataaaatgatctacaggtttcaattcaacctgtttctaggtttttttgtaaatttagttttgattaagcattataagcatttgagtctataaactttatagtagcatctttcagaataaacatttttaattgatttcagtggcaactctcaaattgattacaatatgagatatatcagtgtcgtccattaacactcataagaataatatttactgtgtcagtgctattttaggattatagttattgtttgattatttcaggttgaaaagtagaagttccaaggttttgattttggtctggtctttaagtgaaaaattaaagcaaccagtagatgtaggttaaacttttacttcatagacttaatatgtaattaatatattgccaagcaacactgttaaagaaaagtaaaactcattttttcttgttcttaatttatatattacaagatactgtaaggtattctttatgaagttgatatataaaaatttacatttttagaacatt

SEQ ID NO: 23386 - protein, 141 aa, Homo sapiens; identical to SEQ ID NO: 3097

SEQ ID NO: 23387 - DNA, 1369 bp, Homo sapiens
ggatgtgggggccagccctcggaaacggaagtgagcggcggggtcgactgacggtaacggggcagagaggctgttcgcagagctgcggaagatgaatgccagaggacttggatctgagctaaaggacagtattccagttactgaactttcagcaagtggaccttttgaaagtcatgatcttcttcggaaaggtttttcttgtgtgaaaaatgaacttttgcctagtcatccccttgaattatcagaaaaaaatttccagctcaaccaagataaaatgaatttttccacactgagaaacattcagggtctatttgctccgctaaaattacagatggaattcaaggcagtgcagcaggttcagcgtcttccatttctttcaagctcaaatctttcactggatgttttgaggggtaatgatgagactattggatttgaggatattcttaatgatccatcacaaagcgaagtcatgggagagccacacttgatggtggaatataaacttggtttactgtaatagtgtgctgttcatggaaaccgagggctgcatcttgtttatagtcatctttgtactgtaatttgatgtacacaacattaaaagtactgacacctgagaatttctgctcaagtagtatcagtgatcatttaaaatttggaggggtctttggtttacagccatgtgacaattaaaagcactaaagggagatcatgttaaagctcttaatttatattaaaacagtagcctttgtctttaaaaaagttgttgctcatgaatattataaaatgatctacaggtttcaattcaacctgtttctaggtttttttgtaaatttagttttgattaagcattataagcatttgagtctataaactttatagtagcatctttcagaataaacatttttaattgatttcagtggcaactctcaaattgattacaatatgagatatatcagtgtcgtccattaacactcataagaataatatttactgtgtcagtgctattttaggattatagttattgtttgattatttcaggttgaaaagtagaagttccaaggttttgattttggtctggtctttaagtgaaaaattaaagcaaccagtagatgtaggttaaacttttacttcatagacttaatatgtaattaatatattgccaagcaacactgttaaagaaaagtaaaactcattttttcttgttcttaatttatatattacaagatactgtaaggtattctttatgaagttgatatataaaaatttacatttttagaacattagtgaatggatcatcttttacaattaaaagtatattttgattatcagtttcttaggaacatctttgattagataaattactgatttg

SEQ ID NO: 23388 - protein, 141 aa, Homo sapiens; identical to SEQ ID NO: 3097

SEQ ID NO: 23389 - DNA, 819 bp, Homo sapiens
gagcggcggggtcgactgacggtaacggggcagagaggctgttcgcagagctgcggaagatgttgtggtatttgagaagaacactgagtcaccattgccacagactctgatatcggtactgctggtaggccatccatccaaatctagaaagtttctattgaatgccagaggacttggatctgagctaaaggacagtattccagttactgaactttcagcaagtggaccttttgaaagtcatgatcttcttcggaaaggtttttcttgtgtgaaaaatgaacttttgcctagtcatccccttgaattatcagaaaaaaatttccagctcaaccaagataaaatgaatttttccacactgagaaacattcagggtctatttgctccgctaaaattacagatggaattcaaggcagtgcagcaggttcagcgtcttccatttctttcaagctcaaatctttcactggatgttttgaggggtaatgatgagactattggatttgaggatattcttaatgatccatcacaaagcgaagtcatgggagagccacacttgatggtggaatataaacttggtttactgtaatagtgtgctgttcatggaaaccgagggctgcatcttgtttatagtcatctttgtactgtaatttgatgtacacaacattaaaagtactgacacctgagaatttctgctcaagtagtatcagtgatcatttaaaatttggaggggtctttggtttacagccatgtgacaattaaaagcactaaagggagatcatgttaaagctcttaatttatattaaaacagtagcctttgtcttt

SEQ ID NO: 23390 - protein, 80 aa, Homo sapiens
MNFSTLRNIQGLFAPLKLQMEFKAVQQVQRLPFLSSSNLSLDVLRGNDETIGFEDILNDPSQSEVMGEPHLMVEYKLGLL

SEQ ID NO: 23391 - DNA, 981 bp, Homo sapiens
gagcggcggggtcgactgacggtaacggggcagagaggctgttcgcagagctgcggaagatgttgtggtatttgagaagaacactgagtcaccattgccacagactctgatatcggtactgctggtaggccatccatccaaatctagaaagtttctattgaatgccagaggacttggatctgagctaaaggacagtattccagttactgaactttcagcaagtggaccttttgaaagtcatgatcttcttcggaaaggtttttcttgtgtgaaaaatgaacttttgcctagtcatccccttgaattatcagaaaaaaatttccagctcaaccaagataaaatgaatttttccacactgagaaacattcagggtctatttgctccgctaaaattacagatggaattcaaggcagtgcagcaggttcagcgtcttccatttctttcaagctcaaatctttcactggatgttttgaggggtaatgatgagactattggatttgaggatattcttaatgatccatcacaaagcgaagtcatgggagagccacacttgatggtggaatataaacttggtttactgtaatagtgtgctgttcatggaaaccgagggctgcatcttgtttatagtcatctttgtactgtaatttgatgtacacaacattaaaagtactgacacctgagaatttctgctcaagtagtatcagtgatcatttaaaatttggaggggtctttggtttacagccatgtgacaattaaaagcactaaagggagatcatgttaaagctcttaatttatattaaaacagtagcctttgtctttaaaaaagttgttgctcatgaatattataaaatgatctacaggtttcaattcaacctgtttctaggtttttttgtaaatttagttttgattaagcattataagcatttgagtctataaactttatagtagcatctttcagaataaacatttttaattgatttc

SEQ ID NO: 23392 - protein, 80 aa, Homo sapiens; identical to SEQ ID NO: 23390

SEQ ID NO: 23393 - DNA, 1348 bp, Homo sapiens
gagcggcggggtcgactgacggtaacggggcagagaggctgttcgcagagctgcggaagatgttgtggtatttgagaagaacactgagtcaccattgccacagactctgatatcggtactgctggtaggccatccatccaaatctagaaagtttctattgaatgccagaggacttggatctgagctaaaggacagtattccagttactgaactttcagcaagtggaccttttgaaagtcatgatcttcttcggaaaggtttttcttgtgtgaaaaatgaacttttgcctagtcatccccttgaattatcagaaaaaaatttccagctcaaccaagataaaatgaatttttccacactgagaaacattcagggtctatttgctccgctaaaattacagatggaattcaaggcagtgcagcaggttcagcgtcttccatttctttcaagctcaaatctttcactggatgttttgaggggtaatgatgagactattggatttgaggatattcttaatgatccatcacaaagcgaagtcatgggagagccacacttgatggtggaatataaacttggtttactgtaatagtgtgctgttcatggaaaccgagggctgcatcttgtttatagtcatctttgtactgtaatttgatgtacacaacattaaaagtactgacacctgagaatttctgctcaagtagtatcagtgatcatttaaaatttggaggggtctttggtttacagccatgtgacaattaaaagcactaaagggagatcatgttaaagctcttaatttatattaaaacagtagcctttgtctttaaaaaagttgttgctcatgaatattataaaatgatctacaggtttcaattcaacctgtttctaggtttttttgtaaatttagttttgattaagcattataagcatttgagtctataaactttatagtagcatctttcagaataaacatttttaattgatttcagtggcaactctcaaattgattacaatatgagatatatcagtgtcgtccattaacactcataagaataatatttactgtgtcagtgctattttaggattatagttattgtttgattatttcaggttgaaaagtagaagttccaaggttttgattttggtctggtctttaagtgaaaaattaaagcaaccagtagatgtaggttaaacttttacttcatagacttaatatgtaattaatatattgccaagcaacactgttaaagaaaagtaaaactcattttttcttgttcttaatttatatattacaagatactgtaaggtattctttatgaagttgatatataaaaatttacatttttagaacatt

SEQ ID NO: 23394 - protein, 80 aa, Homo sapiens; identical to SEQ ID NO: 23390

SEQ ID NO: 23395 - DNA, 1435 bp, Homo sapiens
gagcggcggggtcgactgacggtaacggggcagagaggctgttcgcagagctgcggaagatgttgtggtatttgagaagaacactgagtcaccattgccacagactctgatatcggtactgctggtaggccatccatccaaatctagaaagtttctattgaatgccagaggacttggatctgagctaaaggacagtattccagttactgaactttcagcaagtggaccttttgaaagtcatgatcttcttcggaaaggtttttcttgtgtgaaaaatgaacttttgcctagtcatccccttgaattatcagaaaaaaatttccagctcaaccaagataaaatgaatttttccacactgagaaacattcagggtctatttgctccgctaaaattacagatggaattcaaggcagtgcagcaggttcagcgtcttccatttctttcaagctcaaatctttcactggatgttttgaggggtaatgatgagactattggatttgaggatattcttaatgatccatcacaaagcgaagtcatgggagagccacacttgatggtggaatataaacttggtttactgtaatagtgtgctgttcatggaaaccgagggctgcatcttgtttatagtcatctttgtactgtaatttgatgtacacaacattaaaagtactgacacctgagaatttctgctcaagtagtatcagtgatcatttaaaatttggaggggtctttggtttacagccatgtgacaattaaaagcactaaagggagatcatgttaaagctcttaatttatattaaaacagtagcctttgtctttaaaaaagttgttgctcatgaatattataaaatgatctacaggtttcaattcaacctgtttctaggtttttttgtaaatttagttttgattaagcattataagcatttgagtctataaactttatagtagcatctttcagaataaacatttttaattgatttcagtggcaactctcaaattgattacaatatgagatatatcagtgtcgtccattaacactcataagaataatatttactgtgtcagtgctattttaggattatagttattgtttgattatttcaggttgaaaagtagaagttccaaggttttgattttggtctggtctttaagtgaaaaattaaagcaaccagtagatgtaggttaaacttttacttcatagacttaatatgtaattaatatattgccaagcaacactgttaaagaaaagtaaaactcattttttcttgttcttaatttatatattacaagatactgtaaggtattctttatgaagttgatatataaaaatttacatttttagaacattagtgaatggatcatcttttacaattaaaagtatattttgattatcagtttcttaggaacatctttgattagataaattactgatttg

SEQ ID NO: 23396 - protein, 80 aa, Homo sapiens; identical to SEQ ID NO: 23390

SEQ ID NO: 23397 - DNA, 838 bp, Homo sapiens
ggggtcgactgacggtaacggggcagagaggctgttcgcagagctgcggaagatgaatgccagaggacttggatctgagctaaaggacagtattccagttactgaactttcagcaagtggaccttttgaaagtcatgatcttcttcggaaagggtatatgggggagttatgactttgattttgttatgtttctgtgaattttcacaatattctttaagtattttgataggctatacatgtgtatttagttggcagatggcaagtaatataccttacatggggtgcagaggggaagaggcttagatattttctgtagtggaagaggtgtctcatcaaagtagtaggttcccaattagagcatcctcctaggcagtggtgcccattagcatgatttggtaggattctttttatttatttttttgctactgataacttagccatttgccttcttgtcttaactattagggtaattcacttttctttgggaggcactagaacatagcagttgagagattaaactctggattcagtcggcctgggtttggatcgtggctctgctctttactagatgtgtgcctttggacaaatcacataattaatgtctcagtgtccttatggatagaataggcctaataatagtctgtatcttcttttgaggaataaatgagttaatacctgaaaaatattttaaatggtacctgacattagaagcactcagtatgtattggctaccattttttttcttttctagctttagcatgcagttacgccatgtttttgatttcctttttgtttctgtatgtttaggtctcagtttctggtactagaccatactctt

SEQ ID NO: 23398 - protein, 39 aa, Homo sapiens
MNARGLGSELKDSIPVTELSASGPFESHDLLRKGYMGEL

SEQ ID NO: 23399 - DNA, 598 bp, Homo sapiens
gaagttgtggtatttgagaagaacactgagtcaccattgccacagactctgatatcggtactgctgaatgccagaggacttggatctgagctaaaggacagtattccagttactgaactttcagcaagtggaccttttgaaagtcatgatcttcttcggaaaggtttttcttgtgtgaaaaatgaacttttgcctagtcatccccttgaattatcagaaaaaaatttccagctcaaccaagataaaatgaatttttccacactgagaaacattcagggtctatttgctccgctaaaattacagatggaattcaaggcagtgcagcaggttcagcgtcttccatttctttcaagctcaaatctttcactggatgttttgaggggtaatgatgagactattggatttgaggatattcttaatgatccatcacaaagcgaagtcatgggagagccacacttgatggtggaatataaacttggtttactgtaatagtgtgctgttcatggaaaccgagggctgcatcttgtttatagtcatctttgtactgtaatttgatgtacacaacattaaaagtactgacacctgagaatttctgctc

SEQ ID NO: 23400 - protein, 80 aa, Homo sapiens; identical to SEQ ID NO: 23390

SEQ ID NO: 23401 - DNA, 680 bp, Homo sapiens
gaagttgtggtatttgagaagaacactgagtcaccattgccacagactctgatatcggtactgctgaatgccagaggacttggatctgagctaaaggacagtattccagttactgaactttcagcaagtggaccttttgaaagtcatgatcttcttcggaaaggtttttcttgtgtgaaaaatgaacttttgcctagtcatccccttgaattatcagaaaaaaatttccagctcaaccaagataaaatgaatttttccacactgagaaacattcagggtctatttgctccgctaaaattacagatggaattcaaggcagtgcagcaggttcagcgtcttccatttctttcaagctcaaatctttcactggatgttttgaggggtaatgatgagactattggatttgaggatattcttaatgatccatcacaaagcgaagtcatgggagagccacacttgatggtggaatataaacttggtttactgtaatagtgtgctgttcatggaaaccgagggctgcatcttgtttatagtcatctttgtactgtaatttgatgtacacaacattaaaagtactgacacctgagaatttctgctcaagtagtatcagtgatcatttaaaatttggaggggtctttggtttacagccatgtgacaattaaaagcactaaagggagatc

SEQ ID NO: 23402 - protein, 80 aa, Homo sapiens; identical to SEQ ID NO: 23390

SEQ ID NO: 23403 - DNA, 725 bp, Homo sapiens
gaagttgtggtatttgagaagaacactgagtcaccattgccacagactctgatatcggtactgctgaatgccagaggacttggatctgagctaaaggacagtattccagttactgaactttcagcaagtggaccttttgaaagtcatgatcttcttcggaaaggtttttcttgtgtgaaaaatgaacttttgcctagtcatccccttgaattatcagaaaaaaatttccagctcaaccaagataaaatgaatttttccacactgagaaacattcagggtctatttgctccgctaaaattacagatggaattcaaggcagtgcagcaggttcagcgtcttccatttctttcaagctcaaatctttcactggatgttttgaggggtaatgatgagactattggatttgaggatattcttaatgatccatcacaaagcgaagtcatgggagagccacacttgatggtggaatataaacttggtttactgtaatagtgtgctgttcatggaaaccgagggctgcatcttgtttatagtcatctttgtactgtaatttgatgtacacaacattaaaagtactgacacctgagaatttctgctcaagtagtatcagtgatcatttaaaatttggaggggtctttggtttacagccatgtgacaattaaaagcactaaagggagatcatgttaaagctcttaatttatattaaaacagtagcctttgtcttt

SEQ ID NO: 23404 - protein, 80 aa, Homo sapiens; identical to SEQ ID NO: 23390

SEQ ID NO: 23405 - DNA, 887 bp, Homo sapiens
gaagttgtggtatttgagaagaacactgagtcaccattgccacagactctgatatcggtactgctgaatgccagaggacttggatctgagctaaaggacagtattccagttactgaactttcagcaagtggaccttttgaaagtcatgatcttcttcggaaaggtttttcttgtgtgaaaaatgaacttttgcctagtcatccccttgaattatcagaaaaaaatttccagctcaaccaagataaaatgaatttttccacactgagaaacattcagggtctatttgctccgctaaaattacagatggaattcaaggcagtgcagcaggttcagcgtcttccatttctttcaagctcaaatctttcactggatgttttgaggggtaatgatgagactattggatttgaggatattcttaatgatccatcacaaagcgaagtcatgggagagccacacttgatggtggaatataaacttggtttactgtaatagtgtgctgttcatggaaaccgagggctgcatcttgtttatagtcatctttgtactgtaatttgatgtacacaacattaaaagtactgacacctgagaatttctgctcaagtagtatcagtgatcatttaaaatttggaggggtctttggtttacagccatgtgacaattaaaagcactaaagggagatcatgttaaagctcttaatttatattaaaacagtagcctttgtctttaaaaaagttgttgctcatgaatattataaaatgatctacaggtttcaattcaacctgtttctaggtttttttgtaaatttagttttgattaagcattataagcatttgagtctataaactttatagtagcatctttcagaataaacatttttaattgatttc

SEQ ID NO: 23406 - protein, 80 aa, Homo sapiens; identical to SEQ ID NO: 23390

SEQ ID NO: 23407 - DNA, 1254 bp, Homo sapiens
gaagttgtggtatttgagaagaacactgagtcaccattgccacagactctgatatcggtactgctgaatgccagaggacttggatctgagctaaaggacagtattccagttactgaactttcagcaagtggaccttttgaaagtcatgatcttcttcggaaaggtttttcttgtgtgaaaaatgaacttttgcctagtcatccccttgaattatcagaaaaaaatttccagctcaaccaagataaaatgaatttttccacactgagaaacattcagggtctatttgctccgctaaaattacagatggaattcaaggcagtgcagcaggttcagcgtcttccatttctttcaagctcaaatctttcactggatgttttgaggggtaatgatgagactattggatttgaggatattcttaatgatccatcacaaagcgaagtcatgggagagccacacttgatggtggaatataaacttggtttactgtaatagtgtgctgttcatggaaaccgagggctgcatcttgtttatagtcatctttgtactgtaatttgatgtacacaacattaaaagtactgacacctgagaatttctgctcaagtagtatcagtgatcatttaaaatttggaggggtctttggtttacagccatgtgacaattaaaagcactaaagggagatcatgttaaagctcttaatttatattaaaacagtagcctttgtctttaaaaaagttgttgctcatgaatattataaaatgatctacaggtttcaattcaacctgtttctaggtttttttgtaaatttagttttgattaagcattataagcatttgagtctataaactttatagtagcatctttcagaataaacatttttaattgatttcagtggcaactctcaaattgattacaatatgagatatatcagtgtcgtccattaacactcataagaataatatttactgtgtcagtgctattttaggattatagttattgtttgattatttcaggttgaaaagtagaagttccaaggttttgattttggtctggtctttaagtgaaaaattaaagcaaccagtagatgtaggttaaacttttacttcatagacttaatatgtaattaatatattgccaagcaacactgttaaagaaaagtaaaactcattttttcttgttcttaatttatatattacaagatactgtaaggtattctttatgaagttgatatataaaaatttacatttttagaacatt

SEQ ID NO: 23408 - protein, 80 aa, Homo sapiens; identical to SEQ ID NO: 23390

SEQ ID NO: 23409 - DNA, 1341 bp, Homo sapiens
gaagttgtggtatttgagaagaacactgagtcaccattgccacagactctgatatcggtactgctgaatgccagaggacttggatctgagctaaaggacagtattccagttactgaactttcagcaagtggaccttttgaaagtcatgatcttcttcggaaaggtttttcttgtgtgaaaaatgaacttttgcctagtcatccccttgaattatcagaaaaaaatttccagctcaaccaagataaaatgaatttttccacactgagaaacattcagggtctatttgctccgctaaaattacagatggaattcaaggcagtgcagcaggttcagcgtcttccatttctttcaagctcaaatctttcactggatgttttgaggggtaatgatgagactattggatttgaggatattcttaatgatccatcacaaagcgaagtcatgggagagccacacttgatggtggaatataaacttggtttactgtaatagtgtgctgttcatggaaaccgagggctgcatcttgtttatagtcatctttgtactgtaatttgatgtacacaacattaaaagtactgacacctgagaatttctgctcaagtagtatcagtgatcatttaaaatttggaggggtctttggtttacagccatgtgacaattaaaagcactaaagggagatcatgttaaagctcttaatttatattaaaacagtagcctttgtctttaaaaaagttgttgctcatgaatattataaaatgatctacaggtttcaattcaacctgtttctaggtttttttgtaaatttagttttgattaagcattataagcatttgagtctataaactttatagtagcatctttcagaataaacatttttaattgatttcagtggcaactctcaaattgattacaatatgagatatatcagtgtcgtccattaacactcataagaataatatttactgtgtcagtgctattttaggattatagttattgtttgattatttcaggttgaaaagtagaagttccaaggttttgattttggtctggtctttaagtgaaaaattaaagcaaccagtagatgtaggttaaacttttacttcatagacttaatatgtaattaatatattgccaagcaacactgttaaagaaaagtaaaactcattttttcttgttcttaatttatatattacaagatactgtaaggtattctttatgaagttgatatataaaaatttacatttttagaacattagtgaatggatcatcttttacaattaaaagtatattttgattatcagtttcttaggaacatctttgattagataaattactgatttg

SEQ ID NO: 23410 - protein, 80 aa, Homo sapiens; identical to SEQ ID NO: 23390

SEQ ID NO: 23411 - DNA, 630 bp, Homo sapiens
ttgtggtatttgagaagaacactgagtcaccattgccacagactctgatatcggtactgctggtaggccatccatccaaatctagaaagtttctattgaatgccagaggacttggatctgagctaaaggacagtattccagttactgaactttcagcaagtggaccttttgaaagtcatgatcttcttcggaaaggtttttcttgtgtgaaaaatgaacttttgcctagtcatccccttgaattatcagaaaaaaatttccagctcaaccaagataaaatgaatttttccacactgagaaacattcagggtctatttgctccgctaaaattacagatggaattcaaggcagtgcagcaggttcagcgtcttccatttctttcaagctcaaatctttcactggatgttttgaggggtaatgatgagactattggatttgaggatattcttaatgatccatcacaaagcgaagtcatgggagagccacacttgatggtggaatataaacttggtttactgtaatagtgtgctgttcatggaaaccgagggctgcatcttgtttatagtcatctttgtactgtaatttgatgtacacaacattaaaagtactgacacctgagaatttctgctc

SEQ ID NO: 23412 - protein, 80 aa, Homo sapiens; identical to SEQ ID NO: 23390

SEQ ID NO: 23413 - DNA, 712 bp, Homo sapiens
ttgtggtatttgagaagaacactgagtcaccattgccacagactctgatatcggtactgctggtaggccatccatccaaatctagaaagtttctattgaatgccagaggacttggatctgagctaaaggacagtattccagttactgaactttcagcaagtggaccttttgaaagtcatgatcttcttcggaaaggtttttcttgtgtgaaaaatgaacttttgcctagtcatccccttgaattatcagaaaaaaatttccagctcaaccaagataaaatgaatttttccacactgagaaacattcagggtctatttgctccgctaaaattacagatggaattcaaggcagtgcagcaggttcagcgtcttccatttctttcaagctcaaatctttcactggatgttttgaggggtaatgatgagactattggatttgaggatattcttaatgatccatcacaaagcgaagtcatgggagagccacacttgatggtggaatataaacttggtttactgtaatagtgtgctgttcatggaaaccgagggctgcatcttgtttatagtcatctttgtactgtaatttgatgtacacaacattaaaagtactgacacctgagaatttctgctcaagtagtatcagtgatcatttaaaatttggaggggtctttggtttacagccatgtgacaattaaaagcactaaagggagatc

SEQ ID NO: 23414 - protein, 80 aa, Homo sapiens; identical to SEQ ID NO: 23390

SEQ ID NO: 23415 - DNA, 686 bp, Homo sapiens
agttggaacctattatgcaggttctttaggtccaggctaaggagtctgaactttgtgcttcagacatcgatgaaccaacaaagattttatagcagttttgttggaggaggtttcatgcttgaggaaaaccttgatatacagaactggaaaatggaatgccagaggacttggatctgagctaaaggacagtattccagttactgaactttcagcaagtggaccttttgaaagtcatgatcttcttcggaaaggtttttcttgtgtgaaaaatgaacttttgcctagtcatccccttgaattatcagaaaaaaatttccagctcaaccaagataaaatgaatttttccacactgagaaacattcagggtctatttgctccgctaaaattacagatggaattcaaggcagtgcagcaggttcagcgtcttccatttctttcaagctcaaatctttcactggatgttttgaggggtaatgatgagactattggatttgaggatattcttaatgatccatcacaaagcgaagtcatgggagagccacacttgatggtggaatataaacttggtttactgtaatagtgtgctgttcatggaaaccgagggctgcatcttgtttatagtcatctttgtactgtaatttgatgtacacaacattaaaagtactgacacctgagaatttctgctc

SEQ ID NO: 23416 - protein, 80 aa, Homo sapiens; identical to SEQ ID NO: 23390

SEQ ID NO: 23417 - DNA, 3247 bp, Homo sapiens
ggcagggcggcggcggcagcggcgcagctccgctccccgcgcgtctcccttccccgcgcccaggtagggcgctcagcctccgccgccaggatgcggccgcccgcctgctggtggctgctcgcgccgccggcgctgctcgcgctcctcacctgctccctggcaggagctccccagtgtcctcctccttcatcagctggctaaacaagaaggtgcatggaccatacttccgttgttaccgcatttttctgtaacatatagcagaaattcatcttggattttcttctgtgaagaagagacaagaatacagattccaaaactcttggaaaccctcagaagatatgacccctctaaggaatggtttttgggaaaagcattacatgatgaagaagctacaataattcaccattatgccttttccgagaatcctacagtttttaagtatccagactttgctgcaggctgggccttaagtattccacttgtaaacaagcttaccaagagactaaagagtgaatccttgaaatccgactttacaatagatttaaaacatgagattgccctctacatctgggacaaaggcggaggacctcccctgaccccagtgcctgagttttgtaccaatgacgtggacttctactgtgctaccacattccattcttttctaccgctttgtagaaagccagtgaagaagaaggatatttttgttgcagtaaaaacatgcaagaaatttcatggtgacagaatacctattgttaagcagacttgggagagccaggcaagtctcattgaatactatagtgactatactgaaaattccattcctactgtggatttgggaattcctaatacagatagaggtcattgtggaaagacatttgccattttggaaagatttctgaatcgtagccaggacaaaacagcatggttagtcattgtggatgatgatacattaataagtatctccaggctccagcacttgcttagctgttatgactccggcgagcctgtgtttctgggagagcgctacggctacggcctgggcactggtggctacagctacatcacgggaggaggaggaatggtcttcagcagagaagccgtcaggagacttctcgccagtaaatgtcgatgctacagcaatgatgctcccgatgatatggtcctgggaatgtgctttagtggcttgggaatccctgtgacacacagccctctcttccatcaggctcggccggtggattaccctaaggactacctttctcatcaagttcccatatcgttccacaaacactggaacatcgatccagtgaaggtgtatttcacatggttggcacccagtgacgaagacaaagccaggcaggagacacagaaaggttttcgagaggagttataaatcagggtgacctgtgcgcctagcctgcgcagggaatgaactggagactgtggcctcatcccactgtgctgtgctcacaacacttgtgtctgccacatggcattgggtgcttcctgactttagggggagattttatgtatggtattttttgacagaggaagaaaaggggtcacaggagaaacatttttttttctgggaaaaatcacttgcttttgacttatgcagttgttttaacacttagtgatgactgtgtattctccaagctgtgatacagcagtttttttttattgtcacagggaaataaatggtaccagaagtccctttcctgttctgtctcttcattgtaatggaagtttcagttgggcatgagcctggagagatgtgactgtctacagttctatttgtatatataaaaagaagactgaaagtcttttgacatggatattgtgaatggtatgaacttttaaaccatattattgatgatgaaaattatttcctgggaactcagtaggaataataccgtattaaggaataatactgtacataaaacatcatgaaaccctagatatgaaatcccctgaagtctgtaatcatggtggttatgttttgtctattcttttgctgtttgtgcctcataaaaagagaatgaggtcttctgctagagcttcgtattgctttggaagttcatctgtgttttatttctccctgaagccctatctttatggcttacttgtaacatgaaagtagtagatgctgccagaaaatagtgtcctcaatattttaaaacaatgttgacatgttttgttcaagtcagcaagctctatgtgagtctcaggaagtgaattaaatttggaccttatgttttactcttgttttttttttttttttaaatgttacttaatgactctctcctgactcaggagagaaaccccttgtggaaggacagcatggtgatcaggcaatttctctgggttcccaaagaatgacatttgaacacagtattttgaaacagctctagttttcaaattatatctttaatatatagtaatgtaacatattcagtattaatgtataaaaagcactctaattatataattcagtttttgtaaaggtatttgcataaaatttaatatgtcttaaactaattttggtaaattacttcttttttttctttttaataaaaactgttactcattaactttgcttataatgctttttatagcccagcacagaatttaaagccataccaccaaaagtacctgtgtgtgttaatatgtttttcttgtagcatagattgactatttgcaatagtattagtatttaccatttttccaaattagcaactaccagacctcacgtgttgcagtgataacacaatgcattggattcagttttgtgaaaatggattctgtggccatccaagggatgtatcagggatgatcagctgatgagaggctccagaaggatttctagatcgcttcaagcctatactgatggccttagctttgttcagtcattgtaactgggattgttgtcattgctaccgtggtagtcaccttcatgtcatctataatagtactcctggagagccctggctgcctacaccagtggaaaagagtctccagttctgctctggcctactaactgttaccactgagagaacaacatgttcatttgacatgattgaagctggcatccgtatatgaagatccttgtcaagctttcttctgtggtctgattagtgccttctactgataccggggcacctcctctggtacttttaagtgttttgttaattatatttactttttggaatggtgtaagcctaaccacaagtaaaagatctttgcctaagtt

SEQ ID NO: 23418 - protein, 103 aa, Homo sapiens
MVFSREAVRRLLASKCRCYSNDAPDDMVLGMCFSGLGIPVTHSPLFHQARPVDYPKDYLSHQVPISFHKHWNIDPVKVYFTWLAPSDEDKARQETQKGFREEL

SEQ ID NO: 23419 - DNA, 3050 bp, Homo sapiens
gatttattttcatcctagcacatttcagtcactacctgaagttatttgatttactttcttaatttccatttctccactctagggaatggtttttgggaaaagcattacatgatgaagaagctacaataattcaccattatgccttttccgagaatcctacagtttttaagtatccagactttgctgcaggctgggccttaagtattccacttgtaaacaagcttaccaagagactaaagagtgaatccttgaaatccgactttacaatagatttaaaacatgagattgccctctacatctgggacaaaggcggaggacctcccctgaccccagtgcctgagttttgtaccaatgacgtggacttctactgtgctaccacattccattcttttctaccgctttgtagaaagccagtgaagaagaaggatatttttgttgcagtaaaaacatgcaagaaatttcatggtgacagaattaattgagaagaaacacccgtgttctttaataaacctattagagcgaaaaaggactgaaagcctaaaggctgaggaaattgaaagcaaaatttgcacagcctgcaggacccttgctggggactgaggaaagttcttgacctttcctcacagcttcttccagcattatgcaatggaggatattttacccaacagtgtgaacttttagtggctgcaagctgcagggagccctttctgggtacctattgttaagcagacttgggagagccaggcaagtctcattgaatactatagtgactatactgaaaattccattcctactgtggatttgggaattcctaatacagatagaggctttctaattaaaaacactttttaggacatacagagtggaatggtagacattggagactccaaaaggtctccatttccttgtgtgagaaatgaatggcttgaatttcattatctctaaagttcccactggttcaatgtgtctgtgaaaattagagaaggctatttttaaaaattttgaacttttaagctgcattttggcatgtcattgtggaaagacatttgccattttggaaagatttctgaatcgtagccaggacaaaacagcatggttagtcattgtggatgatgatacattaataaggtgcaaaggaaaatgatccaaaagaaacatgaagcaaatgaggtgagttctatgactgccagagctgactgccttaagagaattccaagttactgcttagggagggagcaccagatggaacctgacagactctgtgggcggaaaagatggagctgagagtctcaggagaccaaggctattacagtttgcaggacagagtaccagagaggagagagctatacagaaagggaacactggagatccaagagtgtcaatgaaccccaggcacaccataagcacaaaagcagagaacagccacctccaggaatgccataatggacacttaggacagtacccactgccccactctaggcagctgtggaattgaggactagcatgcttaacccattgtagctacccacaacaccaacatggacctcttgggtctcagtgggttgctccaccaccactactgccatcattcacatcataccagctgctcagggggctaacaacttgtccacacacctagcccactgctctcattactagcttctaagcaagcagttcacctgcaggcccaagaatcagccattcagaactctctaacaccacagccagcataagctgctttagggcctaaaaacaggcatattcacccttctgctgccaccactggggcccaaagactgactcagttggcatccaagtccccagcaaaatttcacagcttcagctaataaccataccctaagccactgaggaaattacacataccacgaaccttgtgtactactgaaaaagtcacacaaagaccacactacaacagcaccaaaaataaaagccaaggtgtcttacttaaccaacaacatatatacatcttcaggaaaaatattctcccctacaaaagcaatttttaaaaattggaacaacaataccagatatgcagatatcaatggaaggaaacaggaaacatgaaaaagcaagaaaatatgataccagtaaaggaccacaacaattttctgggaacagatcccaatcagtaagaattcctgaaataacagataaagaattcaaaatattgattttaaagaacctcattgaggtacaagagaaatctgaaaaccagtacaaaaataagaaaatgaattcaagatgtgaatgagagatataccaaggaaatagatatctttaatttaaaaaaccaaacagattctggaactgaaaattcattgaaggaaatacaaaatacatttgaaagctttggtaatagactagaccaagcagaaggaggaatttcaaaacttgacgacagatcttttgaaataattcagccacacaaaaataaggaaaaaatgaaaaagaatgaaaacagccctcaagatgtctaggactatacaaaatgaccaaacttataaattatcaatatttttgagggggaagagagatcaaaaactttagaaatcctactgaaggacataattgatgaaaatgtcccaaatgtagcaaaagagttagatatttagatacaggagatccagtgatcttcatgtaaatacattgaaaaaaggacttcacatggcatattaggacttcacatggcatattatattcagaatgtttaaattcaagtgaaagaaagaatctttaaaattagcaagagcaaaagcatcaagtcatgtataaaggactaatagtggacttttcagcagaaaccttataggccaaagagaatgagatggcactttagccatcgtgctaaaagaaaaaaaaaaagctgtgagccaagaattttatatcctgccagaataagccttatagataaaggggaaataatctttcccagacaaggaaatgctgaggaaatttgtcaccactaggtagggacaaagcctcacatatcaagattaaccttgaatataactggattaaatgcttcactt

SEQ ID NO: 23420 - protein, 45 aa, Homo sapiens
MVTELIEKKHPCSLINLLERKRTESLKAEEIESKICTACRTLAGD

SEQ ID NO: 23421 - DNA, 1745 bp, Homo sapiens
gatttattttcatcctagcacatttcagtcactacctgaagttatttgatttactttcttaatttccatttctccactctagggaatggtttttgggaaaagcattacatgatgaagaagctacaataattcaccattatgccttttccgagaatcctacagtttttaagtatccagactttgctgcaggctgggccttaagtattccacttgtaaacaagcttaccaagagactaaagagtgaatccttgaaatccgactttacaatagatttaaaacatgagattgccctctacatctgggacaaaggcggaggacctcccctgaccccagtgcctgagttttgtaccaatgacgtggacttctactgtgctaccacattccattcttttctaccgctttgtagaaagccagtgaagaagaaggatatttttgttgcagtaaaaacatgcaagaaatttcatggtgacagaattaattgagaagaaacacccgtgttctttaataaacctattagagcgaaaaaggactgaaagcctaaaggctgaggaaattgaaagcaaaatttgcacagcctgcaggacccttgctggggactgaggaaagttcttgacctttcctcacagcttcttccagcattatgcaatggaggatattttacccaacagtgtgaacttttagtggctgcaagctgcagggagccctttctgggtacctattgttaagcagacttgggagagccaggcaagtctcattgaatactatagtgactatactgaaaattccattcctactgtggatttgggaattcctaatacagatagaggctttctaattaaaaacactttttaggacatacagagtggaatggtagacattggagactccaaaaggtcattgtggaaagacatttgccattttggaaagatttctgaatcgtagccaggacaaaacagcatggttagtcattgtggatgatgatacattaataagtatctccaggctccagcacttgcttagctgttatgactccggcgagcctgtgtttctgggagagcgctacggctacggcctgggcactggtggctacagctacatcacgggaggaggaggaatggtcttcagcagagaagccgtcaggagacttctcgccagtaaatgtcgatgctacagcaatgatgctcccgatgatatggtcctgggaatgtgctttagtggcttgggaatccctgtgacacacagccctctcttccatcaggctcggccggtggattaccctaaggactacctttctcatcaagttcccatatcgttccacaaacactggaacatcgatccagtgaaggtgtatttcacatggttggcacccagtgacgaagacaaagccaggcaggagacacagaaaggttttcgagaggagttataaatcagggtgacctgtgcgcctagcctgcgcagggaatgaactggagactgtggcctcatcccactgtgctgtgctcacaacacttgtgtctgccacatggcattgggtgcttcctgactttagggggagattttatgtatggtattttttgacagaggaagaaaaggggtcacaggagaaacatttttttttctgggaaaaatcacttgcttttgacttatgcagttgttttaacacttagtgatgactgtgtattctccaagctgtgatacagcagtttttttttattgtcacagggaaataaatggtaccagaagtc

SEQ ID NO: 23422 - protein, 103 aa, Homo sapiens; identical to SEQ ID NO: 23418

SEQ ID NO: 23423 - DNA, 2783 bp, Homo sapiens
ggtaaaactgctgaattgagcccagcatgtggaatcagtatttttgattcagggattcaagctctttgtccttttttccttcctcctagactgattcatagaatgtttcctcccccaggaagaaggtctttgtaaaggcgactttgttctcacttgtttgatgcatcaaacttccattgagtgctgtgggcaaggccctatatgtggcagtgggactatatggatgaattttaaatagttttgccttaaagaaagtctttgatgattgagactgaacttatgaaccatattgtttccttcggccctttcagttattgagctttttatggtatgaaaagattcatttctaccttaggatcagaatgaaaacaagaaaccaatctgtattttaaaacgaagagaaattattttgggaacttggtacaaaagtgttggaaagggccagaagactaaaagagaacaggtagggttttacctagagctcagtaactagagaaagctactattgcctctcagtctgcaggagtaaagtcctgtttcccggggcccatttgtgcagcagcggtgtctgtggagcttctctaacccctttctctgctctggctcccactagaatggtcttcagcagagaagccgtcaggagacttctcgccagtaaatgtcgatgctacagcaatgatgctcccgatgatatggtcctgggaatgtgctttagtggcttgggaatccctgtgacacacagccctctcttccatcaggctcggccggtggattaccctaaggactacctttctcatcaagttcccatatcgttccacaaacactggaacatcgatccagtgaaggtgtatttcacatggttggcacccagtgacgaagacaaagccaggcaggagacacagaaaggttttcgagaggagttataaatcagggtgacctgtgcgcctagcctgcgcagggaatgaactggagactgtggcctcatcccactgtgctgtgctcacaacacttgtgtctgccacatggcattgggtgcttcctgactttagggggagattttatgtatggtattttttgacagaggaagaaaaggggtcacaggagaaacatttttttttctgggaaaaatcacttgcttttgacttatgcagttgttttaacacttagtgatgactgtgtattctccaagctgtgatacagcagtttttttttattgtcacagggaaataaatggtaccagaagtccctttcctgttctgtctcttcattgtaatggaagtttcagttgggcatgagcctggagagatgtgactgtctacagttctatttgtatatataaaaagaagactgaaagtcttttgacatggatattgtgaatggtatgaacttttaaaccatattattgatgatgaaaattatttcctgggaactcagtaggaataataccgtattaaggaataatactgtacataaaacatcatgaaaccctagatatgaaatcccctgaagtctgtaatcatggtggttatgttttgtctattcttttgctgtttgtgcctcataaaaagagaatgaggtcttctgctagagcttcgtattgctttggaagttcatctgtgttttatttctccctgaagccctatctttatggcttacttgtaacatgaaagtagtagatgctgccagaaaatagtgtcctcaatattttaaaacaatgttgacatgttttgttcaagtcagcaagctctatgtgagtctcaggaagtgaattaaatttggaccttatgttttactcttgttttttttttttttttaaatgttacttaatgactctctcctgactcaggagagaaaccccttgtggaaggacagcatggtgatcaggcaatttctctgggttcccaaagaatgacatttgaacacagtattttgaaacagctctagttttcaaattatatctttaatatatagtaatgtaacatattcagtattaatgtataaaaagcactctaattatataattcagtttttgtaaaggtatttgcataaaatttaatatgtcttaaactaattttggtaaattacttcttttttttctttttaataaaaactgttactcattaactttgcttataatgctttttatagcccagcacagaatttaaagccataccaccaaaagtacctgtgtgtgttaatatgtttttcttgtagcatagattgactatttgcaatagtattagtatttaccatttttccaaattagcaactaccagacctcacgtgttgcagtgataacacaatgcattggattcagttttgtgaaaatggattctgtggccatccaagggatgtatcagggatgatcagctgatgagaggctccagaaggatttctagatcgcttcaagcctatactgatggccttagctttgttcagtcattgtaactgggattgttgtcattgctaccgtggtagtcaccttcatgtcatctataatagtactcctggagagccctggctgcctacaccagtggaaaagagtctccagttctgctctggcctactaactgttaccactgagagaacaacatgttcatttgacatgattgaagctggcatccgtatatgaagatccttgtcaagctttcttctgtggtctgattagtgccttctactgataccggggcacctcctctggtacttttaagtgttttgttaattatatttactttttggaatggtgtaagcctaaccacaagtaaaagatctttgcctaagtt

SEQ ID NO: 23424 - protein, 103 aa, Homo sapiens; identical to SEQ ID NO: 23418

SEQ ID NO: 23425 - DNA, 3533 bp, Homo sapiens
ggtaaaactgctgaattgagcccagcatgtggaatcagtatttttgattcagggattcaagctctttgtccttttttccttcctcctagactgattcatagaatgtttcctcccccaggaagaaggtctttgtaaaggcgactttgttctcacttgtttgatgcatcaaacttccattgagtgctgtgggcaaggccctatatgtggcagtgggactatatggatgaattttaaatagttttgccttaaagaaagtctttgatgattgagactgaacttatgaaccatattgtttccttcggccctttcagttattgagctttttatggtatgaaaagattcatttctaccttaggatcagaatgaaaacaagaaaccaatctgtattttaaaacgaagagaaattattttgggaacttggtacaaaagtgttggaaagggccagaagactaaaagagaacaggtagggttttacctagagctcagtaactagagaaagctactattgcctctcagtctgcaggagtaaagtcctgtttcccggggcccatttgtgcagcagcggtgtctgtggagcttctctaacccctttctctgctctggctcccactagaatggtcttcagcagagaagccgtcaggagacttctcgccagtaaatgtcgatgctacagcaatgatgctcccgatgatatggtcctgggaatgtgctttagtggcttgggaatccctgtgacacacagccctctcttccatcaggctcggccggtggattaccctaaggactacctttctcatcaagttcccatatcgttccacaaacactggaacatcgatccagtgaaggtgtatttcacatggttggcacccagtgacgaagacaaagccaggcaggagacacagaaaggttttcgagaggagttataaatcagggtgacctgtgcgcctagcctgcgcagggaatgaactggagactgtggcctcatcccactgtgctgtgctcacaacacttgtgtctgccacatggcattgggtgcttcctgactttagggggagattttatgtatggtattttttgacagaggaagaaaaggggtcacaggagaaacatttttttttctgggaaaaatcacttgcttttgacttatgcagttgttttaacacttagtgatgactgtgtattctccaagctgtgatacagcagtttttttttattgtcacagggaaataaatggtaccagaagtccctttcctgttctgtctcttcattgtaatggaagtttcagttgggcatgagcctggagagatgtgactgtctacagttctatttgtatatataaaaagaagactgaaagtcttttgacatggatattgtgaatggtatgaacttttaaaccatattattgatgatgaaaattatttcctgggaactcagtaggaataataccgtattaaggaataatactgtacataaaacatcatgaaaccctagatatgaaatcccctgaagtctgtaatcatggtggttatgttttgtctattcttttgctgtttgtgcctcataaaaagagaatgaggtcttctgctagagcttcgtattgctttggaagttcatctgtgttttatttctccctgaagccctatctttatggcttacttgtaacatgaaagtagtagatgctgccagaaaatagtgtcctcaatattttaaaacaatgttgacatgttttgttcaagtcagcaagctctatgtgagtctcaggaagtgaattaaatttggaccttatgttttactcttgttttttttttttttttaaatgttacttaatgactctctcctgactcaggagagaaaccccttgtggaaggacagcatggtgatcaggcaatttctctgggttcccaaagaatgacatttgaacacagtattttgaaacagctctagttttcaaattatatctttaatatatagtaatgtaacatattcagtattaatgtataaaaagcactctaattatataattcagtttttgtaaaggtatttgcataaaatttaatatgtcttaaactaattttggtaaattacttcttttttttctttttaataaaaactgttactcattaactttgcttataatgctttttatagcccagcacagaatttaaagccataccaccaaaagtacctgtgtgtgttaatatgtttttcttgtagcatagattgactatttgcaatagtattagtatttaccatttttccaaattagcaactaccagacctcacgtgttgcagtgataacacaatgcattggattcagttttgtgaaaatggattctgtggccatccaagggatgtatcagggatgatcagctgatgagaggctccagaaggatttctagatcgcttcaagcctatactgatggccttagctttgttcagtcattgtaactgggattgttgtcattgctaccgtggtagtcaccttcatgtcatctataatagtactcctggagagccctggctgcctacaccagtggaaaagagtctccagttctgctctggcctactaactgttaccactgagagaacaacatgttcatttgacatgattgaagctggcatccgtatatgaagatccttgtcaagctttcttctgtggtctgattagtgccttctactgataccggggcacctcctctggtacttttaagtgttttgttaattatatttactttttggaatggtgtaagcctaaccacaagtaaaagatctttgcctaagtttttgatttctcaaatattgtgttcattagtctagactgggaatggggaggggaaatggggaaaatgaatgaatgaaatcagaaaaaagtcagcggctcagtaaatacagtttaaagagagaataattacttcagagctacccttttaagagaaaaccatcagaaattgataatgtttatataaagtttataaagccattgtgttttgttatataacaaatcagagatgttattttagaatcgattcccatctaaagaactcaattttgagtctgacatttccaggaccagatattgtcttactcacatttcctttgctttgaaatagggctttccttccaaatggctatttttaggctagggatgttaacatcagggatttgtgtgtggaataactggaatgtcatttttgcttttaagccatttctgatgatatagccaaagcaggttgtctgactatgtaggatttttacatcttgaaactaaatcagaaatccagacatgaaaataacctttctagaatgcctaggagcagaaaacaataatagcatgctaaatcacaaatgatgctatgtatgggtatgtaaatatcagtgctgtctgcatttctgggtttattgaagacctcttgttgtatatatcctcaaaaattaatgtaattgacatcttcaagaatgtttctattgtcttccattcataatcagagatgtaatttgtatggactaaataaaaactttattatgtaatgaaa

SEQ ID NO: 23426 - protein, 103 aa, Homo sapiens; identical to SEQ ID NO: 23418

SEQ ID NO: 23427 - DNA, 2874 bp, Homo sapiens
gagactagggggcggtgaggagtgggacccgctcgcggccattggttgtgcggccaggaggggcggagggacgacgcgcgggctgtgcggggccggcagcccggatccactcccgctgcgcctgctgtccgccgtgcgcccagactgcgcgccgcgccgctgcgcccaacattcccgaggacggcttcgcgggcgcgtatcgtccagaccggagcaccgccccaccgctagcgcaggagacctgccggggaagtcgcgtgtcctgacctgcagtctcaatgcacatctgatacctgctgcctttgagaaacaagttttgttgtgctgatttaacagcctgtgaattctgcaaacacgatcgtgaaaaaatgccaatctgtcctgtgtaagccctgtgtgaagttttgactttaatctaccagatcactccttcaccctccataaagatgtctgaacctgacacttcctcaggattttcgggaagtgtggagaatggaacttttcttgagctgtttcccacatccctgtccacgtcagtggacccatcctcaggccacctgtcaaacgtctacatctatgtgtccatattcctcagccttttagcgtttctgcttctgcttttaatcattgccctccagaggctcaaaaatatcatctcctccagttcctcctacccagagtatccaagcgacgctggaagttctttcaccaatttggaagtctgcagcatttcctctcagaggtccactttttcaaacctttcatcctgaggaaaatggaagagtccttgagtgtggcagcagttttgacatccccttacggaagtgtcccgtgaggcattgcctcatgaaagaaatgatccttttggtgtagacctgcttctccttctcctttttctctgatttcttttctgttcatgatgcttttcatttggggatggagacaccgatgttggtggaaatgtgtgcaaaccccaaggtgcagaatttcacacaaatggcttgatgaatctagactgggcttcttcaggtaagtcagttcattctactttgttggacgccgtaggctcatctgaggtggcctctccgtggatgctggacatggactcgcacttcatttcttttacaaagccgtgaaatcaactgagcctgcagaaactggcaaaatcaagtctgacctatgtagaagttattttccatatttaaaagataaagtggagacaccaaacttaaaaaggaagagagtcaatttagatttaatgtatgacatttctaaaactgagggtaaatatatgctaaatattttctttaacttcactttaacaagtaaaaatcacacttattgatgaatgtaagtcatttgggaaagttttggaagagtttacattttaatagcaagacaaacatgtattatgatggagcttgtgatgtatttctgcctcctggagttttattttgtttttctgcttatgttttagtcataatgccacaaagttgtggaatttttgtgattaattgctgttactagtactaagagaagcaccagaagagatgccaagaagtttttatatgaataatttctatcagtgagaattaagcatatggaaaatattcatttagttgtattttatacagtaataactcttagctgtcgtgtaagttcctttattcggtttcatagtctttataattttagtgcagaattatattaagcctccaagatgtctgatatttgttcactcacattaggttgtaaaacttagaaactaaattgcaaatatatgtgttattatatactccacgaatgttgcgtctctgataattagttgttgtatgttaacataatactctacattaggatttcaggatgtgagtttgtattaaaaattgtaggcactcaagttgtgtagctgctgggagctttagggatcctaggagctgccgtgctgcaggcagcagagtatgtctgaactcggcgggcgggtggcaggggctgtctgtgaaattaggcacacatgtgagctcagacatggaatgtggaggaactcaagctgcccctaaaaacaaaacaatcaaactgcagctccttaagagtaagaattttaatttaattttgaaaataaatggcccacagggtaaacactgaacttattcaacctacaggaggccactgcatcaacacgccacggtcttcccatggcaactgaatcattccttgttcaaaacatttaatcatcttaagcagtggggcttcaacacaccgtttggttagattgtgcagtcagcactctccagtgattagaatgggggaaagaatccactatttgtacagggtttatctttatcatactaaaatgctgagtgagtggaggtctgggaatgaaaatcagaagtcttcttcttcttttaattcataagcctcacttaaatcagaacacatttaactatttatatatcaaaaacgtccccaaacaccataagaccagcacagagttgctgccctaaaatgtataattagtgaaaaatttacctctgcttccatttaaagcatggcagtgggttgggtgtcattatgtagtataaaaactggactagataaactgctattttagagcattattagcattctctgaatatatgtatatatacatatatatacgcacacacacacacacacataaatatatatatatatatatatatataaactcacatactcccaattaaaagtcgtgtgaaagctacacaggattacagaggcatctatattatcacttttgctctttgactaatcctatgctgtttttgttatagagagaaacaaggacatggatgaagtgatttttttttaaataaaaggacaaatttgccacac

SEQ ID NO: 23428 - protein, 107 aa, Homo sapiens
MSEPDTSSGFSGSVENGTFLELFPTSLSTSVDPSSGHLSNVYIYVSIFLSLLAFLLLLLIIALQRLKNIISSSSSYPEYPSDAGSSFTNLEVCSISSQRSTFSNLSS

SEQ ID NO: 23429 - DNA, 504 bp, Homo sapiens
atgaggccactgatgggcagtgaggatggtgacttgaagcatcaagcaaacaaagcacagagtggagcagccagggatggaatagaaggaagcgaagcaatgaggggaatgggagcttgggaaccaaaggactcgctgggcatgttcaatggaatctttaaggataggaatgggacgctcatcatcagtgggaagcccatttctatcttccaggaaacaggtcccaccaacctccaatggggtgatgttggtatgggggcccctggtgtcatcactatcttcaagaagattggggttcacttaaagactgtggatggtccttctggcaaaccatggtgcagtggtcatcgtgctgcccagagcagcatcctcaccatcactggcacggccaagactgtcatgaatctgacttgccaccttgagaacattgccaagtacaatgacatcaagaatgtggtgaagcaggtgatgggggcttccgaagagcctcctgagcaacattga

SEQ ID NO: 23430 - protein, 167 aa, Homo sapiens
MRPLMGSEDGDLKHQANKAQSGAARDGIEGSEAMRGMGAWEPKDSLGMFNGIFKDRNGTLIISGKPISIFQETGPTNLQWGDVGMGAPGVITIFKKIGVHLKTVDGPSGKPWCSGHRAAQSSILTITGTAKTVMNLTCHLENIAKYNDIKNVVKQVMGASEEPPEQH

SEQ ID NO: 23431 - DNA, 958 bp, Homo sapiens
cgcgcaggctgcggtcgcgcaggcgcagtcggggcgccttcccggtataggcgccttttaccccagcgtgtcctgagtctttggttcgcgaagtgccgttaggccaagcaggtgctaaaagcccggggtcgtggaccccggccaggtcttagcagcatggaggcgcagggtgtagcggagggcgcggggccgggcgccgccagcggcgtgccccaccccgcggccctagccccggctgcggctcccaccttggcgccagcctcggtggcggccgcggcctctcaattcaccctgctagtgatgcaaccctgtgctgggcaggacgaggctgcggcccccgggggcagcgttggggcgggcaagcccgttaggtacctgtgcgaaggggccggggatggcgaagaggaggctggggaggacgaggcggacctgttagacacttcggaccctccggggggaggcgagagcgcggctagtttggaggatctagaggacgaggagactcactcggggggcgagggcagcagcgggggcgcccggaggcggggcagcggtgggggcagcatgagcaagacctgcacctacgaaggctgcagcgagaccacgagccaggtggccaagcagcgcaaaccgtggatgtgcaagaaacaccgcaacaagatgtacaaggacaagtataaaaagaagaagagcgaccaggccctgaactgcggtgggactgcctcgactggcagcgcgggaaacgtcaaactcgaggaaagtgcagataacatactctccattgttaaacaaagaacaggatcttttggggatcgtcctgcaagacctactcttttagaacaagtgttaaatcaaaaaagaagctattaaatcagcaagttttggagcaaagacaacagcagtttccaggaacatcaatgtgagggaacttaccaagaacatctacatggttttttat

SEQ ID NO: 23432 - protein, 237 aa, Homo sapiens
MEAQGVAEGAGPGAASGVPHPAALAPAAAPTLAPASVAAAASQFTLLVMQPCAGQDEAAAPGGSVGAGKPVRYLCEGAGDGEEEAGEDEADLLDTSDPPGGGESAASLEDLEDEETHSGGEGSSGGARRRGSGGGSMSKTCTYEGCSETTSQVAKQRKPWMCKKHRNKMYKDKYKKKKSDQALNCGGTASTGSAGNVKLEESADNILSIVKQRTGSFGDRPARPTLLEQVLNQKRSY

SEQ ID NO: 23433 - DNA, 2325 bp, Homo sapiens
cgcgcaggctgcggtcgcgcaggcgcagtcggggcgccttcccggtataggcgccttttaccccagcgtgtcctgagtctttggttcgcgaagtgccgttaggccaagcaggtgctaaaagcccggggtcgtggaccccggccaggtcttagcagcatggaggcgcagggtgtagcggagggcgcggggccgggcgccgccagcggcgtgccccaccccgcggccctagccccggctgcggctcccaccttggcgccagcctcggtggcggccgcggcctctcaattcaccctgctagtgatgcaaccctgtgctgggcaggacgaggctgcggcccccgggggcagcgttggggcgggcaagcccgttaggtacctgtgcgaaggggccggggatggcgaagaggaggctggggaggacgaggcggacctgttagacacttcggaccctccggggggaggcgagagcgcggctagtttggaggatctagaggacgaggagactcactcggggggcgagggcagcagcgggggcgcccggaggcggggcagcggtgggggcagcatgagcaagacctgcacctacgaaggctgcagcgagaccacgagccaggtggccaagcagcgcaaaccgtggatgtgcaagaaacaccgcaacaagatgtacaaggacaagtataaaaagaagaagagcgaccaggccctgaactgcggtgggactgcctcgactggcagcgcgggaaacgtcaaactcgaggaaagtgcagataacatactctccattgttaaacaaagaacaggatcttttggggatcgtcctgcaagacctactcttttagaacaagtgttaaatcaaaaaagactgtcgttactaagaagtccagaagtagtgcaatttttacagaaacagcaacagctattaaatcagcaagttttggagcaaagacaacagcagtttccaggaacatcaatgtgagggaacttaccaagaacatctacatggttttttatcttattgtaatagatgagcatatttttttaccagacataaatggggtaataatctatgcctgtagaacataaacattttcctgtaaatgtatgtgtgcatttggggataagtaagtattgcactttgtgcatctaatctttcagattactgtgagtttgaagaagtcagcttatctttccaaataacatttaattataatgttttttaaaaaatatattcctcttcagtcattgttactgaaggtaatgaagcagttactttctgtggaagtcataaagttaatagatattaatcttgactcatctagctcagtggttctcatcaagggtcaatttgattgtcatagtgaccttgaaaaccactggcttttagtgagtggccaggaatgctaaatgttctgcagtgtcaggggtagtcccacatactaaagattgtctcacccgcagtgccaataacactcctaagaaatgttgatggctattttgtggtgctaacatgtagttggggcacctataattgggttctcttaataacctttctttgcagttaagactgaagctgtcaaagaggtaagcacattttatatagacgtaaggaaagtgattattgtttaatatctgtgaatttaggatgtgcatctcttttcagaggtgtgttagtaaaacctgacggattaactaagcacactgggatgtgtctcctacagttggcttctctctttgatgttacctgttagtgctgatctcttaaagcagacatttcttgtttgttgaatttgtgaacagtatagatctcagcccaccaatgccaagacaaaattatttttcttatacttattttttattaaacaaaatgaaaaagatccttttcaaaaaggtgatcctgaaaataaaactaacactccagtattttgtcattgtttttcgcaattgagctatctgaaaactgttattcctaagtaatgttcaaaaatgataagtaatctggatacctttttcttatactttctcctaggaaaactttaaaactttaaaaaggcaaacctaccaataggaataacaaattaaatgtcaagagagtatatccaatattaggatataaatgtatgtgtctcaagtttaactctacaaaaatttgttacttgttttttaaactctatatataaagttcgacttaatcatggctgttctaagaagtacttatggagagcaagaacgtttttgttcatttcttaatgtgtgtgtttttacttgcatatctgttcaaaacacttttaacaaaattaattcattaaagtccagttgttgacctttg

SEQ ID NO: 23434 - protein, 272 aa, Homo sapiens; identical to SEQ ID NO: 3103

SEQ ID NO: 23435 - DNA, 2825 bp, Homo sapiens
cgcgcaggctgcggtcgcgcaggcgcagtcggggcgccttcccggtataggcgccttttaccccagcgtgtcctgagtctttggttcgcgaagtgccgttaggccaagcaggtgctaaaagcccggggtcgtggaccccggccaggtcttagcagcatggaggcgcagggtgtagcggagggcgcggggccgggcgccgccagcggcgtgccccaccccgcggccctagccccggctgcggctcccaccttggcgccagcctcggtggcggccgcggcctctcaattcaccctgctagtgatgcaaccctgtgctgggcaggacgaggctgcggcccccgggggcagcgttggggcgggcaagcccgttaggtacctgtgcgaaggggccggggatggcgaagaggaggctggggaggacgaggcggacctgttagacacttcggaccctccggggggaggcgagagcgcggctagtttggaggatctagaggacgaggagactcactcggggggcgagggcagcagcgggggcgcccggaggcggggcagcggtgggggcagcatgagcaagacctgcacctacgaaggctgcagcgagaccacgagccaggtggccaagcagcgcaaaccgtggatgtgcaagaaacaccgcaacaagatgtacaaggacaagtataaaaagaagaagagcgaccaggccctgaactgcggtgggactgcctcgactggcagcgcgggaaacgtcaaactcgaggaaagtgcagataacatactctccattgttaaacaaagaacaggatcttttggggatcgtcctgcaagacctactcttttagaacaagtgttaaatcaaaaaagactgtcgttactaagaagtccagaagtagtgcaatttttacagaaacagcaacagctattaaatcagcaagttttggagcaaagacaacagcagtttccaggaacatcaatgtgagggaacttaccaagaacatctacatggttttttatcttattgtaatagatgagcatatttttttaccagacataaatggggtaataatctatgcctgtagaacataaacattttcctgtaaatgtatgtgtgcatttggggataagtaagtattgcactttgtgcatctaatctttcagattactgtgagtttgaagaagtcagcttatctttccaaataacatttaattataatgttttttaaaaaatatattcctcttcagtcattgttactgaaggtaatgaagcagttactttctgtggaagtcataaagttaatagatattaatcttgactcatctagctcagtggttctcatcaagggtcaatttgattgtcatagtgaccttgaaaaccactggcttttagtgagtggccaggaatgctaaatgttctgcagtgtcaggggtagtcccacatactaaagattgtctcacccgcagtgccaataacactcctaagaaatgttgatggctattttgtggtgctaacatgtagttggggcacctataattgggttctcttaataacctttctttgcagttaagactgaagctgtcaaagaggtaagcacattttatatagacgtaaggaaagtgattattgtttaatatctgtgaatttaggatgtgcatctcttttcagaggtgtgttagtaaaacctgacggattaactaagcacactgggatgtgtctcctacagttggcttctctctttgatgttacctgttagtgctgatctcttaaagcagacatttcttgtttgttgaatttgtgaacagtatagatctcagcccaccaatgccaagacaaaattatttttcttatacttattttttattaaacaaaatgaaaaagatccttttcaaaaaggtgatcctgaaaataaaactaacactccagtattttgtcattgtttttcgcaattgagctatctgaaaactgttattcctaagtaatgttcaaaaatgataagtaatctggatacctttttcttatactttctcctaggaaaactttaaaactttaaaaaggcaaacctaccaataggaataacaaattaaatgtcaagagagtatatccaatattaggatataaatgtatgtgtctcaagtttaactctacaaaaatttgttacttgttttttaaactctatatataaagttcgacttaatcatggctgttctaagaagtacttatggagagcaagaacgtttttgttcatttcttaatgtgtgtgtttttacttgcatatctgttcaaaacacttttaacaaaattaattcattaaagtccagttgttgacctttgagttagctgatttctttattctgttctttagtttattcttactagatgcagaggaattcatctactgtctgttattaactgttagtttattctcatacttacgatgttgagagtttttttgaagcttaagttaccctttatggtggaaaacattagcttatgcttctttagatggaataatgggaaaggagggaaatgggaaatggatggaaatgggaaaggagggaaaataatagcccagtgagagctgaatgaaaagggactgaatttaaatatttgtaagaactttgtgatgatgagtaattgtcagacgtgggatagataactgagaggctcagaatctttaccaaggatattttttaggataaggtagctgcctgttcatgaatttggataagaatagtaggacaatattcaacacaatttaatttttgtctgccacattagacatttttttaccttataaaatgatcaataaagcaataaggtttattttgggt

SEQ ID NO: 23436 - protein, 272 aa, Homo sapiens; identical to SEQ ID NO: 3103

SEQ ID NO: 23437 - DNA, 2152 bp, Homo sapiens
tgagtagctaggattagaggcatgtgccaccacacctggctaattttttttttttttttttttttttgtatttttaagagactgggtttcaccatgttggccagactggtctcaaactcctgacctcaggtgatccacctgccttggcctcccaaagtgctaggattacaggcatgagccactgcacctgacccacagacatctcttcattcagtagtctagcatgggggcttgctcccaagagtactgttccaggaagacatgccccattgtgcaagtactcattcaaacctctgctcgcataatgcttgctaacatgcctttggccaaattaggtcacatagctaacccaaagtcatgtgggtggccatcaacactgggatgtgtgtggctcgttggaggtcactgaagtgaaacctaccgtagttacacagtaagtcagtcaaattcttggtttattggacagctgacagctgttaagaaggaccctatgttaaaggaaatggatacaatctaataacattaacaatagataatggtttttaaccattaacttccattgataatggttctgattagagcgcaagataactagtgaaacgagaattcccttatcccccttgcggggcatgcgacatgggtatggctcactcttttggtttccctgttgctcaaacccctaggaggagcatgcagacgggcaggtgcagaggccgtggggagcgcttctgggctctgacctcacggcagcgtctagggatggctgtctgtgactcccgaatccctagtgggcgtctcttacagtgtgctctttcagctttgccgtctgcagaaggattatgttaatcagctcgatagaccctctgccttattgcaagggcagtggccagtttaacagctttctgtatcccaagttcttgcccagtgtacaagaagaatcggatgacacgtgggcttgaaggatgagtgcaaggttttattgagtggtggaggctctcagcgagatggatgcggaaccggaagtgggggatggagtgggaacgtgatcttcccctggagtcctgctgttctcggtagacggacgcctccttccttctctgccatgccgccctgccactcccgctctttgtcactctctgccactctctttctctgctcctctcaatgtccagccacttgtgtctttgaggattctgagatggagagatcaacctgaattatctggatgggctctaaatgtaatcacacgtgtccttataagaggaacccttgcttacagaagaacaagagatgtgatgatggaagcaacaggttagagagattcaagaaaagcatagccagccaagggaatgcaggcagcctccagaagctaaaaaaaaaaaaaaaaaaaaaaaaagaaaagaaaaaagaaaagcaagagaacgattccccctagagcttcctgaaagaactagccatgccaccacattgtcgttatcccagtgagacagatttcaaacttgtggcctcaagaactgtaagggtaagaactgtaaaataaatttatgctgttctaagccacaaaatttgtggcacttttttacagcagcaacaggaaattaataaaagtcttccagtggtagggggtgaatctcattacgtttctaaggcaagcattgcttagtatcttgcttatttaaaagataaatttagctagtatacacaatagtggccaattagattgtatgctataatacttgtaagaaaaatgattgcatactctttgttttcttgtttgagacagagcctcactctgttgcccaggctagagtgcagtggcacaatcttggctcactgcaacctccacctcccggtttcaagctcttctcgtgcctcagtctcccaagtagctgggactacaggcacacaccaccacacccagctaacttttgtatttttagtagagacagggttttgccattttggccagactagtctcgaactcccgacctcaggtgatccacccgcctcagcctcgcaaagtgctgggattacaggcatgagccaccacacccagccaattgcatactctgaatcaaaaaaccatttccctcaagttagaatatgcaatatttattgtacattgagtgccctctggtgcttacccaaagct

SEQ ID NO: 23438 - protein, 37 aa, Homo sapiens [sequence omitted]

SEQ ID NO: 23439 - DNA, 5447 bp, Homo sapiens
agtctgactgacgccggctggggccgccgccgccgccgccgccgccgccgctgctgcagccgctgtctcggtccccgccgccgccgccgggccctgcaggcgctgggcgcgcgcagccaggcaagttggccaccctgttcaagggcttaggagaaagtcaacacacttcgcaacttgaattggtcccagctgctcccagaagaacgggcgggttggtccctatgccacccctggagagctactcgccgcccactttgccgtgaagggctgtgcggttcccgtgcgcgccggagcctgctgtggcctcttatgcactccaccacccccatcagctccctcttctccttcaccagccccgcagtgaagagactgctaggctggaagcaaggagatgaagaggaaaagtgggcagagaaggcagtggactctctagtgaagaagttaaagaagaagaagggagccatggacgagctggagagggctctcagctgcccggggcagcccagcaaatgcgtcacgattccccgctccctggacgggcggctgcaggtgtcccaccgcaagggcctgccccatgtgatttactgtcgcgtgtggcgctggccggatctgcagtcccaccacgagctgaagccgctggagtgctgtgagttcccatttggctccaagcagaaagaagtgtgcattaacccttaccactaccgccgggtggagactccagtactgcctcctgtgctcgtgccaagacacagtgaatataacccccagctcagcctcctggccaagttccgcagcgcctccctgcacagtgagccactcatgccacacaacgccacctatcctgactctttccagcagcctccgtgctctgcactccctccctcacccagccacgcgttctcccagtccccgtgcacggccagctaccctcactccccaggaagtccttctgagccagagagtccctatcaacactcagactttcgaccagtttgttacgaggagccccagcactggtgctcggtcgcctactatgaactgaacaaccgagttggggagacattccaggcttcctcccgaagtgtgctcatagatgggttcaccgacccttcaaataacaggaacagattctgtcttggacttctttctaatgtaaacagaaactcaacgatagaaaataccaggagacatataggaaagggtgtgcacttgtactacgtcgggggagaggtgtatgccgagtgcgtgagtgacagcagcatctttgtgcagagccggaactgcaactatcaacacggcttccacccagctaccgtctgcaagatccccagcggctgcagcctcaaggtcttcaacaaccagctcttcgctcagctcctggcccagtcagttcaccacggctttgaagtcgtgtatgaactgaccaagatgtgtactatccggatgagttttgttaagggttggggtgctgagtatcatcgccaggatgtcaccagcaccccctgctggattgagattcatcttcatgggccactgcagtggctggacaaagttctgactcagatgggctctccacataaccccatttcttcagtgtcttaacagtcatgtcttaagctgcatttccataggatagaggctattgcagggagtggcttgtatcatttcagatttgcaactgaagtttctaaaaacatgtgtaaatacatagaatgtatactgttcttattttttttaatcaccgtttgttttgtgctttctagttaacctgatgccagtacagtgcaattggaaaagcaggactttggtgcctgtgctataagcagcagattttgtgggaggaaacacttgagaggcgatattgtcaacagtatttgaagggtgttagcagaataaaagacagctttagtcagccgtgtcattataaagcatgttgtgtggcctcacagaaacattgaaactgtttatacagcaaaagtcaggtattagcagcactaaagcaaatatcactcagatgaaacaaagcagtgaaacccctacagtttaaatgatgtcacttttagtgctgttggcaagaaaaaaaaaacaacaaacttgtacaatgaattaatgagataggccatagaaactttatttctaaggttgacatacctatagctgggctcctgtgctcatattcagtggtacattttaaacaaactgtgatcggaaaagaaaaaaaactgtgaagccaaaagtcatgttccctcagtctaccactgtaaaaacagagtctaatatgggaaaataaatatgaaaatagcatgaaatgctgtttcccagattgcaagataagaccagaacttggtccaagagccagccacccagggagactcctgctttccacagaggagaccaggttcctgtcgtgctggttgttcgtgtcaggcagtcctgcaaactttgagtctgcgcagcgtgccagaatagcttgtgtttcagtcctgtgtcaagaagcaggtgaaaccaaaggttggagaaaagcatcacacgtcgacttacactttctcatttcccacgttccagtctcctgggaagggcactctttcgccacgttttcctgcctcttggcaaatattaactctttgcagatcactaaagcaacagtaaagactttgagaaaatctagacacattattggatcaatgagttatttaacctagtgtctagtgattatctaacctggaaataaattcccaaggaaagtgataataatttcataatcatctgcaatttctggggaacagtggtactgaataataagacatcttttaaaaatatacacaatattaaaaacctgttcttattttactttagatgagggaggaaaatcccccaaatttctaggtactttcatatatatacttgccatgcactaaacactgcattgcttggaaaaatatttcacaccctctttaaaaatgtacaatttaagatggcagttatgcttgtaacagacagcacttcagtaatccaagaagtttcttcatttatacattttatctcaactctttctagcattagtgcacatggtagtttttctaattaaattgtattcaaggtagaaatgatcatgtgagaaagatatatgattgagctactactgtcacctcttacagttactagtgttagctaatagaaactttcatatatacacatagaaaagaattattacattttacattgaaaaatgtaatatatggcccatgtagtgtatagaaaaatctgtagtttattggttcatcaactatgtattgtgcacctacctatgggtgtcaggtacaatgttaggtactgtagaatcaaatgtaaataagagacagtcccagccctcagggagccgagaacctaatagtgaatctgtttgtacagacatcttcatgtttcagaacttttaaaacaaaacaaaataatgtaatctatcatcttttgcttgaaagaatgtgattgatttcttatctctgttttgaaattatttccttactcttctgcaaagtcaggtaatggattccttgtataaatgctacttttcttccatgtctcaaagttgttttttttcctcccctttcttccctgttttccaataattctccatgtccccttttcttagaaaaggcattaatatggtgaatcttgtatgggaaccattccatgggagaacttcaacacagtttttgctccagagatcaaacatagctttcgtgatctctctaccagctatctaacttatcctctggtaatctttttttttttttttttttttttgagatggagtctcgctgtgtcaccaggccagagtgcagtggcgtgatcttggctcactgcaacctctgcctcccgggttcgagtgattctcctgcctcagcctcccaagtagttgggactacaggctaccacgcccagctaatttttatatttttagtagagacggggtttcaccatggtagccagaatggtctctatctcttgaccttgtgatccgcccgcctcagcctcccaaagtgctgggattacaggcgtgagccactgcgcccggcttcctctggtaatcttacacctttacagaattaatctaaactggtggctcataaatgacattaaaaacaaaaaaaaaatctggatgcagtggctcattcctatagtcccagcactttgggaggccaaggcgggaggatcatctgagcccaggagtttggggctgtagtgaactatgatcatacaacttcattctagcctgggtgacaaagtgacaccctgtctctaaacaaaaatcaagaaacaaaaaacttgtatttccctgcagctttgggaagccagaacacaatattgcagtgaatctgaattttctgtgacaaataaattattaaattggcacatatgatcatcaccagtcatgtctcatcaaaagcctttattatgatgcttgtacattttgaagaatttagaattaatgagaagttaaccctttagtcattgtaacacaatcatattttaatcagctttttcttttgctaccaagagtttcaaaaaataaatgcagtatttgatttcaggctgctaaatgggctcatttagcattcattccttgatgtagacattaaaaaaaaaactgaatagcattctttccaggataactaataaagcagacatgctaagcctataaatacatcagcactgcagcacacgtttaaggttgccacggacaaggatcacacaatagagaacactgtagtaacatttcggtctgctcacaagacccagaacattgatcagtttttgttgttggtttattatttttctgttaaaaaattgtgaaaagtttgttttagctagatgatattttaatagctgcgagtgctttggaactataaagatgtcactacttaacacatataccttatgttttgttttgttttgttttacactcagtataaatcaggagaagttagccaaccatctagcatttagaatcctcttttttattgtcttctaaggatatggatgttcccataacagcaacaaaacagcaacaaaaacatttcataaatatcacttgatagactgtaagcacctgcttaactttgtgtcccaaatatttagtgtgtatatatatatatatatatacacacacacacacatatatattcaacaaataaagcaaaatataacatgcatttcacattttgtctttccctgttacgattttaatagcagaactgtatgacaagtttaggtgatcctagcatatgttaaattcaaattaatgtaaaacagattaacaacaacaaagaaactgtctatttgagtgaagtcatgctttctattataataacttggcttcggttatccatcaaatgcacacttatactgttatctgattgtttataataaagaatactgtacttata

SEQ ID NO: 23440 - protein, 430 aa, Homo sapiens; identical to SEQ ID NO: 3105

SEQ ID NO: 23441 - DNA, 5455 bp, Homo sapiens
agggcccagaaacatgtgaggaacagcagctcagaagggtctccagactgatgggccggtgatcctatattcttgttgggctgacaactcttctggtttcgggctccaggtgctggcaagaaatctcagagagttggccaccctgttcaagggcttaggagaaagtcaacacacttcgcaacttgaattggtcccagctgctcccagaagaacgggcgggttggtccctatgccacccctggagagctactcgccgcccactttgccgtgaagggctgtgcggttcccgtgcgcgccggagcctgctgtggcctcttatgcactccaccacccccatcagctccctcttctccttcaccagccccgcagtgaagagactgctaggctggaagcaaggagatgaagaggaaaagtgggcagagaaggcagtggactctctagtgaagaagttaaagaagaagaagggagccatggacgagctggagagggctctcagctgcccggggcagcccagcaaatgcgtcacgattccccgctccctggacgggcggctgcaggtgtcccaccgcaagggcctgccccatgtgatttactgtcgcgtgtggcgctggccggatctgcagtcccaccacgagctgaagccgctggagtgctgtgagttcccatttggctccaagcagaaagaagtgtgcattaacccttaccactaccgccgggtggagactccagtactgcctcctgtgctcgtgccaagacacagtgaatataacccccagctcagcctcctggccaagttccgcagcgcctccctgcacagtgagccactcatgccacacaacgccacctatcctgactctttccagcagcctccgtgctctgcactccctccctcacccagccacgcgttctcccagtccccgtgcacggccagctaccctcactccccaggaagtccttctgagccagagagtccctatcaacactcagactttcgaccagtttgttacgaggagccccagcactggtgctcggtcgcctactatgaactgaacaaccgagttggggagacattccaggcttcctcccgaagtgtgctcatagatgggttcaccgacccttcaaataacaggaacagattctgtcttggacttctttctaatgtaaacagaaactcaacgatagaaaataccaggagacatataggaaagggtgtgcacttgtactacgtcgggggagaggtgtatgccgagtgcgtgagtgacagcagcatctttgtgcagagccggaactgcaactatcaacacggcttccacccagctaccgtctgcaagatccccagcggctgcagcctcaaggtcttcaacaaccagctcttcgctcagctcctggcccagtcagttcaccacggctttgaagtcgtgtatgaactgaccaagatgtgtactatccggatgagttttgttaagggttggggtgctgagtatcatcgccaggatgtcaccagcaccccctgctggattgagattcatcttcatgggccactgcagtggctggacaaagttctgactcagatgggctctccacataaccccatttcttcagtgtcttaacagtcatgtcttaagctgcatttccataggatagaggctattgcagggagtggcttgtatcatttcagatttgcaactgaagtttctaaaaacatgtgtaaatacatagaatgtatactgttcttattttttttaatcaccgtttgttttgtgctttctagttaacctgatgccagtacagtgcaattggaaaagcaggactttggtgcctgtgctataagcagcagattttgtgggaggaaacacttgagaggcgatattgtcaacagtatttgaagggtgttagcagaataaaagacagctttagtcagccgtgtcattataaagcatgttgtgtggcctcacagaaacattgaaactgtttatacagcaaaagtcaggtattagcagcactaaagcaaatatcactcagatgaaacaaagcagtgaaacccctacagtttaaatgatgtcacttttagtgctgttggcaagaaaaaaaaaacaacaaacttgtacaatgaattaatgagataggccatagaaactttatttctaaggttgacatacctatagctgggctcctgtgctcatattcagtggtacattttaaacaaactgtgatcggaaaagaaaaaaaactgtgaagccaaaagtcatgttccctcagtctaccactgtaaaaacagagtctaatatgggaaaataaatatgaaaatagcatgaaatgctgtttcccagattgcaagataagaccagaacttggtccaagagccagccacccagggagactcctgctttccacagaggagaccaggttcctgtcgtgctggttgttcgtgtcaggcagtcctgcaaactttgagtctgcgcagcgtgccagaatagcttgtgtttcagtcctgtgtcaagaagcaggtgaaaccaaaggttggagaaaagcatcacacgtcgacttacactttctcatttcccacgttccagtctcctgggaagggcactctttcgccacgttttcctgcctcttggcaaatattaactctttgcagatcactaaagcaacagtaaagactttgagaaaatctagacacattattggatcaatgagttatttaacctagtgtctagtgattatctaacctggaaataaattcccaaggaaagtgataataatttcataatcatctgcaatttctggggaacagtggtactgaataataagacatcttttaaaaatatacacaatattaaaaacctgttcttattttactttagatgagggaggaaaatcccccaaatttctaggtactttcatatatatacttgccatgcactaaacactgcattgcttggaaaaatatttcacaccctctttaaaaatgtacaatttaagatggcagttatgcttgtaacagacagcacttcagtaatccaagaagtttcttcatttatacattttatctcaactctttctagcattagtgcacatggtagtttttctaattaaattgtattcaaggtagaaatgatcatgtgagaaagatatatgattgagctactactgtcacctcttacagttactagtgttagctaatagaaactttcatatatacacatagaaaagaattattacattttacattgaaaaatgtaatatatggcccatgtagtgtatagaaaaatctgtagtttattggttcatcaactatgtattgtgcacctacctatgggtgtcaggtacaatgttaggtactgtagaatcaaatgtaaataagagacagtcccagccctcagggagccgagaacctaatagtgaatctgtttgtacagacatcttcatgtttcagaacttttaaaacaaaacaaaataatgtaatctatcatcttttgcttgaaagaatgtgattgatttcttatctctgttttgaaattatttccttactcttctgcaaagtcaggtaatggattccttgtataaatgctacttttcttccatgtctcaaagttgttttttttcctcccctttcttccctgttttccaataattctccatgtccccttttcttagaaaaggcattaatatggtgaatcttgtatgggaaccattccatgggagaacttcaacacagtttttgctccagagatcaaacatagctttcgtgatctctctaccagctatctaacttatcctctggtaatctttttttttttttttttttttttgagatggagtctcgctgtgtcaccaggccagagtgcagtggcgtgatcttggctcactgcaacctctgcctcccgggttcgagtgattctcctgcctcagcctcccaagtagttgggactacaggctaccacgcccagctaatttttatatttttagtagagacggggtttcaccatggtagccagaatggtctctatctcttgaccttgtgatccgcccgcctcagcctcccaaagtgctgggattacaggcgtgagccactgcgcccggcttcctctggtaatcttacacctttacagaattaatctaaactggtggctcataaatgacattaaaaacaaaaaaaaaatctggatgcagtggctcattcctatagtcccagcactttgggaggccaaggcgggaggatcatctgagcccaggagtttggggctgtagtgaactatgatcatacaacttcattctagcctgggtgacaaagtgacaccctgtctctaaacaaaaatcaagaaacaaaaaacttgtatttccctgcagctttgggaagccagaacacaatattgcagtgaatctgaattttctgtgacaaataaattattaaattggcacatatgatcatcaccagtcatgtctcatcaaaagcctttattatgatgcttgtacattttgaagaatttagaattaatgagaagttaaccctttagtcattgtaacacaatcatattttaatcagctttttcttttgctaccaagagtttcaaaaaataaatgcagtatttgatttcaggctgctaaatgggctcatttagcattcattccttgatgtagacattaaaaaaaaaactgaatagcattctttccaggataactaataaagcagacatgctaagcctataaatacatcagcactgcagcacacgtttaaggttgccacggacaaggatcacacaatagagaacactgtagtaacatttcggtctgctcacaagacccagaacattgatcagtttttgttgttggtttattatttttctgttaaaaaattgtgaaaagtttgttttagctagatgatattttaatagctgcgagtgctttggaactataaagatgtcactacttaacacatataccttatgttttgttttgttttgttttacactcagtataaatcaggagaagttagccaaccatctagcatttagaatcctcttttttattgtcttctaaggatatggatgttcccataacagcaacaaaacagcaacaaaaacatttcataaatatcacttgatagactgtaagcacctgcttaactttgtgtcccaaatatttagtgtgtatatatatatatatatatacacacacacacacatatatattcaacaaataaagcaaaatataacatgcatttcacattttgtctttccctgttacgattttaatagcagaactgtatgacaagtttaggtgatcctagcatatgttaaattcaaattaatgtaaaacagattaacaacaacaaagaaactgtctatttgagtgaagtcatgctttctattataataacttggcttcggttatccatcaaatgcacacttatactgttatctgattgtttataataaagaatactgtacttata

SEQ ID NO: 23442 - protein, 430 aa, Homo sapiens; identical to SEQ ID NO: 3105

SEQ ID NO: 23443 - DNA, 510 bp, Homo sapiens
ggaaggagacaaattgagatggctagtatggatgactcttctgagggtttttgccagaaatgggataaaaacatagggcagtagctggtggggggtggagaagtatcttgaaggtagaaaggccaagtatgtggatgcaggtcctgtggaaacttatttctgatgtattcatttttctcattaaaatacaaaataaatatcagttgcaggtatggacagggaaaaaggggttgcaggttttagtggggaggagcgatcacctaggagggggacatgagagaagggactggggggtgggttgtgactgccggggacatcacaggtccacttgaggttctcagtcatgaaagtaaaatgtgatcaggcagcatggttgtgttgaaatccaagttttaaaaaactctacagagaatcactgctcccagtcacagaactgatttacttggctgtgatctcccttcatttttaaatatcctttcattgatatataacatatagagaaaaatatgc

SEQ ID NO: 23444 - protein, 67 aa, Homo sapiens [sequence omitted]

SEQ ID NO: 23445 - DNA, 526 bp, Homo sapiens
ttttctcttgtctgtcaccatgtgagacatggctttcaccttccatcatgattgtgaggcctccccagccacatagaattgtgtcatgagagccacccttcccaaagtagcacttgtgagcagaggtgatcagagggctttctgaagagtgaggagtgacttcagagggccaaaaagaagaaaagggagtgagacagtcgttaagactcctaatcccggcttatttttactgcttctcaacacagcattgcaagtggctgatttgatggatgtggcacgtgaccaagttctggctaatgagatgtctgaaacttaaagtggaagagatgtatcatctccttttccttgctccatcctgctacctgaaaaatggatgtggtgacaagccctggaaaaccacaaggatgagaacagcactggagagatggtgcagcgcatgatgcaattgcctaggtatctgatggctgagtagaatttctctcctccgacttttacatgggaaggaaataaaactctattttgtttg

SEQ ID NO: 23446 - protein, 56 aa, Homo sapiens
MWHVTKFWLMRCLKLKVEEMYHLLFLAPSCYLKNGCGDKPWKTTRMRTALERWCSA

SEQ ID NO: 23447 - DNA, 3184 bp, Homo sapiens
aaggtctctttacaccagagctaagatcacgaataaaggagcagctttgggtttgcagagattacacaggaatgtatgtttctggcaggtcatttgccatctttgcaaggagtgtacatggatgtcatcattacaaaggatgtgagaggaaaaatttattcaagaagcacttattaaaatttcttccactgtgctggatccttaatttacatacttgtttgtagattctgtttctctttaagtattttttaaaaattcatatggaatatttcttataatcccaagtttattgttgttatggtcaaccactaattacttgaagaatgtaatataaaattgtttatcgtttatgaagtctcttagttaccttttgatacagtttggctgtgtactcacccaagtctcatcttgaattgtagctctcataatccccacgtgttgtgggagggacctgatgggaggtaattgaattatatgggtgggttttcctatgttcttgtgatagtgaataagtctcatgagatctgatggttttataaagggcagttcccctgcacatactctcttgcttgctgccatgtaaatgtgcctttgttcctccttcaccttctgggatgattatggggcctccttagccatggggactgtgccattaaacctctttttctttataaattacccagccttgggtatttcttcatagcagtataaaaatggattaatacagtaaattggtactggtagagtggggtactgctattaagatatctgaaaatgtggaagcaacattggaactgggtaacaggcagaggttagaacaatttggagggctcagaagaagataggaagatgtgggaaagtttggaacttcctagagacttgttgaattgctttcactataatgctgatagtaatatggacaataaaatccaggctaaggtggtctcagattgagatgaggaatttgttggaaactggagtaaaggtcactcttgctatgcaaagagatgtactgcattttacccccaccctagagatctgtggaactttgaacttgagagagatgatttagggtatctggtagaagaaatttctaagcagcaaagtgttcaagaagtaacagtgcataaaagtttggaaaatatgcagcttgacaatgtggtagaacaaaaagcccattttctggggagaaattcaagccactgcagaaatttgcacaagtaatgaggaaccaaagggtaatccccaagacaatgggtaaaatgtctccagggcatatgagagaccttcacagcagcccctcccatcacaggctcagggacctgggaggaaaaaatggttttgtgggcctggttcagggcttccttcctgtgtgcagcctagggacttggtgccctgtgtcccaaatgctccagtcatggctaaaagtgaccaaagtacagctcaggtcattgcttcagaaagtgcgagtcccaaagtcttgacagcttccacatggtgttggttctgtgagcgcacagaagttgagaactgagttttgggaacctctgcctagttttcagaggatgtatggaaatacctggatgtcgaggcagaggtgtactgcaggggtggagccctcatggagaacctctgctagggcagtgcagaagggaaatgtagggtgggagcctccacacagtgtccctattggggtacttccttgtggagctgtgagaagaaggccaccatcctccagatcccggaatggtagatccattgaaagcttgaactgtgcacctaaagaagccacagacactcaatgccagcccaggaaagcggccaggagggaggctgtaccctgcaaagccacaggggcagagctgtccgaggctgtgggagcccacctcctgtatcagcatgacctggatgtgaaacatggagtcaaaggagatcattttggagctttaagatttgactgccccactggattttggacttgcatgggtcctgcagcccctttgttttaattaatttctcctgtttagaatggctgtatttacccaatgcctgtacccctattttatctaggaagtaactaacttgctcttgatttaacaggctcatcggcagaaggaacttgccttgtctcagatgagactttggatatagacttttgagtaaatgctgaaatgagataacactttgggggactgttgggaaggcatggttggttttgaaatgtgaggacatgagatgtgggaggggctgggggtggaatgatatggtttgactgtgtcccaacccaaatctcatcttgaattgtagctcccacagttcccatgtatcctaggagggacccgatgggaggtaattgaatcataggagtgggttttcccctcctgtcctcatgatactgaataagtctcatgagacctgatggttttataaagagtagttcctctaaacatgttctcttccctgccaccatgtaagatgtgcctttgctactccttcaccttctgtgataattttgaggcctccctagccatggggactgtgagtccattaaacctctttttctctataaattacccagtcttgggtatttcttcataggagtaaaaaaatagactaatacactctttatctttcagacttttctatatttttataactttttgtgagacttcataaaagtttagaaaatgcattagtgaattgtgttattgctaaaagtgaaagtcatctagcattcttattcacatatggcctagtttttcaagagtttttcagaacttaggttggctagaaaatcaccagtcttttctcattatattgtagaaatttcatcagtgagtattatcagatgttgtataagaccttacaaagaccccacagaagtaaaggcaataatcctatatgtaaaaaaacaaattgataacaaaaacaaaaaacaaaacaagacaaactaaaaagtactgaaacttcaagaaatgtttttccaataattgaaaataaatagctgtttggatgaatataaaaataaatctcaataaattaaattcagctgccatttttgaataattaattggtatatgttggattatgtgtgcatattgtgtaacaatgatactggctgtaagatagctcatattgggttctttttctgctacctataatagatttgtgagtgtcttacaac

SEQ ID NO: 23448 - protein, 50 aa, Homo sapiens
MYVSGRSFAIFARSVHGCHHYKGCERKNLFKKHLLKFLPLCWILNLHTCL

SEQ ID NO: 23449 - DNA, 1268 bp, Homo sapiens
acagaggcagacattgcacataggtatgactgcaaaaatgggtggctaactctgggaagatacttgtgttaaactttatatgacatttaataacccttcatcataaggcaatgttttttacaaaaagattgaaaaaatcatgtaagtcatttactctgcaaaaatggcacattaggtggggttccaaaatccataatgaaacaatgtgttttgcaactaagaaacattcattatgatatatggaaaacactgtctgtctacttgtcctttacgaaaaaatgtaaaactctgaggatcataaaatttaactactaaaaataatcttcgtgtttaagtgatacttatttaagactttacactgttctgtttaaccatggtctcctgtctgattttagccataattgcgaagtatttctaactacaacaatttaattttagacacacccgtgaggaagttgcaagccaacaaaaaagttcaaggatctagaagacgattaagggaaggtcgttctcagtgaaaatccaaaaaccagaaaaaaatgtttatacaaccctaagtcaataacctgaccttagaaaattgtgagagccaagttgacttcaggaactgaaacatcagcacaaagaagcaatcatcaaataattctgaacacaaatttaatatttttttttctgaatgagaaacatgagggaaattgtggagttagcctcctgtggtaaaggaattgaagaaaatataacaccttacaccctttttcatcttgacattaaaagttctggctaactttggaatccattagagaaaaatccttgtcaccagattcattacaattcaaatcgaagagttgtgaactgttatcccattgaaaagaccgagccttgtatgtatgttatggatacataaaatgcacgcaagccattatctctccatgggaagctaagttataaaaataggtgcttggtgtacaaaactttttatatcaaaaggctttgcacatttctatatgagtgggtttactggtaaattatgttattttttacaactaattttgtactctcagaatgtttgtcatatgcttcttgcaatgcatattttttaatctcaaacgtttcaataaaaccatttttcagatataaagagaattacttcaaattgagtaattcagaaaaactcaagatttaagttaaaaagtggtttggacttgggaacaggactttatacctcttttactgtaacaagtactcattaaaggaaattgaatgaaatt

SEQ ID NO: 23450 - protein, 51 aa, Homo sapiens
MLFFTTNFVLSECLSYASCNAYFLISNVSIKPFFRYKENYFKLSNSEKLKI

SEQ ID NO: 23451 - DNA, 1754 bp, Homo sapiens
aacctgaattcagactgattaaagaaggtgaaacaataactgaagtgatccatggaggtgcgttccttatgttacctggggccgactaccttcgctgtgattattttgaaatagtgttggtttagaaatattgaacatctgatattttctcttagttcttattttataaaaattgtgggaattatttcctcagctatgagttcttattagctggtcagaaataaaacatagttagcttttaatggatctagttggaattaatttatctattaagtcactgggcccaacaaaatgtcatgatttttgcatatacaagtgaggattgtggaataaaattgtaacattaatgtcagtataaaaggaaatattagaaacagtaggaaaaaatgaccattgtataagtctctgtctaataagccactccactactaggatttatgatagggctcccattccaatgatatagaactccctggattctcactaagtatttattccacatccagaaaacaagtatgacatggagagttaggatgtcaaatggccctctctctcaaccaagattcaggacatagctattaccttttagatccctattgatatgatttttgggggatatgttctaaaaatgtttatgattgaatcttaaatggtaatatttgtagaaatatagttaatcattacaatgtctagcttatggatgtatagtcacaatatgagggtaaatcaaatgcatttgtattcccctgcttttagagccaattattaaaaaatacaccaaaatcattgatggagtgcctgtggaaataactgaaaaagagacacgagaagaacgaatcattacaggtcctgaaataaaatacactaggatttctactggaggtggagaaacagaagaaactctgaagaaattgttacaagaagacacacccgtgaggaagttgcaagccaacaaaaaagttcaaggatctagaagacgattaagggaaggtcgttctcagtgaaaatccaaaaaccagaaaaaaatgtttatacaaccctaagtcaataacctgaccttagaaaattgtgagagccaagttgacttcaggaactgaaacatcagcacaaagaagcaatcatcaaataattctgaacacaaatttaatatttttttttctgaatgagaaacatgagggaaattgtggagttagcctcctgtggtaaaggaattgaagaaaatataacaccttacaccctttttcatcttgacattaaaagttctggctaactttggaatccattagagaaaaatccttgtcaccagattcattacaattcaaatcgaagagttgtgaactgttatcccattgaaaagaccgagccttgtatgtatgttatggatacataaaatgcacgcaagccattatctctccatgggaagctaagttataaaaataggtgcttggtgtacaaaactttttatatcaaaaggctttgcacatttctatatgagtgggtttactggtaaattatgttattttttacaactaattttgtactctcagaatgtttgtcatatgcttcttgcaatgcatattttttaatctcaaacgtttcaataaaaccatttttcagatataaagagaattacttcaaattgagtaattcagaaaaactcaagatttaagttaaaaagtggtttggacttgggaacaggactttatacctcttttactgtaacaagtactcattaaaggaaattgaatgaaatt

SEQ ID NO: 23452 - protein, 51 aa, Homo sapiens; identical to SEQ ID NO: 23450

SEQ ID NO: 23453 - DNA, 3166 bp, Homo sapiens
atgtatataaattctgagctctccaaagcccactgccagttctcttcggggactaactgcaacggagagactcaagatgattccctttttacccatgttttctctactattgctgcttattgttaaccctataaacgccaacaatcattatgacaagatcttggctcatagtcgtatcaggggtcgggaccaaggcccaaatgtctgtgcccttcaacagattttgggcaccaaaaagaaatacttcagcacttgtaagaactggtataaaaagtccatctgtggacagaaaacgactgtgttatatgaatgttgccctggttatatgagaatggaaggaatgaaaggctgcccagcagttttgcccattgaccatgtttatggcactctgggcatcgtgggagccaccacaacgcagcgctattctgacgcctcaaaactgagggaggagatcgagggaaagggatccttcacttactttgcaccgagtaatgaggcttgggacaacttggattctgatatccgtagaggtttggagagcaacgtgaatgttgaattactgaatgctttacatagtcacatgattaataagagaatgttgaccaaggacttaaaaaatggcatgattattccttcaatgtataacaatttggggcttttcattaaccattatcctaatggggttgtcactgttaattgtgctcgaatcatccatgggaaccagattgcaacaaatggtgttgtccatgtcattgaccgtgtgcttacacaaattggtacctcaattcaagacttcattgaagcagaagatgacctttcatcttttagagcagctgccatcacatcggacatattggaggcccttggaagagacggtcacttcacactctttgctcccaccaatgaggcttttgagaaacttccacgaggtgtcctagaaaggatcatgggagacaaagtggcttccgaagctcttatgaagtaccacatcttaaatactctccagtgttctgagtctattatgggaggagcagtctttgagacgctggaaggaaatacaattgagataggatgtgacggtgacagtataacagtaaatggaatcaaaatggtgaacaaaaaggatattgtgacaaataatggtgtgatccatttgattgatcaggtcctaattcctgattctgccaaacaagttattgagctggctggaaaacagcaaaccaccttcacggatcttgtggcccaattaggcttggcatctgctctgaggccagatggagaatacactttgctggcacctgtgaataatgcattttctgatgatactctcagcatggatcagcgcctccttaaattaattctgcagaatcacatattgaaagtaaaagttggccttaatgagctttacaacgggcaaatactggaaaccatcggaggcaaacagctcagagtcttcgtatatcgtacagctgtctgcattgaaaattcatgcatggagaaagggagtaagcaagggagaaacggtgcgattcacatattccgcgagatcatcaagccagcagagaaatccctccatgaaaagttaaaacaagataagcgctttagcaccttcctcagcctacttgaagctgcagacttgaaagagctcctgacacaacctggagactggacattatttgtgccaaccaatgatgcttttaagggaatgactagtgaagaaaaagaaattctgatacgggacaaaaatgctcttcaaaacatcattctttatcacctgacaccaggagttttcattggaaaaggatttgaacctggtgttactaacattttaaagaccacacaaggaagcaaaatctttctgaaagaagtaaatgatacacttctggtgaatgaattgaaatcaaaagaatctgacatcatgacaacaaatggtgtaattcatgttgtagataaactcctctatccagcagacacacctgttggaaatgatcaactgctggaaatacttaataaattaatcaaatacatccaaattaagtttgttcgtggtagcaccttcaaagaaatccccgtgactgtctataagccaattattaaaaaatacaccaaaatcattgatggagtgcctgtggaaataactgaaaaagagacacgagaagaacgaatcattacaggtcctgaaataaaatacactaggatttctactggaggtggagaaacagaagaaactctgaagaaattgttacaagaagaggtcaccaaggtcaccaaattcattgaaggtggtgatggtcatttatttgaagatgaagaaattaaaagactgcttcagggagacacacccgtgaggaagttgcaagccaacaaaaaagttcaaggatctagaagacgattaagggaaggtcgttctcagtgaaaatccaaaaaccagaaaaaaatgtttatacaaccctaagtcaataacctgaccttagaaaattgtgagagccaagttgacttcaggaactgaaacatcagcacaaagaagcaatcatcaaataattctgaacacaaatttaatatttttttttctgaatgagaaacatgagggaaattgtggagttagcctcctgtggtaaaggaattgaagaaaatataacaccttacaccctttttcatcttgacattaaaagttctggctaactttggaatccattagagaaaaatccttgtcaccagattcattacaattcaaatcgaagagttgtgaactgttatcccattgaaaagaccgagccttgtatgtatgttatggatacataaaatgcacgcaagccattatctctccatgggaagctaagttataaaaataggtgcttggtgtacaaaactttttatatcaaaaggctttgcacatttctatatgagtgggtttactggtaaattatgttattttttacaactaattttgtactctcagaatgtttgtcatatgcttcttgcaatgcatattttttaatctcaaacgtttcaataaaaccatttttcagatataaagagaattacttcaaattgagtaattcagaaaaactcaagatttaagttaaaaagtggtttggacttgggaacaggactttatacctcttttactgtaacaagtactcattaaaggaaattgaatgaaatt

SEQ ID NO: 23454 - protein, 779 aa, Homo sapiens
MIPFLPMFSLLLLLIVNPINANNHYDKILAHSRIRGRDQGPNVCALQQILGTKKKYFSTCKNWYKKSICGQKTTVLYECCPGYMRMEGMKGCPAVLPIDHVYGTLGIVGATTTQRYSDASKLREEIEGKGSFTYFAPSNEAWDNLDSDIRRGLESNVNVELLNALHSHMINKRMLTKDLKNGMIIPSMYNNLGLFINHYPNGVVTVNCARIIHGNQIATNGVVHVIDRVLTQIGTSIQDFIEAEDDLSSFRAAAITSDILEALGRDGHFTLFAPTNEAFEKLPRGVLERIMGDKVASEALMKYHILNTLQCSESIMGGAVFETLEGNTIEIGCDGDSITVNGIKMVNKKDIVTNNGVIHLIDQVLIPDSAKQVIELAGKQQTTFTDLVAQLGLASALRPDGEYTLLAPVNNAFSDDTLSMDQRLLKLILQNHILKVKVGLNELYNGQILETIGGKQLRVFVYRTAVCIENSCMEKGSKQGRNGAIHIFREIIKPAEKSLHEKLKQDKRFSTFLSLLEAADLKELLTQPGDWTLFVPTNDAFKGMTSEEKEILIRDKNALQNIILYHLTPGVFIGKGFEPGVTNILKTTQGSKIFLKEVNDTLLVNELKSKESDIMTTNGVIHVVDKLLYPADTPVGNDQLLEILNKLIKYIQIKFVRGSTFKEIPVTVYKPIIKKYTKIIDGVPVEITEKETREERIITGPEIKYTRISTGGGETEETLKKLLQEEVTKVTKFIEGGDGHLFEDEEIKRLLQGDTPVRKLQANKKVQGSRRRLREGRSQ

SEQ ID NO: 23455 - DNA, 3172 bp, Homo sapiens
atgtatataaattctgagctctccaaagcccactgccagttctcttcggggactaactgcaacggagagactcaagatgattccctttttacccatgttttctctactattgctgcttattgttaaccctataaacgccaacaatcattatgacaagatcttggctcatagtcgtatcaggggtcgggaccaaggcccaaatgtctgtgcccttcaacagattttgggcaccaaaaagaaatacttcagcacttgtaagaactggtataaaaagtccatctgtggacagaaaacgactgtgttatatgaatgttgccctggttatatgagaatggaaggaatgaaaggctgcccagcagttttgcccattgaccatgtttatggcactctgggcatcgtgggagccaccacaacgcagcgctattctgacgcctcaaaactgagggaggagatcgagggaaagggatccttcacttactttgcaccgagtaatgaggcttgggacaacttggattctgatatccgtagaggtttggagagcaacgtgaatgttgaattactgaatgctttacatagtcacatgattaataagagaatgttgaccaaggacttaaaaaatggcatgattattccttcaatgtataacaatttggggcttttcattaaccattatcctaatggggttgtcactgttaattgtgctcgaatcatccatgggaaccagattgcaacaaatggtgttgtccatgtcattgaccgtgtgcttacacaaattggtacctcaattcaagacttcattgaagcagaagatgacctttcatcttttagagcagctgccatcacatcggacatattggaggcccttggaagagacggtcacttcacactctttgctcccaccaatgaggcttttgagaaacttccacgaggtgtcctagaaaggatcatgggagacaaagtggcttccgaagctcttatgaagtaccacatcttaaatactctccagtgttctgagtctattatgggaggagcagtctttgagacgctggaaggaaatacaattgagataggatgtgacggtgacagtataacagtaaatggaatcaaaatggtgaacaaaaaggatattgtgacaaataatggtgtgatccatttgattgatcaggtcctaattcctgattctgccaaacaagttattgagctggctggaaaacagcaaaccaccttcacggatcttgtggcccaattaggcttggcatctgctctgaggccagatggagaatacactttgctggcacctgtgaataatgcattttctgatgatactctcagcatggatcagcgcctccttaaattaattctgcagaatcacatattgaaagtaaaagttggccttaatgagctttacaacgggcaaatactggaaaccatcggaggcaaacagctcagagtcttcgtatatcgtacagctgtctgcattgaaaattcatgcatggagaaagggagtaagcaagggagaaacggtgcgattcacatattccgcgagatcatcaagccagcagagaaatccctccatgaaaagttaaaacaagataagcgctttagcaccttcctcagcctacttgaagctgcagacttgaaagagctcctgacacaacctggagactggacattatttgtgccaaccaatgatgcttttaagggaatgactagtgaagaaaaagaaattctgatacgggacaaaaatgctcttcaaaacatcattctttatcacctgacaccaggagttttcattggaaaaggatttgaacctggtgttactaacattttaaagaccacacaaggaagcaaaatctttctgaaagaagtaaatgatacacttctggtgaatgaattgaaatcaaaagaatctgacatcatgacaacaaatggtgtaattcatgttgtagataaactcctctatccagcagacacacctgttggaaatgatcaactgctggaaatacttaataaattaatcaaatacatccaaattaagtttgttcgtggtagcaccttcaaagaaatccccgtgactgtctatagacccacactaacaaaagtcaaaattgaaggtgaacctgaattcagactgattaaagaaggtgaaacaataactgaagtgatccatggagagccaattattaaaaaatacaccaaaatcattgatggagtgcctgtggaaataactgaaaaagagacacgagaagaacgaatcattacaggtcctgaaataaaatacactaggatttctactggaggtggagaaacagaagaaactctgaagaaattgttacaagaagacacacccgtgaggaagttgcaagccaacaaaaaagttcaaggatctagaagacgattaagggaaggtcgttctcagtgaaaatccaaaaaccagaaaaaaatgtttatacaaccctaagtcaataacctgaccttagaaaattgtgagagccaagttgacttcaggaactgaaacatcagcacaaagaagcaatcatcaaataattctgaacacaaatttaatatttttttttctgaatgagaaacatgagggaaattgtggagttagcctcctgtggtaaaggaattgaagaaaatataacaccttacaccctttttcatcttgacattaaaagttctggctaactttggaatccattagagaaaaatccttgtcaccagattcattacaattcaaatcgaagagttgtgaactgttatcccattgaaaagaccgagccttgtatgtatgttatggatacataaaatgcacgcaagccattatctctccatgggaagctaagttataaaaataggtgcttggtgtacaaaactttttatatcaaaaggctttgcacatttctatatgagtgggtttactggtaaattatgttattttttacaactaattttgtactctcagaatgtttgtcatatgcttcttgcaatgcatattttttaatctcaaacgtttcaataaaaccatttttcagatataaagagaattacttcaaattgagtaattcagaaaaactcaagatttaagttaaaaagtggtttggacttgggaacaggactttatacctcttttactgtaacaagtactcattaaaggaaattgaatgaaatt

SEQ ID NO: 23456 - protein, 781 aa, Homo sapiens
MIPFLPMFSLLLLLIVNPINANNHYDKILAHSRIRGRDQGPNVCALQQILGTKKKYFSTCKNWYKKSICGQKTTVLYECCPGYMRMEGMKGCPAVLPIDHVYGTLGIVGATTTQRYSDASKLREEIEGKGSFTYFAPSNEAWDNLDSDIRRGLESNVNVELLNALHSHMINKRMLTKDLKNGMIIPSMYNNLGLFINHYPNGVVTVNCARIIHGNQIATNGVVHVIDRVLTQIGTSIQDFIEAEDDLSSFRAAAITSDILEALGRDGHFTLFAPTNEAFEKLPRGVLERIMGDKVASEALMKYHILNTLQCSESIMGGAVFETLEGNTIEIGCDGDSITVNGIKMVNKKDIVTNNGVIHLIDQVLIPDSAKQVIELAGKQQTTFTDLVAQLGLASALRPDGEYTLLAPVNNAFSDDTLSMDQRLLKLILQNHILKVKVGLNELYNGQILETIGGKQLRVFVYRTAVCIENSCMEKGSKQGRNGAIHIFREIIKPAEKSLHEKLKQDKRFSTFLSLLEAADLKELLTQPGDWTLFVPTNDAFKGMTSEEKEILIRDKNALQNIILYHLTPGVFIGKGFEPGVTNILKTTQGSKIFLKEVNDTLLVNELKSKESDIMTTNGVIHVVDKLLYPADTPVGNDQLLEILNKLIKYIQIKFVRGSTFKEIPVTVYRPTLTKVKIEGEPEFRLIKEGETITEVIHGEPIIKKYTKIIDGVPVEITEKETREERIITGPEIKYTRISTGGGETEETLKKLLQEDTPVRKLQANKKVQGSRRRLREGRSQ

SEQ ID NO: 23457 - DNA, 3337 bp, Homo sapiens
atgtatataaattctgagctctccaaagcccactgccagttctcttcggggactaactgcaacggagagactcaagatgattccctttttacccatgttttctctactattgctgcttattgttaaccctataaacgccaacaatcattatgacaagatcttggctcatagtcgtatcaggggtcgggaccaaggcccaaatgtctgtgcccttcaacagattttgggcaccaaaaagaaatacttcagcacttgtaagaactggtataaaaagtccatctgtggacagaaaacgactgtgttatatgaatgttgccctggttatatgagaatggaaggaatgaaaggctgcccagcagttttgcccattgaccatgtttatggcactctgggcatcgtgggagccaccacaacgcagcgctattctgacgcctcaaaactgagggaggagatcgagggaaagggatccttcacttactttgcaccgagtaatgaggcttgggacaacttggattctgatatccgtagaggtttggagagcaacgtgaatgttgaattactgaatgctttacatagtcacatgattaataagagaatgttgaccaaggacttaaaaaatggcatgattattccttcaatgtataacaatttggggcttttcattaaccattatcctaatggggttgtcactgttaattgtgctcgaatcatccatgggaaccagattgcaacaaatggtgttgtccatgtcattgaccgtgtgcttacacaaattggtacctcaattcaagacttcattgaagcagaagatgacctttcatcttttagagcagctgccatcacatcggacatattggaggcccttggaagagacggtcacttcacactctttgctcccaccaatgaggcttttgagaaacttccacgaggtgtcctagaaaggatcatgggagacaaagtggcttccgaagctcttatgaagtaccacatcttaaatactctccagtgttctgagtctattatgggaggagcagtctttgagacgctggaaggaaatacaattgagataggatgtgacggtgacagtataacagtaaatggaatcaaaatggtgaacaaaaaggatattgtgacaaataatggtgtgatccatttgattgatcaggtcctaattcctgattctgccaaacaagttattgagctggctggaaaacagcaaaccaccttcacggatcttgtggcccaattaggcttggcatctgctctgaggccagatggagaatacactttgctggcacctgtgaataatgcattttctgatgatactctcagcatggatcagcgcctccttaaattaattctgcagaatcacatattgaaagtaaaagttggccttaatgagctttacaacgggcaaatactggaaaccatcggaggcaaacagctcagagtcttcgtatatcgtacagctgtctgcattgaaaattcatgcatggagaaagggagtaagcaagggagaaacggtgcgattcacatattccgcgagatcatcaagccagcagagaaatccctccatgaaaagttaaaacaagataagcgctttagcaccttcctcagcctacttgaagctgcagacttgaaagagctcctgacacaacctggagactggacattatttgtgccaaccaatgatgcttttaagggaatgactagtgaagaaaaagaaattctgatacgggacaaaaatgctcttcaaaacatcattctttatcacctgacaccaggagttttcattggaaaaggatttgaacctggtgttactaacattttaaagaccacacaaggaagcaaaatctttctgaaagaagtaaatgatacacttctggtgaatgaattgaaatcaaaagaatctgacatcatgacaacaaatggtgtaattcatgttgtagataaactcctctatccagcagacacacctgttggaaatgatcaactgctggaaatacttaataaattaatcaaatacatccaaattaagtttgttcgtggtagcaccttcaaagaaatccccgtgactgtctatacaactaaaattataaccaaagttgtggaaccaaaaattaaagtgattgaaggcagtcttcagcctattatcaaaactgaaggacccacactaacaaaagtcaaaattgaaggtgaacctgaattcagactgattaaagaaggtgaaacaataactgaagtgatccatggagagccaattattaaaaaatacaccaaaatcattgatggagtgcctgtggaaataactgaaaaagagacacgagaagaacgaatcattacaggtcctgaaataaaatacactaggatttctactggaggtggagaaacagaagaaactctgaagaaattgttacaagaagaggtcaccaaggtcaccaaattcattgaaggtggtgatggtcatttatttgaagatgaagaaattaaaagactgcttcagggagacacacccgtgaggaagttgcaagccaacaaaaaagttcaaggatctagaagacgattaagggaaggtcgttctcagtgaaaatccaaaaaccagaaaaaaatgtttatacaaccctaagtcaataacctgaccttagaaaattgtgagagccaagttgacttcaggaactgaaacatcagcacaaagaagcaatcatcaaataattctgaacacaaatttaatatttttttttctgaatgagaaacatgagggaaattgtggagttagcctcctgtggtaaaggaattgaagaaaatataacaccttacaccctttttcatcttgacattaaaagttctggctaactttggaatccattagagaaaaatccttgtcaccagattcattacaattcaaatcgaagagttgtgaactgttatcccattgaaaagaccgagccttgtatgtatgttatggatacataaaatgcacgcaagccattatctctccatgggaagctaagttataaaaataggtgcttggtgtacaaaactttttatatcaaaaggctttgcacatttctatatgagtgggtttactggtaaattatgttattttttacaactaattttgtactctcagaatgtttgtcatatgcttcttgcaatgcatattttttaatctcaaacgtttcaataaaaccatttttcagatataaagagaattacttcaaattgagtaattcagaaaaactcaagatttaagttaaaaagtggtttggacttgggaacaggactttatacctcttttactgtaacaagtactcattaaaggaaattgaatgaaatt

SEQ ID NO: 23458 - protein, 836 aa, Homo sapiens
MIPFLPMFSLLLLLIVNPINANNHYDKILAHSRIRGRDQGPNVCALQQILGTKKKYFSTCKNWYKKSICGQKTTVLYECCPGYMRMEGMKGCPAVLPIDHVYGTLGIVGATTTQRYSDASKLREEIEGKGSFTYFAPSNEAWDNLDSDIRRGLESNVNVELLNALHSHMINKRMLTKDLKNGMIIPSMYNNLGLFINHYPNGVVTVNCARIIHGNQIATNGVVHVIDRVLTQIGTSIQDFIEAEDDLSSFRAAAITSDILEALGRDGHFTLFAPTNEAFEKLPRGVLERIMGDKVASEALMKYHILNTLQCSESIMGGAVFETLEGNTIEIGCDGDSITVNGIKMVNKKDIVTNNGVIHLIDQVLIPDSAKQVIELAGKQQTTFTDLVAQLGLASALRPDGEYTLLAPVNNAFSDDTLSMDQRLLKLILQNHILKVKVGLNELYNGQILETIGGKQLRVFVYRTAVCIENSCMEKGSKQGRNGAIHIFREIIKPAEKSLHEKLKQDKRFSTFLSLLEAADLKELLTQPGDWTLFVPTNDAFKGMTSEEKEILIRDKNALQNIILYHLTPGVFIGKGFEPGVTNILKTTQGSKIFLKEVNDTLLVNELKSKESDIMTTNGVIHVVDKLLYPADTPVGNDQLLEILNKLIKYIQIKFVRGSTFKEIPVTVYTTKIITKVVEPKIKVIEGSLQPIIKTEGPTLTKVKIEGEPEFRLIKEGETITEVIHGEPIIKKYTKIIDGVPVEITEKETREERIITGPEIKYTRISTGGGETEETLKKLLQEEVTKVTKFIEGGDGHLFEDEEIKRLLQGDTPVRKLQANKKVQGSRRRLREGRSQ

SEQ ID NO: 23459 - DNA, 1621 bp, Homo sapiens
aacctgaattcagactgattaaagaaggtgaaacaataactgaagtgatccatggaggtgcgttccttatgttacctggggccgactaccttcgctgtgattattttgaaatagtgttggtttagaaatattgaacatctgatattttctcttagttcttattttataaaaattgtgggaattatttcctcagctatgagttcttattagctggtcagaaataaaacatagttagcttttaatggatctagttggaattaatttatctattaagtcactgggcccaacaaaatgtcatgatttttgcatatacaagtgaggattgtggaataaaattgtaacattaatgtcagtataaaaggaaatattagaaacagtaggaaaaaatgaccattgtataagtctctgtctaataagccactccactactaggatttatgatagggctcccattccaatgatatagaactccctggattctcactaagtatttattccacatccagaaaacaagtatgacatggagagttaggatgtcaaatggccctctctctcaaccaagattcaggacatagctattaccttttagatccctattgatatgatttttgggggatatgttctaaaaatgtttatgattgaatcttaaatggtaatatttgtagaaatatagttaatcattacaatgtctagcttatggatgtatagtcacaatatgagggtaaatcaaatgcatttgtattcccctgcttttagagccaattattaaaaaatacaccaaaatcattgatggagtgcctgtggaaataactgaaaaagagacacgagaagaacgaatcattacaggtcctgaaataaaatacactaggatttctactggaggtggagaaacagaagaaactctgaagaaattgttacaagaagacacacccgtgaggaagttgcaagccaacaaaaaagttcaaggatctagaagacgattaagggaaggtcgttctcagtgaaaatccaaaaaccagaaaaaaatgtttatacaaccctaagtcaataacctgaccttagaaaattgtgagagccaagttgacttcaggaactgaaacatcagcacaaagaagcaatcatcaaataattctgaacacaaatttaatatttttttttctgaatgagaaacatgagggaaattgtggagttagcctcctgtggtaaaggaattgaagaaaatataacaccttacaccctttttcatcttgacattaaaagttctggctaactttggaatccattagagaaaaatccttgtcaccagattcattacaattcaaatcgaagagttgtgaactgttatcccattgaaaagaccgagccttgtatgtatgttatggatacataaaatgcacgcaagccattatctctccatgggaagctaagttataaaaataggtgcttggtgtacaaaactttttatatcaaaaggctttgcacatttctatatgagtgggtttactggtaaattatgttattttttacaactaattttgtactctcagaatgtttgtcatatgcttcttgcaatgcatattttttaatctcaaacgtttcaataaaaccatttttcagatat

SEQ ID NO: 23460 - protein, 35 aa, Homo sapiens
MLFFTTNFVLSECLSYASCNAYFLISNVSIKPFFR

SEQ ID NO: 23461 - DNA, 3039 bp, Homo sapiens
atgtatataaattctgagctctccaaagcccactgccagttctcttcggggactaactgcaacggagagactcaagatgattccctttttacccatgttttctctactattgctgcttattgttaaccctataaacgccaacaatcattatgacaagatcttggctcatagtcgtatcaggggtcgggaccaaggcccaaatgtctgtgcccttcaacagattttgggcaccaaaaagaaatacttcagcacttgtaagaactggtataaaaagtccatctgtggacagaaaacgactgtgttatatgaatgttgccctggttatatgagaatggaaggaatgaaaggctgcccagcagttttgcccattgaccatgtttatggcactctgggcatcgtgggagccaccacaacgcagcgctattctgacgcctcaaaactgagggaggagatcgagggaaagggatccttcacttactttgcaccgagtaatgaggcttgggacaacttggattctgatatccgtagaggtttggagagcaacgtgaatgttgaattactgaatgctttacatagtcacatgattaataagagaatgttgaccaaggacttaaaaaatggcatgattattccttcaatgtataacaatttggggcttttcattaaccattatcctaatggggttgtcactgttaattgtgctcgaatcatccatgggaaccagattgcaacaaatggtgttgtccatgtcattgaccgtgtgcttacacaaattggtacctcaattcaagacttcattgaagcagaagatgacctttcatcttttagagcagctgccatcacatcggacatattggaggcccttggaagagacggtcacttcacactctttgctcccaccaatgaggcttttgagaaacttccacgaggtgtcctagaaaggatcatgggagacaaagtggcttccgaagctcttatgaagtaccacatcttaaatactctccagtgttctgagtctattatgggaggagcagtctttgagacgctggaaggaaatacaattgagataggatgtgacggtgacagtataacagtaaatggaatcaaaatggtgaacaaaaaggatattgtgacaaataatggtgtgatccatttgattgatcaggtcctaattcctgattctgccaaacaagttattgagctggctggaaaacagcaaaccaccttcacggatcttgtggcccaattaggcttggcatctgctctgaggccagatggagaatacactttgctggcacctgtgaataatgcattttctgatgatactctcagcatggatcagcgcctccttaaattaattctgcagaatcacatattgaaagtaaaagttggccttaatgagctttacaacgggcaaatactggaaaccatcggaggcaaacagctcagagtcttcgtatatcgtacagctgtctgcattgaaaattcatgcatggagaaagggagtaagcaagggagaaacggtgcgattcacatattccgcgagatcatcaagccagcagagaaatccctccatgaaaagttaaaacaagataagcgctttagcaccttcctcagcctacttgaagctgcagacttgaaagagctcctgacacaacctggagactggacattatttgtgccaaccaatgatgcttttaagggaatgactagtgaagaaaaagaaattctgatacgggacaaaaatgctcttcaaaacatcattctttatcacctgacaccaggagttttcattggaaaaggatttgaacctggtgttactaacattttaaagaccacacaaggaagcaaaatctttctgaaagaagtaaatgatacacttctggtgaatgaattgaaatcaaaagaatctgacatcatgacaacaaatggtgtaattcatgttgtagataaactcctctatccagcagacacacctgttggaaatgatcaactgctggaaatacttaataaattaatcaaatacatccaaattaagtttgttcgtggtagcaccttcaaagaaatccccgtgactgtctatagacccacactaacaaaagtcaaaattgaaggtgaacctgaattcagactgattaaagaaggtgaaacaataactgaagtgatccatggagagccaattattaaaaaatacaccaaaatcattgatggagtgcctgtggaaataactgaaaaagagacacgagaagaacgaatcattacaggtcctgaaataaaatacactaggatttctactggaggtggagaaacagaagaaactctgaagaaattgttacaagaagacacacccgtgaggaagttgcaagccaacaaaaaagttcaaggatctagaagacgattaagggaaggtcgttctcagtgaaaatccaaaaaccagaaaaaaatgtttatacaaccctaagtcaataacctgaccttagaaaattgtgagagccaagttgacttcaggaactgaaacatcagcacaaagaagcaatcatcaaataattctgaacacaaatttaatatttttttttctgaatgagaaacatgagggaaattgtggagttagcctcctgtggtaaaggaattgaagaaaatataacaccttacaccctttttcatcttgacattaaaagttctggctaactttggaatccattagagaaaaatccttgtcaccagattcattacaattcaaatcgaagagttgtgaactgttatcccattgaaaagaccgagccttgtatgtatgttatggatacataaaatgcacgcaagccattatctctccatgggaagctaagttataaaaataggtgcttggtgtacaaaactttttatatcaaaaggctttgcacatttctatatgagtgggtttactggtaaattatgttattttttacaactaattttgtactctcagaatgtttgtcatatgcttcttgcaatgcatattttttaatctcaaacgtttcaataaaaccatttttcagatat

SEQ ID NO: 23462 - protein, 781 aa, Homo sapiens; identical to SEQ ID NO: 23456

SEQ ID NO: 23463 - DNA, 1954 bp, Homo sapiens
gccacatataatattttgcataatcatactttataactacgaataaacagatggatttatccatctgtttaaaagctaaagcagatgaaagtaattttagtagcacacaaacagactaaatcatttgttctcataactcttgtctaatttgaagacaatgggaaatatttaaaagtgatttcatagagcctgaaaccactttgacatttgagttgagtcacaccgaatgttgaaataaatgtcctattccggtaaatttaaaggactgttttaacatgataatttgtctcctaaaataatgtcccaggacccacactaacaaaagtcaaaattgaaggtgaacctgaattcagactgattaaagaaggtgaaacaataactgaagtgatccatggaggtgcgttccttatgttacctggggccgactaccttcgctgtgattattttgaaatagtgttggtttagaaatattgaacatctgatattttctcttagttcttattttataaaaattgtgggaattatttcctcagctatgagttcttattagctggtcagaaataaaacatagttagcttttaatggatctagttggaattaatttatctattaagtcactgggcccaacaaaatgtcatgatttttgcatatacaagtgaggattgtggaataaaattgtaacattaatgtcagtataaaaggaaatattagaaacagtaggaaaaaatgaccattgtataagtctctgtctaataagccactccactactaggatttatgatagggctcccattccaatgatatagaactccctggattctcactaagtatttattccacatccagaaaacaagtatgacatggagagttaggatgtcaaatggccctctctctcaaccaagattcaggacatagctattaccttttagatccctattgatatgatttttgggggatatgttctaaaaatgtttatgattgaatcttaaatggtaatatttgtagaaatatagttaatcattacaatgtctagcttatggatgtatagtcacaatatgagggtaaatcaaatgcatttgtattcccctgcttttagagccaattattaaaaaatacaccaaaatcattgatggagtgcctgtggaaataactgaaaaagagacacgagaagaacgaatcattacaggtcctgaaataaaatacactaggatttctactggaggtggagaaacagaagaaactctgaagaaattgttacaagaagaggtcaccaaggtcaccaaattcattgaaggtggtgatggtcatttatttgaagatgaagaaattaaaagactgcttcagggaggttagtaaaaggacaacaactaacccccttaacaggttctagtgactgagttcaactttttaaagactgagcaagcagattttttcttttaattgggttaaaaaaaaaaaagacaacatccactgttgtcttaatagatggattggttcaatggtagttaatagttatgaagaaatgattactagtttaaacagtctttaaaaagttctatggtataaagtttggggagcaatgaatattttttttgctttgattcagataattttaagggccttttaagtatgcaaaagggaaataattgttaaattgctagctgttaaacaagcccaaatttgatatactttttatatttaaaaaattatattcactgcccccataagagcaatcaaggcatgtctttaaattctatacatagatatagccaaaaatagtgcatttagtaacattcttttccaaaactatattcttgggaatgaatatctgtttcttctaacagtttgagtgataatctatacctgtagatataagttattttgcatataaaattaatcttaatcttttatggaatgttctctgtctgtggcattaaatgaaccttaagaacaa

SEQ ID NO: 23464 - protein, 95 aa, Homo sapiens
IKCICIPLLLEPIIKKYTKIIDGVPVEITEKETREERIITGPEIKYTRISTGGGETEETLKKLLQEEVTKVTKFIEGGDGHLFEDEEIKRLLQGG

SEQ ID NO: 23465 - DNA, 1166 bp, Homo sapiens
atgactcttcccctcatcagctatgtgacaagaagtcactaaacttttctatatctcggcttctttattaataaaatgagaggtgggattaggttacctccaaggttttaacattctttgatcttatacaaatgccagtgaagaagcatttttatttttaataacactttcctcttcagatggccaagttattgtgattgaaggcattccaggaaacaggaaacagtggcggcatgaagctccaggaactttaatgagtgttttggcagcagcacatctaacgagtagctcattttctgccgatgaagaatttgcaatgggaacattaaaacaatggctacccaaagaagaagatgaagggaaggtagaaatggtctctggcattgaagtagatgaggaacaactagaaccaagatctgatgatgatgatacaaattttgaagaatctgaagatgagttgagagatgaagtagtagaatacttagaaaaactcgctactttcaaaggggaagaaaaaacagaagaggcctccagtacctctaaggactctagaaagtcaagagaaagagaggggataagtatgcagaaatctgaagaattaagggagggcttggagaatatttctactacatctaatgaccacatttgtattactgatgaagaccaaggaacatcaacaaccagtcaaaatatacaagtgtgattattgtactttttcttaagtaataagttagtgtctattacctatagtatttatttgggtacaagtcataaatgctcatttactgtaagggttttctagtaatctcaaggatttattaatttttctttcaatttaggaagtagaacttttgaatatagccattaatatttttactttaaagtttctattaagaaatcttaggccgggcagtctcatcactttgggaggccaaggcaggcagatcatgaggtcaggagtttgagaccagtccaaccaacatggtgaaaccccgtctctactaaaaatacaaaattagctgggcatggtggtgcatgcctgtaatcccagttacttgggaggctgaggcaggagaatcacctgaacccaggagatggaagttgcaagtgagccgagattgtgccactgcactccagcctgggcaacaagagcgaaactctgtctc

SEQ ID NO: 23466 - protein, 149 aa, Homo sapiens; identical to SEQ ID NO: 3109

SEQ ID NO: 23467 - DNA, 3431 bp, Homo sapiens
agcccaggacgctaggccttttctgggccgcccccgccgccccaggccgaaactccatccctttcccccaccctgccgagctcccgaagccctgtggcggctccgggcaagaactaagggcggcccctgcaagcgtacctgctccgccggctccgcggggccaacgaagcgtcccggaaggatccgggttcccggggccgctgcgcctccctgcggccggggcggagccgcgcaaggaaacgcgggcggggcgcgggtctggaatggcctggggaccagtccacctcgaggcagggtcaggcgccagggagtttggagacccggcagagtcaccccgcaaccgtcccgttgccttgggtcgggattcctttgctttgcagtctacagtagcgctccccgctcttgcttaaggtgcaccagacgcttcgcaaacgttctctcttttctttacaacccgtcaaggcagtagtctcccagttttacaaatgagctaaactgatacaggaagagtgtttcttgtacaaggtctcaaatattgccaaaaggtggacgtgagactggaacggcttcctactctttgggccacagcggcggcctgccaagggactttctaacgaaaccggcgctgcccaagcgtctgcactcacgcccagtgctcatcccaccctgccccattctggatttgcacatcaagctgctgtctaaaatgtttaagtagttgaaaaaaatgtaattttcagcaattgtaaatagtgacgcaagttaaatatatccaactgaatcgaaacactacagtaatatggtaccctccatcgtccacctcacacacacacacaaaaaaaacccacaaaaaactcttaaaaatcctaagtttacatcattactcttccttcttaaaatcatctctccgccgccccctccccgtccctgccacaaaaaatttcttcttcttgtaagcactctagtcaagttggattagggctgaactaaaggcctcattttgatctaattgcatctttaaagtctctgtctccgaatatagtctcattattagttattggtgttagatttcagtgtgtgaattgggggtggccgcggcgggggtgaatgcagcccgtagcaggagtccaaaagttgtttagcagttggaatatccaatgttagtttctttggcagtgaaattccctcaaaatattagtaggtatatgatctacttgtttttgtttaattacacgtgtcagtgaccacacccaaatttcttccctagaattcttagacatgcttcattaaatcatatcttcattctactttcctgatagaattttacccgttatctttttcatacttgaaagtcttattgatcatcctatcatactgctgaaagaagtacagaaatggaaatttatatttcctgctcatagaattttagtttttctggattaaattgttaaaattactagtactacacaattgatcacaataaaatgtatcacaatactgataattattaaatataaaaaataaaattgtattgaaaattcatctctttaagacctggatgggcttcccatgcaccgttagttcctgtatccatagatgaatgctaacttcttgctacaatgaagtttaacactgattctcttccattttcttaaggctgtaagtgctgagaaataagtacataggaatgaaaagttttgttaaaagtgtccctcaatttttgtctagttgtatctcaagaatcatatagtaatctgtcaccaaaactggtttataatcatgaactgataattccattagtcttctgaaattttattaaaagcaaaaccccataagccattctgattttgaaaaggatttattatccaatacttatccagtctctcagtaactgtacataatttcaagttttttttgtttgatggttttgaaatgtttatgcccttgggcaatgccaagattgaagatgactaagaggtatggaatacagtatatatggaagctgagtacctggaaatgtccttaaaactatccatgcctgctttaacttgaaaaatcttcaagagagtagtaagctaatttcaaagagctaacccaagtaattttgggaaatggtatttgactggaaactatgagacaataggaaagatacataaactctgtaccttagttggtaaatttgtttctcccaggggtatgggttaatgatttggaaactgctttacaaatagactaggattgaacagctaagcagatggcggatggtacaagccagttttctcattgtcagggagagaagttacagaaaagcgtgagaagaaggctagaatgaaccttgtagtactgggttagttggagacatcagtatggacccatgcttaatttaatgtatgtacagatggagagatacagaaataactgtagagatgtctggatggatatacaattatacagtgtatacaggttagtatacacatatatacttcctagctctgtctgctgagagggcctagaagcagtgacaccccaggagcaataagcacacccagcacccagatcttggtttctaaaccagtgggaaccttgttgaaatggatgattttggggctggggcagagaagataaagatgagtctggaccatcttgtagtgccagaaaggaagtgctccaaaagaaccagcgcacctcaaagggacacaggaggtgacctgaaacaattcccaacggccaaagctagaacaatttaagcaagaaaacaaacgacttattattggattatactcccacccccagaggtggagattaattcctttgcatttgactatgagctggagtgtgtgactcacttatagtgaacacagcatgaacatggaaaattatgaagttgatagtgaagagcctggcagacactgccttcatcaagtgatcaaggtgaacgacaccaggaagaagtcatgctgatgctccctgaaatgatgtgatgagaagggcacttcacctttgtgattttccccaaaatccataagcttagtccaattgtgagacaaacccaaattgagcaacagtctacaaaatacctaagcagtactcaaaaatgtcaaggtcccgaaaaacaaggaaagatttagagactgccagagaccactggagatgaaagatatctaaatgactgccatcttctgacaagatctgcagaccaccccaagcttcccagggctgaccctccaacccaggctcttttgtgcatcctatgagggactgtatttaaggacagctggtagttggtgaagatcattggaatgatcttcaaactactcagaatcaggtcatattgaaaaactgcacacattactaaatcataattaaatatatttaattctcaaacctttaggaaatgtaaaaagagtcacataataataaacacatatcat

SEQ ID NO: 23468 - protein, 59 aa, Homo sapiens
MVPSIVHLTHTHKKNPQKTLKNPKFTSLLFLLKIISPPPPPRPCHKKFLLLVSTLVKLD

SEQ ID NO: 23469 - DNA, 701 bp, Homo sapiens
cagcagaggacgatagaggtggttctgtaataaagtacagcaaaaatactactcgtaagcagtggctcaaagagacccctgacactttgttgaacatccttaagaatgctgatctcagcttggcttttcaaacatacacaatcccgactgggtgtcagagctgaagaagcgagctggatggcaaggcctgtgcgacagataatgcctgaggaaatgttcctgagtcacgctgaggagaggcttcactcaggagttcatgctgagatgatcatgagttcatgcgacgtatattttcctttggaaacagaatgaagcagaggaaactcttaatacttaaaatcgttcttgattagtatcgtgagtttgaaaagtctagaactcctgtaagtttttgaactcaagggagaaggtatagtggaatgagtgtgagcatcgggctttgcagtcccatagaacagaaatgggatgctagcgtgccactacctacttgtgtgattgtgggaaattacttaacctcttcaagccccaatttcctcaaccataaaatgaagataataatgcctacctcagagggatgctgaccacagacctttatagcagcccgtatgatattattcacattatgatatgtgtttattattatgtgactctttttacatttcctaaaggtttgagaattaaatatatttaattatgattta

SEQ ID NO: 23470 - protein, 68 aa, Homo sapiens [sequence omitted]

SEQ ID NO: 23471 - DNA, 2266 bp, Homo sapiens
ccgcaagtccctcgccgccttggggtctgggcgcgcggtgccgtgggggtcagcagggcggagcggcttttccaggagaaagggccctcacgggtgagcggggcgactgggctcccccgcggtgcagttgccccgcgggcgccggccccggctcaacggattcttctcgctcgctgcccggaaagaaccatttgggagagcccatggtgactgcgtgagtggagcccagctgtgtggatgccccagcatggatgactacatggtcctgagaatgattggggagggctccttcggcagagctcttttggttcagcatgaaagcagtaatcagatgtttgccatgaaagaaataaggcttcccaagtctttctctaatacacagaattctaggaaggaggctgttcttttagccaaaatgaaacaccctaatattgttgccttcaaagaatcatttgaagctgaaggacacttgtatattgtgatggaatactgtgatggaggggatctaatgcaaaagattaaacagcagaaaggaaagttatttcctgaagacatgatacttaattggtttacccaaatgtgccttggagtaaatcacattcacaagaaacgtgtgctacacagagatatcaagtccaagaatatcttcctcactcagaatggaaaagtgaaattgggagactttggatctgcccgtcttctctccaatccgatggcatttgcttgtacctatgtgggaactccttattatgtgcctccagaaatttgggaaaacctgccttataacaataaaagtgacatctggtccttgggttgcatcctgtatgaactctgtacccttaagcatccatttcaggcaaatagttggaaaaatcttatcctcaaagtatgtcaagggtgcatcagtccactgccgtctcattactcctatgaacttcagttcctagtcaagcagatgtttaaaaggaatccctcacatcgcccctcggctacaacgcttctctctcgaggcatcgtagctcggcttgtccagaagtgcttaccccccgagatcatcatggaatatggtgaggaagtattagaagaaataaaaaattcgaagcataacacaccaagaaaaaaacaaaccccagcagaatcaggatagctttgggaaatgaagcaagcacagtgcaagaggaagaacaagatagaaagggtagccatactgatttggaaagcattaatgaaaatttagttgaaagtgcattgagaagagtaaacagagaagaaaaaggtaataagtcagtccatctgaggaaagccagttcaccaaatcttcatagacgacagtgggagaaaaatgtacccaatacagctcttacagctttggaaaatgcatccatactcacctccagtttaacagcagaggacgatagaggtggttctgtaataaagtacagcaaaaatactactcgtaagcagtggctcaaagagacccctgacactttgttgaacatccttaagaatgctgatctcagcttggcttttcaaacatacacaatatatagaccaggttcagaagggttcttgaaaggccccctgtctgaagaaacagaagcatcggacagtgttgatggaggtcacgattctgtcattttggatccagagcgacttgagcctgggctagatgaggaggacacggactttgaggaggaagatgacaaccccgactgggtgtcagagctgaagaagcgagctggatggcaaggcctgtgcgacagataatgcctgaggaaatgttcctgagtcacgctgaggagaggcttcactcaggagttcatgctgagatgatcatgagttcatgcgacgtatattttcctttggaaacagaatgaagcagaggaaactcttaatacttaaaatcgttcttgattagtatcgtgagtttgaaaagtctagaactcctgtaagtttttgaactcaagggagaaggtatagtggaatgagtgtgagcatcgggctttgcagtcccatagaacagaaatgggatgctagcgtgccactacctacttgtgtgattgtgggaaattacttaacctcttcaagccccaatttcctcaaccataaaatgaagataataatgcctacctcagagggatgctgaccacagacctttatagcagcccgtatgatattattcacattatgatatgtgtttattattatgtgactctttttacatttcctaaaggtttgagaattaaatatatttaattatgattta

SEQ ID NO: 23472 - protein, 299 aa, Homo sapiens
MDDYMVLRMIGEGSFGRALLVQHESSNQMFAMKEIRLPKSFSNTQNSRKEAVLLAKMKHPNIVAFKESFEAEGHLYIVMEYCDGGDLMQKIKQQKGKLFPEDMILNWFTQMCLGVNHIHKKRVLHRDIKSKNIFLTQNGKVKLGDFGSARLLSNPMAFACTYVGTPYYVPPEIWENLPYNNKSDIWSLGCILYELCTLKHPFQANSWKNLILKVCQGCISPLPSHYSYELQFLVKQMFKRNPSHRPSATTLLSRGIVARLVQKCLPPEIIMEYGEEVLEEIKNSKHNTPRKKQTPAESG

SEQ ID NO: 23473 - DNA, 5789 bp, Homo sapiens
ccgcaagtccctcgccgccttggggtctgggcgcgcggtgccgtgggggtcagcagggcggagcggcttttccaggagaaagggccctcacgggtgagcggggcgactgggctcccccgcggtgcagttgccccgcgggcgccggccccggctcaacggattcttctcgctcgctgcccggaaagaaccatttgggagagcccatggtgactgcgtgagtggagcccagctgtgtggatgccccagcatggatgactacatggtcctgagaatgattggggagggctccttcggcagagctcttttggttcagcatgaaagcagtaatcagatgtttgccatgaaagaaataaggcttcccaagtctttctctaatacacagaattctaggaaggaggctgttcttttagccaaaatgaaacaccctaatattgttgccttcaaagaatcatttgaagctgaaggacacttgtatattgtgatggaatactgtgatggaggggatctaatgcaaaagattaaacagcagaaaggaaagttatttcctgaagacatgatacttaattggtttacccaaatgtgccttggagtaaatcacattcacaagaaacgtgtgctacacagagatatcaagtccaagaatatcttcctcactcagaatggaaaagtgaaattgggagactttggatctgcccgtcttctctccaatccgatggcatttgcttgtacctatgtgggaactccttattatgtgcctccagaaatttgggaaaacctgccttataacaataaaagtgacatctggtccttgggttgcatcctgtatgaactctgtacccttaagcatccagtaagtatggcgtgcaaaatggaaaaggcagcttgtcatatctagctgagccctaataatgtgacagattctagttggcagtttgcttccctaggatgaagtcattataaaagtttgtatatgtttccagtgcagtcatctgccctgagttagttttgtagcatatactaataggaaatttccattattcagtttggctgtgcaatacataacctttctctctctttctttctcttttcctcttttctttctttttgctattcttaattttttattttgataaaataaatataaaatttgccattttatccatttttaagtatacaattcattgtcattaattacattcaaaatattgtgcaaccaccactattatctctttgggggttttttgttttgttttgttttgtttcgtttttgagatggaatcttgctctgttgcccagtctggagtgcagtggtgcaatctcagctcactgcaacctccgcctcctgggttcaagtgattctcctgcctcagcctcccaagtagctgggactacaggtgcataccaccatgcccagctaaattttttttgtatttttactagagacattttttttgtatttttttgtattttcccccatgttgagcaggctggtcttgaactcctgacctcaggtgatccactcgcctcggcctcccaaagtgctgggattacaggcatgagccactatgcccggccactactatctctttgtaaaacttttgtcatcaccccaaccagaaactctgtacccattaaatagttgctccccatttcttccctttccccagtcccaatctaatttctgcctcatgaatttgcatattctaggtatttcatacaactggaattatagaacttttgcccttttgtgtctggtttatttcactagcacagtgttttcaaggttcatccatgttgtagcatctatcaggattccattcctttttatggctgcatagtattccattgtgtgtatagacatgtttatccattcatctgttgagggacacttgggtcgtttctgtcttttggctattgtatataatgctgttatgaacaaatggtgtacaagtatctgttagagtccttgattccaaattttgaggtttacatttagcagtggaactgctgggtcatatggtaattgtatttagctttttgaggaaacagcaaactttgcaagagtggccgcgtcatttttttcctcagctttttgcagttagatttcacttatatgagtttcctctctaactgaaacatcatgaaaacatagactttgccctataatgtgttttttcaagatatttttaaaaatatgaacaaaaaaaggttaaataacttgtcccgcttgttcagccattgtttattatatagaacaacaactgcagggccaattcctattagttcttagctttgcatagaaataaattctgttctttgggcacaggctgaaggttagcttttttacagatgtacttgagggcacatagagctcaggagagggtgaatggttgagaaacaatcttcaccactaccagatgaaagtagctcaaactgaagacacctggtattaatgagaggttatcttccttgaatataagtggtttataatgatagctacacagttagaacaacttggggaacctttaaaatgctgatgcctaggcccacagcacagtgattgaattaaaatctctgaaaatgtcctgggcattaatgtttttaaaacaggtgattacaatgtacagcccaagttgagaaccaccatagtctacaaataaaattatttttaaaattccaacatcttacaattctttacttcctgatgtatctttttcataatttacatgtatacgttcttcttttttccagcaagaatgagtattaaggactatagtgccctgaatatttggcatgagatctgtcatcccttgtctgctcgaagacaaaagttgttctcaaacctttaggaaacacagatagttggtgtaatggttaaaaagccagaggcaaagcagattcagtagtatttgtcattatcacaatctgtcctttgttatgtgttgatttttctttttcatatattcacttacattttatattcataggacaatacactttttaaaaaataaacttcttttaaattttaaaacagttttagatttacagaaaaattacaaagataatacaaaaagcttctatataccccacactgtaattaacatctatcatagccttgaggtgtagaatcatttcttaagcaagattcgacaagcagaaattattaaggaaaaatgatgaataaatttgactatactaaattttaaattttgcatagcaaaagataccataaataaaaacataatatgcagatcagcagaaaacattttcaaacgtaactagcaatgaattaataaaatatcttatttaaaatttttattttaagttctggggtacatgttcagagtacgcagctttgttacataggtaaatgggtgccatggtgatttgctgcacctaccaacccctcatgtaggtattagggcaatacactttcaaggtagaatgctaacacattctttcataagcattaccaaggctgacatctaatgttagttctgatatatttattatacatggaaaactttaaaaatgttactccagtctgtcattgtatatcccacggtgttactcatcaaattttcatagctgctttaatgacaggaatggttaaaaaggattttgcagtagaagtttaaaattggaaaagtctggccaggtgcagtgcctcatgcgtgtaatctcagcactttgggaagccaaagtgggaggatcgtttgagcccaggagttcaagactagcctgggcaacatagcaagaccctgcgtctaaaaaaagaaaaaaaaatttaaaaattagccaggcgcggtggcacatgcctgtagtcccagctatttgggaggctgaggtgggaggatcgcttgagcccaggaggtcaaagatgcagtgagctgtgattgcaccatcacactcaagccaaaaaaccacctgtagaaaactgggtaagtctgaagtgcatgttgctatggagcaggcctggcagtttctgggaagggctggagcaaagggatattacacttattataaacctttagtatcagttgatgttttaaaaggccatgtgtatatattactttgattttcaatatatattaataatgtatatctgcaaaaaacattaggactaataaggtagtcacagcaggcattgatggaaatactttttctagatggggaagctttttatcattcatgtttaactttctcctaagccaccttaagattatataatggtatcttaaggacacctctagaaagaaaaatgaccagacagcagatatgtttataaaattagaataatttacataactggtagtttcttgcttccatttcttcccctgtatctgcttgtaaagttcaattttccttttcagtttcaggcaaatagttggaaaaatcttatcctcaaagtatgtcaagggtgcatcagtccactgccgtctcattactcctatgaacttcagttcctagtcaagcagatgtttaaaaggaatccctcacatcgcccctcggctacaacgcttctctctcgaggcatcgtagctcggcttgtccagaagtgcttaccccccgagatcatcatggaatatggtgaggaagtattagaagaaataaaaaattcgaagcataacacaccaagaaaaaaacaaaccccagcagaatcaggatagctttgggaaatgaagcaagcacagtgcaagaggaagaacaagatagaaagggtagccatactgatttggaaagcattaatgaaaatttagttgaaagtgcattgagaagagtaaacagagaagaaaaaggtaataagtcagtccatctgaggaaagccagttcaccaaatcttcatagacgacagtgggagaaaaatgtacccaatacagctcttacagctttggaaaatgcatccatactcacctccagtttaacagcagaggacgatagaggtggttctgtaataaagtacagcaaaaatactactcgtaagcagtggctcaaagagacccctgacactttgttgaacatccttaagaatgctgatctcagcttggcttttcaaacatacacaatatatagaccaggttcagaagggttcttgaaaggccccctgtctgaagaaacagaagcatcggacagtgttgatggaggtcacgattctgtcattttggatccagagcgacttgagcctgggctagatgaggaggacacggactttgaggaggaagatgacaaccccgactgggtgtcagagctgaagaagcgagctggatggcaaggcctgtgcgacagataatgcctgaggaaatgttcctgagtcacgctgaggagaggcttcactcaggagttcatgctgagatgatcatgagttcatgcgacgtatattttcctttggaaacagaatgaagcagaggaaactcttaatacttaaaatcgttcttgattagtatcgtgagtttgaaaagtctagaactcctgtaagtttttgaactcaagggagaaggtatagtggaatgagtgtgagcatcgggctttgcagtcccatagaacagaaatgggatgctagcgtgccactacctacttgtgtgattgtgggaaattacttaacctcttcaagccccaatttcctcaaccataaaatgaagataataatgcctacctcagagggatgctgaccacagacctttatagcagcccgtatgatattattcacattatgatatgtgtttattattatgtgactctttttacatttcctaaaggtttgagaattaaatatatttaattatgattta

SEQ ID NO: 23474 - protein, 215 aa, Homo sapiens
MDDYMVLRMIGEGSFGRALLVQHESSNQMFAMKEIRLPKSFSNTQNSRKEAVLLAKMKHPNIVAFKESFEAEGHLYIVMEYCDGGDLMQKIKQQKGKLFPEDMILNWFTQMCLGVNHIHKKRVLHRDIKSKNIFLTQNGKVKLGDFGSARLLSNPMAFACTYVGTPYYVPPEIWENLPYNNKSDIWSLGCILYELCTLKHPVSMACKMEKAACHI

SEQ ID NO: 23475 - DNA, 2331 bp, Homo sapiens
ttcacttaacctgcagacagaactcagttagtcggggacaatttccctcaatgttaacagcactgttccaccgcaacgtggaacaacagctttaaaacgtgctcttcgtaggcccggctactccaagaacagtgcctcccgccagacccaggcggcttccttcacccgcaacccgagagacgacccgccgggcccgccccgcggaagccgccggttgccaggccaaggagtggactagggtcgccggggaagcggtttgggagagcccatggtgactgcgtgagtggagcccagctgtgtggatgccccagcatggatgactacatggtcctgagaatgattggggagggctccttcggcagagctcttttggttcagcatgaaagcagtaatcagatgtttgccatgaaagaaataaggcttcccaagtctttctctaatacacagaattctaggaaggaggctgttcttttagccaaaatgaaacaccctaatattgttgccttcaaagaatcatttgaagctgaaggacacttgtatattgtgatggaatactgtgatggaggggatctaatgcaaaagattaaacagcagaaaggaaagttatttcctgaagacatgatacttaattggtttacccaaatgtgccttggagtaaatcacattcacaagaaacgtgtgctacacagagatatcaagtccaagaatatcttcctcactcagaatggaaaagtgaaattgggagactttggatctgcccgtcttctctccaatccgatggcatttgcttgtacctatgtgggaactccttattatgtgcctccagaaatttgggaaaacctgccttataacaataaaagtgacatctggtccttgggttgcatcctgtatgaactctgtacccttaagcatccatttcaggcaaatagttggaaaaatcttatcctcaaagtatgtcaagggtgcatcagtccactgccgtctcattactcctatgaacttcagttcctagtcaagcagatgtttaaaaggaatccctcacatcgcccctcggctacaacgcttctctctcgaggcatcgtagctcggcttgtccagaagtgcttaccccccgagatcatcatggaatatggtgaggaagtattagaagaaataaaaaattcgaagcataacacaccaagaaaaaaacaaaccccagcagaatcaggatagctttgggaaatgaagcaagcacagtgcaagaggaagaacaagatagaaagggtagccatactgatttggaaagcattaatgaaaatttagttgaaagtgcattgagaagagtaaacagagaagaaaaaggtaataagtcagtccatctgaggaaagccagttcaccaaatcttcatagacgacagtgggagaaaaatgtacccaatacagctcttacagctttggaaaatgcatccatactcacctccagtttaacagcagaggacgatagaggtggttctgtaataaagtacagcaaaaatactactcgtaagcagtggctcaaagagacccctgacactttgttgaacatccttaagaatgctgatctcagcttggcttttcaaacatacacaatatatagaccaggttcagaagggttcttgaaaggccccctgtctgaagaaacagaagcatcggacagtgttgatggaggtcacgattctgtcattttggatccagagcgacttgagcctgggctagatgaggaggacacggactttgaggaggaagatgacaaccccgactgggtgtcagagctgaagaagcgagctggatggcaaggcctgtgcgacagataatgcctgaggaaatgttcctgagtcacgctgaggagaggcttcactcaggagttcatgctgagatgatcatgagttcatgcgacgtatattttcctttggaaacagaatgaagcagaggaaactcttaatacttaaaatcgttcttgattagtatcgtgagtttgaaaagtctagaactcctgtaagtttttgaactcaagggagaaggtatagtggaatgagtgtgagcatcgggctttgcagtcccatagaacagaaatgggatgctagcgtgccactacctacttgtgtgattgtgggaaattacttaacctcttcaagccccaatttcctcaaccataaaatgaagataataatgcctacctcagagggatgctgaccacagacctttatagcagcccgtatgatattattcacattatgatatgtgtttattattatgtgactctttttacatttcctaaaggtttgagaattaaatatatttaattatgattta

SEQ ID NO: 23476 - protein, 299 aa, Homo sapiens; identical to SEQ ID NO: 23472

SEQ ID NO: 23477 - DNA, 2770 bp, Homo sapiens
ggaggagagcgcgggggatgtgtttggcatggggacgcactgttacagttgcgctcctggttggctttgtgtttccgcggtgttggtagagtctcggtgtttctacctcttagcaccctttcctgccaccctttgtcctgtggaagcccggagacatcagcggctgcaattttgctactcgctgctcggcatggaacggtcaggacaaaaaataatatccaaagatattttggcactaacagcgctatctgtagcaagaaagttgagcagtgtgaactgttgagacttccaagaagacttcagagaaccaagacagtgtaaaggaaaacaggaaaaaagacttgttagacattattaagggcacgaaagttgaattgagcacagtaaatgtacaaacaacaaagccacccaacagaagtccacttaaaagctacaactggcccgcctcaaagagctacagagcatgctccaaagaagagaaatgagcccgtgagtcctgagttggtggcagctgcatctgctgctctgttttgacaagcaaacaagccagaactgctcaggcagctccgtagcatgaggaagagtcaggggcacagagagatggagagagacctagttagagagcgaaccatgtgctggatttagccagtcctgcatttttctatacttcaaatcaaaacgggccatgcttcacatctacccatgatgaataggggtactttgattaagaataaatagagctgactgaattctgaacaagaaaaacatattcaaggggaagagatgtaatagttttgacgtgacgacagttactaaagaagcacctgaacagacacatcaccttcactttgggatgtggaatttgctaaataagccacagaaaatgaacatcccttcagaatgggtttgaagagctgatccagtggattaaagaggggaaactgggagtttccaattaacaatgaagcaggagctgactaaggctttggaacagaaaccagatgatgcacaatattattgtcaaagagcttattgtcacattcttcttgggagttactatggatctgtaaataactgacgaaaaacccatctgtttctacgtagttgctgttgccgacacaaagaagtcttatgaactcaatccaaataattccactgctatgctgagaaaagggggctggcggcatggagtcttgctctgtcacccatcctcgagtgcaatggcaccatcttagttcactgcagccttgaattccagggctcgagccatccttctgcctctgcctcctgagtaggtgggactacaggcatgtgccaccatactgagctaatttgttaaacactttttttgtagagacgaggtcttgctacgtttcccagactggtctctgaactcccggcctcaagtgatcctactgccttggcctcccaaagtactggcataatagacatgagccactgcacctggctcctaagttcttttcttgaataatatctttctttttttttattttttgaggtggagtctcaccctgttgcccaggctggagtgcaatggcgtgatctcggctcactgcaacttctacctcccgggttcaagtgattctcctgcctcagcctcctgaatagctaggattacaggcgtgcgctaccacgcctggctaattttttgtgtctttagtagagatgcggtttcaccatgttggccaggcttgtctcgaactcttgacctcgtgatccacccgccttggcctcccaaagtgttgggattacaggcgtgagccaccacgcctggccaagtaatatcttaatatcatgccattgacatttatcctctaattatttcagaggtggccttcagaagaaggcctctttggtaaaattgctattgaggatatttcactgaaaaacaaatttatctttaaatttaaatccaggaaaaatttaaactttcaggcttctatttttatcagacagggtaaaaaatttataactcagaatattaccctttcccctctttgtgtgatggattgcttggttttagttactgattatttaaaataataagttattcaaatctaggattttgatacaatagttcttctctagaatatagtgtgtgtgtgagagtatatttaaaatttttattaaggcccatggggcagcctttgaggaaaccagaccttggggatcgccaggcaggattagtggcaggaattgagagaacagagccccacagagctcctcggggaccgtcccccagtcacaagagtatctcaaggaagtagtcttctcccacatcccccaaagataactaccagagggtcagttctctgagcccttctcagtgtagaaaagacaagtgtcaaagcttccccactcaccctgagtttgccttctatgacaatacgtcgtttggcctcactgaggctgagcagaggatgctggacctcccaggatattttgggtcaaatgaagaggatgaaaccacaagtacacttagcgtggagaagctggtgatctagactgagaatcagcctgagcttaacacagctggggtctgctactcgcgttttgtagacttttgtgtaactatttgtaccgtaggacagaatgtgaggaggaagtaacacacacagaggaggatgtgtgtgtgtgcatgtgtttgaattcacaaggaagaaattatttatcttgagctttttcctttgttattcagtttttattggtttattactaataatgataataaaatgtaaacaagagcaaa

SEQ ID NO: 23478 - protein, 84 aa, Homo sapiens
MGTHCYSCAPGWLCVSAVLVESRCFYLLAPFPATLCPVEARRHQRLQFCYSLLGMERSGQKIISKDILALTALSVARKLSSVNC

SEQ ID NO: 23479 - DNA, 3496 bp, Homo sapiens
agaccggaaacggaggagagcgcgggggatgtgtttggcatggggacgcactgttacagttgcgctcctggttggctttgtgtttccgcggtgttggtagagtctcggtgtttctacctcttagcaccctttcctgccaccctttgtcctgtggaagcccggagacatcagcggctgcaattttgctactcgctgctcggcatggaacggtcaggtaccgcagttcagcgctcttggccccgcaggtcctcgggcatccccgtgccccgtgctgtacattcagttatcctccgacttcccggggtcgaaggtattacctgctgggttttagaatctattgctttacatctgagaaaagaaaaatcccagaaagataagatgacttgcccaagatcatagcgtgcctggaaaacagtgctccgattacaagctggtcgctgtgcctcattcgtcttgtcatcaactcctgtcagtttatccaagctccaaaagcgaagttgttttagcttttgcttcccaagatttatttgatagtctcatttctgtttccttcgtttattctttcgttcattattggaaaactttacagcgtgccagtactggtcataaaccccaatgtgtcttaggccttagtgagctgtgaggtgcatgaccttaggtaagttacttctctgattttcagtttccttatctgcaaaatggagaccttagggagttaatgtgggtatgagaaatgtacataaaacatattgcacaaggtgaggcatgtagtgtatgctaataaatggtaagttgctgctgctatggttgttaacaataattataaaaagcaaatggaaaaggcttgaattgaaaaaaatttagacacatagtttttttccttattagcctgcactgtatttttcattttttttaatgcatctttccaggacaaaaaataatatccaaagatattttggcactaacagcgctatctgtagcaagaaagttgagcagtgtgaactgttgagacttccaagaagacttcagagaaccaagacagtgtaaaggaaaacaggaaaaaagacttgttagacattattaagggcacgaaagttgaattgagcacagtaaatgtacaaacaacaaagccacccaacagaagtccacttaaaagctacaactggcccgcctcaaagagctacagagcatgctccaaagaagagaaatgagcccgtgagtcctgagttggtggcagctgcatctgctgctctgttttgacaagcaaacaagccagaactgctcaggcagctccgtagcatgaggaagagtcaggggcacagagagatggagagagacctagttagagagcgaaccatgtgctggatttagccagtcctgcatttttctatacttcaaatcaaaacgggccatgcttcacatctacccatgatgaataggggtactttgattaagaataaatagagctgactgaattctgaacaagaaaaacatattcaaggggaagagatgtaatagttttgacgtgacgacagttactaaagaagcacctgaacagacacatcaccttcactttgggatgtggaatttgctaaataagccacagaaaatgaacatcccttcagaatgggtttgaagagctgatccagtggattaaagaggggaaactgggagtttccaattaacaatgaagcaggagctgactaaggctttggaacagaaaccagatgatgcacaatattattgtcaaagagcttattgtcacattcttcttgggagttactatggatctgtaaataactgacgaaaaacccatctgtttctacgtagttgctgttgccgacacaaagaagtcttatgaactcaatccaaataattccactgctatgctgagaaaagggggctggcggcatggagtcttgctctgtcacccatcctcgagtgcaatggcaccatcttagttcactgcagccttgaattccagggctcgagccatccttctgcctctgcctcctgagtaggtgggactacaggcatgtgccaccatactgagctaatttgttaaacactttttttgtagagacgaggtcttgctacgtttcccagactggtctctgaactcccggcctcaagtgatcctactgccttggcctcccaaagtactggcataatagacatgagccactgcacctggctcctaagttcttttcttgaataatatctttctttttttttattttttgaggtggagtctcaccctgttgcccaggctggagtgcaatggcgtgatctcggctcactgcaacttctacctcccgggttcaagtgattctcctgcctcagcctcctgaatagctaggattacaggcgtgcgctaccacgcctggctaattttttgtgtctttagtagagatgcggtttcaccatgttggccaggcttgtctcgaactcttgacctcgtgatccacccgccttggcctcccaaagtgttgggattacaggcgtgagccaccacgcctggccaagtaatatcttaatatcatgccattgacatttatcctctaattatttcagaggtggccttcagaagaaggcctctttggtaaaattgctattgaggatatttcactgaaaaacaaatttatctttaaatttaaatccaggaaaaatttaaactttcaggcttctatttttatcagacagggtaaaaaatttataactcagaatattaccctttcccctctttgtgtgatggattgcttggttttagttactgattatttaaaataataagttattcaaatctaggattttgatacaatagttcttctctagaatatagtgtgtgtgtgagagtatatttaaaatttttattaaggcccatggggcagcctttgaggaaaccagaccttggggatcgccaggcaggattagtggcaggaattgagagaacagagccccacagagctcctcggggaccgtcccccagtcacaagagtatctcaaggaagtagtcttctcccacatcccccaaagataactaccagagggtcagttctctgagcccttctcagtgtagaaaagacaagtgtcaaagcttccccactcaccctgagtttgccttctatgacaatacgtcgtttggcctcactgaggctgagcagaggatgctggacctcccaggatattttgggtcaaatgaagaggatgaaaccacaagtacacttagcgtggagaagctggtgatctagactgagaatcagcctgagcttaacacagctggggtctgctactcgcgttttgtagacttttgtgtaactatttgtaccgtaggacagaatgtgaggaggaagtaacacacacagaggaggatgtgtgtgtgtgcatgtgtttgaattcacaaggaagaaattatttatcttgagctttttcctttgttattcagtttttattggtttattactaataatgataataaaatgtaaacaagagcaaa

SEQ ID NO: 23480 - protein, 48 aa, Homo sapiens
MYKQQSHPTEVHLKATTGPPQRATEHAPKKRNEPVSPELVAAASAALF

SEQ ID NO: 23481 - DNA, 3784 bp, Homo sapiens
gaaaattgttcattcaattgtgtcatcctttgcagttggaatatttggagttttcctgatcttgttggatgtggctctgatctttgctgacctaattttcactgatagcaaagtttatattcctttggagtatcattctatttctctagctattgctttattttttctcatggatgttcttcttcgagtatttgtagaagggagacagcattatttttctgatttacttaacattttagatactgctgttactgtgattattctgctggttgatgtcgtttacattttttttgacgttaagtttcttaaggatattcccagatggacacgtttatttcgacttctacgacttatcattctgataagagtttttcatctggctcatctaaaaagacaacttggaaagctgataagaaggctggtttcaggaaacaaaaggtgatacgaaagtgatggatttgacctagacctcacttatattacagaacatattgtcgctatgtcgtttccatcttcgggaggccagtctttctatcggaatccaattaaggaagtcatacagtttctagacaaagaaacatccaaaccactatcgagtctacaatctatgcagtgaaagagcttatgatcctaagcacttccataatagggtcagtagaatcatgatcgatgatcataatgtccccactctacgggagatggtagcattctccaaggaagtgttggagtggatggctcaagattctgaaaacatcgtagtgattcactgtaaaggaggcaaaggaagaaccggaactatggtttgtgcctgcctgattgccagtgaaatatttttaactgcagaggaaagattgtactattttggagaacggcgaacagataaaaccaatggcactaaatatcagggagtagaaactccttctcagaatagatatgttggatattttgcacaagtgaaacatagctacaactggaatctccctccaagaaaaacactgtttataaaaagattcgttatttattcgattcatggtgttggaacaggcgatggatatgatctaaaagtccaaatagtaatgaagaaaaagattgtcttttcctgtacttccttaaagaattgtcgggtatttcatgacactgaaacagacagggtaataactgatgtgttcaactgtccacctctgtatgatgatgtgaaagtgcaagcttcctcttcagacaaaaaataatatccaaagatattttggcactaacagcgctatctgtagcaagaaagttgagcagtgtgaactgttgagacttccaagaagacttcagagaaccaagacagtgtaaaggaaaacaggaaaaaagacttgttagacattattaagggcacgaaagttgaattgagcacagtaaatgtacaaacaacaaagccacccaacagaagtccacttaaaagctacaactggcccgcctcaaagagctacagagcatgctccaaagaagagaaatgagcccgtgagtcctgagttggtggcagctgcatctgctgctctgttttgacaagcaaacaagccagaactgctcaggcagctccgtagcatgaggaagagtcaggggcacagagagatggagagagacctagttagagagcgaaccatgtgctggatttagccagtcctgcatttttctatacttcaaatcaaaacgggccatgcttcacatctacccatgatgaataggggtactttgattaagaataaatagagctgactgaattctgaacaagaaaaacatattcaaggggaagagatgtaatagttttgacgtgacgacagttactaaagaagcacctgaacagacacatcaccttcactttgggatgtggaatttgctaaataagccacagaaaatgaacatcccttcagaatgggtttgaagagctgatccagtggattaaagaggggaaactgggagtttccaattaacaatgaagcaggagctgactaaggctttggaacagaaaccagatgatgcacaatattattgtcaaagagcttattgtcacattcttcttgggagttactatggatctgtaaataactgacgaaaaacccatctgtttctacgtagttgctgttgccgacacaaagaagtcttatgaactcaatccaaataattccactgctatgctgagaaaagggggctggcggcatggagtcttgctctgtcacccatcctcgagtgcaatggcaccatcttagttcactgcagccttgaattccagggctcgagccatccttctgcctctgcctcctgagtaggtgggactacaggcatgtgccaccatactgagctaatttgttaaacactttttttgtagagacgaggtcttgctacgtttcccagactggtctctgaactcccggcctcaagtgatcctactgccttggcctcccaaagtactggcataatagacatgagccactgcacctggctcctaagttcttttcttgaataatatctttctttttttttattttttgaggtggagtctcaccctgttgcccaggctggagtgcaatggcgtgatctcggctcactgcaacttctacctcccgggttcaagtgattctcctgcctcagcctcctgaatagctaggattacaggcgtgcgctaccacgcctggctaattttttgtgtctttagtagagatgcggtttcaccatgttggccaggcttgtctcgaactcttgacctcgtgatccacccgccttggcctcccaaagtgttgggattacaggcgtgagccaccacgcctggccaagtaatatcttaatatcatgccattgacatttatcctctaattatttcagaggtggccttcagaagaaggcctctttggtaaaattgctattgaggatatttcactgaaaaacaaatttatctttaaatttaaatccaggaaaaatttaaactttcaggcttctatttttatcagacagggtaaaaaatttataactcagaatattaccctttcccctctttgtgtgatggattgcttggttttagttactgattatttaaaataataagttattcaaatctaggattttgatacaatagttcttctctagaatatagtgtgtgtgtgagagtatatttaaaatttttattaaggcccatggggcagcctttgaggaaaccagaccttggggatcgccaggcaggattagtggcaggaattgagagaacagagccccacagagctcctcggggaccgtcccccagtcacaagagtatctcaaggaagtagtcttctcccacatcccccaaagataactaccagagggtcagttctctgagcccttctcagtgtagaaaagacaagtgtcaaagcttccccactcaccctgagtttgccttctatgacaatacgtcgtttggcctcactgaggctgagcagaggatgctggacctcccaggatattttgggtcaaatgaagaggatgaaaccacaagtacacttagcgtggagaagctggtgatctagactgagaatcagcctgagcttaacacagctggggtctgctactcgcgttttgtagacttttgtgtaactatttgtaccgtaggacagaatgtgaggaggaagtaacacacacagaggaggatgtgtgtgtgtgcatgtgtttgaattcacaaggaagaaattatttatcttgagctttttcctttgttattcagtttttattggtttattactaataatgataataaaatgtaaacaagagcaaa

SEQ ID NO: 23482 - protein, 188 aa, Homo sapiens
MIDDHNVPTLREMVAFSKEVLEWMAQDSENIVVIHCKGGKGRTGTMVCACLIASEIFLTAEERLYYFGERRTDKTNGTKYQGVETPSQNRYVGYFAQVKHSYNWNLPPRKTLFIKRFVIYSIHGVGTGDGYDLKVQIVMKKKIVFSCTSLKNCRVFHDTETDRVITDVFNCPPLYDDVKVQASSSDKK

SEQ ID NO: 23483 - DNA, 3838 bp, Homo sapiens
agccttgctgctgccttgcagtttgatctcagactgctgtgctagcaatcagcgagactccgtgggcgtaggaccctccaagccaggtgaaagagcttatgatcctaagcacttccataatagggtcagtagaatcatgatcgatgatcataatgtccccactctacgggagatggtagcattctccaaggaagtgttggagtggatggctcaagattctgaaaacatcgtagtgattcactgtaaaggaggcaaagaatagatatgttggatattttgcacaagtgaaacatagctacaactggaatctccctccaagaaaaacactgtttataaaaagattcgttatttattcgattcatggtgttggaacaggcgatggatatgatctaaaagtccaaatagtaatgaagaaaaagattgtcttttcctgtacttccttaaagaattgtcgggtatttcatgacactgaaacagacagggtaataactgatgtgttcaactgtccacctctgtatgatgatgtgaaagtgcaagcttcctcttcaagagaagagggcagcacacctcgcagggctaactggaagggggagccatccaggagacctgtgctcaactgatgggtggggagcaatagcgagaacgagggagggacctgagagtggaagcctttattgggatgtaaggtgttacctgagcaggtttcctacggggaggtctaactggtggatttaatgcaagcagtcatgagttccatggagtcatgctgtgactgagaggtggtcattgatatatccacatggtccatgcagagtacgggggtctgtagggaggttatatctagctgtcccataatgaagtagtcaccaacagaaggttgtataaggcagatactgggatcagtcacattgagaaacctggaggaggtgaactggaaactgtcaagggtgactgaaccctgcttctgatatcagaaagtccaatttatatttgaaagggatgctgaggcacaaaaaaattgtaagaattcactacaaaaatacttggctatatataagcataggtccttagtagattctgtttagcactatctaaaccagattcaaatttcagcatttaaattaaatatctatcatggaaaataaactattccttgaaaattttggtagaaacagcaagagaaagcaatagcattttcttaagcctcctcctctgtgtcttgagtgtgttattatagaatgcagagtgctacctattgaatggttataattatttgataaatatataaaggaataaaggaaggaactttgatttctttggaatgattagttcttggcatcaattttacttttaaaatatttttttttctttttaggattttcctaaatactatcacaactacccttttttcttctggtttaacacatctttaatacaaaataacgggtatggatataatatcaacccatagaaacaacctaatcttcaatgtctatgtataagatgtaatggcaagtcttttgctggttgtcataagcttaatttatagaaaacaaaaaatccttgagccaccattgttcattgccttactccttttacgttggctattttaaaaatacagttgttcttgagacccccagttgcagtatcctcaaggtccatgccataggactgtgttatgagctcaaaagtattataatcagatcttaagtgtggaagtaaattcctcccagagaagttcaatatgaatctgctcagtaccttcaacatgtcaggtcctcagtaggtgctgatttaccaatgacgaaccaccaccaaattttgtgctaaagtaagggaggacctagggaagcttcagctagctgaaaagctgactgacacacttatatctaggagaagttacaagacacagtaagtattaagaaatacagctaaaaaatcattaaaattggtagtctcccatttaaacatgggtttctaataactgaattgggaaaactttcttaaaaactattaattggaggctgggtgtggtggctcatgcctgtaatcctagcactttgggaggctgaggcgggcggatcacctaaggttggaagttcgagactagcctggccaacatggtaaaactccgtctctactaaaaatacaaaaatcagccaggcgtggtggcacatgcctgtaatcccagctactcaggaggctgagccagtagaatcgcttgaacccaggaggcagattgcagtgagccgagatcgcaccactacactccagcctgggcgacagagtgagactctgtctaaagaaaaaagcaaaaaaacagaacaactattacttggatttggagattattgttcccagaaaaccttctgccatatttggaaacttatttctcagtctagaagttctccactttaagtagcatttgttctgtgctggtgaaaaactgagatttttttgtattaaccatactcttcaatacaaaaagagaaaatatttttaaaatgcttcaggtcacagttgaggcagttgctatgattgcatgtggcatgaattggtagttattgttacaaccagttctagtcttttcttcaaatctgagctggatctaataactccttaagtccagcaaggcaacagtaaattaaacctctggtctacacacttgcaatacatacacatttaatagattttgatagagtgaactttggattggatggaaattttttaaaaatttgtttcttggatgcatacaaacaataagctttgactcctaacatgagcaaagtccctcaattgtgagagctgggtggagcttcatttgttgctgctcctcaaattgattcttggtaaaggatacagatttttcctttgaaacaccatgttcattttggggaagcaataagttagatcacctttattttcacttttatataaatttctaaagatttctgtaatatttaaatttatatactattggtaaagctgtttttcttagttgtgaaattgttgtttagccaaaaatgccaacttctgtcttttagaacactaggcataaatgggttaaccaatttatgcctagtgttccattattggaatgctaagcatgtgggatttatttatatcctactgctcaaggtcatcgccaagggctgattgcaaaaattcaaaaaattgcaacctcaggcataaattaaaagagatatagtattttattattgggttttgatacatgtctaatcagactgatttctgtcacatatagaaatttagatactgtattaaacctagatgtcattaattccataaaaagcaacgttaaaagaatcagtagcatgtgttactgatgtgttgctgaagattaagatatttttaagtctcaccgaaaaggtagaaggagccaactgagacacaaaaaggggctgaggttctattcatggtgagcaagtcttttttttgtttgtttcttcaagctctaacaagggtgcctactacatggcttttcagttagccccaaaataaaatgtaacaatttttttttctattcttaggctttatctacaaagaaatgaattggataatcttcataaacaaaaaacatggaaaatttatcaaccagaatatgcagtagagatatattttaatgagaaatgacttaagttatgttgtaactggtagctgattaagtatagttccctgcaccccttctgggaaagaattatgttctttctaaccctgccacatagttatatgttctaaatcttccttgctggtacatctatattgatatatgtatacacatgttctttataaatctattaaatatatacagataaaa

SEQ ID NO: 23484 - protein, 70 aa, Homo sapiens
MKKKIVFSCTSLKNCRVFHDTETDRVITDVFNCPPLYDDVKVQASSSREEGSTPRRANWKGEPSRRPVLN

SEQ ID NO: 23485 - DNA, 574 bp, Homo sapiens
agaggtgagggtctctgagcaagagaaggttgtactgaagacacgagacctgagacttgtgtcattttagcggctgaaccgaccccaacttcttctgagcggcagtggcgccagaagcagtctggctttcagaattctggattcattaccagcgtctaccatatgctctgacaactatgaccacaatggtccacccacaaatgaattgacaacagcaaacccagaggcacgtatcaatgaaagtcattattgatcaatccaccgatgacaggtacgttataaaagatgtacacatggccaggagcagtggttcacacctggaatctgagcactttgggagaccaaggcgggcagataccctgaggtcaggagtttgagaccaggctggcaaacatggtgaaaccctgtctctactaaaaatacaatagttagcccagcatggtggcgggtgcctctaatcccagctactcaggaggctgaggcaggagaattgcttgtacctgggaggtggacgttgcagtgagccgagaccgtgccactgcattccagcctgggcagcaggagcgaaactctg

SEQ ID NO: 23486 - protein, 46 aa, Homo sapiens
MKVIIDQSTDDRYVIKDVHMARSSGSHLESEHFGRPRRADTLRSGV

SEQ ID NO: 23487 - DNA, 673 bp, Homo sapiens
gcggggcctgacgggagctctgctcaggcttcaacatggcgggccgtttcggttgacttcgcctgtggaaaccgaattccccctccatggtttccccaggatatgagttgggggcctcacctcgcctataagggtcaggcgagctttctggatgctcgagggacctttcggcctgcgcagccggagcagcttgtcccaatgccctgccatttctgtgagggcccacgaggcctggaggagcctcggagcccccgcaggccctcgcgtcactgcctcaagagggtgctcggagccctgctcgggagctggtccccaacgaggtgtggaaccccttcttgctggaactccacggagagactgtcctgctaggacctgcttccagaagagttgatcccagccgtgaaagtgcatgatgccttcagcgaagcaggcaggaaaggctcaagtgatcctcctgtatcaccctggaagccgaacacttgataaaaagttcatcagcgtaaataagaagaatcccctccattacatacaaaagaaaaaataactggagagatcgtctctgctctaaggtgattatcctgtggtctttggttttagtacattctccccgaccccatgcccttttccctcatctttaatgagtatctgtatgtgtggcagaacagcgtgtttt

SEQ ID NO: 23488 - protein, 88 aa, Homo sapiens
MSWGPHLAYKGQASFLDARGTFRPAQPEQLVPMPCHFCEGPRGLEEPRSPRRPSRHCLKRVLGALLGSWSPTRCGTPSCWNSTERLSC

SEQ ID NO: 23489 - DNA, 809 bp, Homo sapiens
gccaggctcgctgggcagcgcctcctcccggaggtccctccgctggttccttcattccgctggttccttcatttcgctgaatggagatattctcaacatgggatgtgcatctaagttatgaagcataacaattaaataacatccataaacccatgacctcatgcagaatgaaacatttctagtcccgtggaagctacaggactgctggaatttcttctctgatccagtccccttgcttcgcaacagaggttcctgcttctccacgccaatgacatggtgagagaatagaggggaagctgaagacaaacaacataaacttatgtttgaaaagcaccttttactctatgaaataaagtgagtgtaagcagtaaatggaacaacaagctttcagagtcactgcagggcaagagctggggagggaagagctggctggtcatggaggatgcactggagtgaaaaaacatcactcaattggccaggacattccaggacatcagggagaccacacaacagctagagtgtctcttttcatccaaatgaccgcaacacctctccagcaagggcacagaactgggctgaggctgagtattgctgaggcaataccatttagaacataggcacaggtaaggatttcatgacaaaaacgccaaaagcaattgcaaccaaagcaaaaattgataaatgggatctaattgaacctaagagcctctgcatagcaaaagaaactatcatcagagtgaacagagagcctacagaatgggagacaatttttgcgatctgtctgtctgacaaaggcctaatatccagaa

SEQ ID NO: 23490 - protein, 39 aa, Homo sapiens
MQNETFLVPWKLQDCWNFFSDPVPLLRNRGSCFSTPMTW

SEQ ID NO: 23491 - DNA, 383 bp, Homo sapiens
ccctttgttttttttacacattcttaaatacaagtgctttgtttctataggagatattctcaacatgggatgtgcatctaagttatgaagcataacaattaaataacatccataaacccatgacctcatgcagaatgaaacatttctagtcccgtggaagctacaggactgctggaatttcttctctgatccagtccccttgcttcgcaacagaggtgaccactcttctgaaggttatgttcataatccctgtgcttttctttatagtctagatatgtatcttgaagcacactgtgatcatgacatattttgatgttcacttcccatgtttaggttcctgcttctccacgccaatgacatggtgagagaatagaggggaagct

SEQ ID NO: 23492 - protein, 61 aa, Homo sapiens
MQNETFLVPWKLQDCWNFFSDPVPLLRNRGDHSSEGYVHNPCAFLYSLDMYLEAHCDHDIF

SEQ ID NO: 23493 - DNA, 2070 bp, Homo sapiens
gcggggtcagggcgtgcagtctgggacgcgggatgcttggcgctctacctcgccgcccctgagccttcccgtccgcctcgccacgcgcccggacggcctggggttgctgcccgtcagtctcgaaaggtgtttttggggaaaaaaatcacaatctggacgtgagaaaggacatgaggagactaaagacctgggattttgtcaatcagaatgaaaccaatgttgaaagacttttcaaatctattgttggtggtactctgtgactatgttcttggagaagctgaatatcttctcttgagagagccaggccatgtagcactaagcaacgacacagtgtatgtggatttccagtattttgatggtgctaatgggacactgaggaatgtatctgtcctgctgttggaggccaacaccaatcagactgtaactaccaagtacctcctgaccaaccagtcccagggaacactaaagtttgagtgcttctatttcaaggaggctggtgactactggttcacaatgactccagaagcaacagacaacagcactccattcccctggtgggagaaaagtgcctttctgaaggtggaatggcctgtctttcacgttgacttgaataggagtgccaaggcagcagaaggcaccttccaagtgggcctatttaccagtcaaccactgtgcccgtttcctgtggacaagcccaacatcgtagtggatgtcatcttcaccaacagtcttcctgaggcaagaagaaattcaagacagccgctggaaataagaaccagcaaaaggacagaacttgctcaaggtcagtgggttgagtttggctgtgcacccttggggccagaagcctatgtcaccgtggtgctgaagctgcttgggcgagactcagtcattacctccacaggacccattgacctggcccagaaatttggatacaaactggtgatggtgccagaactcacatgtgagtccggggtagaggtgacagtgctgcctccaccatgcaccttcgtccaaggagtggtcactgtcttcaaggaggcccccagataccctgggaagaggaccattcacttggctgaaaacagcctgcccctgggagagaggaggacaatttttaactgtactttgtttgacatggggaagaataagtactgctttgactttggcatttcaagcagaagccatttttctgcaaaggaggagtgcatgctaattcagagaaatacagaaacttggggactgtggcagccatggagccagtgtagtgccacatgtggggatggtgtcagagagcgtcgccgagtgtgtctcacttccttcccctccagtcctgtctgccctggaatgtccttggaggcctccctgtgttccctggaggagtgtgctggcggattctcgctctgttgcccaggctggagtgcagtggcacgatcttggctcactacaagctccgcctcccgggttcatgccatactcctgcctcagcctcccgagtagctgggaatacaggtgcccgccaccacgccccactaagtttttgtatttttagtagagacggggtttcaccgtgttagccaggatggtcttgatctcctgacctcgtgatctgcctgcctcgtcctcccaaagtgctgagattacaggcgtgagccaccgtgcctggcgcataatttcttttcttttctttctttcttttttttttttttttgagacagagtttcactctgttgcccaggctggagtgcagtggcatgatcttggctcactgtaacctccacctcctgcgttcaagcaattctcatgcctcagcctcccgagtagctgggattacaggcgcctgccaccaggcccggctaatttttctatgtttagtagagacatgggttcaccatgttggccaggctggtcttcaactcctggcctcaagtgatccactcacctcggcctcccaaaatgttaagattataggcatgagccactgcggccagccacaaattcataatttctaaatgagcagcctaaaaaaggtctgctgcaagattataatgaaataaaaataagtaacattta

SEQ ID NO: 23494 - protein, 429 aa, Homo sapiens
MKPMLKDFSNLLLVVLCDYVLGEAEYLLLREPGHVALSNDTVYVDFQYFDGANGTLRNVSVLLLEANTNQTVTTKYLLTNQSQGTLKFECFYFKEAGDYWFTMTPEATDNSTPFPWWEKSAFLKVEWPVFHVDLNRSAKAAEGTFQVGLFTSQPLCPFPVDKPNIVVDVIFTNSLPEARRNSRQPLEIRTSKRTELAQGQWVEFGCAPLGPEAYVTVVLKLLGRDSVITSTGPIDLAQKFGYKLVMVPELTCESGVEVTVLPPPCTFVQGVVTVFKEAPRYPGKRTIHLAENSLPLGERRTIFNCTLFDMGKNKYCFDFGISSRSHFSAKEECMLIQRNTETWGLWQPWSQCSATCGDGVRERRRVCLTSFPSSPVCPGMSLEASLCSLEECAGGFSLCCPGWSAVARSWLTTSSASRVHAILLPQPPE

SEQ ID NO: 23495 - DNA, 1721 bp, Homo sapiens
cgggatgcttggcgctctacctcgccgcccctgagccttcccgtccgcctcgccacgcgcccggacggcctggggttgctgcccgtcagtctcgaaagctttccagccatccagcccatctcctcttcagccccagggtccagtgaagtccaacaacatcgtgactgtcactggtatatccttgtgcttgttcatcatcattgccactgtgctcatcacgctgtggaggaggttcggccggccagccaagtgcagcacacctgctcgacacaactccatccactcccccagcttccggaagaactcggacgaggagaatatctgcgagctgagcgagcagcgcgggagcttctcggatgggggagacgggcccacggggagtccaggggacacaggcatccctctgacctacaggcggagcgggccggtacctcccgaggatgatgcctctggcagcgagagcttccagtccaacgcccagaagataatcccacctctgttcagctaccgccttgcccagcagcagttaaaggagatgaaaaagaaaggtctgacggaaactaccaaagtgtatcacgtgtctcagagtcccctgacagacactgccattgatgcggcccccagcgctcccttagatttggaaagcccggaagaagctgcagcaaacaagttccggatcaaatccccatttccggagcagcccgcggtcagtgccggggaaaggcctccctccaggctggatctaaatgtgactcaggccagttgtgccataagccccagccagactctgatccgcaagtcacaggcaaggcacgtgggcagcagagggggcccgtccgaaaggagccatgccaggaacgcccatttcaggaggacagcgagtttccatgaagccaggcaggcccggccgttccgagagaggagcatgtccactctgactccacggcaggcccctgcctacagctctaggacgcggacctgcgagcaggcagaggacagatttaggcctcagagtcgaggtgcccacctgtttcctgaaaaactggagcatttccaagaggcaagtggaacccgtggtccattaaaccctctccctaaatcctacactttggggcagcccttgaggaaaccagaccttggggatcaccaggcaggattagtggccggaattgagagaacagagccccacagagctcgtcggggaccgtcccccagtcacaagagtgtctcaaggaagcagtcttctcccatatcccccaaagataactaccagagggtcagttctctgagcccttctcagtgtagaaaagacaagtgtcaaagcttccccactcaccctgagtttgccttctatgacaatacgtcgtttggcctcactgaggctgagcagaggatgctggacctcccaggatattttgggtcaaatgaagaggatgaaaccacaagtacacttagcgtggagaagctggtgatctagactgagaatcagcctgagctttacacagctggggtctgctactcgcgttttgtagacttttgtgtaactatttgtaccgtaggacagaatgtgaggaggaagtaacacacagaggaggatgtgtgtgtatgcatgtgtttgaattcacaaggaagaaattatttatcttgagctttttcctttgttattcaatttctattgatttattagtaataacaatgataataaaatgtaaatgagcaaa

SEQ ID NO: 23496 - protein, 313 aa, Homo sapiens
MKKKGLTETTKVYHVSQSPLTDTAIDAAPSAPLDLESPEEAAANKFRIKSPFPEQPAVSAGERPPSRLDLNVTQASCAISPSQTLIRKSQARHVGSRGGPSERSHARNAHFRRTASFHEARQARPFRERSMSTLTPRQAPAYSSRTRTCEQAEDRFRPQSRGAHLFPEKLEHFQEASGTRGPLNPLPKSYTLGQPLRKPDLGDHQAGLVAGIERTEPHRARRGPSPSHKSVSRKQSSPISPKDNYQRVSSLSPSQCRKDKCQSFPTHPEFAFYDNTSFGLTEAEQRMLDLPGYFGSNEEDETTSTLSVEKLVI

SEQ ID NO: 23497 - DNA, 3039 bp, Homo sapiens
gccccgcggggctgtgggagccgaacgccgcggggtcagggcgtgcagtctgggacgcgggatgcttggcgctctacctcgccgcccctgagccttcccgtccgcctcgccacgcgcccggacggcctggggttgctgcccgtcagtctcgaaaggtgtttttggggaaaaaaatcacaatctggacgtgagaaaggacatgaggagactaaagacctgggattttgtcaatcagaatgaaaccaatgttgaaagacttttcaaatctattgttggtggtactctgtgactatgttcttggagaagctgaatatcttctcttgagagagccaggccatgtagcactaagcaacgacacagtgtatgtggatttccagtattttgatggtgctaatgggacactgaggaatgtatctgtcctgctgttggaggccaacaccaatcagactgtaactaccaagtacctcctgaccaaccagtcccagggaacactaaagtttgagtgcttctatttcaaggaggctggtgactactggttcacaatgactccagaagcaacagacaacagcactccattcccctggtgggagaaaagtgcctttctgaaggtggaatggcctgtctttcacgttgacttgaataggagtgccaaggcagcagaaggcaccttccaagtgggcctatttaccagtcaaccactgtgcccgtttcctgtggacaagcccaacatcgtagtggatgtcatcttcaccaacagtcttcctgaggcaagaagaaattcaagacagccgctggaaataagaaccagcaaaaggacagaacttgctcaaggtcagtgggttgagtttggctgtgcacccttggggccagaagcctatgtcaccgtggtgctgaagctgcttgggcgagactcagtcattacctccacaggacccattgacctggcccagaaatttggatacaaactggtgatggtgccagaactcacatgtgagtccggggtagaggtgacagtgctgcctccaccatgcaccttcgtccaaggagtggtcactgtcttcaaggaggcccccagataccctgggaagaggaccattcacttggctgaaaacagcctgcccctgggagagaggaggacaatttttaactgtactttgtttgacatggggaagaataagtactgctttgactttggcatttcaagcagaagccatttttctgcaaaggaggagtgcatgctaattcagagaaatacagaaacttggggactgtggcagccatggagccagtgtagtgccacatgtggggatggtgtcagagagcgtcgccgagtgtgtctcacttccttcccctccagtcctgtctgccctggaatgtccttggaggcctccctgtgttccctggaggagtgtgctgctttccagccatccagcccatctcctcttcagccccagggtccagtgaagtccaacaacatcgtgactgtcactggtatatccttgtgcttgttcatcatcattgccactgtgctcatcacgctgtggaggaggttcggccggccagccaagtgcagcacacctgctcgacacaactccatccactcccccagcttccggaagaactcggacgaggagaatatctgcgagctgagcgagcagcgcgggagcttctcggatgggggagacgggcccacggggagtccaggggacacaggcatccctctgacctacaggcggagcgggccggtacctcccgaggatgatgcctctggcagcgagagcttccagtccaacgcccagaagataatcccacctctgttcagctaccgccttgcccagcagcagttaaaggagatgaaaaagaaaggtctgacggaaactaccaaagtgtatcacgtgtctcagagtcccctgacagacactgccattgatgcggcccccagcgctcccttagatttggaaagcccggaagaagctgcagcaaacaagttccggatcaaatccccatttccggagcagcccgcggtcagtgccggggaaaggcctccctccaggctggatctaaatgtgactcaggccagttgtgccataagccccagccagactctgatccgcaagtcacaggcaaggcacgtgggcagcagagggggcccgtccgaaaggagccatgccaggaacgcccatttcaggaggacagcgagtttccatgaagccaggcaggcccggccgttccgagagaggagcatgtccactctgactccacggcaggcccctgcctacagctctaggacgcggacctgcgagcaggcagaggacagatttaggcctcagagtcgaggtgcccacctgtttcctgaaaaactggagcatttccaagaggcaagtggaacccgtggtccattaaaccctctccctaaatcctacactttggggcagcccttgaggaaaccagaccttggggatcaccaggcaggattagtggccggaattgagagaacagagccccacagagctcgtcggggaccgtcccccagtcacaagagtgtctcaaggaagcagtcttctcccatatcccccaaagataactaccagagggtcagttctctgagcccttctcagtgtagaaaagacaagtgtcaaagcttccccactcaccctgagtttgccttctatgacaatacgtcgtttggcctcactgaggctgagcagaggatgctggacctcccaggatattttgggtcaaatgaagaggatgaaaccacaagtacacttagcgtggagaagctggtgatctagactgagaatcagcctgagctttacacagctggggtctgctactcgcgttttgtagacttttgtgtaactatttgtaccgtaggacagaatgtgaggaggaagtaacacacagaggaggatgtgtgtgtatgcatgtgtttgaattcacaaggaagaaattatttatcttgagctttttcctttgttattcaatttctattgatttattagtaataacaatgataataaaatgtaaatgagcaaa

SEQ ID NO: 23498 - protein, 852 aa, Homo sapiens; identical to SEQ ID NO: 3115

SEQ ID NO: 23499 - DNA, 3189 bp, Homo sapiens
actagagtagaagtgattgaatgtgaagtgtcaggagattgctcgctcgtccttcgttaaacccctggtccggctgtgtgctgtggatgcgggtgtgtgttgaggggacctgcgtctgccggggccgcaccccctcccgcaggaccttggctggccgcgcgtttcctgcctgtttcctgtccagcagctggcgagctggggaccggcaggaaaggatgcgctgcccagaaggggcgggaaccgaccacgcccggtcccgtgtgccccccgccctcccggcgcccgccctccccacgccgtcgggggcgggccccgcggggctgtgggagccgaacgccgcggggtcagggcgtgcagtctgggacgcgggatgcttggcgctctacctcgccgcccctgagccttcccgtccgcctcgccacgcgcccggacggcctggggttgctgcccgtcagtctcgaaaggtgtttttggggaaaaaaatcacaatctggacgtgagaaaggacatgaggagactaaagacctgggattttgtcaatcagaatgaaaccaatgttgaaagacttttcaaatctattgttggtggtactctgtgactatgttcttggagaagctgaatatcttctcttgagagagccaggccatgtagcactaagcaacgacacagtgtatgtggatttccagtattttgatggtgctaatgggacactgaggaatgtatctgtcctgctgttggaggccaacaccaatcagactgtaactaccaagtacctcctgaccaaccagtcccagggaacactaaagtttgagtgcttctatttcaaggaggctggtgactactggttcacaatgactccagaagcaacagacaacagcactccattcccctggtgggagaaaagtgcctttctgaaggtggaatggcctgtctttcacgttgacttgaataggagtgccaaggcagcagaaggcaccttccaagtgggcctatttaccagtcaaccactgtgcccgtttcctgtggacaagcccaacatcgtagtggatgtcatcttcaccaacagtcttcctgaggcaagaagaaattcaagacagccgctggaaataagaaccagcaaaaggacagaacttgctcaaggtcagtgggttgagtttggctgtgcacccttggggccagaagcctatgtcaccgtggtgctgaagctgcttgggcgagactcagtcattacctccacaggacccattgacctggcccagaaatttggatacaaactggtgatggtgccagaactcacatgtgagtccggggtagaggtgacagtgctgcctccaccatgcaccttcgtccaaggagtggtcactgtcttcaaggaggcccccagataccctgggaagaggaccattcacttggctgaaaacagcctgcccctgggagagaggaggacaatttttaactgtactttgtttgacatggggaagaataagtactgctttgactttggcatttcaagcagaagccatttttctgcaaaggaggagtgcatgctaattcagagaaatacagctttccagccatccagcccatctcctcttcagccccagggtccagtgaagtccaacaacatcgtgactgtcactggtatatccttgtgcttgttcatcatcattgccactgtgctcatcacgctgtggaggaggttcggccggccagccaagtgcagcacacctgctcgacacaactccatccactcccccagcttccggaagaactcggacgaggagaatatctgcgagctgagcgagcagcgcgggagcttctcggatgggggagacgggcccacggggagtccaggggacacaggcatccctctgacctacaggcggagcgggccggtacctcccgaggatgatgcctctggcagcgagagcttccagtccaacgcccagaagataatcccacctctgttcagctaccgccttgcccagcagcagttaaaggagatgaaaaagaaaggtctgacggaaactaccaaagtgtatcacgtgtctcagagtcccctgacagacactgccattgatgcggcccccagcgctcccttagatttggaaagcccggaagaagctgcagcaaacaagttccggatcaaatccccatttccggagcagcccgcggtcagtgccggggaaaggcctccctccaggctggatctaaatgtgactcaggccagttgtgccataagccccagccagactctgatccgcaagtcacaggcaaggcacgtgggcagcagagggggcccgtccgaaaggagccatgccaggaacgcccatttcaggaggacagcgagtttccatgaagccaggcaggcccggccgttccgagagaggagcatgtccactctgactccacggcaggcccctgcctacagctctaggacgcggacctgcgagcaggcagaggacagatttaggcctcagagtcgaggtgcccacctgtttcctgaaaaactggagcatttccaagaggcaagtggaacccgtggtccattaaaccctctccctaaatcctacactttggggcagcccttgaggaaaccagaccttggggatcaccaggcaggattagtggccggaattgagagaacagagccccacagagctcgtcggggaccgtcccccagtcacaagagtgtctcaaggaagcagtcttctcccatatcccccaaagataactaccagagggtcagttctctgagcccttctcagtgtagaaaagacaagtgtcaaagcttccccactcaccctgagtttgccttctatgacaatacgtcgtttggcctcactgaggctgagcagaggatgctggacctcccaggatattttgggtcaaatgaagaggatgaaaccacaagtacacttagcgtggagaagctggtgatctagactgagaatcagcctgagctttacacagctggggtctgctactcgcgttttgtagacttttgtgtaactatttgtaccgtaggacagaatgtgaggaggaagtaacacacagaggaggatgtgtgtgtatgcatgtgtttgaattcacaaggaagaaattatttatcttgagctttttcctttgttattcaatttctattgatttattagtaataacaatgataataaaatgtaaatgagcaaa

SEQ ID NO: 23500 - protein, 799 aa, Homo sapiens; identical to SEQ ID NO: 3117

SEQ ID NO: 23501 - DNA, 683 bp, Homo sapiens
gtccagtgaagtccaacaacatcgtgactgtcactggtatatccttgtgcttgttcatcatcattgccactgtgctcatcacgctgtggaggaggttcggccggccagccaagtgcagcacacctgctcgacacaactccatccactcccccagcttccggaagaactcggacgaggagaatatctgcgagctgagcgagcagcgcgggagcttctcggatgggggagacgggcccacggggagtccaggggacacaggcatccctctgacctacaggcggagcgggccggtacctcccgaggatgatgcctctggcagcgagagcttccagtccaacgcccagaagataatcccacctctgttcagctaccgccttgcccagcagcagttaaaggagatgaaaccacaagtacacttagcgtggagaagctggtgatctagactgagaatcagcctgagctttacacagctggggtctgctactcgcgttttgtagacttttgtgtaactatttgtaccgtaggacagaatgtgaggaggaagtaacacacagaggaggatgtgtgtgtatgcatgtgtttgaattcacaaggaagaaattatttatcttgagctttttcctttgttattcaatttctattgatttattagtaataacaatgataataaaatgtaaatgagc

SEQ ID NO: 23502 - protein, 36 aa, Homo sapiens [sequence omitted]

SEQ ID NO: 23503 - DNA, 3466 bp, Homo sapiens
acccagagtgtgtttaaattagtgtcctaaattaattacattttttttctgctgtgtgtttctattaggtttcagaaaagggatccctaacatcagaagagtttgctaagcttgtgggaatgtctgtcctcctagccaaagaaaggttgctgcttgcagagaagatgggccatctttgccgtgatgactcagtggaaggcctgcgtttttacccaaatttatttatgacacagagctaagggttttgtatttaaaatcctttttgtccatatgcttgcgtcatgtagaggttgtatgacattgagctaagagataaaccccgatcaattgagaatttattggaacttcacagtgcaatgtaaatctcttttaatttctcactaaatatggtccaggaaatttatttagtatacgcataggaaaattcagaaaagtgaatgccaatatgaatttaaaatcatgctatagtgcagaaccctcagagtttaacttggaatatagtggattttaacttgatcctcaaatctaatcattttataaagaagggaatttagttttgcagagaataaaaagagaagttgcatgttcagacaggttagattattattttggtgtaactgaaattcactgattgcacatgacaatgttgggacaaaatatactgcagcatgctatatgaggctcctccccagggcttttagaagcagtcatagacatgtcttcaacataccaaataaaatacctttaaaaatgaaataattttatttgacacatatatttatatatattctatctagtttctctttgtttttttaagtgatgatttcatgactggcatttaaagaatgcaactgtgtcattttgtttccaaatgctgtggattttgaaactgaactagagagctgtatagacatgcccagagttatgattacaaatttaggaggtagacggctcaggaattccctgggattgttgtgctggtggaatggcagagggaacttcacaggaaccttagtgttcttttacctcaaagccacagacaggaaatagaaagtggaaaagtaatatctccttttcttttccataaggagtttcaacactgaactttaaaaagtctatcatattccagcaatattttttctttgtcctttatgttgtaagttgtgtggaaaaactacttcggtaagaaatgttactgagataacaacaactggctaatactgcatgtagattgcttaggttttaaagtgactgcctgacttcacatgttattgctacagcctccagtatgttcgcattatctcaaactcagggaccccacaggacaggagacaccctttctgaaactgagttggaagtgaaagggtggtgatggttttggccaagcctgcgggagggaaagtattgtattgggagcacccttgggaccaggaagagggatgcccaggttcacactctgggacccctaagacattgtcagtgggtaaggtggagggccactgccagaggctgctgcagtgccctctgggaagtgccagggaccctcagctgcagacccaggggatcccaatcccttatctctgcctgaaaagtggctattgctgcttcgtatcctccagtgtcacaggaatgctgtgcctgagacatcccactttagtttttgttttccaaacctgtcactgactcttcattgtggtgacagatcctctggttcccccattgctcagcctcaggtttattttgagggtaactcagtgtctgactgcccaagtcttttaggggttagttggaccattgtgtaagcttgtttgtatgtctcacctctttctggttggtacttactgtctcacactgctctggcaaacttgtacacacacacacactctctctctctctcacctggctaaggcttttaaaattatgaagataaataatctgtttcaccagctggagtgagttgcaaggaagattgctggagctactcaatctagcgctaatggtttggattcattactgcaaacctacataatttaacatatttgtttactttagtgtgacaactgatgaaaaaaaatggagcaatctgaattgtataaaataacttaagaaggaagaaaagtgatatataaatatattttgcaaatgtcacattaatttaaaaatgagtatgattgattttatttttaaagtgggcattcttcactgtttcgagacctttgtatgtatttgtgtatttttatctttttttttcaggccattattataaggtgttattttggccctctaatgtagaagttatgtttaaatacaaccaatcaggccctaagtgcaaaaaagttctgtcttggtgcttatcactggtataattattatttttttgttttcctaactttgctcttaggagcatgagcctctttgtagctttatggtaatgcaatatttctggtcatttactgtcaaaaaatttttttacattgtgttagtgaagactgtgttttcagggttaaatgattggtatcaatgtatatagagtaaaattattgcaaaatttaaaaatgatttttcttggcattctttttaaatactctgaaacatatatgcaaatgagaaacctttaatcatactaaagccagttatgttaagaatttttcctttggattttataattaagagttgcttataaatacttatgacattgagctcttactgttttagttgtcttaaaacaatgggacatgtcatgaactggtttctttttttaaaaaattcttgatgtgaattccactgttacctgaccatgtatattcagatgaatgtactctttcttgttccttgttaccagattaatctgagagaatgtggattcatcctgtcatctttctcatactcaaatacttaaaatggttcttttgcccaaaagtctcagagtcttcattttggtacagtggagtcacaacttgtaaggtggttaggttttaaagaccgtgcctaaggacaaaattgagcatgctcagaatggtccttgaaaatctcctaaattaccaataaatttctctttgtagtcttaaagtttaaatccctgtggagtgatatgtaggtatgaatatattatgcttatattaagtacaaaaatacaaactgcatatcaagagattcttatagcattaataatttccatgcatgtgtctttttccagtaggtatggttgaatttatgtaaatttattgctaatcccatcccttacgatctagagtataagctgcgcaagggcagaagtttttatctggtttgttcatggatgtattctaagagctgagaacagggcctggacacaataagcattcaataaatatttactgaatgaatgaactcctacctatattcctatttataatttggctccactttatcctactttagctcccattcaattcaataaaaaaaacatttttttgaacacatagca

SEQ ID NO: 23504 - protein, 39 aa, Homo sapiens
MSVLLAKERLLLAEKMGHLCRDDSVEGLRFYPNLFMTQS

SEQ ID NO: 23505 - DNA, 915 bp, Homo sapiens
actatgtctcttctgggtacttcaacttttgtaggattaagcattagttaaaatttagttatagtgtgaatgttctttggattttagtaggacattcagtaaattatttcttgcatatactggtatacattctgcctaccattagaacccagagtgtgtttaaattagtgtcctaaattaattacattttttttctgctgtgtgtttctattaggtttcagaaaagggatccctaacatcagaagagtttgctaagcttgtgggaatgtctgtcctcctagccaaagaaagattaatctgagagaatgtggattcatcctgtcatctttctcatactcaaatacttaaaatggttcttttgcccaaaagtctcagagtcttcattttggtacagtggagtcacaacttgtaaggtggttaggttttaaagaccgtgcctaaggacaaaattgagcatgctcagaatggtccttgaaaatctcctaaattaccaataaatttctctttgtagtcttaaagtttaaatccctgtggagtgatatgtaggtatgaatatattatgcttatattaagtacaaaaatacaaactgcatatcaagagattcttatagcattaataatttccatgcatgtgtctttttccagtaggtatggttgaatttatgtaaatttattgctaatcccatcccttacgatctagagtataagctgcgcaagggcagaagtttttatctggtttgttcatggatgtattctaagagctgagaacagggcctggacacaataagcattcaataaatatttactgaatgaatgaactcctacctatattcctatttataatttggctccactttatcctactttagctcccattcaattcaataaaaaaaacatttttttgaacacatagca

SEQ ID NO: 23506 - protein, 40 aa, Homo sapiens
MWIHPVIFLILKYLKWFFCPKVSESSFWYSGVTTCKVVRF

SEQ ID NO: 23507 - DNA, 4422 bp, Homo sapiens
ggcctcggagggccggggctgggtggcagcggccatggaccgcttcgtttggaccagcggcctcctggagatcaacgagaccctggtgatccagcagcgcggggtgcgaatctacgatggcgaggagaagataaaatttgatgctgggactctccttcttagtacacaccgactgatttggagagatcagaaaaatcatgagtgttgcatggccattctcctttcccaaattgtgttcattgaagaacaggcggctggaattgggaagagtgccaaaatagtggttcatcttcacccagctcctcctaacaaagaacctggcccattccagagtagtaagaactcctacatcaaactctccttcaaagaacatggccagattgagttttacaggcgtttatcagaggaaatgacacaaagaagatgggagaatatgccagtttcccagtcattacaaacaaatagaggaccccagccaggaagaataagggctgtaggaattgtaggtattgaaaggaaactggaagaaaaaagaaaagaaactgacaaaaacatttctgaggcctttgaagacctcagcaaactaatgatcaaggctaaggaaatggtggaattatcaaaatcaattgctaataaaattaaagacaaacaaggtgacatcacagaagatgagaccatcaggtttaaatcctacttgctgagcatgggaatagctaacccagttaccagagaaacctacggctcaggcacacagtaccacatgcagctggccaaacaactggctggaatattgcaggtgcctttagaggaacgagggggaataatgtcactcacggaggtgtactgcttagtaaaccgagctcgaggaatggaattgctctcaccagaagatttagtgaatgcgtgcaagatgctggaagcactgaaattacctctcaggctccgtgtgtttgacagtggcgtcatggtaattgagcttcagtctcacaaggaagaggaaatggtggcctcggccctggagacagtttcagaaaagggatccctaacatcagaagagtttgctaagcttgtgggaatgtctgtcctcctagccaaagaaaggttgctgcttgcagagaagatgggccatctttgccgtgatgactcagtggaaggcctgcgtttttacccaaatttatttatgacacagagctaagggttttgtatttaaaatcctttttgtccatatgcttgcgtcatgtagaggttgtatgacattgagctaagagataaaccccgatcaattgagaatttattggaacttcacagtgcaatgtaaatctcttttaatttctcactaaatatggtccaggaaatttatttagtatacgcataggaaaattcagaaaagtgaatgccaatatgaatttaaaatcatgctatagtgcagaaccctcagagtttaacttggaatatagtggattttaacttgatcctcaaatctaatcattttataaagaagggaatttagttttgcagagaataaaaagagaagttgcatgttcagacaggttagattattattttggtgtaactgaaattcactgattgcacatgacaatgttgggacaaaatatactgcagcatgctatatgaggctcctccccagggcttttagaagcagtcatagacatgtcttcaacataccaaataaaatacctttaaaaatgaaataattttatttgacacatatatttatatatattctatctagtttctctttgtttttttaagtgatgatttcatgactggcatttaaagaatgcaactgtgtcattttgtttccaaatgctgtggattttgaaactgaactagagagctgtatagacatgcccagagttatgattacaaatttaggaggtagacggctcaggaattccctgggattgttgtgctggtggaatggcagagggaacttcacaggaaccttagtgttcttttacctcaaagccacagacaggaaatagaaagtggaaaagtaatatctccttttcttttccataaggagtttcaacactgaactttaaaaagtctatcatattccagcaatattttttctttgtcctttatgttgtaagttgtgtggaaaaactacttcggtaagaaatgttactgagataacaacaactggctaatactgcatgtagattgcttaggttttaaagtgactgcctgacttcacatgttattgctacagcctccagtatgttcgcattatctcaaactcagggaccccacaggacaggagacaccctttctgaaactgagttggaagtgaaagggtggtgatggttttggccaagcctgcgggagggaaagtattgtattgggagcacccttgggaccaggaagagggatgcccaggttcacactctgggacccctaagacattgtcagtgggtaaggtggagggccactgccagaggctgctgcagtgccctctgggaagtgccagggaccctcagctgcagacccaggggatcccaatcccttatctctgcctgaaaagtggctattgctgcttcgtatcctccagtgtcacaggaatgctgtgcctgagacatcccactttagtttttgttttccaaacctgtcactgactcttcattgtggtgacagatcctctggttcccccattgctcagcctcaggtttattttgagggtaactcagtgtctgactgcccaagtcttttaggggttagttggaccattgtgtaagcttgtttgtatgtctcacctctttctggttggtacttactgtctcacactgctctggcaaacttgtacacacacacacactctctctctctctcacctggctaaggcttttaaaattatgaagataaataatctgtttcaccagctggagtgagttgcaaggaagattgctggagctactcaatctagcgctaatggtttggattcattactgcaaacctacataatttaacatatttgtttactttagtgtgacaactgatgaaaaaaaatggagcaatctgaattgtataaaataacttaagaaggaagaaaagtgatatataaatatattttgcaaatgtcacattaatttaaaaatgagtatgattgattttatttttaaagtgggcattcttcactgtttcgagacctttgtatgtatttgtgtatttttatctttttttttcaggccattattataaggtgttattttggccctctaatgtagaagttatgtttaaatacaaccaatcaggccctaagtgcaaaaaagttctgtcttggtgcttatcactggtataattattatttttttgttttcctaactttgctcttaggagcatgagcctctttgtagctttatggtaatgcaatatttctggtcatttactgtcaaaaaatttttttacattgtgttagtgaagactgtgttttcagggttaaatgattggtatcaatgtatatagagtaaaattattgcaaaatttaaaaatgatttttcttggcattctttttaaatactctgaaacatatatgcaaatgagaaacctttaatcatactaaagccagttatgttaagaatttttcctttggattttataattaagagttgcttataaatacttatgacattgagctcttactgttttagttgtcttaaaacaatgggacatgtcatgaactggtttctttttttaaaaaattcttgatgtgaattccactgttacctgaccatgtatattcagatgaatgtactctttcttgttccttgttaccagattaatctgagagaatgtggattcatcctgtcatctttctcatactcaaatacttaaaatggttcttttgcccaaaagtctcagagtcttcattttggtacagtggagtcacaacttgtaaggtggttaggttttaaagaccgtgcctaaggacaaaattgagcatgctcagaatggtccttgaaaatctcctaaattaccaataaatttctctttgtagtcttaaagtttaaatccctgtggagtgatatgtaggtatgaatatattatgcttatattaagtacaaaaatacaaactgcatatcaagagattcttatagcattaataatttccatgcatgtgtctttttccagtaggtatggttgaatttatgtaaatttattgctaatcccatcccttacgatctagagtataagctgcgcaagggcagaagtttttatctggtttgttcatggatgtattctaagagctgagaacagggcctggacacaataagcattcaataaatatttactgaatgaatgaactcctacctatattcctatttataatttggctccactttatcctactttagctcccattcaattcaataaaaaaaacatttttttgaacacatagca

SEQ ID NO: 23508 - protein, 386 aa, Homo sapiens; identical to SEQ ID NO: 3119

SEQ ID NO: 23509 - DNA, 3378 bp, Homo sapiens
acccagagtgtgtttaaattagtgtcctaaattaattacattttttttctgctgtgtgtttctattaggtttcagaaaagggatccctaacatcagaagagtttgctaagcttgtgggaatgtctgtcctcctagccaaagaaaggttgctgcttgcagagaagatgggccatctttgccgtgatgactcagtggaaggcctgcgtttttacccaaatttatttatgacacagagctaagggttttgtatttaaaatcctttttgtccatatgcttgcgtcatgtagaggttgtatgacattgagctaagagataaaccccgatcaattgagaatttattggaacttcacagtgcaatgtaaatctcttttaatttctcactaaatatggtccaggaaatttatttagtatacgcataggaaaattcagaaaagtgaatgccaatatgaatttaaaatcatgctatagtgcagaaccctcagagtttaacttggaatatagtggattttaacttgatcctcaaatctaatcattttataaagaagggaatttagttttgcagagaataaaaagagaagttgcatgttcagacaggttagattattattttggtgtaactgaaattcactgattgcacatgacaatgttgggacaaaatatactgcagcatgctatatgaggctcctccccagggcttttagaagcagtcatagacatgtcttcaacataccaaataaaatacctttaaaaatgaaataattttatttgacacatatatttatatatattctatctagtttctctttgtttttttaagtgatgatttcatgactggcatttaaagaatgcaactgtgtcattttgtttccaaatgctgtggattttgaaactgaactagagagctgtatagacatgcccagagttatgattacaaatttaggaggtagacggctcaggaattccctgggattgttgtgctggtggaatggcagagggaacttcacaggaaccttagtgttcttttacctcaaagccacagacaggaaatagaaagtggaaaagtaatatctccttttcttttccataaggagtttcaacactgaactttaaaaagtctatcatattccagcaatattttttctttgtcctttatgttgtaagttgtgtggaaaaactacttcggtaagaaatgttactgagataacaacaactggctaatactgcatgtagattgcttaggttttaaagtgactgcctgacttcacatgttattgctacagcctccagtatgttcgcattatctcaaactcagggaccccacaggacaggagacaccctttctgaaactgagttggaagtgaaagggtggtgatggttttggccaagcctgcgggagggaaagtattgtattgggagcacccttgggaccaggaagagggatgcccaggttcacactctgggacccctaagacattgtcagtgggtaaggtggagggccactgccagaggctgctgcagtgccctctgggaagtgccagggaccctcagctgcagacccaggggatcccaatcccttatctctgcctgaaaagtggctattgctgcttcgtatcctccagtgtcacaggaatgctgtgcctgagacatcccactttagtttttgttttccaaacctgtcactgactcttcattgtggtgacagatcctctggttcccccattgctcagcctcaggtttattttgagggtaactcagtgtctgactgcccaagtcttttaggggttagttggaccattgtgtaagcttgtttgtatgtctcacctctttctggttggtacttactgtctcacactgctctggcaaacttgtacacacacacacactctctctctctctcacctggctaaggcttttaaaattatgaagataaataatctgtttcaccagctggagtgagttgcaaggaagattgctggagctactcaatctagcgctaatggtttggattcattactgcaaacctacataatttaacatatttgtttactttagtgtgacaactgatgaaaaaaaatggagcaatctgaattgtataaaataacttaagaaggaagaaaagtgatatataaatatattttgcaaatgtcacattaatttaaaaatgagtatgattgattttatttttaaagtgggcattcttcactgtttcgagacctttgtatgtatttgtgtatttttatctttttttttcaggccattattataaggtgttattttggccctctaatgtagaagttatgtttaaatacaaccaatcaggccctaagtgcaaaaaagttctgtcttggtgcttatcactggtataattattatttttttgttttcctaactttgctcttaggagcatgagcctctttgtagctttatggtaatgcaatatttctggtcatttactgtcaaaaaatttttttacattgtgttagtgaagactgtgttttcagggttaaatgattggtatcaatgtatatagagtaaaattattgcaaaatttaaaaatgatttttcttggcattctttttaaatactctgaaacatatatgcaaatgagaaacctttaatcatactaaagccagttatgttaagaatttttcctttggattttataattaagagttgcttataaatacttatgacattgagctcttactgttttagttgtcttaaaacaatgggacatgtcatgaactggtttctttttttaaaaaattcttgatgtgaattccactgttacctgaccatgtatattcagatgaatgtactctttcttgttccttgttaccagattaatctgagagaatgtggattcatcctgtcatctttctcatactcaaatacttaaaatggttcttttgcccaaaagtctcagagtcttcattttggtacagtggagtcacaacttgtaaggtggttaggttttaaagaccgtgcctaaggacaaaattgagcatgctcagaatggtccttgaaaatctcctaaattaccaataaatttctctttgtagtcttaaagtttaaatccctgtggagtgatatgtaggtatgaatatattatgcttatattaagtacaaaaatacaaactgcatatcaagagattcttatagcattaataatttccatgcatgtgtctttttccagtaggtatggttgaatttatgtaaatttattgctaatcccatcccttacgatctagagtataagctgcgcaagggcagaagtttttatctggtttgttcatggatgtattctaagagctgagaacagggcctggacacaataagcattcaataaatatttactgaatgaatgaactcctacct

SEQ ID NO: 23510 - protein, 39 aa, Homo sapiens; identical to SEQ ID NO: 23504

SEQ ID NO: 23511 - DNA, 827 bp, Homo sapiens
actatgtctcttctgggtacttcaacttttgtaggattaagcattagttaaaatttagttatagtgtgaatgttctttggattttagtaggacattcagtaaattatttcttgcatatactggtatacattctgcctaccattagaacccagagtgtgtttaaattagtgtcctaaattaattacattttttttctgctgtgtgtttctattaggtttcagaaaagggatccctaacatcagaagagtttgctaagcttgtgggaatgtctgtcctcctagccaaagaaagattaatctgagagaatgtggattcatcctgtcatctttctcatactcaaatacttaaaatggttcttttgcccaaaagtctcagagtcttcattttggtacagtggagtcacaacttgtaaggtggttaggttttaaagaccgtgcctaaggacaaaattgagcatgctcagaatggtccttgaaaatctcctaaattaccaataaatttctctttgtagtcttaaagtttaaatccctgtggagtgatatgtaggtatgaatatattatgcttatattaagtacaaaaatacaaactgcatatcaagagattcttatagcattaataatttccatgcatgtgtctttttccagtaggtatggttgaatttatgtaaatttattgctaatcccatcccttacgatctagagtataagctgcgcaagggcagaagtttttatctggtttgttcatggatgtattctaagagctgagaacagggcctggacacaataagcattcaataaatatttactgaatgaatgaactcctacct

SEQ ID NO: 23512 - protein, 40 aa, Homo sapiens; identical to SEQ ID NO: 23506

SEQ ID NO: 23513 - DNA, 4334 bp, Homo sapiens
ggcctcggagggccggggctgggtggcagcggccatggaccgcttcgtttggaccagcggcctcctggagatcaacgagaccctggtgatccagcagcgcggggtgcgaatctacgatggcgaggagaagataaaatttgatgctgggactctccttcttagtacacaccgactgatttggagagatcagaaaaatcatgagtgttgcatggccattctcctttcccaaattgtgttcattgaagaacaggcggctggaattgggaagagtgccaaaatagtggttcatcttcacccagctcctcctaacaaagaacctggcccattccagagtagtaagaactcctacatcaaactctccttcaaagaacatggccagattgagttttacaggcgtttatcagaggaaatgacacaaagaagatgggagaatatgccagtttcccagtcattacaaacaaatagaggaccccagccaggaagaataagggctgtaggaattgtaggtattgaaaggaaactggaagaaaaaagaaaagaaactgacaaaaacatttctgaggcctttgaagacctcagcaaactaatgatcaaggctaaggaaatggtggaattatcaaaatcaattgctaataaaattaaagacaaacaaggtgacatcacagaagatgagaccatcaggtttaaatcctacttgctgagcatgggaatagctaacccagttaccagagaaacctacggctcaggcacacagtaccacatgcagctggccaaacaactggctggaatattgcaggtgcctttagaggaacgagggggaataatgtcactcacggaggtgtactgcttagtaaaccgagctcgaggaatggaattgctctcaccagaagatttagtgaatgcgtgcaagatgctggaagcactgaaattacctctcaggctccgtgtgtttgacagtggcgtcatggtaattgagcttcagtctcacaaggaagaggaaatggtggcctcggccctggagacagtttcagaaaagggatccctaacatcagaagagtttgctaagcttgtgggaatgtctgtcctcctagccaaagaaaggttgctgcttgcagagaagatgggccatctttgccgtgatgactcagtggaaggcctgcgtttttacccaaatttatttatgacacagagctaagggttttgtatttaaaatcctttttgtccatatgcttgcgtcatgtagaggttgtatgacattgagctaagagataaaccccgatcaattgagaatttattggaacttcacagtgcaatgtaaatctcttttaatttctcactaaatatggtccaggaaatttatttagtatacgcataggaaaattcagaaaagtgaatgccaatatgaatttaaaatcatgctatagtgcagaaccctcagagtttaacttggaatatagtggattttaacttgatcctcaaatctaatcattttataaagaagggaatttagttttgcagagaataaaaagagaagttgcatgttcagacaggttagattattattttggtgtaactgaaattcactgattgcacatgacaatgttgggacaaaatatactgcagcatgctatatgaggctcctccccagggcttttagaagcagtcatagacatgtcttcaacataccaaataaaatacctttaaaaatgaaataattttatttgacacatatatttatatatattctatctagtttctctttgtttttttaagtgatgatttcatgactggcatttaaagaatgcaactgtgtcattttgtttccaaatgctgtggattttgaaactgaactagagagctgtatagacatgcccagagttatgattacaaatttaggaggtagacggctcaggaattccctgggattgttgtgctggtggaatggcagagggaacttcacaggaaccttagtgttcttttacctcaaagccacagacaggaaatagaaagtggaaaagtaatatctccttttcttttccataaggagtttcaacactgaactttaaaaagtctatcatattccagcaatattttttctttgtcctttatgttgtaagttgtgtggaaaaactacttcggtaagaaatgttactgagataacaacaactggctaatactgcatgtagattgcttaggttttaaagtgactgcctgacttcacatgttattgctacagcctccagtatgttcgcattatctcaaactcagggaccccacaggacaggagacaccctttctgaaactgagttggaagtgaaagggtggtgatggttttggccaagcctgcgggagggaaagtattgtattgggagcacccttgggaccaggaagagggatgcccaggttcacactctgggacccctaagacattgtcagtgggtaaggtggagggccactgccagaggctgctgcagtgccctctgggaagtgccagggaccctcagctgcagacccaggggatcccaatcccttatctctgcctgaaaagtggctattgctgcttcgtatcctccagtgtcacaggaatgctgtgcctgagacatcccactttagtttttgttttccaaacctgtcactgactcttcattgtggtgacagatcctctggttcccccattgctcagcctcaggtttattttgagggtaactcagtgtctgactgcccaagtcttttaggggttagttggaccattgtgtaagcttgtttgtatgtctcacctctttctggttggtacttactgtctcacactgctctggcaaacttgtacacacacacacactctctctctctctcacctggctaaggcttttaaaattatgaagataaataatctgtttcaccagctggagtgagttgcaaggaagattgctggagctactcaatctagcgctaatggtttggattcattactgcaaacctacataatttaacatatttgtttactttagtgtgacaactgatgaaaaaaaatggagcaatctgaattgtataaaataacttaagaaggaagaaaagtgatatataaatatattttgcaaatgtcacattaatttaaaaatgagtatgattgattttatttttaaagtgggcattcttcactgtttcgagacctttgtatgtatttgtgtatttttatctttttttttcaggccattattataaggtgttattttggccctctaatgtagaagttatgtttaaatacaaccaatcaggccctaagtgcaaaaaagttctgtcttggtgcttatcactggtataattattatttttttgttttcctaactttgctcttaggagcatgagcctctttgtagctttatggtaatgcaatatttctggtcatttactgtcaaaaaatttttttacattgtgttagtgaagactgtgttttcagggttaaatgattggtatcaatgtatatagagtaaaattattgcaaaatttaaaaatgatttttcttggcattctttttaaatactctgaaacatatatgcaaatgagaaacctttaatcatactaaagccagttatgttaagaatttttcctttggattttataattaagagttgcttataaatacttatgacattgagctcttactgttttagttgtcttaaaacaatgggacatgtcatgaactggtttctttttttaaaaaattcttgatgtgaattccactgttacctgaccatgtatattcagatgaatgtactctttcttgttccttgttaccagattaatctgagagaatgtggattcatcctgtcatctttctcatactcaaatacttaaaatggttcttttgcccaaaagtctcagagtcttcattttggtacagtggagtcacaacttgtaaggtggttaggttttaaagaccgtgcctaaggacaaaattgagcatgctcagaatggtccttgaaaatctcctaaattaccaataaatttctctttgtagtcttaaagtttaaatccctgtggagtgatatgtaggtatgaatatattatgcttatattaagtacaaaaatacaaactgcatatcaagagattcttatagcattaataatttccatgcatgtgtctttttccagtaggtatggttgaatttatgtaaatttattgctaatcccatcccttacgatctagagtataagctgcgcaagggcagaagtttttatctggtttgttcatggatgtattctaagagctgagaacagggcctggacacaataagcattcaataaatatttactgaatgaatgaactcctacct

SEQ ID NO: 23514 - protein, 386 aa, Homo sapiens; identical to SEQ ID NO: 3119

SEQ ID NO: 23515 - DNA, 1713 bp, Homo sapiens
ggcctcggagggccggggctgggtggcagcggccatggaccgcttcgtttggaccagcggcctcctggagatcaacgagaccctggtgatccagcagcgcggggtgcgaatctacgatggcgaggagaagataaaatttgatgctgggactctccttcttagtacacaccgactgatttggagagatcagaaaaatcatgagtgttgcatggccattctcctttcccaaattgtgttcattgaagaacaggcggctggaattgggaagagtgccaaaatagtggttcatcttcacccagctcctcctaacaaagaacctggcccattccagagtagtaagaactcctacatcaaactctccttcaaagaacatggccagattgagttttacaggcgtttatcagaggaaatgacacaaagaagatgggagaatatgccagtttcccagtcattacaaacaaatagaggaccccagccaggaagaataagggctgtaggaattgtaggtattgaaaggaaactggaagaaaaaagaaaagaaactgacaaaaacatttctgaggcctttgaagacctcagcaaactaatgatcaaggctaaggaaatggtggaattatcaaaatcaattgctaataaaattaaagacaaacaaggtgacatcacagaagatgagaccatcaggtttaaatcctacttgctgagcatgggaatagctaacccagttaccagagaaacctacggctcaggcacacagtaccacatgcagctggccaaacaactggctggaatattgcaggtgcctttagaggaacgagggggaataatgtcactcacggaggtgtactgcttagtaaaccgagctcgaggaatggaattgctctcaccagaagatttagtgaatgcgtgcaagatgctggaagcactgaaattacctctcaggctccgtgtgtttgacagtggcgtcatggtaattgagcttcagtctcacaaggaagaggaaatggtggcctcggccctggagacagtttcagaaaagggatccctaacatcagaagagtttgctaagcttgtgggaatgtctgtcctcctagccaaagaaaggttgctgcttgcagagaagatgggccatctttgccgtgatgactcagtggaaggcctgcgtttttacccaaatttatttatgacacagagctaagggttttgtatttaaaatcctttttgtccatatgcttgcgtcatgtagaggttgtatgacattgagctaagagataaaccccgatcaattgagaatttattggaacttcacagtgcaatgtaaatctcttttaatttctcactaaatatggtccaggaaatttatttagtatacgcataggaaaattcagaaaagtgaatgccaatatgaatttaaaatcatgctatagtgcagaaccctcagagtttaacttggaatatagtggattttaacttgatcctcaaatctaatcattttataaagaagggaatttagttttgcagagaataaaaagagaagttgcatgttcagacaggttagattattattttggtgtaactgaaattcactgattgcacatgacaatgttgggacaaaatatactgcagcatgctatatgaggctcctccccagggcttttagaagcagtcatagacatgtcttcaacataccaaataaaatacctttaaaaatgaaat

SEQ ID NO: 23516 - protein, 386 aa, Homo sapiens; identical to SEQ ID NO: 3119

SEQ ID NO: 23517 - DNA, 755 bp, Homo sapiens
acccagagtgtgtttaaattagtgtcctaaattaattacattttttttctgctgtgtgtttctattaggtttcagaaaagggatccctaacatcagaagagtttgctaagcttgtgggaatgtctgtcctcctagccaaagaaaggttgctgcttgcagagaagatgggccatctttgccgtgatgactcagtggaaggcctgcgtttttacccaaatttatttatgacacagagctaagggttttgtatttaaaatcctttttgtccatatgcttgcgtcatgtagaggttgtatgacattgagctaagagataaaccccgatcaattgagaatttattggaacttcacagtgcaatgtaaatctcttttaatttctcactaaatatggtccaggaaatttatttagtatacgcataggaaaattcagaaaagtgaatgccaatatgaatttaaaatcatgctatagtgcagaaccctcagagtttaacttggaatatagtggattttaacttgatcctcaaatctaatcattttataaagaagggaatttagttttgcagagaataaaaagagaagttgcatgttcagacaggttagattattattttggtgtaactgaaattcactgattgcacatgacaatgttgggacaaaatatactgcagcatgctatatgaggctcctccccagggcttttagaagcagtcatagacatgtcttcaacataccaaataaaatacctttaaaaatgaa

SEQ ID NO: 23518 - protein, 39 aa, Homo sapiens; identical to SEQ ID NO: 23504

SEQ ID NO: 23519 - DNA, 541 bp, Homo sapiens
cagatgaccagcatggataagaagaacccaggaaaagggaatggaatatgcaaggcacattcaagagtactgaagtggaaaatcaagaatatactgagttactgatgctaatagccaaagtgataactaaaagcctttgaagacctcagcaaactaatgatcaaggctaaggaaatggtggaattatcaaaatcaattgctaataaaattaaagacaaacaaggtgacatcacagaagatgagaccatcaggtttaaatcctacttgctgagcatgggaatagctaacccagttaccagagaaacctacggctcaggcacacagtaccacatgcagctggccaaacaactggctggaatattgcaggtgcctttagaggtaaaaactaaacctatgtgtttttttttaaactgtgttaaattagccctatgtcattagaaatgttaacaagagcataactattttcatgatatggttattgtcaactgacatgttttttttttctttcaggtatattaaataagttcattgtgcttattat

SEQ ID NO: 23520 - protein, 93 aa, Homo sapiens
MIKAKEMVELSKSIANKIKDKQGDITEDETIRFKSYLLSMGIANPVTRETYGSGTQYHMQLAKQLAGILQVPLEVKTKPMCFFLNCVKLALCH

SEQ ID NO: 23521 - DNA, 563 bp, Homo sapiens
ggcctcggagggccggggctgggtggcagcggccatggaccgcttcgtttggaccagcggcctcctggagatcaacgagaccctggtgatccagcagcgcggggtgcgaatctacgatggcgaggagaagataaaatttgatgctgggactctccttcttagtacacaccgactgatttggagagatcagaaaaatcatgagtgttgcatggccattctcctttcccaaattgtgttcattgaagaacaggcggctggaattgggaagagtgccaaaatagtggttcatcttcacccagctcctcctaacaaagaacctggcccattccagagtagtaagaactcctacatcaaactctccttcaaagaacatggccagattgaggtaagtttctacatgaataaaatcgtactagaaaggtgtgtgtgtgtgtgtgtgtgtgtgtgtgtgtgtgttgtggcttgttaatatgatggaaggtagtattatacaacataccagatttcaccatatttttacaataaaatttttattatatcttaagccttagcagtgagtggag

SEQ ID NO: 23522 - protein, 144 aa, Homo sapiens
MDRFVWTSGLLEINETLVIQQRGVRIYDGEEKIKFDAGTLLLSTHRLIWRDQKNHECCMAILLSQIVFIEEQAAGIGKSAKIVVHLHPAPPNKEPGPFQSSKNSYIKLSFKEHGQIEVSFYMNKIVLERCVCVCVCVCVCVVAC

SEQ ID NO: 23523 - DNA, 454 bp, Homo sapiens
gcggccgcttccctccgcccggaatgcttccgggagcgcacagctgcagtgcccgggagaaggagcgctcgccgtctgcgggcgccgggcggcgatccggcagtcgacttccttggcgtggttccagaccccctgacgacaccaacctcggcgtcggcaccggacagccccgtttcgcctttctgtgaggagggcgcggtggccgtacagtccgtgccccagcggaagctttagcttggaccttatgcagtcggagggattagcatatctgggcagaggggtgagggattgcttcgaaaggatttcctaaagagataaaatttgatgctgggactctccttcttagtacacaccgactgatttggagagatcagaaaaatcatgagtgttgcatggccattctcctttcccaaattgtgttcattgaagaacaggcggctggaattgggaagag

SEQ ID NO: 23524 - protein, 54 aa, Homo sapiens
MLPGAHSCSAREKERSPSAGAGRRSGSRLPWRGSRPPDDTNLGVGTGQPRFAFL

SEQ ID NO: 23525 - DNA, 2051 bp, Homo sapiens
accggccccggcaactgcagtccaggctccgcctccctacgcccattggcttattcaattcacgcaggaaccaatgggcggagacggcagccgcgccgtctgacggcttagccgcggtgcagactgcggcggcggtggtctgaggaagttctatcttggcgctaaagcggagacgcatcccccgacccgaggctacgatgagcacaccggccgtgccccaggacctgcagctgcccccgagtcagagggcgcagtccgcattcaaagagcaaagaagacaaaaactcaaggaacatctgttgagaagaaaaacgctttttgcatacaagcaggaaaatgagatgttatccagtagagatcagagagttgtgacatctgaggaccaagttcaagaagggactaaagtgctgaaacttaaaacaaaaatggctgataaagaaaacatgaagagacctgcagagagcaaaaataatacagtggtggggaaacattgtattcctttaaaaccttcaaatgaactaaccaattcaactgtagtaattgacacacataaacctaaggatagtaatcaaactccgcatttgttactaactgaagatgatccccaaagtcaacatatgacattaagccaggcatttcaccttaaaaacaatagtaaaaagaaacaaatgactacagaaaaacaaaagcaagatgctaacatgcccaagaaacctgtgcttggatcttatcgtggccagattgttcagtctaagattaattcatttagaaaacctctacaagtcaaagatgagagttctgcagcaacaaagaaactttcagccactatacctaaagccacaaaacctcagcctgtaaacaccagcagtgtaacagtgaaaagtaatagatcctccaatatgactgccactactaaatttgtgagcactacatctcagaacacacaacttgtgcgacctcctattagaagtcatcacagtaatacccgggacactgtgaaacaaggcatcagtagaacttctgccaatgttacaatccggaaagggcctcatgaaaaagaactattacaatcaaaaacagctttatctagtgtcaaaaccagttcttctcaaggtataataagaaataagactctatcaagatccatagcatctgaagttatagccaggcctgcttcattgtctaatgataaactgatggaaaagtcagagcccgttgaccagcgaagacatactgcaggaaaagcaattgttgatagtagatcagctcagcccaaagaaacctcggaagagagaaaagctcgtctgagtgagtggaaagctggcaaaggaagagtgctaaaaaggccccctaattcagtagttactcagcatgagcctgcaggacaaaatgaaaaaccagttgggtctttttggactaccatggcagaagaagatgaacaaagattatttactgaaaaagtaaacaacacattttctgaatgcctgaacttgattaatgagggatgtccaaaagaagatatactggtcacactgaatgacctgattaaaaatattccagatgccaaaaagcttgttaagtattggatatgtcttgcacttattgaaccaatcacaagtcctattgaaaatattattgcaatctatgagaaagccattctggcaggggctcaggtaagataaaaatttactgatctttacaattacagtgtagtagacaattcggaattaatttgaaacacatcacaacataacttgagaaaattttctttgtatatgtagtggtaataaatgtttaaaggctgcaaggattgcattataaaagctgtttgttggctttctaagtcttttattcctgtattgggaataatcagattttagaaaatggatataagctgaaatgtatatttaatgaaactttctgcatgaaatgttttagcatattattgtatgcatttcctggttggaagtttactgggagactgaatgtaatattaaaatttgtttattgaatataaagcaaaagggattaaattcgctttttaaatgtta

SEQ ID NO: 23526 - protein, 494 aa, Homo sapiens
MSTPAVPQDLQLPPSQRAQSAFKEQRRQKLKEHLLRRKTLFAYKQENEMLSSRDQRVVTSEDQVQEGTKVLKLKTKMADKENMKRPAESKNNTVVGKHCIPLKPSNELTNSTVVIDTHKPKDSNQTPHLLLTEDDPQSQHMTLSQAFHLKNNSKKKQMTTEKQKQDANMPKKPVLGSYRGQIVQSKINSFRKPLQVKDESSAATKKLSATIPKATKPQPVNTSSVTVKSNRSSNMTATTKFVSTTSQNTQLVRPPIRSHHSNTRDTVKQGISRTSANVTIRKGPHEKELLQSKTALSSVKTSSSQGIIRNKTLSRSIASEVIARPASLSNDKLMEKSEPVDQRRHTAGKAIVDSRSAQPKETSEERKARLSEWKAGKGRVLKRPPNSVVTQHEPAGQNEKPVGSFWTTMAEEDEQRLFTEKVNNTFSECLNLINEGCPKEDILVTLNDLIKNIPDAKKLVKYWICLALIEPITSPIENIIAIYEKAILAGAQVR

SEQ ID NO: 23527 - DNA, 3457 bp, Homo sapiens
accggccccggcaactgcagtccaggctccgcctccctacgcccattggcttattcaattcacgcaggaaccaatgggcggagacggcagccgcgccgtctgacggcttagccgcggtgcagactgcggcggcggtggtctgaggaagttctatcttggcgctaaagcggagacgcatcccccgacccgaggctacgatgagcacaccggccgtgccccaggacctgcagctgcccccgagtcagagggcgcagtccgcattcaaagagcaaagaagacaaaaactcaaggaacatctgttgagaagaaaaacgctttttgcatacaagcaggaaaatgagatgttatccagtagagatcagagagttgtgacatctgaggaccaagttcaagaagggactaaagtgctgaaacttaaaacaaaaatggctgataaagaaaacatgaagagacctgcagagagcaaaaataatacagtggtggggaaacattgtattcctttaaaaccttcaaatgaactaaccaattcaactgtagtaattgacacacataaacctaaggatagtaatcaaactccgcatttgttactaactgaagatgatccccaaagtcaacatatgacattaagccaggcatttcaccttaaaaacaatagtaaaaagaaacaaatgactacagaaaaacaaaagcaagatgctaacatgcccaagaaacctgtgcttggatcttatcgtggccagattgttcagtctaagattaattcatttagaaaacctctacaagtcaaagatgagagttctgcagcaacaaagaaactttcagccactatacctaaagccacaaaacctcagcctgtaaacaccagcagtgtaacagtgaaaagtaatagatcctccaatatgactgccactactaaatttgtgagcactacatctcagaacacacaacttgtgcgacctcctattagaagtcatcacagtaatacccgggacactgtgaaacaaggcatcagtagaacttctgccaatgttacaatccggaaagggcctcatgaaaaagaactattacaatcaaaaacagctttatctagtgtcaaaaccagttcttctcaaggtataataagaaataagactctatcaagatccatagcatctgaagttatagccaggcctgcttcattgtctaatgataaactgatggaaaagtcagagcccgttgaccagcgaagacatactgcaggaaaagcaattgttgatagtagatcagctcagcccaaagaaacctcggaagagagaaaagctcgtctgagtgagtggaaagctggcaaaggaagagtgctaaaaaggccccctaattcagtagttactcagcatgagcctgcaggacaaaatgaaaaaccagttgggtctttttggactaccatggcagaagaagatgaacaaagattatttactgaaaaagtaaacaacacattttctgaatgcctgaacttgattaatgagggatgtccaaaagaagatatactggtcacactgaatgacctgattaaaaatattccagatgccaaaaagcttgttaagtattggatatgtcttgcacttattgaaccaatcacaagtcctattgaaaatattattgcaatctatgagaaagccattctggcaggggctcagcctattgaagagatgcgacacacgattgtagatattctaacaatgaagagtcaagaaaaagctaatttaggagaaaatatggagaagtcttgtgcaagcaaggaagaagtcaaagaagtcagtattgaagatacaggtgttgatgtagatccagaaaaactggaaatggagagtaaacttcatagaaatttgctatttcaagattgtgaaaaagagcaagacaacaaaacaaaagatccaacccatgatgttaaaacccccaatacagaaacgaggacaagttgcttaattaaatataatgtgtctactacgccatacttgcaaagtgtgaaaaaaaaggtgcagtttgatggaacaaattccgcatttaaagagctgaagtttttaacaccagtgagacgttctcgacgtcttcaagagaaaacttctaaattgccagatatgttaaaagatcattatccttgtgtgtcttcattggaacagctaacggagttgggaagagaaactgatgcttttgtatgccgccctaatgcagcactgtgccgggtgtactatgaggctgatacaacataagagaaataaagctctgttagggaatggggtttttattatttgtggggtgttttgttttgagtagctttatattgctcttaggtctggagttggccatgtacctatgtatcctaagcattcacggcagtgagctcctttactaacattcatgttatggcaagagttgtcctctacattggaaagctaatcctaccttgtcagtttcaaccaactgagttttttctttaagaaaggtaaattttgtcagctagtttactatgttccttgaatataaacaggttataatactaccctgttcactttactaaatataagtacagtaatgatgcataattagaaaatgaggtattctaggtaaaatgtatgtttgccttgacatgtttttaaaagttatgatgtacctccctgcctttaaacagaatacttttttcttttttttggcctttctcagattagtcaaaaattctatagaatgactcacttcgaatactaagacacaggaggtttagcctgctttcttaccaaattcatgttacccagacttgtgttctcttgcgtcccttggactgcctgttgattgatggaaagtgtctgcactgacacttttcgtcagtagtctgtagtttcgtggcctcttttgattataactggggtcaccaagaaggtttacttaattaaataccgcatttctaagagaagatactttgtgtaagaaaagatgccacatttagtggtttaacttttgtaacttcacttgatagtttttaagcaattagaatggagttagggaaagaacatatcatactgaacaaatgtcattctagtttagatagcatttctaagataactgatactaatacttgttttcttccctataacataaaaaacttcactgttaagtcatgtcccttgaaacatgatagttacatacacagttttctctccacacataaataacaccactaaagttgttttgtaaggttccaaactaatatggcatatatcaactctacagtttcaaataaatgactttttaattgtaaaagattagttgaaaaactgtatgaatgtgaagatcacatgcttagtcatttttatgttcattccactttgtatatcttttctatttattgacttctcatgttctagagagtaggacttttattccgtgtacctgatatatatacaattaaaatatctgtgtaattatg

SEQ ID NO: 23528 - protein, 682 aa, Homo sapiens
MSTPAVPQDLQLPPSQRAQSAFKEQRRQKLKEHLLRRKTLFAYKQENEMLSSRDQRVVTSEDQVQEGTKVLKLKTKMADKENMKRPAESKNNTVVGKHCIPLKPSNELTNSTVVIDTHKPKDSNQTPHLLLTEDDPQSQHMTLSQAFHLKNNSKKKQMTTEKQKQDANMPKKPVLGSYRGQIVQSKINSFRKPLQVKDESSAATKKLSATIPKATKPQPVNTSSVTVKSNRSSNMTATTKFVSTTSQNTQLVRPPIRSHHSNTRDTVKQGISRTSANVTIRKGPHEKELLQSKTALSSVKTSSSQGIIRNKTLSRSIASEVIARPASLSNDKLMEKSEPVDQRRHTAGKAIVDSRSAQPKETSEERKARLSEWKAGKGRVLKRPPNSVVTQHEPAGQNEKPVGSFWTTMAEEDEQRLFTEKVNNTFSECLNLINEGCPKEDILVTLNDLIKNIPDAKKLVKYWICLALIEPITSPIENIIAIYEKAILAGAQPIEEMRHTIVDILTMKSQEKANLGENMEKSCASKEEVKEVSIEDTGVDVDPEKLEMESKLHRNLLFQDCEKEQDNKTKDPTHDVKTPNTETRTSCLIKYNVSTTPYLQSVKKKVQFDGTNSAFKELKFLTPVRRSRRLQEKTSKLPDMLKDHYPCVSSLEQLTELGRETDAFVCRPNAALCRVYYEADTT

SEQ ID NO: 23529 - DNA, 3733 bp, Homo sapiens
accggccccggcaactgcagtccaggctccgcctccctacgcccattggcttattcaattcacgcaggaaccaatgggcggagacggcagccgcgccgtctgacggcttagccgcggtgcagactgcggcggcggtggtctgaggaagttctatcttggcgctaaagcggagacgcatcccccgacccgaggctacgatgagcacaccggccgtgccccaggacctgcagctgcccccgagtcagagggcgcagtccgcattcaaagagcaaagaagacaaaaactcaaggaacatctgttgagaagaaaaacgctttttgcatacaagcaggaaaatgagatgttatccagtagagatcagagagttgtgacatctgaggaccaagttcaagaagggactaaagtgctgaaacttaaaacaaaaatggctgataaagaaaacatgaagagacctgcagagagcaaaaataatacagtggtggggaaacattgtattcctttaaaaccttcaaatgaactaaccaattcaactgtagtaattgacacacataaacctaaggatagtaatcaaactccgcatttgttactaactgaagatgatccccaaagtcaacatatgacattaagccaggcatttcaccttaaaaacaatagtaaaaagaaacaaatgactacagaaaaacaaaagcaagatgctaacatgcccaagaaacctgtgcttggatcttatcgtggccagattgttcagtctaagattaattcatttagaaaacctctacaagtcaaagatgagagttctgcagcaacaaagaaactttcagccactatacctaaagccacaaaacctcagcctgtaaacaccagcagtgtaacagtgaaaagtaatagatcctccaatatgactgccactactaaatttgtgagcactacatctcagaacacacaacttgtgcgacctcctattagaagtcatcacagtaatacccgggacactgtgaaacaaggcatcagtagaacttctgccaatgttacaatccggaaagggcctcatgaaaaagaactattacaatcaaaaacagctttatctagtgtcaaaaccagttcttctcaaggtataataagaaataagactctatcaagatccatagcatctgaagttatagccaggcctgcttcattgtctaatgataaactgatggaaaagtcagagcccgttgaccagcgaagacatactgcaggaaaagcaattgttgatagtagatcagctcagcccaaagaaacctcggaagagagaaaagctcgtctgagtgagtggaaagctggcaaaggaagagtgctaaaaaggccccctaattcagtagttactcagcatgagcctgcaggacaaaatgaaaaaccagttgggtctttttggactaccatggcagaagaagatgaacaaagattatttactgaaaaagtaaacaacacattttctgaatgcctgaacttgattaatgagggatgtccaaaagaagatatactggtcacactgaatgacctgattaaaaatattccagatgccaaaaagcttgttaagtattggatatgtcttgcacttattgaaccaatcacaagtcctattgaaaatattattgcaatctatgagaaagccattctggcaggggctcagcctattgaagagatgcgacacacgattgtagatattctaacaatgaagagtcaagaaaaagctaatttaggagaaaatatggagaagtcttgtgcaagcaaggaagaagtcaaagaagtcagtattgaagatacaggtgttgatgtagatccagaaaaactggaaatggagagtaaacttcatagaaatttgctatttcaagattgtgaaaaagagcaagacaacaaaacaaaagatccaacccatgatgttaaaacccccaatacagaaacgaggacaagttgcttaattaaatataatgtgtctactacgccatacttgcaaagtgtgaaaaaaaaggtgcagtttgatggaacaaattccgcatttaaagagctgaagtttttaacaccagtgagacgttctcgacgtcttcaagagaaaacttctaaattgccagatatgttaaaagatcattatccttgtgtgtcttcattggaacagctaacggagttgggaagagaaactgatgcttttgtatgccgccctaatgcagcactgtgccgggtgtactatgaggctgatacaacataagagaaataaagctctgttagggaatggggtttttattatttgtggggtgttttgttttgagtagctttatattgctcttaggtctggagttggccatgtacctatgtatcctaagcattcacggcagtgagctcctttactaacattcatgttatggcaagagttgtcctctacattggaaagctaatcctaccttgtcagtttcaaccaactgagttttttctttaagaaaggtaaattttgtcagctagtttactatgttccttgaatataaacaggttataatactaccctgttcactttactaaatataagtacagtaatgatgcataattagaaaatgaggtattctaggtaaaatgtatgtttgccttgacatgtttttaaaagttatgatgtacctccctgcctttaaacagaatacttttttcttttttttggcctttctcagattagtcaaaaattctatagaatgactcacttcgaatactaagacacaggaggtttagcctgctttcttaccaaattcatgttacccagacttgtgttctcttgcgtcccttggactgcctgttgattgatggaaagtgtctgcactgacacttttcgtcagtagtctgtagtttcgtggcctcttttgattataactggggtcaccaagaaggtttacttaattaaataccgcatttctaagagaagatactttgtgtaagaaaagatgccacatttagtggtttaacttttgtaacttcacttgatagtttttaagcaattagaatggagttagggaaagaacatatcatactgaacaaatgtcattctagtttagatagcatttctaagataactgatactaatacttgttttcttccctataacataaaaaacttcactgttaagtcatgtcccttgaaacatgatagttacatacacagttttctctccacacataaataacaccactaaagttgttttgtaaggttccaaactaatatggcatatatcaactctacagtttcaaataaatgactttttaattgtaaaagattagttgaaaaactgtatgaatgtgaagatcacatgcttagtcatttttatgttcattccactttgtatatcttttctatttattgacttctcatgttctagagagtaggacttttattccgtgtacctgatatatatacaattaaaatatctgtgtaattatgttttaatgaagtttatttcaacagatattttatgaaatgcagtttaaccacagtgaatgaattttagctttgcttttgaaatacattgtaagatttgacttgaggtttttgacacttaagtacatgcttaatgatatattttcaaaagtcatcagtctacttacataaactttacctaatttttttcactttaacaaaaacataactatgcccttgttttttcatactttgacccaaaatatgccattttgaaataaaatttaagctttgatacac

SEQ ID NO: 23530 - protein, 682 aa, Homo sapiens; identical to SEQ ID NO: 23528

SEQ ID NO: 23531 - DNA, 825 bp, Homo sapiens
cgcttgtgaagcattccctaaccatctccctataccacaggcaaagttagttgtttctttttgtgggttttaataatcctttgttcttatttcatatatagcatttatttcattttataatagtatttgttatatagttggcagcagtatttgctgaggaaaaggaatggttcagagatggcaatcgtgttcttttattttgaaaatgtggccaactaggaacaactttaatgtcttctgattttgttcttaaaattcagccaaaagcttaatctataaatgtattttctataggagaaaatatggagaagtcttgtgcaagcaaggaagaagtcaaagaagtcagtattgaagatacaggtgttgatgtagatccagaaaaactggaaatggagagtaaacttcatagaaatttgctatttcaagattgtgaaaaagagcaagacaacaaaacaaaagatccaacccatgatgttaaaacccccaatacagaaacgaggacaagttgcttaattaaatataatgtgtctactacgccatacttgcaaagtgtgaaaaaaaaggtgcagtttgatggaacaaattccgcatttaaagagctgaagtttttaacaccagtgagacgttctcgacgtcttcaagagaaaacttctaaattgccagatatgttaaaagatcattatccttgtgtgtcttcattggaacagctaacggagttgggaagagaaactgatgcttttgtatgccgccctaatgcagcactgtgccgggtgtactatgaggctgatacaacataagagaaataaagctctgttagggaatggg

SEQ ID NO: 23532 - protein, 164 aa, Homo sapiens [sequence omitted]

SEQ ID NO: 23533 - DNA, 2008 bp, Homo sapiens
cgcttgtgaagcattccctaaccatctccctataccacaggcaaagttagttgtttctttttgtgggttttaataatcctttgttcttatttcatatatagcatttatttcattttataatagtatttgttatatagttggcagcagtatttgctgaggaaaaggaatggttcagagatggcaatcgtgttcttttattttgaaaatgtggccaactaggaacaactttaatgtcttctgattttgttcttaaaattcagccaaaagcttaatctataaatgtattttctataggagaaaatatggagaagtcttgtgcaagcaaggaagaagtcaaagaagtcagtattgaagatacaggtgttgatgtagatccagaaaaactggaaatggagagtaaacttcatagaaatttgctatttcaagattgtgaaaaagagcaagacaacaaaacaaaagatccaacccatgatgttaaaacccccaatacagaaacgaggacaagttgcttaattaaatataatgtgtctactacgccatacttgcaaagtgtgaaaaaaaaggtgcagtttgatggaacaaattccgcatttaaagagctgaagtttttaacaccagtgagacgttctcgacgtcttcaagagaaaacttctaaattgccagatatgttaaaagatcattatccttgtgtgtcttcattggaacagctaacggagttgggaagagaaactgatgcttttgtatgccgccctaatgcagcactgtgccgggtgtactatgaggctgatacaacataagagaaataaagctctgttagggaatggggtttttattatttgtggggtgttttgttttgagtagctttatattgctcttaggtctggagttggccatgtacctatgtatcctaagcattcacggcagtgagctcctttactaacattcatgttatggcaagagttgtcctctacattggaaagctaatcctaccttgtcagtttcaaccaactgagttttttctttaagaaaggtaaattttgtcagctagtttactatgttccttgaatataaacaggttataatactaccctgttcactttactaaatataagtacagtaatgatgcataattagaaaatgaggtattctaggtaaaatgtatgtttgccttgacatgtttttaaaagttatgatgtacctccctgcctttaaacagaatacttttttcttttttttggcctttctcagattagtcaaaaattctatagaatgactcacttcgaatactaagacacaggaggtttagcctgctttcttaccaaattcatgttacccagacttgtgttctcttgcgtcccttggactgcctgttgattgatggaaagtgtctgcactgacacttttcgtcagtagtctgtagtttcgtggcctcttttgattataactggggtcaccaagaaggtttacttaattaaataccgcatttctaagagaagatactttgtgtaagaaaagatgccacatttagtggtttaacttttgtaacttcacttgatagtttttaagcaattagaatggagttagggaaagaacatatcatactgaacaaatgtcattctagtttagatagcatttctaagataactgatactaatacttgttttcttccctataacataaaaaacttcactgttaagtcatgtcccttgaaacatgatagttacatacacagttttctctccacacataaataacaccactaaagttgttttgtaaggttccaaactaatatggcatatatcaactctacagtttcaaataaatgactttttaattgtaaaagattagttgaaaaactgtatgaatgtgaagatcacatgcttagtcatttttatgttcattccactttgtatatcttttctatttattgacttctcatgttctagagagtaggacttttattccgtgtacctgatatatatacaattaaaatatctgtgtaattatg

SEQ ID NO: 23534 - protein, 164 aa, Homo sapiens [sequence omitted]

SEQ ID NO: 23535 - DNA, 2284 bp, Homo sapiens
cgcttgtgaagcattccctaaccatctccctataccacaggcaaagttagttgtttctttttgtgggttttaataatcctttgttcttatttcatatatagcatttatttcattttataatagtatttgttatatagttggcagcagtatttgctgaggaaaaggaatggttcagagatggcaatcgtgttcttttattttgaaaatgtggccaactaggaacaactttaatgtcttctgattttgttcttaaaattcagccaaaagcttaatctataaatgtattttctataggagaaaatatggagaagtcttgtgcaagcaaggaagaagtcaaagaagtcagtattgaagatacaggtgttgatgtagatccagaaaaactggaaatggagagtaaacttcatagaaatttgctatttcaagattgtgaaaaagagcaagacaacaaaacaaaagatccaacccatgatgttaaaacccccaatacagaaacgaggacaagttgcttaattaaatataatgtgtctactacgccatacttgcaaagtgtgaaaaaaaaggtgcagtttgatggaacaaattccgcatttaaagagctgaagtttttaacaccagtgagacgttctcgacgtcttcaagagaaaacttctaaattgccagatatgttaaaagatcattatccttgtgtgtcttcattggaacagctaacggagttgggaagagaaactgatgcttttgtatgccgccctaatgcagcactgtgccgggtgtactatgaggctgatacaacataagagaaataaagctctgttagggaatggggtttttattatttgtggggtgttttgttttgagtagctttatattgctcttaggtctggagttggccatgtacctatgtatcctaagcattcacggcagtgagctcctttactaacattcatgttatggcaagagttgtcctctacattggaaagctaatcctaccttgtcagtttcaaccaactgagttttttctttaagaaaggtaaattttgtcagctagtttactatgttccttgaatataaacaggttataatactaccctgttcactttactaaatataagtacagtaatgatgcataattagaaaatgaggtattctaggtaaaatgtatgtttgccttgacatgtttttaaaagttatgatgtacctccctgcctttaaacagaatacttttttcttttttttggcctttctcagattagtcaaaaattctatagaatgactcacttcgaatactaagacacaggaggtttagcctgctttcttaccaaattcatgttacccagacttgtgttctcttgcgtcccttggactgcctgttgattgatggaaagtgtctgcactgacacttttcgtcagtagtctgtagtttcgtggcctcttttgattataactggggtcaccaagaaggtttacttaattaaataccgcatttctaagagaagatactttgtgtaagaaaagatgccacatttagtggtttaacttttgtaacttcacttgatagtttttaagcaattagaatggagttagggaaagaacatatcatactgaacaaatgtcattctagtttagatagcatttctaagataactgatactaatacttgttttcttccctataacataaaaaacttcactgttaagtcatgtcccttgaaacatgatagttacatacacagttttctctccacacataaataacaccactaaagttgttttgtaaggttccaaactaatatggcatatatcaactctacagtttcaaataaatgactttttaattgtaaaagattagttgaaaaactgtatgaatgtgaagatcacatgcttagtcatttttatgttcattccactttgtatatcttttctatttattgacttctcatgttctagagagtaggacttttattccgtgtacctgatatatatacaattaaaatatctgtgtaattatgttttaatgaagtttatttcaacagatattttatgaaatgcagtttaaccacagtgaatgaattttagctttgcttttgaaatacattgtaagatttgacttgaggtttttgacacttaagtacatgcttaatgatatattttcaaaagtcatcagtctacttacataaactttacctaatttttttcactttaacaaaaacataactatgcccttgttttttcatactttgacccaaaatatgccattttgaaataaaatttaagctttgatacac

SEQ ID NO: 23536 - protein, 164 aa, Homo sapiens [sequence omitted]

SEQ ID NO: 23537 - DNA, 2617 bp, Homo sapiens
ggcctgacgggagctctgctcaggcttcaacatggcgggccgtttcggttgacttcgcctgtggaaaccgaattccccctccatggtttccccaggatatgagttgggggcctcacctcgcctataagggtcaggcgagctttctggatgctcgagggacctttcggcctgcgcagccggagcagcttgtcccaatgccctgccatttctgtgagggcccacgaggcctggaggagcctcggagcccccgcaggccctcgcgtcactgcctcaagagggtgctcggagccctgctcgggagctggtccccaacgaggtgtggaaccccttcttgctggaactccacggagagactgtcctgctaggacctgcttccagaagagttgatcccagccgtgaaagtgcatgatgccttcagcgaagcaggcaggaaaggctcaagtgatcctcctgtatcaccctgggtatcaaggccattcagtggaaaagaacagtctcttcagcaagtggatgaagttagatctcttcctcacatcatacagaaaaatcaacctcaaatggaagaaatatctaaatgaagccgaacacttgataaaaagttcatcagcgtaaataagaagaatcccctccattacatacaaaagaaaaaataactggagagatcatctctgctctaagcgtgtttttaagtctctgcagtcttggaccaagctcgttttattccctactctacgagaatctcaagagcaccaggattctgtttggagttgccatggacacagagttcttaatccagtactggcttattctcaatacgagagaaagttgtactgaagacacgagacctgagacttgtgtcattttagcggctgaaccgaccccaacttcttctgagcggcagtggcgccagaagcagtctggctttcagtccccatcctgttgacctggtggaagtcatcattgatagagacaccgatgacattccccacacaagtgaactgacaggaggaaccaaggaagcatgtatctacgaaagtgtgtcagaacgactttccaggtttgaagattatgaaaatgctgaatatgtcgcttcatatgacagcaagattaagaaaattgttcattcaattgtgtcatcctttgcagttggaatatttggagttttcctgatcttgttggatgtggctctgatctttgctgacctaattttcactgatagcaaagtttatattcctttggagtatcgttctatttctctagctattgctttattttttctcatggatgttcttcttcgagtatttgtagaagggagacagcattatttttctgatttacttaacattttagatactgccgttactgtgattattctgctggttgatgtcgtttacattttttttgacgttaagtttcttaaggatattcccagatggacacgtttatttcgacttctacgacttatcattctgataagagtttttcgtctggctcatctaaaaagacaacttggaaagctgataagaaggctggtttcaggaaacaaaaggtgatacgaaagggatggatttgacctagacctcacttatattacagaacgtattgtcgctatgtcatttccatcttcgggaggccagtctttctatcggaatccaattaaggtgaaagagcttatgatcctaagcacttccataatagggtcagtagaatcatgatcgatgatcataatgtccccactctacgggagatggtagcattctccaaggaagtgttggagtggatggctcaagattctgaaaacatcgtagtgattcactgtaaaggaggcaaaggaagaaccggaactatggtttgtgcctgcctgattgccagtgaaatatttttaactgcagaggaaagattgtactattttggagaacggcgaacagataaaaccaatggcactaaatatcagggagtagaaactccttctcagaatagatatgttggatattttgcacaagtgaaacatagctacaactggaatctccctccaagaaaaacactgtttataaaaagattagttatttattcgattcatggtgttggaacaggcgatggatatgatctaaaagtccaaatagtaatgaagaaaaagattgtcttttcctgcacttccttaaacagttgtcgggtatttcatgacactgaaacagacagggtaataattgatgtgttcaactgtccacctctgtatgatgatgtgaaagtgcaagcttcctcttcggattttcctaaatactatcacaactacccttttttcttctggtttaacacatctttaatacaaaataacaagctttatctacaaagaaatgaattggataatcttcataaacaaaaaactggaaaatttatcaaccagaatatgcagtagagacatattttgatgagaaatgacttaagttatgttgtaactggtagctgattaagtatagttccctgcaccccttctgggaaagaattatgttctttctaaccctgccacatagttatatgttctaaatcttccttgctggtacatctatattgatatatgtatacacatgttctttataaatctattaaatatatacag

SEQ ID NO: 23538 - protein, 234 aa, Homo sapiens
MIDDHNVPTLREMVAFSKEVLEWMAQDSENIVVIHCKGGKGRTGTMVCACLIASEIFLTAEERLYYFGERRTDKTNGTKYQGVETPSQNRYVGYFAQVKHSYNWNLPPRKTLFIKRLVIYSIHGVGTGDGYDLKVQIVMKKKIVFSCTSLNSCRVFHDTETDRVIIDVFNCPPLYDDVKVQASSSDFPKYYHNYPFFFWFNTSLIQNNKLYLQRNELDNLHKQKTGKFINQNMQ

SEQ ID NO: 23539 - DNA, 2664 bp, Homo sapiens
atgcccttttccctcatctttaatgagtatctgtatgtgtggcagaacagcgtgtttttaagtctctgcagtcttggaccaagctcgttttattccctactctacgagaatctcaagagcaccaggattctgtttggagttgccatggacacagagttcttaatccagtactggcttattctcaatacgagggaccttacggagtccccttatcctcagggtactgggggacaactacggctgaaccgaccccaacttcttctgagcggcagtggcgccagaagcagtctggctttcagtccccatcctgttgacctggtggaagtcatcattgatagagacaccgatgacattccccacacaagtgaactgacaggaggaaccaaggaagcatgtatctacgaaagaatatttggagttttcctgatcttgttggatgtggctctgatctttgctgacctaattttcactgatagcaaagtttatattcctttggagtatcgttctatttctctagctattgctttattttttctcatggatgttcttcttcgagtatttgtagaagggagacagcattatttttctgatttacttaacattttagatactgccgttactgtgattattctgctggttgatgtcgtttacattttttttgacgttaagtttcttaaggatattcccagatggacacgtttatttcgacttctacgacttatcattctgataagagtttttcgtctggctcatctaaaaagacaacttggaaagctgataagaaggctggaagtcgtacagtttctagacaagaaacatccaaaccactatcgagtctacaatctatgcagtgtgtaccttactctgtattttgctactgtagatagaaaacagattactgaatgtgaaagagcttatgatcctaagcacttccataatagggtcagtagaatcatgatcgatgatcataatgtccccactctacgggagatggtagcattctccaaggaagtgttggagtggatggctcaagattctgaaaacatcgtagtgattcactgtaaaggaggcaaaggaagaaccggaactatggtttgtgcctgcctgattgccagtgaaatatttttaactgcagaggaaagattgtactattttggagaacggcgaacagataaaaccaatggcactaaatatcagggagtagaaactccttctcagaatagatatgttggatattttgcacaagtgaaacatagctacaactggaatctccctccaagaaaaacactgtttataaaaagattagttatttattcgattcatggtgttggaacaggcgatggatatgatctaaaagtccaaatagtaatgaagaaaaagattgtcttttcctgcacttccttaaacagttgtcgggtatttcatgacactgaaacagacagggtaataattgatgtgttcaactgtccacctctgtatgatgatgtgaaagtgcaagcttcctcttcgctgggagaagaaacagggcttggaggaggcaagactgttcagcatgaattagaactgatttatgagcttgctgtagcacttggaatagaaaaactcttcagcgcctttgatccctctcacactacaccaggccgcccactgtctggcagcctgcaagtctccattcagaagcggctccgtgctgcccagcgatggcgccctggcggcgcggaagcccgcggccaaatgacacgacttgggggcaaaggaggacaacagttcccaccaggccagcgaaccttactgaacactggcgaggactccgcctctaggaatagaatcgcgggagtctcggcgtttctacctcttcgcaccctttcctgccaccctttgtcccctggaagcccggagacatcagcggctgcaattttgctactcgctgctcggcgtggaactgtcaggtaccgcagttcagcacttttggctccgcaggagacttcagacaaccaagacagtgtaaaggaaaacagagaaaaagacttgttagacattattaagggcacgaaagttgaattgagcacagtaaatgtacaaacaacaaagccacccaacagaagttcacttaaaagctacaactggcgggcctcaaagagctttaggacatgctccaaagaagaggatgggtgtgatgtatgtaaaatatatgccttagaaccttttatcagtggtcctgtgtttaaaaaagaggctttggtcctacatcaaaagactggtgaacaagcaaacaagccagaactgctcaggcagctccgtagcatgaggaagagtcaggggcacagagagatggagagagacctagttagtttcaataacaaaatatcagatatgaaaattgccagatgtgctacagctagaattaatataaggccagagcatcagattcagtttgaccaaggctatgacaattatcctggcctggagaagactgctgatcttagaaacagtaaaataaatgaagaaactcagtacaaatggtctccagagtacacatcaccttcactttgggatatggaatttgataagcagttagccacagaatatgaacaaccccttgagaatgagattgaagaactgatccaggggacaaaagaggggaaactgagagttcccaattaa

SEQ ID NO: 23540 - protein, 887 aa, Homo sapiens [sequence omitted]

SEQ ID NO: 23541 - DNA, 754 bp, Homo sapiens
ggacacgtttatttcgacttctacgacttatcattctgataagagtttttcgtctggctcatctaaaaagacaacttggaaagctgataagaaggctggtttcaggaaacaaaaggtgatacgaaagggatggatttgacctagacctcacttatattacagaacgtattgtcgctatgtcatttccatcttcgggaggccagtctttctatcggaatccaattaaggaagaaccggaactatggtttgtgcctgcctgattgccagtgaaatatttttaactgcagaggtgttggaacaggcgatggatatgatctaaaagtccaaatagtaatgaagaaaaagattgtcttttcctgcacttccttaaacagttgtcgggtatttcatgacactgaaacagacagggtaataattgatgtgttcaactgtccacctctgtatgatgatgtgaaagtgcaagcttcctcttcggattttcctaaatactatcacaactacccttttttcttctggtttaacacatctttaatacaaaataacaagctttatctacaaagaaatgaattggataatcttcataaacaaaaaactggaaaatttatcaaccagaatatgcagtagagacatattttgatgagaaatgacttaagttatgttgtaactggtagctgattaagtatagttccctgcaccccttctgggaaagaattatgttctttctaaccctgccacatagttatatgttctaaat

SEQ ID NO: 23542 - protein, 96 aa, Homo sapiens
MKKKIVFSCTSLNSCRVFHDTETDRVIIDVFNCPPLYDDVKVQASSSDFPKYYHNYPFFFWFNTSLIQNNKLYLQRNELDNLHKQKTGKFINQNMQ

SEQ ID NO: 23543 - DNA, 827 bp, Homo sapiens
gagctctctgttgccttaggcaatgagctgattcctggagtacacattaatctgagctccctcctaaaccctaggggaacgggagttaggtgggggtgtgggaggaagatgggtggagccagatggggaaggttccccagtgttgtcctgctctcagtccaggtttgggaaaatgcctgcagcttttccttgtgtcctttcctcacaaagtctccaagtctctcgttaaattagctccaggacttgggagaaacagtgcccctcctcggtccgggttgcttggatccccagtggaaaggaagaaccggaactatggtttgtgcctgcctgattgccagtgaaatatttttaactgcagaggtgttggaacaggcgatggatatgatctaaaagtccaaatagtaatgaagaaaaagattgtcttttcctgcacttccttaaacagttgtcgggtatttcatgacactgaaacagacagggtaataattgatgtgttcaactgtccacctctgtatgatgatgtgaaagtgcaagcttcctcttcggctttatctacaaagaaatgaattggataatcttcataaacaaaaaactggaaaatttatcaaccagaatatgcagtagagacatattttgatgagaaatgacttaagttatgttgtaactggtagctgattaagtatagttccctgcaccccttctgggaaagaattatgttctttctaaccctgccacatagttatatgttctaaatcttccttgctggtacatctatattgatatatgtatacacatgttctttataaatctattaaatatatacagat

SEQ ID NO: 23544 - protein, 72 aa, Homo sapiens
MGKVPQCCPALSPGLGKCLQLFLVSFPHKVSKSLVKLAPGLGRNSAPPRSGLLGSPVERKNRNYGLCLPDCQ

SEQ ID NO: 23545 - DNA, 640 bp, Homo sapiens
cagtgttgtcctgctctcagtccaggtttgggaaaatgcctgcagcttttccttgtgtcctttcctcacaaagtctccaagtctctcgttaaattagctccaggacttgggagaaacagtgcccctcctcggtccgggttgcttggatccccagtggaaaggaagaaccggaactatggtttgtgcctgcctgattgccagtgaaatatttttaactgcagaggtgttggaacaggcgatggatatgatctaaaagtccaaatagtaatgaagaaaaagattgtcttttcctgcacttccttaaacagttgtcgggtatttcatgacactgaaacagacagggtaataattgatgtgttcaactgtccacctctgtatgatgatgtgaaagtgcaagcttcctcttcggtgagtaatcaagaaacggcctctgccactgttcttatctgaacttttgaatggttttatttaaggtttcctttactacagttcccaacaagggagatgatagatgtcatcccatagagggagggggagaaaataaatcagatctataacaatttttttaaaagaacatatgtaatttgaataatttttgttcatttgttttttctaaattgtacattttctaaatttttct

SEQ ID NO: 23546 - protein, 60 aa, Homo sapiens
MKKKIVFSCTSLNSCRVFHDTETDRVIIDVFNCPPLYDDVKVQASSSVSNQETASATVLI

SEQ ID NO: 23547 - DNA, 1590 bp, Homo sapiens
gagaagaaacagggcttggaggaggcaagactgttcagcatgaattagaactgatttatgagcttgctgtagcacttggaatagaaaaactcttcagcgcctttgatccctctcacactacaccagggttcgattgagaaaacaacagcgctgaccacccgtccttctcgatccttggggaaaaaacttttttggacggtagagtcagatgaggccgcattttccaccagggaacactaactgctgcgggaagatcccagcttctggctaaagctggggcggtaggagctgccggccagctcgccatctagtccccagagcccgggctttagggcgcccggatgcaaaccagttttgccgccaaggaacccggacaggcgcgcctcctccccggcctcgcaaggaacaggttaaggagacatttcccactttctctgcccggccctgaacgctcgccgcccctgcccagccgcccactgtctggcagcctgcaagtctccattcagaagcggctccgtgctgcccagcgatggcgccctggcggcgcggaagcccgcggccaaatgacacgacttgggggcaaaggaggacaacagttcccaccaggacaaaaaataatatccaaagatattttggcactaacggcgctatctgtagcaagaaagttgagcagtgtgaactgttgagacttccaaggagacttcagacaaccaagacagtgtaaaggaaaacagagaaaaagacttgttagacattattaagggcacgaaagttgaattgagcacagtaaatgtacaaacaacaaagccacccaacagaagttcacttaaaagctacaactggcgggcctcaaagagctttaggacatgctccaaagaagagaaatgagcccctgagtcctgagttggtggcagctgcatctgctgctctgttttgacaagcaaacaagccagaactgctcaggcagctccgtagcatgaggaagagtcaggggcacagagagatggagagagacctagttagtttcaataacaaaatatcagatatgaaaattgccagatgtgctacagctagaattaatataaggccagagcatcagattcagtttgaccaaggctatgacaattatcctggcctggagaagactgctgatcttagaaacaggtatcaggctttgtagtctgctgggttttgtttgtatagtttggttttaccttgactgtagatttaccttattgtgggtgtgtatgattgctgttggatatgtgagcattatgaatgcatttacatctgtgttcttactctctgtataccacttcctagagagggaaccatgtgctggagttagccagtcctgcatttttctataccttaaatcaaaataggccatgcttcatatctacccatgatgaatagggttcctttgatttagaataaatagagctgactgaattctgaacaagtgagtattttgtaagaaacattatttttcattttaaatatcaatgcctaatactgtgtattcatttaccctttatatctctatacatgcttatcttttgttacaccttagagaaatgacccaccatc

SEQ ID NO: 23548 - protein, 114 aa, Homo sapiens
MQTSFAAKEPGQARLLPGLARNRLRRHFPLSLPGPERSPPLPSRPLSGSLQVSIQKRLRAAQRWRPGGAEARGQMTRLGGKGGQQFPPGQKIISKDILALTALSVARKLSSVNC

SEQ ID NO: 23549 - DNA, 674 bp, Homo sapiens
agaccagaaacggaagagagcgcgggggatgtgtttggcgtggggcgcactgttcagttgctctcctggatggctttatgtctccgcggtgtttcctagagtctcggcgtttctacctcttcgcaccctttcctgccaccctttgtcccctggaagcccggagacatcagcggctgcaattttgctactcgctgctcggcgtggaactgtcaggacaaaaaataatatccaaagatattttggcactaacggcgctatctgtagcaagaaagttgagcagtgtgaactgttgagacttccaaggagacttcagacaaccaagacagtgtaaaggaaaacagagaaaaagacttgttagacattattaagggcacgaaagttgaattgagcacagtaaatgtacaaacaacaaagccacccaacagaagttcacttaaaagctacaactggcgggcctcaaagagctttaggacatgctccaaagaagagaaatgagcccctgagtcctgagttggtggcagctgcatctgctgctctgttttgacaagcaaacaagccagaactgctcaggcagctccgtagcatgaggaagagtcaggggcacagagagatggagagagacctagttagagaaatgacccaccatcaacgaaaagaaagaaaggcgtaggctg

SEQ ID NO: 23550 - protein, 100 aa, Homo sapiens
MCLAWGALFSCSPGWLYVSAVFPRVSAFLPLRTLSCHPLSPGSPETSAAAILLLAARRGTVRTKNNIQRYFGTNGAICSKKVEQCELLRLPRRLQTTKTV

SEQ ID NO: 23551 - DNA, 908 bp, Homo sapiens
agaccagaaacggaagagagcgcgggggatgtgtttggcgtggggcgcactgttcagttgctctcctggatggctttatgtctccgcggtgtttcctagagtctcggcgtttctacctcttcgcaccctttcctgccaccctttgtcccctggaagcccggagacatcagcggctgcaattttgctactcgctgctcggcgtggaactgtcaggacaaaaaataatatccaaagatattttggcactaacggcgctatctgtagcaagaaagttgagcagtgtgaactgttgagacttccaaggagacttcagacaaccaagacagtgtaaaggaaaacagagaaaaagacttgttagacattattaagggcacgaaagttgaattgagcacagtaaatgtacaaacaacaaagccacccaacagaagttcacttaaaagctacaactggcgggcctcaaagagctttaggacatgctccaaagaagagaaatgagcccctgagtcctgagttggtggcagctgcatctgctgctctgttttgacaagcaaacaagccagaactgctcaggcagctccgtagcatgaggaagagtcaggggcacagagagatggagagagacctagttagtttcaataacaaaatatcagatatgaaaattgccagatgtgctacagctagaattaatataaggccagagcatcagattcagtttgaccaaggctatgacaattatcctggcctggagaagactgctgatcttagaaacagagaaatgacccaccatcaacgaaaagaaagaaaggcgtaggctgggcatggtggctcacgcctgtaatcccagcaatttagagggccgaggcaggcggatcacgaggtcgggagttcaagaccaacctggctaacat

SEQ ID NO: 23552 - protein, 100 aa, Homo sapiens; identical to SEQ ID NO: 23550

SEQ ID NO: 23553 - DNA, 1402 bp, Homo sapiens
agaccagaaacggaagagagcgcgggggatgtgtttggcgtggggcgcactgttcagttgctctcctggatggctttatgtctccgcggtgtttcctagagtctcggcgtttctacctcttcgcaccctttcctgccaccctttgtcccctggaagcccggagacatcagcggctgcaattttgctactcgctgctcggcgtggaactgtcaggacaaaaaataatatccaaagatattttggcactaacggcgctatctgtagcaagaaagttgagcagtgtgaactgttgagacttccaaggagacttcagacaaccaagacagtgtaaaggaaaacagagaaaaagacttgttagacattattaagggcacgaaagttgaattgagcacagtaaatgtacaaacaacaaagccacccaacagaagttcacttaaaagctacaactggcgggcctcaaagagctttaggacatgctccaaagaagagaaatgagcccctgagtcctgagttggtggcagctgcatctgctgctctgttttgacaagcaaacaagccagaactgctcaggcagctccgtagcatgaggaagagtcaggggcacagagagatggagagagacctagttagtttcaataacaaaatatcagatatgaaaattgccagatgtgctacagctagaattaatataaggccagagcatcagattcagtttgaccaaggctatgacaattatcctggcctggagaagactgctgatcttagaaacagttcagtgctttaccaaggcatttcctctctgccgtgacttgctttaatccaccatcctgttcaccggacgttcggttgagaaagaagaatgcaaggcactgaggaaagttctggagcagaaaagcctttgtttacaaataacttgggaacctgctagaggaaaacttgtatgacttgaaatcacattacttaatgttcatatgatattttcattttttccggttctatttagtagagaaaagtagtttagtccataaaaaaagaatttagaattatttttaaaattagccctccagtttataaactggattttaatctgccagtaagtttattcaagtaaatatgtaaattgatgcataaaacagttgattatcaagtttgcaagaaaatgttacctgttaactctgatattaatttcaatggttaaaaagtcatgtaaagaaagttaattattttacagaatgattgctttatgaaagggaatgttgtgatttacctatataatcttttgtaattataatttgtaattaaacattgcagtgtttcctgcccttaaaaacaagtgttgactctttttaacagcttcttttaattataatttgtaattaaacattgcagtgtttcctgccct

SEQ ID NO: 23554 - protein, 100 aa, Homo sapiens; identical to SEQ ID NO: 23550

SEQ ID NO: 23555 - DNA, 772 bp, Homo sapiens
agaccagaaacggaagagagcgcgggggatgtgtttggcgtggggcgcactgttcagttgctctcctggatggctttatgtctccgcggtgtttcctagagtctcggcgtttctacctcttcgcaccctttcctgccaccctttgtcccctggaagcccggagacatcagcggctgcaattttgctactcgctgctcggcgtggaactgtcaggacaaaaaataatatccaaagatattttggcactaacggcgctatctgtagcaagaaagttgagcagtgtgaactgttgagacttccaaggagacttcagacaaccaagacagtgtaaaggaaaacagagaaaaagacttgttagacattattaagggcacgaaagttgaattgagcacagtaaatgtacaaacaacaaagccacccaacagaagttcacttaaaagctacaactggcgggcctcaaagagctttaggacatgctccaaagaagagaaatgagcccctgagtcctgagttggtggcagctgcatctgctgctctgttttgacaagcaaacaagccagaactgctcaggcagctccgtagcatgaggaagagtcaggggcacagagagatggagagagacctagttagacacatcaccttcactttgggatatggaatttgataagcagttagccacagaatatgaacaaccccttgagaatgagattgaagaactgatccaggggacaaaagaggggaaactgagagttcccaattaataatgaagcag

SEQ ID NO: 23556 - protein, 100 aa, Homo sapiens; identical to SEQ ID NO: 23550

SEQ ID NO: 23557 - DNA, 2238 bp, Homo sapiens
agaccagaaacggaagagagcgcgggggatgtgtttggcgtggggcgcactgttcagttgctctcctggatggctttatgtctccgcggtgtttcctagagtctcggcgtttctacctcttcgcaccctttcctgccaccctttgtcccctggaagcccggagacatcagcggctgcaattttgctactcgctgctcggcgtggaactgtcaggacaaaaaataatatccaaagatattttggcactaacggcgctatctgtagcaagaaagttgagcagtgtgaactgttgagacttccaaggagacttcagacaaccaagacagtgtaaaggaaaacagagaaaaagacttgttagacattattaagggcacgaaagttgaattgagcacagtaaatgtacaaacaacaaagccacccaacagaagttcacttaaaagctacaactggcgggcctcaaagagctttaggacatgctccaaagaagagaaatgagcccctgagtcctgagttggtggcagctgcatctgctgctctgttttgacaagcaaacaagccagaactgctcaggcagctccgtagcatgaggaagagtcaggggcacagagagatggagagagacctagttaggaaaaatatattcagggggaagagatgtaatagatttcacattatggcagttactaaagaagcacgtgaacagacacatcaccttcactttgggatatggaatttgataagcagttagccacagaatatgaacaaccccttgagaatgagattgaagaactgatccaggggacaaaagaggggaaactgagagttcccaattaataatgaagcagcttcatatctaagatctctggtggactttttctgcccgtggacgccgctgaagaagcatcgttaaagtctctcttcaccttgccgtcatgtctaagtcagcgtctccaaaagagcccgaacagctgaggaagctcttcattggagggttgagctttgaaacaactgatgagagcctgaggagccattttgagcaatggggaacgctcacagactgtgtggtaatgagagatccaaacaccaagcgctccaggggctttgggtttgtcacatatgccactgtggaggaggtggatgcagctatgaatacaacgccacacaaggtggatggaagagttgtggaaccaaagagagctgtctccagagaagattctcaaagaccaggtgcccacttaactgtgaaaaagatatttgttggtggcattaaagaagacactgaagaacatcacctaagagattattttgaacagtatggaaaaattgaagtaattgaaatcatgactgaccgaggcagtggcaagaaaaggggctttgcctttgtaacctttgacgaccatgactccgtggataagattgtcattcagaaataccatactgtgaagggccacaactgtgaagttagaaaagccctgccaaagcaagagatggctagtgcttcatccagccaaagaggtcgaaggggttctggaaactttggtggtggtcgtggagatggtttcggtgggaatgacaactttggtcgtggaggaaacttcagtggtcgtggtggctttggtggcagctgtggtggtggtggatatggtggcagtggggatggctataatggatttggtaatgatggaagcaattttggaggtggtggaagctacaatgattttggcaattacaacaatcagtcttcaaattttggacccatgaagggaggaaattttggaggcagaagctctggcccctatggcggtggaggccaatactttgcaaaaccacaaaaccaaggtggctatggcgtttccagcagcagcagtagctatggcagtggcagaagattttaattaggaaacaaagcttagcaggagaggagagccagagaagtgacagggaagctacaggttacaacagatttgtgaactcagccaagcacagtggtggcagggcctagctgctacaaagaagacatgttttagacaaatactcatgtgtatgggcaaaaaactcgaggactgtatttgtgactaattgtataacaggttattttagtttctgttctgtggaaagtgtaaagcattccaacaaagtgttttaatgtagatttttttttttgcacccatgctgttgattgctaaatgtaatagtctgattgtgacgctgaataaatgtctctaaaaaaaaaaaaga

SEQ ID NO: 23558 - protein, 100 aa, Homo sapiens; identical to SEQ ID NO: 23550

SEQ ID NO: 23559 - DNA, 1918 bp, Homo sapiens
gcgcactgttcagttgctctcctggatggctttatgtctccgcggtgtttcctagagtctcggcgtttctacctcttcgcaccctttcctgccaccctttgtcccctggaagcccggagacatcagcggctgcaattttgctactcgctgctcggcgtggaactgtcagaaatgagcccctgagtcctgagttggtggcagctgcatctgctgctctgttttgacaagcaaacaagccagaactgctcaggcagctccgtagcatgaggaagagtcaggggcacagagagatggagagagacctagttaggaaaaatatattcagggggaagagatgtaatagatttcacattatggcagttactaaagaagcacgtgaacagacacatcaccttcactttgggatatggaatttgataagcagttagccacagaatatgaacaaccccttgagaatgagattgaagaactgatccaggggacaaaagaggggaaactgagagttcccaattaataatgaagcagcttcatatctaagatctctggtggactttttctgcccgtggacgccgctgaagaagcatcgttaaagtctctcttcaccttgccgtcatgtctaagtcagcgtctccaaaagagcccgaacagctgaggaagctcttcattggagggttgagctttgaaacaactgatgagagcctgaggagccattttgagcaatggggaacgctcacagactgtgtggtaatgagagatccaaacaccaagcgctccaggggctttgggtttgtcacatatgccactgtggaggaggtggatgcagctatgaatacaacgccacacaaggtggatggaagagttgtggaaccaaagagagctgtctccagagaagattctcaaagaccaggtgcccacttaactgtgaaaaagatatttgttggtggcattaaagaagacactgaagaacatcacctaagagattattttgaacagtatggaaaaattgaagtaattgaaatcatgactgaccgaggcagtggcaagaaaaggggctttgcctttgtaacctttgacgaccatgactccgtggataagattgtcattcagaaataccatactgtgaagggccacaactgtgaagttagaaaagccctgccaaagcaagagatggctagtgcttcatccagccaaagaggtcgaaggggttctggaaactttggtggtggtcgtggagatggtttcggtgggaatgacaactttggtcgtggaggaaacttcagtggtcgtggtggctttggtggcagctgtggtggtggtggatatggtggcagtggggatggctataatggatttggtaatgatggaagcaattttggaggtggtggaagctacaatgattttggcaattacaacaatcagtcttcaaattttggacccatgaagggaggaaattttggaggcagaagctctggcccctatggcggtggaggccaatactttgcaaaaccacaaaaccaaggtggctatggcgtttccagcagcagcagtagctatggcagtggcagaagattttaattaggaaacaaagcttagcaggagaggagagccagagaagtgacagggaagctacaggttacaacagatttgtgaactcagccaagcacagtggtggcagggcctagctgctacaaagaagacatgttttagacaaatactcatgtgtatgggcaaaaaactcgaggactgtatttgtgactaattgtataacaggttattttagtttctgttctgtggaaagtgtaaagcattccaacaaagtgttttaatgtagatttttttttttgcacccatgctgttgattgctaaatgtaatagtctgattgtgacgctgaataaatgtctctaaaaaaaaaaaaga

SEQ ID NO: 23560 - protein, 54 aa, Homo sapiens
MRKSQGHREMERDLVRKNIFRGKRCNRFHIMAVTKEAREQTHHLHFGIWNLISS

SEQ ID NO: 23561 - DNA, 535 bp, Homo sapiens
gtaaaggaaaacagagaaaaagacttgttagacattattaagggcacgaaagttgaattgagcacagtaaatgtacaaacaacaaagccacccaacagaagttcacttaaaagctacaactggcgggcctcaaagagctttaggacatgctccaaagaagagaaatgagcccctgagtcctgagttggtggcagctgcatctgctgctctgttttgacaagcaaacaagccagaactgctcaggcagctccgtagcatgaggaagagtcaggggcacagagagatggagagagacctagttaggtaagtgaatcaaaccattaggttagtaatgtttatatctcaaaataggccattttcatgtggctagtaagtaatacacataatatataccacataagtggaatttacatatagaatataccatataagtagaattttagcaattcaagtttttaaaaaacttatgtcttaagtaagattatagttttaagagaccaattgaatagttactgtccttttaggaagttacagt

SEQ ID NO: 23562 - protein, 48 aa, Homo sapiens [sequence omitted]

SEQ ID NO: 23563 - DNA, 3058 bp, Homo sapiens
ggctctcaccgtccatttagactaaagggatcagtattttgggcacacccataaccattcatagtaccttagttggggagctctgccttatgtcctggtatttcttaagattcctttcttggctctcttcccactgcacatgcttctttgacaatctcatttacttccatggctcagtcacatctgatatccacgtccaatcaatcatgcagcccaggtaatttacctcctcaaaagcttttaatttgtcatttgtcttcatgtttctaccttagtttaagttaccatcatttcttacaaggaatatgcaaacttctgaacagggtttacaaggaccagcatgatctgtcccgatattacatcttgactctctgtagccctaacataatctagtcatcaactcctgaataagacatggctgtcagtacttggcctctccacaccaaatcattgactcaagattgtttattaaagaaggacctgtgatgctgttgtcattgtccttaacctgtaaacttgctgccttcctcactttccatttattctttaaccctctgtagtattgcatttgacttattaccctgaatttgttgttacaaaggtcactaagagtaaccaatttccatattgctgaatcccatccttccttctcttcctggacctcttgatcaattgataacctttcataactcacttttcctctaaactctctattgccttcagttttgcccaatctgaagtgcccaactgtcctatcctgcttctgtaatattttcccccttttaccatgtaaaaaataatttcctgatgttccctttgggttgctccagagactttttcaaagattggagttctcccaagttttgtctaaaggtcactgttcttattctctgttttcaacttgtccgcttccaatctgttctccccagtgcaataggagtgtcagtctaattatgtcaagccttcagtggttttttaaatcttttcagatggagttgaggccctatgtggtctcacctcttctttatctcaccagccttatgatcaaattctgcactcccagacataatagcaattagaataagaatgttttcaattgcaagaagcaaacagaaaaacccaactcaaaattattaaataatacaaaacaaaaagtcaggagtttggaggcttctgggttggttaactcaggagctcactggtatcactgatgaactaggtttctccatccttatgctttcactttccttgggatattggtttggtcttccaggatggctattgctaaaggtagctgcagtaatttattctgtgtttctgtttatcaataaggagacctttcccagaatccctgagcagacacctcatgcatggcccaattggctagattagttatataccccttcttaaaccatattgtttgccaatatggccaacaatgtggggttggtgatcccaacaatgtgggatgtgggattaccacaaatgacttagtcatgtgctggagaaacaaaattagggcttcacagcaaggaagaagggaggaatgaagtatcctactgttatgtatacttgtctttcttcctgtacatacactaaaaaatgttcaggcccatatgaaaaatgtatttatttcccaaagagaatcagccagaatctcatccaaatactctatccagcttcatatctaagatctctggtggactttttctgcccgtggacgccgctgaagaagcatcgttaaagtctctcttcaccttgccgtcatgtctaagtcagcgtctccaaaagagcccgaacagctgaggaagctcttcattggagggttgagctttgaaacaactgatgagagcctgaggagccattttgagcaatggggaacgctcacagactgtgtggtaatgagagatccaaacaccaagcgctccaggggctttgggtttgtcacatatgccactgtggaggaggtggatgcagctatgaatacaacgccacacaaggtggatggaagagttgtggaaccaaagagagctgtctccagagaagattctcaaagaccaggtgcccacttaactgtgaaaaagatatttgttggtggcattaaagaagacactgaagaacatcacctaagagattattttgaacagtatggaaaaattgaagtaattgaaatcatgactgaccgaggcagtggcaagaaaaggggctttgcctttgtaacctttgacgaccatgactccgtggataagattgtcattcagaaataccatactgtgaagggccacaactgtgaagttagaaaagccctgccaaagcaagagatggctagtgcttcatccagccaaagaggtcgaaggggttctggaaactttggtggtggtcgtggagatggtttcggtgggaatgacaactttggtcgtggaggaaacttcagtggtcgtggtggctttggtggcagctgtggtggtggtggatatggtggcagtggggatggctataatggatttggtaatgatggaagcaattttggaggtggtggaagctacaatgattttggcaattacaacaatcagtcttcaaattttggacccatgaagggaggaaattttggaggcagaagctctggcccctatggcggtggaggccaatactttgcaaaaccacaaaaccaaggtggctatggcgtttccagcagcagcagtagctatggcagtggcagaagattttaattaggaaacaaagcttagcaggagaggagagccagagaagtgacagggaagctacaggttacaacagatttgtgaactcagccaagcacagtggtggcagggcctagctgctacaaagaagacatgttttagacaaatactcatgtgtatgggcaaaaaactcgaggactgtatttgtgactaattgtataacaggttattttagtttctgttctgtggaaagtgtaaagcattccaacaaagtgttttaatgtagatttttttttttgcacccatgctgttgattgctaaatgtaatagtctgattgtgacgctgaataaatgtctct

SEQ ID NO: 23564 - protein, 320 aa, Homo sapiens; identical to SEQ ID NO: 3124

SEQ ID NO: 23565 - DNA, 750 bp, Homo sapiens
aggaatcggtcctccactgtcccagccggccccgcgccggcgtgtcgcctcccgtccccctagcagcacgctgcgtggctgctcgctggctatttaggacggaagctcggttggtgtttctccagaagtttcccccttgggcggtggtggaggtggtaaccgtgatagtagcagctccggcggcagcaacagcgactacgagggatggcggcggctgcagcaggaactgcaacatcccagaggtttttccagagcttctcggatgccctaatcgacgaggacccccaggcggcgttagaggagctgactaaggctttggaacagaaaccagatgatgcacagtattattgtcaaagagcttattgtcacattcttcttgggaattactgtgttgctgttgctgatgcaaagaagtctctagaactcaatccaaataattccactgctatgctgagaaaaggaatatgtgaataccatgaaaaaaactatgctgctgccctagaaacttttacagaaggacaaaaattagatatagagacggggtttcatcgtgttggccaggctggtctccaactcttgacctcaagtgatccacctgccttggactcccaaagtgctgggattacaggtgcagatgctaatttcagtgtctggattaaaaggtgtcaagaagctcagaatggctcagaatctgaggtgtggactcatcagtcaaaaatcaagtatgactggtatcaaacagaatctcaa

SEQ ID NO: 23566 - protein, 181 aa, Homo sapiens
MAAAAAGTATSQRFFQSFSDALIDEDPQAALEELTKALEQKPDDAQYYCQRAYCHILLGNYCVAVADAKKSLELNPNNSTAMLRKGICEYHEKNYAAALETFTEGQKLDIETGFHRVGQAGLQLLTSSDPPALDSQSAGITGADANFSVWIKRCQEAQNGSESEVWTHQSKIKYDWYQTES

SEQ ID NO: 23567 - DNA, 1342 bp, Homo sapiens
aggaatcggtcctccactgtcccagccggccccgcgccggcgtgtcgcctcccgtccccctagcagcacgctgcgtggctgctcgctggctatttaggacggaagctcggttggtgtttctccagaagtttcccccttgggcggtggtggaggtggtaaccgtgatagtagcagctccggcggcagcaacagcgactacgagggatggcggcggctgcagcaggaactgcaacatcccagaggtttttccagagcttctcggatgccctaatcgacgaggacccccaggcggcgttagaggagctgactaaggctttggaacagaaaccagatgatgcacagtattattgtcaaagagcttattgtcacattcttcttgggaattactgtgttgctgttgctgatgcaaagaagtctctagaactcaatccaaataattccactgctatgctgagaaaaggaatatgtgaataccatgaaaaaaactatgctgctgccctagaaacttttacagaaggacaaaaattagatatagagacggggtttcatcgtgttggccaggctggtctccaactcttgacctcaagtgatccacctgccttggactcccaaagtgctgggattacaggtgcagatgctaatttcagtgtctggattaaaaggtgtcaagaagctcagaatggctcagaatctgaggtgtggactcatcagtcaaaaatcaagtatgactggtatcaaacagaatctcaagtagtcattacacttatgatcaagaatgttcagaagaatgatgtaaatgtggaattttcagaaaaagagttgtctgctttggttaaacttccttctggagaggattacaatttgaaactggaacttcttcatcctataataccagaacagagcacgtttaaagtactttcaacaaagattgaaattaaactgaaaaagccagaggctgtgagatgggaaaagctagaggggcaaggagatgtgcctacgccaaaacaattcgtagcagatgtaaagaacctatatccatcatcatctccttatacaagaaattgggataaattggttggtgagatcaaagaagaagaaaagaatgaaaagttggagggagatgcagctttaaacagattatttcagcagatctattcagatggttctgatgaagtgaaacgtgccatgaacaaatcctttatggagtcgggtggtacagttttgagtaccaactggtctgatgtaggtaaaaggaaagttgaaatcaatcctcctgatgatatggaatggaaaaagtactaaataaattaatttgctctcatcgtattgtgtatattcacct

SEQ ID NO: 23568 - protein, 365 aa, Homo sapiens
MAAAAAGTATSQRFFQSFSDALIDEDPQAALEELTKALEQKPDDAQYYCQRAYCHILLGNYCVAVADAKKSLELNPNNSTAMLRKGICEYHEKNYAAALETFTEGQKLDIETGFHRVGQAGLQLLTSSDPPALDSQSAGITGADANFSVWIKRCQEAQNGSESEVWTHQSKIKYDWYQTESQVVITLMIKNVQKNDVNVEFSEKELSALVKLPSGEDYNLKLELLHPIIPEQSTFKVLSTKIEIKLKKPEAVRWEKLEGQGDVPTPKQFVADVKNLYPSSSPYTRNWDKLVGEIKEEEKNEKLEGDAALNRLFQQIYSDGSDEVKRAMNKSFMESGGTVLSTNWSDVGKRKVEINPPDDMEWKKY

SEQ ID NO: 23569 - DNA, 1243 bp, Homo sapiens
aatcggtcctccactgtcccagccggccccgcgccggcgtgtcgcctcccgtccccctagcagcacgctgcgtggctgctcgctggctatttaggacggaagctcggttggtgtttctccagaagtttcccccttgggcggtggtggaggtggtaaccgtgatagtagcagctccggcggcagcaacagcgactacgagggatggcggcggctgcagcaggaactgcaacatcccagaggtttttccagagcttctcggatgccctaatcgacgaggacccccaggcggcgttagaggagctgactaaggctttggaacagaaaccagatgatgcacagtattattgtcaaagagcttattgtcacattcttcttgggaattactgtgttgctgttgctgatgcaaagaagtctctagaactcaatccaaataattccactgctatgctgagaaaaggaatatgtgaataccatgaaaaaaactatgctgctgccctagaaacttttacagaaggacaaaaattagatagtgcagatgctaatttcagtgtctggattaaaaggtgtcaagaagctcagaatggctcagaatctgaggtgtggactcatcagtcaaaaatcaagtatgactggtatcaaacagaatctcaagtagtcattacacttatgatcaagaatgttcagaagaatgatgtaaatgtggaattttcagaaaaagagttgtctgctttggttaaacttccttctggagaggattacaatttgaaactggaacttcttcatcctataataccagaacagagcacgtttaaagtactttcaacaaagattgaaattaaactgaaaaagccagaggctgtgagatgggaaaagctagaggggcaaggagatgtgcctacgccaaaacaattcgtagcagatgtaaagaacctatatccatcatcatctccttatacaagaaattgggataaattggttggtgagatcaaagaagaagaaaagaatgaaaagttggagggagatgcagctttaaacagattatttcagcagatctattcagatggttctgatgaagtgaaacgtgccatgaacaaatcctttatggagtcgggtggtacagttttgagtaccaactggtctgatgtaggtaaaaggaaagttgaaatcaatcctcctgatgatatggaatggaaaaagtactaaataaattaatttgctctcatcgtattgtgtatattcacct

SEQ ID NO: 23570 - protein, 333 aa, Homo sapiens; identical to SEQ ID NO: 3128

SEQ ID NO: 23571 - DNA, 1451 bp, Homo sapiens
aatcggtcctccactgtcccagccggccccgcgccggcgtgtcgcctcccgtccccctagcagcacgctgcgtggctgctcgctggctatttaggacggaagctcggttggtgtttctccagaagtttcccccttgggcggtggtggaggtggtaaccgtgatagtagcagctccggcggcagcaacagcgactacgagggatggcggcggctgcagcaggaactgcaacatcccagaggtttttccagagcttctcggatgccctaatcgacgaggacccccaggcggcgttagaggagctgactaaggctttggaacagaaaccagatgatgcacagtattattgtcaaagagcttattgtcacattcttcttgggaattactgtgttgctgttgctgatgcaaagaagtctctagaactcaatccaaataattccactgctatgctgagaaaaggaatatgtgaataccatgaaaaaaactatgctgctgccctagaaacttttacagaaggacaaaaattagatagtgcagatgctaatttcagtgtctggattaaaaggtgtcaagaagctcagaatggctcagaatctgaggtgtggactcatcagtcaaaaatcaagtatgactggtatcaaacagaatctcaagtagtcattacacttatgatcaagaatgttcagaagaatgatgtaaatgtggaattttcagaaaaagagttgtctgctttggttaaacttccttctggagaggattacaatttgaaactggaacttcttcatcctataataccagaacagagcacgtttaaagtactttcaacaaagattgaaattaaactgaaaaagccagaggctgtgagatgggaaaagctagaggggcaaggagatgtgcctacgccaaaacaattcgtagcagatgtaaagaacctatatccatcatcatctccttatacaagaaattgggataaattggttggtgagatcaaagaagaagaaaagaatgaaaagttggagggagatgcagctttaaacagattatttcagcagatctattcagatggttctgatgaagtgaaacgtgccatgaacaaatcctttatggagtcgggtggtacagttttgagtaccaactggtctgatgtaggtaaaaggaaagttgaaatcaatcctcctgatgatatggaatggaaaaagtactaaataaattaatttgctctcatcgtattgtgtatattcacctaatgcccattgtgtattgatattgcattcttgaattttgaacactgaatatctttttgaaagattatacttctttacctctttgtgctttagaaattattttccttcaagtgttcaagtctaatgaagaatgaagataacattttatcacttctgtccttaaaggtttcagacatggtgaaactgaataaagcatgtcatttgctcct

SEQ ID NO: 23572 - protein, 333 aa, Homo sapiens; identical to SEQ ID NO: 3128

SEQ ID NO: 23573 - DNA, 1666 bp, Homo sapiens
aatcggtcctccactgtcccagccggccccgcgccggcgtgtcgcctcccgtccccctagcagcacgctgcgtggctgctcgctggctatttaggacggaagctcggttggtgtttctccagaagtttcccccttgggcggtggtggaggtggtaaccgtgatagtagcagctccggcggcagcaacagcgactacgagggatggcggcggctgcagcaggaactgcaacatcccagaggtttttccagagcttctcggatgccctaatcgacgaggacccccaggcggcgttagaggagctgactaaggctttggaacagaaaccagatgatgcacagtattattgtcaaagagcttattgtcacattcttcttgggaattactgtgttgctgttgctgatgcaaagaagtctctagaactcaatccaaataattccactgctatgctgagaaaaggaatatgtgaataccatgaaaaaaactatgctgctgccctagaaacttttacagaaggacaaaaattagatagtgcagatgctaatttcagtgtctggattaaaaggtgtcaagaagctcagaatggctcagaatctgaggtgtggactcatcagtcaaaaatcaagtatgactggtatcaaacagaatctcaagtagtcattacacttatgatcaagaatgttcagaagaatgatgtaaatgtggaattttcagaaaaagagttgtctgctttggttaaacttccttctggagaggattacaatttgaaactggaacttcttcatcctataataccagaacagagcacgtttaaagtactttcaacaaagattgaaattaaactgaaaaagccagaggctgtgagatgggaaaagctagaggggcaaggagatgtgcctacgccaaaacaattcgtagcagatgtaaagaacctatatccatcatcatctccttatacaagaaattgggataaattggttggtgagatcaaagaagaagaaaagaatgaaaagttggagggagatgcagctttaaacagattatttcagcagatctattcagatggttctgatgaagtgaaacgtgccatgaacaaatcctttatggagtcgggtggtacagttttgagtaccaactggtctgatgtaggtaaaaggaaagttgaaatcaatcctcctgatgatatggaatggaaaaagtactaaataaattaatttgctctcatcgtattgtgtatattcacctaatgcccattgtgtattgatattgcattcttgaattttgaacactgaatatctttttgaaagattatacttctttacctctttgtgctttagaaattattttccttcaagtgttcaagtctaatgaagaatgaagataacattttatcacttctgtccttaaaggtttcagacatggtgaaactgaataaagcatgtcatttgctcctagatagattcattctatctagttgtggggatggagaaatctttaatggtatattttcggttattgccttatttttgatacagtattctgtcagtaatttattagacctggcagctttgggtgagcttagatttttcaccttcagtgttacattgtgtttgcttttaaaaactgcttttgaatggagttgtaaatacaatttttctatgaagatgt

SEQ ID NO: 23574 - protein, 333 aa, Homo sapiens; identical to SEQ ID NO: 3128

SEQ ID NO: 23575 - DNA, 3307 bp, Homo sapiens
aatcggtcctccactgtcccagccggccccgcgccggcgtgtcgcctcccgtccccctagcagcacgctgcgtggctgctcgctggctatttaggacggaagctcggttggtgtttctccagaagtttcccccttgggcggtggtggaggtggtaaccgtgatagtagcagctccggcggcagcaacagcgactacgagggatggcggcggctgcagcaggaactgcaacatcccagaggtttttccagagcttctcggatgccctaatcgacgaggacccccaggcggcgttagaggagctgactaaggctttggaacagaaaccagatgatgcacagtattattgtcaaagagcttattgtcacattcttcttgggaattactgtgttgctgttgctgatgcaaagaagtctctagaactcaatccaaataattccactgctatgctgagaaaaggaatatgtgaataccatgaaaaaaactatgctgctgccctagaaacttttacagaaggacaaaaattagatagtgcagatgctaatttcagtgtctggattaaaaggtgtcaagaagctcagaatggctcagaatctgaggtgtggactcatcagtcaaaaatcaagtatgactggtatcaaacagaatctcaagtagtcattacacttatgatcaagaatgttcagaagaatgatgtaaatgtggaattttcagaaaaagagttgtctgctttggttaaacttccttctggagaggattacaatttgaaactggaacttcttcatcctataataccagaacagagcacgtttaaagtactttcaacaaagattgaaattaaactgaaaaagccagaggctgtgagatgggaaaagctagaggggcaaggagatgtgcctacgccaaaacaattcgtagcagatgtaaagaacctatatccatcatcatctccttatacaagaaattgggataaattggttggtgagatcaaagaagaagaaaagaatgaaaagttggagggagatgcagctttaaacagattatttcagcagatctattcagatggttctgatgaagtgaaacgtgccatgaacaaatcctttatggagtcgggtggtacagttttgagtaccaactggtctgatgtaggtaaaaggaaagttgaaatcaatcctcctgatgatatggaatggaaaaagtactaaataaattaatttgctctcatcgtattgtgtatattcacctaatgcccattgtgtattgatattgcattcttgaattttgaacactgaatatctttttgaaagattatacttctttacctctttgtgctttagaaattattttccttcaagtgttcaagtctaatgaagaatgaagataacattttatcacttctgtccttaaaggtttcagacatggtgaaactgaataaagcatgtcatttgctcctagatagattcattctatctagttgtggggatggagaaatctttaatggtatattttcggttattgccttatttttgatacagtattctgtcagtaatttattagacctggcagctttgggtgagcttagatttttcaccttcagtgttacattgtgtttgcttttaaaaactgcttttgaatggagttgtaaatacaatttttctatgaagatgtttggtttatttacctttttcttaagtttttaatgagaactttgagaaattatcacagggaattcccatgtagttcttttaatgggaagaatttgtaaatttaattgcactgagatattttggtcgttaccttgcaagtttctgtataaaacatagatacctgagttttaacacactgcaagtttatactaaggataatctgtgaaggtagggcaaagaaggttctaggaaagcccaactccacttgcttcttttatcacgacaggattcttgaaattacagcattggtgggttttttggtattttttttctttattagaaaatctctgttgtcacgtccccatgattactttggtttcattggtttatggtaactgctgtgagagtaaattaatgtgtatatgtttagtatttactctgtgcctagaatatatagatatcatgagaatacaaaaaattaaagacatgattattaacttcaaagagcttataaatgtagcagggaaaaaaaataacattcatgaaggaactgtggaaagattgaatgctgaactcggtataaatacactttagagacaggaaaatgttctgtgattaaaattgtttacagtctaggctgttataaagtatagactatggatgacctgtagatctgactttgttttctcaccatgattttctcaactgtaataccccagatgttggtctcagctctgttaggtgtcactaacatttttatggcaaagcactactctataccctcagagcagggggagtgggaggcaaacgggtcatcatttcagcctccaaaacagtaggaattcagctccttccttctcgtcctttgttgtggggtgtaggggagttactaaggaaagtttcagtaaggtgataccagatggtgcccaaacctgttgttatagcttgtttaagcattctagagttttcacttgtccttctgtccacttagagctactagatacatttttttcttcttgaacactgaaggaaaaggcaaaattaagttttggttggatggatttctaaagttttcttcttaggaaaataggatagtgacttttgtattctgtatgttaaattttctcagtaccattaatcctaagatgaagaggaaggctattgctgcagaggcatagttgaggacgtatagcactataccagagacaagaatgcttagctctagcaagtcttctgtcattgactaccttcataatcttcagcaggtttaggcctttcttagttcctttgtaaataatccatagagtcttagagttataattaaaggtccatggttctaaatacagaagcatatttttgccgcttaactttttctttcttaaagatgacactattaaaatagctgtttctgaccaggtgcagtagctcatgcttgtaatcccagcattttgggaggcggaggtgggcagatcacctgaggtcaggagttcaagaccagcctggccaacatggtgaaaccctgtgtctactaaaaatgcaaaaattagctgggtgtagtggcatgcacctgtagtcccagctacttgggaggctcaggcagggagaattgcttgaaccgggaggcagggggtgcagtgagccaagatcatgccactgcactcca

SEQ ID NO: 23576 - protein, 333 aa, Homo sapiens; identical to SEQ ID NO: 3128

SEQ ID NO: 23577 - DNA, 796 bp, Homo sapiens
ccgcgccggcgtgtcgcctcccgtccccctagcagcacgctgcgtggctgctcgctggctatttaggacggaagctcggttggtgtttctccagaagtttcccccttgggcggtggtggaggtggtaaccgtgatagtagcagctccggcggcagcaacagcgactacgagggatggcggcggctgcagcaggaactgcaacatcccagaggtttttccagagcttctcggatgccctaatcgacgaggacccccaggcggcgttagaggagctgactaaggctttggaacagaaaccagatgatgcacagtattattgtcaaagagcttattgtcacattcttcttgggaattactgtgggaaaaactgaataccttgagtaaaattacatagaaaatgttaatgagacaaggaggtgaattttgtgacacagctgtattcattgaagagctttaagaaggaagctaaatgttaagccaaaaggaagttgctgttgctgatgcaaagaagtctctagaactcaatccaaataattccactgctatgctgagaaaaggaatatgtgaataccatgaaaaaaactatgctgctgccctagaaacttttacagaaggacaaaaattagatatagagacggggtttcatcgtgttggccaggctggtctccaactcttgacctcaagtgatccacctgccttggactcccaaagtgctgggattacaggtgcagatgctaatttcagtgtctggattaaaaggtgtcaagaagctcagaatggctcagaatctgaggtg

SEQ ID NO: 23578 - protein, 108 aa, Homo sapiens
MLSQKEVAVADAKKSLELNPNNSTAMLRKGICEYHEKNYAAALETFTEGQKLDIETGFHRVGQAGLQLLTSSDPPALDSQSAGITGADANFSVWIKRCQEAQNGSESE

SEQ ID NO: 23579 - DNA, 777 bp, Homo sapiens
catgtagttattttatatcaaaataactgcagtgttgggtaaattaataatacatgcattttaataatacagttgctaaactgacttgtaaaaatctttctctttcaacttaccaaaatcaatctgcatcccagtggactcatcagtcaaaaatcaagtatgactggtatcaaacagaatctcaagtagtcattacacttatgatcaagaatgttcagaagaatgatgtaaatgtggaattttcagaaaaagagttgtctgctttggttaaacttccttctggagaggattacaatttgaaactggaacttcttcatcctataataccagaacagagcacgtttaaagtactttcaacaaagattgaaattaaactgaaaaagccagaggctgtgagatgggaaaagctagaggggcaaggagatgtgcctacgccaaaacaattcgtagcagatgtaaagaacctatatccatcatcatctccttatacaagaaattgggataaattggttggtgagatcaaagaagaagaaaagaatgaaaagttggagggagatgcagctttaaacagattatttcagcagatctattcagatggttctgatgaagtgaaacgtgccatgaacaaatcctttatggagtcgggtggtacagttttgagtaccaactggtctgatgtaggtaaaaggaaagttgaaatcaatcctcctgatgatatggaatggaaaaagtactaaataaattaatttgctctcatcgtattgtgtatattcacct

SEQ ID NO: 23580 - protein, 227 aa, Homo sapiens
MHFNNTVAKLTCKNLSLSTYQNQSASQWTHQSKIKYDWYQTESQVVITLMIKNVQKNDVNVEFSEKELSALVKLPSGEDYNLKLELLHPIIPEQSTFKVLSTKIEIKLKKPEAVRWEKLEGQGDVPTPKQFVADVKNLYPSSSPYTRNWDKLVGEIKEEEKNEKLEGDAALNRLFQQIYSDGSDEVKRAMNKSFMESGGTVLSTNWSDVGKRKVEINPPDDMEWKKY

SEQ ID NO: 23581 - DNA, 6331 bp, Homo sapiens
agagttataattaaaggtccatggttctaaatacagaagcatatttttgccgcttaactttttctttcttaaagatgacactattaaaatagctgtttctgaccaggtgcagtagctcatgcttgtaatcccagcattttgggaggcggaggtgggcagatcacctgaggtcaggagttcaagaccagcctggccaacatggtgaaaccctgtgtctactaaaaatgcaaaaattagctgggactacaggcgtccgccaccatgcccggctaattttttgtatttttagtagagacaagagtttcaccgtgttagccaggatggtctcatctcctgatcttgtgacccgcccgcctcggcctcccaaagtgctgggattacaggcgtgagccaccatgcccagcctgctggtagatgtttttatgagttaattcatcaatcttattattcttgccccaaatgaatcagtgtggagcatatacaagtgtgtagacattaatatgggctcactgtcagctgggagttctcacaactaccactttttactgattatctgttttctaaactttttctgtggcttgaagtgactgaaagtgaacacattcataagtaatgagcttaggctgaggatatatatccagtgggggatgaaacatgcttaagaaattgagtgcatttcctttattattgttattattttgctatttcaaaacaattgactttaaaaaattatacttcaccacagagacaggtgttgttttgtaatggaaggagtagtaacttatgaatctagactcttaaaatcccagttctgatactttcataattgtgtgttttgagggcaagtgacttatctgaacttttttcttttttataacactggatgataattaaccctcaggattgtgaggatttaataactaagtcctgactcaaattatgttaccaataaatgctacttaaatgtaaagtccttgatttattttttcccctcagtcctgtttagtgttgaaattcttcaaaggagggtgagtctggcatttacctgctattcaagagttttcagaattcaaccccagccaaaatttttggccacatctcttgtcactgctttgctgtgtactaaagctcccagacacacaagaatcttctagtcatggtcaaactttttctgcaaagggcacttacagtctattgcatattctttgtttttagtgttcagacatctgctgtttctgaatatgtcgtgtattttcattcctttttctgcccctcctgggcatctccagtttcctactgatgtgtcaaaactgagtttgtatgctacctccaggaaagcagtctaatcttttgcaactctgttactgacttttgtggcattggattgggttatttgcttatggttgagacatcactggatcctttgatggagtcataccaaaaccacaacatgtcatgagcatgcttgagagtgctaatctattccttgtttgtcagaccagtacattacagttggttcatttcttcccccgtgtgactgagtttcttgagggcgcggtctagcttccatctttgtatgtgtagcacctggtacatagagaacaggctcccagaattggatggatttgctcatggtcttatcactgcacagaatgcccttattttcttccattcattctatgagatctcaattaaaatgtcagtactcttgtggaactcccctctccatgccctctactgaaatgcattgccactctagttgtgatgtgggagtgccttgtttatgcctctatttatgacaccttcatggtgtcacatgttatagggttagttgcggctgtgtctgttttaccttgtgtgtcttggtcagttagtgttatttacttaagctttggatctttgatacatagcgtagtgcctttcacatagtatgtactcaaatattggaagttactcatcccaaaccatagtgtttaaaattggggttttttaaaaatgtcaagcccttaaagttgatcatttatttgtcaatgtaaatagaatagtaatttgttttcaaaaagatgaggtcttgctgtggtgctcaggctggagtgcagtggctgttcacaggcgtgataattgtgtgttacagcctcaaagtccagggctcgagtgatcttctcacttcagcctcctgagtagctgagactaggcgtgcaccaccgtttctgacaggattttaatttttaagtaggtttttaacccacagccacgagagctaattttaactacattgttagaggtagtaacagttatataactaatcaaaaccagtgtgatatccaagtacttttttttttttttttttttgctatttaattttgagataccattttttggaggggtgtcctgatttattttatttattttatttatttatttttattttttatttttttagataaggtcttgctcttgcccaggctggaatgtaatggcatggtcgcagctcactgcagcctccgtcttctgggctcaagcaatcctccttcctcagcctcctgagtagctgggactacaggtgtgtgccaccactcccagctaatttttaaattttgtgtagagatggggtctccctgcattgcccaggttggtctctcaaactcctgggttcaagcagtcctcccaccttggcctcccaaagtgttgggattataggcgtaagccactgtgcccggctgttttttgttttgttttgttttgtgttttaattgaacggactgaagtttactttctaactaggttagccctccattcatacaaaattatgagcccaaatgtcttggggagagtacaggagaggccagatcttaaaagccaggagtggaattaggtttgagcatatgtagcaatatggaaacaaagagtgagtcaatttataagcataccaatcttcttggagacaaaagtttgaattgctcacgtgtccattttttttctggaatccctgaagaaattttgagatactgagtactagaaaaccctctttgatgagggttgtatactttatttttaaacagtatcaacaccgttgaggcccttcaagtctttgcagtcaaaagccatacactttttctttgagtgagcctttactttaaggtatgtagtagaataatataggtatctgaaaaagaacttggttcatgacatccactcattcatttatgcacttagcaaatattcattgattgccaaatacgcatcagacactgagctaggtgctaggtactaggtaaacaaaattccctgccttcatggagcttagcttgtggtggtggaaagaagccctcagcctgaatactcaacttatgtctgccgtttattccttaacacattaaactataggtaatagcatatgttagtctaatctttgtttagcaaagctatttcttgttctggaatataagtacagttacagcagaataagtaccaaggcaagattggagaatgaccggttgtgaacagggacttaggaatatgtgtagcataggattttattttagagttgttaaaatcagatcaacagagcatgtttttatgggccatctgacaagactagaggtagctttggaacctcttattccctggaatgcaaacatgtatttgcatttcatccactgtcagtatgaggagacaaaaacgaagtcaggattttggagctggaatggatcttaaatactatgtagtccaaacgtttggttttacagatgcactttttccagagtgctgtcatctcatatacttttttcttcatacaggtttttaatgtaactcactcagatcgttggtgatagactctctcttaaaacttatttatcctaatcttttttttttttttttttttaagagacagggttttgctctgctgtccaggcacacaatagctcactgtaacctccaactcctggagtcaagtgatcctcctgcctcagcctctcaggtagctgggactgcactactagtgcactaagctaatttttaaattttttttgtagagacagggtcttgctgtgttgcccgggctgctctcttaactcctggcctcaagtaatcctcttgccttggcttcccaaagtgctgggattacaggcgtgagccaccatgcttagctgatttgccctaatcctctgctgacattctgatatcggacaactaaaattataacattgggcagctattttgtatgatatatagggtagtggttcttaagcttattggtgagtaaccttcacttgggaagcttatttttaaaaatgtagaccttcattactttcctcctgagattttgaatcagtacctttgagagagggtccagtaaatctttgttttgaatgaactgatggttttgaagcaggtgacctggaggactgcatgtagaacacagtgatgtcaaggagtaaaggagagaacagaagtgagattagcactaatcacctctaatgccttatttccagtaaagtttagagaagaggaaaagctacttggcttgctcctttgaaggttttgtttccctcttaacacagaaattaaaaggtagaggagagatgctgaatgatgctttttttcttcttaatcttggggggtcattatgattaagttattgaatccatatcaccgtatgacagcacatgatgaaagaaaatcaaatgtttgtttcaatcaaagtgaaacaaaatgagaataactatttgggcaaaacacttttatcactgctaagatattactagaactgagcagagaaatactcagagagagccatggcatagtactaattaataatggggtaccatttagcaactggaatattctccgatgatgcctgtttaattacccataggtgctaagtgaatgttaaaaattacggtgctggttgagtaggccgagtagaatttgtgttagggcacatcccatggagatcttttttactgcttaattttttggagttacctcagtaacttaacaggcaggaatatggttttaatggaaaggaaaccatttgcctttaacagcattagtcccgctaagagaaagtttttgcttgtctagtttattacaggtctttgactttgtcagtatatggcaaatttagtataaaagatgattaattatcaaggctgatgaaatataggcagctgaaaagaaaattcttagcaattcataccttagaaggaaccctgaaggacaggacgccatagaaatcctgtttttttaaaaaagtaatttcaagtaagtttgcaaatgcaatgctagtaaaaagtatatagaggtatgtctttcacactatcttgttactattagaatttttgtagccatgtgcagaggagagaaaaggtgttggattttctgcagttctgattcagttctaagaatttggtgtgaaaagaatgtttgcaaaggagcaggcacaaaggtgagaacaggaatacgaaacacaacatctgtaaatgactaaattcagagggaatttagtggggcatatctcttaaatggttttgaataatttggtgttttaaccaatgacttaatttaacttagtgggtatactgttcccagtcccattactgatttttattcctctgtgataacatacacccaaataaagactgctatgtatttgactttaaaactataaagatgtaaaaaaggttcactaagccaaacaccttagaaaatagcctcagctatttgctatgtttatattatacctgcataaaagtatttatgtatagatgtacttaccttacacagtaagtacctaaaatttgtaaattgaatacttttgaatgtaagcagttgaagtaaaacctgtagtgagttcttcagtcagtcaacactaaacctgttttgtaaatttgatgctagtattatactggactttctcaaaatgaagtacacctatatatgcatatagtatatgagcatgtgtatttgtacaaaagcccttcaaaaggagttcagcttttataaacaccaaaacactctctgcctgtaaaatgtttttgctgaaatttgtatcattaactctcaaatttacatcttcatgtttgagatacgcttttaggactgtctatgcatgtagactttggtcaactctctcctcctccctcaataaatcagttaacttaaaaaatatattgtgaccatttttataaaatacatgttcataaaacagatcaacatatttagcttatacagaaataaaattaagtcaatccactcacaaagaatttctattttgtaaaaatgtagcttgtatttcagtataataaaatctgatgtaagaaactgt

SEQ ID NO: 23582 - protein, 54 aa, Homo sapiens
MQKLAGTTGVRHHARLIFCIFSRDKSFTVLARMVSSPDLVTRPPRPPKVLGLQA

SEQ ID NO: 23583 - DNA, 1452 bp, Homo sapiens
ccgtgcaccgtgtgtgcgcgcggcgttgaaatgccctgcacgtcggggcagcgggacagatcccagggtgcccagggagtctccaagtgcctcactcctcccgccgcaaacatgacagagaactccgacaaagttcccattgccctggtgggacctgatgacgtggaattctgcagccccccggcgtacgctacgctgacggtgaagccctccagccccgcgcggctgctcaaggtgggagccgtggtcctcatttcgggagctgtgctgctgctctttggggccatcggggccttctacttctggaaggggagcgacagtcacatttacaatgtccattacaccatgagtatcaatgggaaattacaagatgggtcaatggaaatagacgctgggaacaacttggagacctttaaaatgggaagtggagctgaagaagcaattgcagttaatgatttccagaatggcatcacaggaattcgttttgctggaggagagaagtgctacattaaagcgcaagtgaaggctcgtattcctgaggtgggcgccgtgaccaaacagagcatctcctccaaactggaaggcaagatcatgccagtcaaatatgaagaaaattctcttatctgggtggctgtagatcagcctgtgaaggacaacagcttcttgagttctaaggtgttagaactctgcggtgaccttcctattttctggcttaaaccaacctatccaaaagaaatccagagggaaagaagagaagtggtaagaaaaattgttccaactaccacaaaaagaccacacagtggaccacggagcaacccaggcgctggaagactgaataatgaaaccagacccagtgttcaagaggactcacaagccttcaatcctgataatccttatcatcagcaggaaggggaaagcatgacattcgaccctagactggatcacgaaggaatctgttgtatagaatgtaggcggagctacacccactgccagaagatctgtgaacccctggggggctattacccatggccttataattatcaaggctgccgttcggcctgcagagtcatcatgccatgtagctggtgggtggcccgtatcttgggcatggtgtgaaatcacttcatatatcatgtgctgtaaaataagaactagctgaagagacaaccaaagaagcattaaggcaggttgatgctgataggaccacaaaatatttttacactcaacctgagcggttattcttgacactcttaacagaattttttcaattgttttccagaactttagtatatgcaaatgtactgaaagggtagttcaagtctaaaatgccataacccctttattatttgttattttttatttgcattgctttgccataagtcttcccttgcttgtatcttccaaagctattttgaaataaacatgaaaatttacagtttgccaaaaatctca

SEQ ID NO: 23584 - protein, 361 aa, Homo sapiens
MPCTSGQRDRSQGAQGVSKCLTPPAANMTENSDKVPIALVGPDDVEFCSPPAYATLTVKPSSPARLLKVGAVVLISGAVLLLFGAIGAFYFWKGSDSHIYNVHYTMSINGKLQDGSMEIDAGNNLETFKMGSGAEEAIAVNDFQNGITGIRFAGGEKCYIKAQVKARIPEVGAVTKQSISSKLEGKIMPVKYEENSLIWVAVDQPVKDNSFLSSKVLELCGDLPIFWLKPTYPKEIQRERREVVRKIVPTTTKRPHSGPRSNPGAGRLNNETRPSVQEDSQAFNPDNPYHQQEGESMTFDPRLDHEGICCIECRRSYTHCQKICEPLGGYYPWPYNYQGCRSACRVIMPCSWWVARILGMV

SEQ ID NO: 23585 - DNA, 504 bp, Homo sapiens
gagcaacccaggcgctggaagactgaataatgaaaccagacccagtgttcaagaggactcacaagccttcaatcctgataatccttataattatcaaggctgccgttcggcctgcagagtcatcatgccatgtagctggtgggtggcccgtatcttgggcatggtgtgaaatcacttcatatatcatgtgctgtaaaataagaactagctgaagagacaaccaaagaagcattaaggcaggttgatgctgataggaccacaaaatatttttacactcaacctgagcggttattcttgacactcttaacagaattttttcaattgttttccagaactttagtatatgcaaatgtactgaaagggtagttcaagtctaaaatgccataacccctttattatttgttattttttatttgcattgctttgccataagtcttcccttgcttgtatcttccaaagctattttgaaataaacatgaaaatttacagtttgccaaaaatctc

SEQ ID NO: 23586 - protein, 60 aa, Homo sapiens
MKPDPVFKRTHKPSILIILIIIKAAVRPAESSCHVAGGWPVSWAWCEITSYIMCCKIRTS

SEQ ID NO: 23587 - DNA, 899 bp, Homo sapiens
ccctggaagctattactgcaagaagccacaagcattccactgacttagaattagcagtggcagaaatgctactttttatcataatgcttccttcttgctttcctacttaaaacaagctgagttactaagtggtaaccatagttcattaaaggcatggagaaacttcaggatatcgttttaaaagacaaaacaactttctagtcagtgacaggtgaggtaggtgtagattccttggtgtcaaaaggaattatgaatgacagcagtgaacatgaattatgaatgacagggtaaacaagatcaaaccctttacagattacaccttcctgtagcagtgaaaaattcagaatcttatttaaaaataacatgcatgctatgaccttcccactatgcagttatcacaaataattatcttttatttcacagcagcaggaaggggaaagcatgacattcgaccctagactggatcacgaaggaatctgttgtatagaatgtaggcggagctacacccactgccagaagatctgtgaacccctggggggctattacccatggccttataattatcaaggctgccgttcggcctgcagagtcatcatgccatgtagctggtgggtggcccgtatcttgggcatggtgtgaaatcacttcatatatcatgtgctgtaaaataagaactagctgaagagacaaccaaagaagcattaaggcaggttgatgtttttcaattgttttccagaactttagtatatgcaaatgtactgaaagggtagttcaagtctaaaatgccataacccctttattatttgttattttttatttgcattgctttgccataagtcttcccttgcttgtatcttccaaagctattttgaaataaacatgaaaatttacagtttgcc

SEQ ID NO: 23588 - protein, 65 aa, Homo sapiens
MTFDPRLDHEGICCIECRRSYTHCQKICEPLGGYYPWPYNYQGCRSACRVIMPCSWWVARILGMV

SEQ ID NO: 23589 - DNA, 522 bp, Homo sapiens
atggtcaaccccaccgtgttcttcaacatggctgtcaatgatgagcccttgtgccacgtctcctttgagctgtatgcagacaagtttccaaagacagcagaaaactttcgtgctctgagcactggagagaaaggatttggttacaagggtttctgcttttacagaattattccagggtttatgtggtttatgtgtcagggcagtgacttcacacaccataatggcactggtggcaagtccatctatggagagaaatttgatgacgagaacttcatcctgaagcatacaggtcctgaaccctcacattcccaaaccaattacttatccatggcaaatgctggacccaacacaaatggttcccagtttttcctctgcactgccaagactgagtggttggatggcacacatgtggtctttggcaaggtgaaagaaggcatcaatattgtggaggccatggagcgctttggatctaggaatggcaagaccagcaagatcaccattgttgactgtggacaactctaa

SEQ ID NO: 23590 - protein, 173 aa, Homo sapiens [sequence omitted]

SEQ ID NO: 23591 - DNA, 1600 bp, Homo sapiens
acatggagatcaaaatacctttactatggctaaagctgattgaaaatcttggcatagatatggaataaatattaatgtctccaaaatcttctcaaaatttatactatggcacaaacaagttaaatgtaggtctcttcctcaccatctatcttaggtctctttctcatattttcctccaatctctactgctgggaaggcgagggacatggaggggagagatcacctcaagtaggcacaggattcaaagatgagtgaagcatagcatctttcctgcataaacatttaaaaaaggagaaagtgagagagaggagtcttccatccacttctaaatagaacaaaatgatatctcagtgcccttaactttgaaactgaaacagagcttctagatcatctcaagattttgcagctttggagaaagcaagctgtaggactcatggcatagtgagcagcatttttgccatgagcgtctgcattaggaaaatctggagactgccgtctcaaagggctccttgggccatggatcactgctcaggggatgggaggaggcaagtctaggagggcctgcctgtgagctcaggtgagatgcccttgaggccactagggagaaggtgggccagagtcattgatgggatttgaatagtgaaggggttaataagccaatgaaatgtggattgctcaacttaatataagcacataagtactgtgtgaggaaaaacaaactgtggagaaaatagattttcctctgctctcatcccacaacaatgaacacagaagacttctgtgaccaaatgtgggtcctccgctgcaccccacacaccaagcaagtgatcaattctgcagtggacaccagcattcggtatcctccacttcaatcctgacaccatctacctggagatagcatcagataccgcaggttgggggctcagtcccacaagactgccctcgactttggatgccaatcacaagccccaggtttttatatctgtgcttctgactggctgtaaatagaagttcccaaaattcccttctcctgttcgattagtttgctagagtggctcacagaacttgttacaggtagttagacaggcatgagtggggcaggagagggtcctccctcacctactaggaatgttgggtgatggtttggcaattatcacattgcctctctaaaagtgataagttgccagccggtgccagggaaaggccacttcctgatgatctacacctgttgcactaaagtgttaattgaatgcagatgccagtggggagcaaatttctgggcatgcacattaagagacaaaatggctgagtatgatcttccaggcacactccaccagaaaagggaagaaaagcctcagatgggcatgtgtacaacttcctaaacacactgcatgtggtcattttccaagcataaggagggtactgtgcatgcaggcagcccaccctaaggtagaatcatgggaaaggggccagcctataaagtcctaggatccaggttaaagaccacacttgttcttcaagtcacatgcttgggtctcttccaagcacactttcttttctgttctaaagctttttaaaataagcttccactgctgctctg

SEQ ID NO: 23592 - protein, 58 aa, Homo sapiens
MSPKSSQNLYYGTNKLNVGLFLTIYLRSLSHIFLQSLLLGRRGTWRGEITSSRHRIQR

SEQ ID NO: 23593 - DNA, 699 bp, Homo sapiens
gaaaatcttggcatagatatggaataaatattaatgtctccaaaatcttctcaaaatttatactatggcacaaacaagttaaatgtaggtctcttcctcaccatctatcttaggtctctttctcatattttcctccaatctctactgctgggaaggcgagggacatggaggggagagatcacctcaagtaggcacaggcttgaaagtccaagatcaaggtaccagcatctggtgaggactgcaatcgacttccaagatgacgccttgaatgccatacccaccagaaggctggtacactgtgtcctcacatggcagaaggcagaagggaacagagagacagatgccttccatcaagccctttgattacagcatgaatgcataagtgagagtggagctttcatgaactgaatgcctccccaaaggccccaccttccaacactgttgcagtgggattaggtttctaacatatgaattttgggagacacattcagaccatagcagcaaagctgtagactaattgaagaattagtctgtaggcaaataagtacaataagatgttctgagagaaggttgtgtatgacactgcaatgtaggaaatgtgttgaatttgtgcttgttgagtaaaaaagtaaattgtatttgctaaatattttgtcttcattatcaactgatctgtataaacaataaaagtattctatt

SEQ ID NO: 23594 - protein, 109 aa, Homo sapiens
MSPKSSQNLYYGTNKLNVGLFLTIYLRSLSHIFLQSLLLGRRGTWRGEITSSRHRLESPRSRYQHLVRTAIDFQDDALNAIPTRRLVHCVLTWQKAEGNRETDAFHQAL

SEQ ID NO: 23595 - DNA, 1166 bp, Homo sapiens
ccacagtactaagactgaggtacctgtctacatcaaaagatgagtactacaatgcagatgacttagccagttggctgactagggatgttggatgccaggtctcctcagaaagatcaaagttacaggtgaatgcccatgatttaaatggaaatctgagggaatgaagcaaggacctgttggagcacccatgggaagaacctggggcacaaaagaggaaagcagcaagagactgacagagattgtctccctagaaacctggaccacgaaaagggtggagaggagaaaactctgtgctaaatattactcctggaaaagtgcatttgcttcggagaaatctttatcatgggtctctaagaggaaggaacaatagcatcttctatgtgccgaggtagcgcaataatgaactctgttcaagtggatcaaaagccatcaaggtcaaaattaggcacaggctgtacaggaagcgtgattctggcatctgtttggtttctgggaaggcctcaggaaacttaaagtcatggaagaaggggaagggagagcaggcacgtcttacatgaccaaagcaggaagaagagagagaagtgtggaggtgctatacacttttaaacagccagatcttgtgagaactctgtcagaagaacagcactagggaaatggtgctaaaccattcttggggactccatccctgtgatacaatcacctcccaccaggccccacctccaacactgagaattacaactcaacatgagatttggatggggacacagatccaaaccatatcaaattttcacacctttcagtaaagctttatattttttaaggatatttaagtacttggaagtagaagtagagagtaaggggaatattgtacagccatcacagcctttgtctactaaagaagtcagtttcatgtgacaaatgttcattttaatattcgcttcttcagtccatctgggggtgtttccttatttctataagatgctgcttttcaaaaaaattaccgaaagcattctggaaatccaagagtaattgtgtgaactataagcattagaaaacacagacataagttgaaaatatttatgaacctaaatagatgtaaagctagtgactcatattttataatgtattcacagatgatatttcttaaataaagtaggcatttcttt

SEQ ID NO: 23596 - protein, 69 aa, Homo sapiens
MKQGPVGAPMGRTWGTKEESSKRLTEIVSLETWTTKRVERRKLCAKYYSWKSAFASEKSLSWVSKRKEQ

SEQ ID NO: 23597 - DNA, 611 bp, Homo sapiens
aagagtgtgattaatgataaatgaacttctattatctgccagttactttatatatgcaccagagtcaatgcttaacacaactgctggaagtaagaactgctaaatttgttttcctgtgatgaaatggaaattcataaggattataatatttcattgaattgaaaaccaatcctattcattgaaagacacgtatcaccttactgccaggagaaacagaaaatgctgccaaacatgactgtaagacttatctgtagactggtactgactcaaaaatgttattctggtaggatttaggtgggtaaatgataccggtaggatgggttgggtggcccatggagtaatgccaggtagtaaagcacctgtttaaggcaaagaagttggtgagctgaatctattcccaggcctctctgactccaaagccctgattcttacattgaacctcacggcctcagctatcttcacaaaacaggatgcatttgacattttcctatatgagaactcatcttttccttgatggcaccagcagtctttgtaaccttcatgtggaggaaatcaaagtgcatggcagtgtattaatcagaaaaatggattgtgcttgcctcctcctgcca

SEQ ID NO: 23598 - protein, 46 aa, Homo sapiens
MHLTFSYMRTHLFLDGTSSLCNLHVEEIKVHGSVLIRKMDCACLLL

SEQ ID NO: 23599 - DNA, 471 bp, Homo sapiens
gccaacatccacatgaaatgtgtccatctgtttaagcatacgtgccaggcagctaaacttacagaacgaccagtcaggccccctcaggatatcttgcaggtggcagataatgagacttctcagcctccataatcatataatgagaatgaagacttttatgatgagccacttctactaaatgaatagagcagttttacaagcaccacatctgccacacacagaataccactggaaggtccaagatccaggggcccacatctgctaagggctttcatgccgtgtcatcccatgaggaaagacagaggcaaggagagtcagatccagagaaaagtgacacatctagatacaaattctaggatcttcccgcctttcagtatcatcactgcttttccactttgacactatatgaacttctaggtttcatatgaaacattctgtattattttcagaaataaaagaagcttcatacaa

SEQ ID NO: 23600 - protein, 41 aa, Homo sapiens
MPCHPMRKDRGKESQIQRKVTHLDTNSRIFPPFSIITAFPL

SEQ ID NO: 23601 - DNA, 559 bp, Homo sapiens
gaattaccccaccagctttcttgattttccagcttgcaggtggcagataatgagacttctcagcctccataatcatataatgagaatgaagacttttatgatgagccacttctactaaatgaataacagagtttcgttcttgttgcccaggctggagtgcaaaggcatggtctcagctcactgcaacctccacctggagtttaagccattctcctgcctcagcctcccaagtagctgggattacacatgtccaccactacgcccaattcatgaaacatggttagagagaagcgacttctctaaacaacccagctagtcagtgacagactagaacttcagcttcgtcatgtctggtggcaaacttcacgttcttaaacatgaagctgggatggaaaattttgaccagctaccgaaaatgacaactgtaatttcaccactggtactttattcttccacatggctccagagaatgaagaaaacgtttgcagtattccttcattgttacttctttactatattttggtgcaatacagtcatatacagatatattatttgaatg

SEQ ID NO: 23602 - protein, 65 aa, Homo sapiens [sequence omitted]

SEQ ID NO: 23603 - DNA, 376 bp, Homo sapiens
ccagcttgcaggtggcagataatgagacttctcagcctccataatcatataatgagaatgaagacttttatgatgagccacttctactaaatgaatattaaacggcaaactctctgcatgactggagagggtaaagggccagaggagcagttttacaagcaccacatctgccacacacagaataccactggaaggtccaagatccaggggcccacatctgctaagggctttcatgccgtgtcatcccatgaggaaagacagagggatcctgttctctgcaaatgcaaacagttcttttattacaaggctttttcaaggggaagagaaaactcatttggcagataaggttaaccttttaaaaaatcaagtgtgttaa

SEQ ID NO: 23604 - protein, 84 aa, Homo sapiens
MNIKRQTLCMTGEGKGPEEQFYKHHICHTQNTTGRSKIQGPTSAKGFHAVSSHEERQRDPVLCKCKQFFYYKAFSRGRENSFGR

SEQ ID NO: 23605 - DNA, 439 bp, Homo sapiens
gaagaaactccgaaaacatcttaacatcagaaggaacaaattccagacgcgccatcttaagagctgtaacactcaccgcgaggggcgtggcttcatgcttgaagtcagtgagaccaagaacccaccaattctggacacattatgacctttgtttcctgccatggaagaaaatttaaattcccaggctgaagaagcaaattaggcctctcaagcagaaaccaacagctttggagaccagaagccccaaatcaagctatcagcagggaagtactacctctggaagatgcaatgaagaatgcttttttccctcttctggcttctggcggctctgtattacttggcttccttggcttgtggctacatcactccaatctctgtctcagtcttcacattgccttttcctctatgagtttataggaatgaatgcaggaggaaatga

SEQ ID NO: 23606 - protein, 42 aa, Homo sapiens [sequence omitted]

SEQ ID NO: 23607 - DNA, 2929 bp, Homo sapiens
ctgctgcgagccgagccgggcggcggaggcggcggcggcggcggcagtggcggcagtggcggcagtggcggcagcggcagcagttgcagcagtggtggccagagcggatgcttgcgggctccctgcggctccactagttttcttcgccccgcccagccgcccactcttctcggctagggaagaagaccagagggtgctcagctggaaaactctggtgtctcagcttagggcctcctccgggaagagctaactgctcccaggtgaagccggtgcccgcgggcggtccgtacaccccgcagccggctcgcaccgctcgagagcctcggccgctgtgtcttccacgtctgcagctcagccagggcgcgcagggcgagtggggtccactggcgggtaaaggggaccaggacggcgaggatggacgcacagacctggcccgtgggctttcgctgcctcctccttctggccctggttgggtccgcccgcagcgagggcgtgcagacctgcgaagaagttcggaaacttttccagtggcggctgctgggagctgtcagggggctgccggattcgccgcgggcaggacctgatcttcaggtttgcatatccaaaaagcctacatgttgcaccaggaagatggaggagagatatcagattgcggctcgccaggatatgcagcagtttcttcaaacgtccagctctacattaaagtttctaatatctcgaaatgcggctgcttttcaagaaacccttgaaactctcatcaaacaagcagaaaattacaccagtatacttttttgcagtacctacaggaacatggccttggaggctgctgcttcggttcaggagttcttcactgatgtggggctgtatttatttggtgcggatgttaatcctgaagaatttgtaaacagattttttgacagtctttttcctctggtctacaaccacctcattaaccctggtgtgactgacagttccctggaatactcagaatgcatccggatggctcgccgggatgtgagtccatttggtaatattccccaaagagtaatgggacagatggggaggtccctgctgcccagccgcacttttctgcaggcactcaatctgggcattgaagtcatcaacaccacagactatctgcacttctccaaagagtgcagcagagccctcctgaagatgcaatactgcccgcactgccaaggcctggcgctcactaagccttgtatgggatactgcctcaatgtcatgcgaggctgcctggcgcacatggcggagcttaatccacactggcatgcatatatccggtcgttggaagaactctcggatgcaatgcatggaacatacgacattggacacgtgctgctgaactttcacttgcttgttaatgatgctgtgttacaggctcacctcaatggacaaaaattattggaacaggtaaataggatttgtggccgccctgtaagaacacccacacaaagcccccgttgttcttttgatcagagcaaagagaagcatggaatgaagaccaccacaaggaacagtgaagagacgcttgccaacagaagaaaagaatttatcaacagccttcgactgtacaggtcattctatggaggtctagctgatcagctttgtgctaatgaattagctgctgcagatggacttccctgctggaatggagaagatatagtaaaaagttatactcagcgtgtggttggaaatggaatcaaagcccagtctggaaatcctgaagtcaaagtcaaaggaattgatcctgtgataaatcagattattgataaactgaagcatgttgttcagttgttacagggtagatcacccaaacctgacaagtgggaacttcttcagctgggcagtggtggaggcatggttgaacaagtcagtggggactgtgatgatgaagatggttgcgggggatcaggaagtggagaagtcaagaggacactgaagatcacagactggatgccagatgatatgaacttcagtgatgtaaagcaaatccatcaaacagacactggcagtactttagacacaacaggagcaggatgtgcagtggcgactgaatctatgacattcactctgataagtgtggtgatgttacttcccgggatttggtaactgaactcttctgtcctgacataccttactgaagtctcgatttcttctctctctgcatatgcctggaataagagatcctttttcaatgtaacaattatatttatgaaaagatatgttacactaacttctcagaagccaagctgaaatattcataaagtccctaaaactcaacgtttaaatgacacactttaaaaatatgtcttttttcaatctaactgaaaaccttcttaacttctaatatattaaatctgaagatgtgaagggcacagaagtgactttgaataagaagaatttagtgtatctgtaattttattatcaattccaagccccttcctttctaaattaaaaatgttttcatttgaaagtgtatttgccagacaatgaaaacagtatgcagtatttcttaaagtattgaaattagaatatcatgaaataaatcaaaacatacaatggcaagtagtatgcatgcatattcaagagactcttccatttttgcaagctgtagaaggaaatgtctgaatgtctataagttatggggtagattcttgagaagcatttcatataatttcactgaagaaccttgataattttgacccactgtaacttagccactgatgaaccttaaagctgagtattttattaacacctgatttgtattccattatattcaaaatgcatctttggtattgtgcctctgctcccatctctctctttgcctcatagatttagctatgttgggaagcacatgcttgctctaggaatatctccaataaagctgttaactatttggtggaaa

SEQ ID NO: 23608 - protein, 572 aa, Homo sapiens; identical to SEQ ID NO: 3135

SEQ ID NO: 23609 - DNA, 2763 bp, Homo sapiens
tggcggcagtggcggcagtggcggcagcggcagcagttgcagcagtggtggccagagcggatgcttgcgggctccctgcggctccactagttttcttcgccccgcccagccgcccactcttctcggctagggaagaagaccagagggtgctcagctggaaaactctggtgtctcagcttagggcctcctccgggaagagctaactgctcccaggtgaagccggtgcccgcgggcggtccgtacaccccgcagccggctcgcaccgctcgagagcctcggccgctgtgtcttccacgtctgcagctcagccagggcgcgcagggcgagtggggtccactggcgggtaaaggggaccaggacggcgaggatggacgcacagacctggcccgtgggctttcgctgcctcctccttctggccctggttgggtccgcccgcagcgagggcgtgcagacctgcgaagaagttcggaaacttttccagtggcggctgctgggagctgtcagggggctgccggattcgccgcgggcaggacctgatcttcaggtttgcatatccaaaaagcctacatgttgcaccaggaagatggaggagagatatcagattgcggctcgccaggatatgcagcagtttcttcaaacgtccagctctacattaaagtttctaatatctcgaaatgcggctgcttttcaagaaacccttgaaactctcatcaaacaagcagaaaattacaccagtatacttttttgcagtacctacaggaacatggccttggaggctgctgcttcggttcaggagttcttcactgatgtggggctgtatttatttggtgcggatgttaatcctgaagaatttgtaaacagattttttgacagtctttttcctctggtctacaaccacctcattaaccctggtgtgactgacagttccctggaatactcagaatgcatccggatggctcgccgggatgtgagtccatttggtaatattccccaaagagtaatgggacagatggggaggtccctgctgcccagccgcacttttctgcaggcactcaatctgggcattgaagtcatcaacaccacagactatctgcacttctccaaagagtgcagcagagccctcctgaagatgcaatactgcccgcactgccaaggcctggcgctcactaagccttgtatgggatactgcctcaatgtcatgcgaggctgcctggcgcacatggcggagcttaatccacactggcatgcatatatccggtcgttggaagaactctcggatgcaatgcatggaacatacgacattggacacgtgctgctgaactttcacttgcttgttaatgatgctgtgttacaggctcacctcaatggacaaaaattattggaacaggtaaataggatttgtggccgccctgtaagaacacccacacaaagcccccgttgttcttttgatcagagcaaagagaagcatggaatgaagaccaccacaaggaacagtgaagagacgcttgccaacagaagaaaagaatttatcaacagccttcgactgtacaggtcattctatggaggtctagctgatcagctttgtgctaatgaattagctgctgcagatggacttccctgctggaatggagaagatatagtaaaaagagttgttacagggtagatcacccaaacctgacaagtgggaacttcttcagctgggcagtggtggaggcatggttgaacaagtcagtggggactgtgatgatgaagatggttgcgggggatcaggaagtggagaagtcaagaggacactgaagatcacagactggatgccagatgatatgaacttcagtgatgtaaagcaaatccatcaaacagacactggcagtactttagacacaacaggagcaggatgtgcagtggcgactgaatctatgacattcactctgataagtgtggtgatgttacttcccgggatttggtaactgaactcttctgtcctgacataccttactgaagtctcgatttcttctctctctgcatatgcctggaataagagatcctttttcaatgtaacaattatatttatgaaaagatatgttacactaacttctcagaagccaagctgaaatattcataaagtccctaaaactcaacgtttaaatgacacactttaaaaatatgtcttttttcaatctaactgaaaaccttcttaacttctaatatattaaatctgaagatgtgaagggcacagaagtgactttgaataagaagaatttagtgtatctgtaattttattatcaattccaagccccttcctttctaaattaaaaatgttttcatttgaaagtgtatttgccagacaatgaaaacagtatgcagtatttcttaaagtattgaaattagaatatcatgaaataaatcaaaacatacaatggcaagtagtatgcatgcatattcaagagactcttccatttttgcaagctgtagaaggaaatgtctgaatgtctataagttatggggtagattcttgagaagcatttcatataatttcactgaagaaccttgataattttgacccactgtaacttagccactgatgaaccttaaagctgagtattttattaacacctgatttgtattccattatattcaaaatgcatctttggtattgtgcctctgctcccatctctctctttgcctcatagatttagctatgttgggaagcacatgcttgctctaggaatatctccaataaagctgttaactatttggtggaaa

SEQ ID NO: 23610 - protein, 431 aa, Homo sapiens
MDAQTWPVGFRCLLLLALVGSARSEGVQTCEEVRKLFQWRLLGAVRGLPDSPRAGPDLQVCISKKPTCCTRKMEERYQIAARQDMQQFLQTSSSTLKFLISRNAAAFQETLETLIKQAENYTSILFCSTYRNMALEAAASVQEFFTDVGLYLFGADVNPEEFVNRFFDSLFPLVYNHLINPGVTDSSLEYSECIRMARRDVSPFGNIPQRVMGQMGRSLLPSRTFLQALNLGIEVINTTDYLHFSKECSRALLKMQYCPHCQGLALTKPCMGYCLNVMRGCLAHMAELNPHWHAYIRSLEELSDAMHGTYDIGHVLLNFHLLVNDAVLQAHLNGQKLLEQVNRICGRPVRTPTQSPRCSFDQSKEKHGMKTTTRNSEETLANRRKEFINSLRLYRSFYGGLADQLCANELAAADGLPCWNGEDIVKRVVTG

SEQ ID NO: 23611 - DNA, 934 bp, Homo sapiens
cattctcctagctaattcctatccaaagtgatgatggaatttttattctactttttcatagctacaagtacagctgacactgttcatgacaccgttcaccactaatttcccatctttcaattttcttgttaattttctttccttcccatcccaatcctgatgctgaacctctgcaccagctgtaaaatggttacaggtgattttcattgtcctatcactactttctaattgtctacagtgagtagatagtgcttttaaatgagaaaaaggtgcgtgtaaaatacaccttcagctactaaaattgtatatgaattgtcttattaaacttatcacctttctacacaccactgcccacatctggccaaacagaaaaactgactttatcagtaaaaaacgatctgtgacttcaaaaacaatgttcaaaatataatccacttttcaaacaaagatcaagtaaccccacttttaaactgataactcaatgttttgttaatgtgaattgaattacaaaattcaaaatgttaatatttctttattaagacatctgatgggtataatgagtcaatttaagtagatacaaaatgtaaaattgttatgccaaagttctatttagtaatttttcaaaaatttattcataaaccatattttggtgagtttcagtgttaagaaaattccgatcgccataagtatgggaggccgaggtgggcagatcatgaggtcaggagatcgagaccatcctggctaacacggtgaaacaccgtctctactacaaatacaaaaaaaaattagccgggcgcggtggtgggcgcctgcagtcccagcttctagggaggctgaggcgggagaatggcgtgaacccggcaggcagagcttgcagtgagccgagatcgtgccactgcactccagcctgggcaacagagcgagactccgtctc

SEQ ID NO: 23612 - protein, 40 aa, Homo sapiens [sequence omitted]

SEQ ID NO: 23613 - DNA, 4445 bp, Homo sapiens
ggtctctctctctgctcgccctcagtcccacccggtgcctacggggccgcatcgccgcccggctcggcccggcccatgcccagggccgctgctccctcagttgccgccgccgccgccggcgcccagggggccgccgcggctgtgaggtgggggcggcagcgggaggcggcggggcgggccgccggggccggggctgggggcgcagcgcggccggcgtaggtctatgtcgcgggcggcggcggcggcggcggccgcggagggacgatgcgcgagtacaaagtggtggtgctgggctcgggcggggtaggcaaatccgccctgaccgtgcagttcgtgaccggcaccttcatcgagaaatacgaccccaccatcgaggacttctaccgcaaggagatcgaggtggattcgtcgccgtcggtgctggagatcctggacacggcgggcaccgagcagttcgcgtccatgcgggacctgtacatcaagaacggccagggcttcatcctcgtctacagcctcgtcaaccagcagagcttccaggacatcaagcccatgcgggaccagatcatccgcgtgaagcggcctatgttgtaaaaagagttttaagtactctaagtttttttggagtaataagagtttgaatacgagcagactttcaaacaaggtatgagaaagtgccagtcatcttggttgggaacaaagtggacctggaaagtgagagagaagtatcgtccagcgaaggcagagcccttgctgaagagtggggctgcccctttatggaaacttccgctaagagtaaaacaatggtggacgaactctttgcagaaattgtgaggcagatgaactatgctgctcagcctgacaaagatgacccatgctgttctgcatgtaacatacaatagcatccaaatatggctgtcctggatgggatttgcccaatgtcgtaggtgatagaaaactcgcctactccactgcagaacttgcagaatgcgtggtgttaatctacagagaactgcagcccttattcagaattgagcagtgattgtcagttgatatctctgagtaacatttgggttcagtaactacagttttcaccatttgtcctcagtctcctttatgcatctgcaactttaaggcatagtccatcgatctacagggtgatctcatttgaaagctatgatggcattgtcgctgagttgacagaagcaactattgtacaaattaaaaataaccataagggagaaaccagaagaattcctctgaccacttacaattaaaatattttgtcttctttaaaaaaataagtaaaggagaaatattttcctacaagagtactgaatttcaggaaatgggatagagcttctaaccaatgtattccgtcaagtaagataataacagctgacctgccaacagcattacagggagattctttgctcagctaacacatttctgtttttcaaaattgatgcttaattgtagctgttattctaatttgtgacatggaactaactcatgcttcaatccttgatagagcaaaactcagaacaggttatgtaaaaatatagtctggctttagaatttgttaattcacctgctttgccacagaaaatggaggctttcacaagggtttgatcagaattaaaaccccaaacccgccctctgttaggggtggtctttataactttactgaacaagagggaagcaactgtgatgggaagagattacctagccttactaacaagaagcattctaatagataaactagtaccatcatgtaaggaagatgaagccatgttgcatccacatgttcccgtttgcagaaacctcacaggacagtacgaatatctggcatttttaagttcattaaagcagcaaattccttctcgcctttaagggctatggttgtagtgtgacccgtggctaacctgctttcaaaatcaagtatttgctgtagcagagctttattgcaggcattttaaaaattgaataaccatgtgaaataatttgggcttaaaagtgaacataaattatagagtggaaggtaagggacaaaagccttttacctttaattttcctggagaattatataaaggttttcttagaacaattttgccctgattactgaagcgtcaaataaagctggagtgaaaattttgttttgaaaaggtgctcaagctctgacatttttggttttcatagtcgtgaagtatttatcatttgcatgactaatggcacaggaaaaacctattcataagttttacaatcaagtatagaggggtcttcagctaacttagttatacataaatgctgaaaagattatcttgagctgggccttgggagaagaatttggccttcagaactgcaatatcactgagcctgcgatctatacaccaccccacattttgttggtttcacagtcttgtgcaagtaacctctggtcttacgtgtgtaactgagagaagagtgtgtgtttgtgtgtgcatgtgtgtttattgttcctaagaatttggcacaagtcagagataattgcctatactaagaatctatactgcagaatatagtgtatcaaaaacttttttcttttaaattattaaagtgtcttttatacttttatgaaatcattggtagccccccaagtgtttaataactggcattaagcttagagggtgaaaaaaaaaaaaaagattgatagtatttttcataatgaaaaaactgaagagatacgtgaatgaaaccaggccatagctgtcataaatctttgacttttgaatatttacattcttcagtataattttttataatcctcaattatgaaccaccttgtttataggacaaaaaaatttaaccaattttattgaaacgaatttcactgtgtaaaagttggtttgattcaaacatgtagagaagttgtagattcaagatatatgatttctctatggaaataaaaatatttgttagtgaattggttgagttttgattcctctaacttctcagaatgattctttagaattctataattcatagcaatttttgacaagtaagattgcaaaatagaaatatctataaagattccacagtttgacattatggcttgctatgcagatgtgaaaataggttaaataatatgaaagatatggcagaatgtaaagtggaaaagatgacctaaaattttgagttgtattaatagttaaaaacatttgtgtcagatgacagggtgggcttttactgtcaagacatgaataagaactgatctggctgcctgatgagtgtttccacgcagccctgcatatttagtgaccaaggcatcaaggacatcccgaaactggaaattcatatccatctggtatgaatatataactcagctggcaaatgaatgtgtttgttgagatattacagtaataaaacacttaagaacaggaagattacatttgttggcatacgaaaccttagtggctacagaagaaagttgaccttgtgtcactatttattttatgccctgatcagactagcaacttagataagtgaaagtttttctaacatgccttaaaaatattatggtttgatccaaagacccactttttctttagctcttgtgataagattttcttttttttacttttatacaaaggcagcatctttgaatttttttttcttttgatgttgcaacttttgggttcttttaaactgtgatagtgatggtaactgatgcctttcattttgttcaacttatacaaaacaagccagcatctgatcaaaagtattacataaaatattttcttaaactattgaaaggtgctttgatgattttctcctttggtttgtagaattaggactgaacttttgactcaaattgctacagttgccatcacctttctgtggtaatactactgatatttgcttttctatataaagaaatgttgcctaaggctgtctggtatttcttttcaagggttttccagtatgaatgttaatgttgtcagtgtatgtatgaatatgaaagtgctttgttttgtttgttgctgttttttgtttatgtgtgtgtttttaatttttttgttcttatcagcagtcttgtgttagcactgggtaagctttaattgtcccttagccaatcaaacattaaggactatggaggtctttttttttttatttaacatgtcattgttcatctattaaatcttgatcagggtttcaagaatgactgcagtgggttttggaaacagacttatcattattgatttgaggtttcccagagatatagttcacagttaattgttgcgctctaatacaactgaccatttaaaattgaacaagtttattgttttgtaacaatgtcagttgttaaaccttgacatttcaattaaaacatgaattgtagttataactcaatgcaaattcaacagttgtatttggagttaaattattttaacaaataaatttatttaatg

SEQ ID NO: 23614 - protein, 108 aa, Homo sapiens
MREYKVVVLGSGGVGKSALTVQFVTGTFIEKYDPTIEDFYRKEIEVDSSPSVLEILDTAGTEQFASMRDLYIKNGQGFILVYSLVNQQSFQDIKPMRDQIIRVKRPML

SEQ ID NO: 23615 - DNA, 3163 bp, Homo sapiens
ggtctctctctctgctcgccctcagtcccacccggtgcctacggggccgcatcgccgcccggctcggcccggcccatgcccagggccgctgctccctcagttgccgccgccgccgccggcgcccagggggccgccgcggctgtgaggtgggggcggcagcgggaggcggcggggcgggccgccggggccggggctgggggcgcagcgcggccggcgtaggtctatgtcgcgggcggcggcggcggcggcggccgcggagggacgatgcgcgagtacaaagtggtggtgctgggctcgggcggggtaggcaaatccgccctgaccgtgcagttcgtgaccggcaccttcatcgagaaatacgaccccaccatcgaggacttctaccgcaaggagatcgaggtggattcgtcgccgtcggtgctggagatcctggacacggcgggcaccgagcagttcgcgtccatgcgggacctgtacatcaagaacggccagggcttcatcctcgtctacagcctcgtcaaccagcagagcttccaggacatcaagcccatgcgggaccagatcatccgcgtgaagcggtatgagaaagtgccagtcatcttggttgggaacaaagtggacctggaaagtgagagagaagtatcgtccagcgaaggcagagcccttgctgaagagtggggctgcccctttatggaaacttccgctaagagtaaaacaatggtggacgaactctttgcagaaattgtgaggcagatgaactatgctgctcagcctgacaaagatgacccatgctgttctgcatgtaacatacaatagcatccaaatatggctgtcctggatgggatttgcccaatgtcgtaggtgatagaaaactcgcctactccatcaagctctgacatttttggttttcatagtcgtgaagtatttatcatttgcatgactaatggcacaggaaaaacctattcataagttttacaatcaagtatagaggggtcttcagctaacttagttatacataaatgctgaaaagattatcttgagctgggccttgggagaagaatttggccttcagaactgcaatatcactgagcctgcgatctatacaccaccccacattttgttggtttcacagtcttgtgcaagtaacctctggtcttacgtgtgtaactgagagaagagtgtgtgtttgtgtgtgcatgtgtgtttattgttcctaagaatttggcacaagtcagagataattgcctatactaagaatctatactgcagaatatagtgtatcaaaaacttttttcttttaaattattaaagtgtcttttatacttttatgaaatcattggtagccccccaagtgtttaataactggcattaagcttagagggtgaaaaaaaaaaaaaagattgatagtatttttcataatgaaaaaactgaagagatacgtgaatgaaaccaggccatagctgtcataaatctttgacttttgaatatttacattcttcagtataattttttataatcctcaattatgaaccaccttgtttataggacaaaaaaatttaaccaattttattgaaacgaatttcactgtgtaaaagttggtttgattcaaacatgtagagaagttgtagattcaagatatatgatttctctatggaaataaaaatatttgttagtgaattggttgagttttgattcctctaacttctcagaatgattctttagaattctataattcatagcaatttttgacaagtaagattgcaaaatagaaatatctataaagattccacagtttgacattatggcttgctatgcagatgtgaaaataggttaaataatatgaaagatatggcagaatgtaaagtggaaaagatgacctaaaattttgagttgtattaatagttaaaaacatttgtgtcagatgacagggtgggcttttactgtcaagacatgaataagaactgatctggctgcctgatgagtgtttccacgcagccctgcatatttagtgaccaaggcatcaaggacatcccgaaactggaaattcatatccatctggtatgaatatataactcagctggcaaatgaatgtgtttgttgagatattacagtaataaaacacttaagaacaggaagattacatttgttggcatacgaaaccttagtggctacagaagaaagttgaccttgtgtcactatttattttatgccctgatcagactagcaacttagataagtgaaagtttttctaacatgccttaaaaatattatggtttgatccaaagacccactttttctttagctcttgtgataagattttcttttttttacttttatacaaaggcagcatctttgaatttttttttcttttgatgttgcaacttttgggttcttttaaactgtgatagtgatggtaactgatgcctttcattttgttcaacttatacaaaacaagccagcatctgatcaaaagtattacataaaatattttcttaaactattgaaaggtgctttgatgattttctcctttggtttgtagaattaggactgaacttttgactcaaattgctacagttgccatcacctttctgtggtaatactactgatatttgcttttctatataaagaaatgttgcctaaggctgtctggtatttcttttcaagggttttccagtatgaatgttaatgttgtcagtgtatgtatgaatatgaaagtgctttgttttgtttgttgctgttttttgtttatgtgtgtgtttttaatttttttgttcttatcagcagtcttgtgttagcactgggtaagctttaattgtcccttagccaatcaaacattaaggactatggaggtctttttttttttatttaacatgtcattgttcatctattaaatcttgatcagggtttcaagaatgactgcagtgggttttggaaacagacttatcattattgatttgaggtttcccagagatatagttcacagttaattgttgcgctctaatacaactgaccatttaaaattgaacaagtttattgttttgtaacaatgtcagttgttaaaccttgacatttcaattaaaacatgaattgtagttataactcaatgcaaattcaacagttgtatttggagttaaattattttaacaaataaatttatttaatg

SEQ ID NO: 23616 - protein, 183 aa, Homo sapiens; identical to SEQ ID NO: 3137

SEQ ID NO: 23617 - DNA, 4362 bp, Homo sapiens
ggtctctctctctgctcgccctcagtcccacccggtgcctacggggccgcatcgccgcccggctcggcccggcccatgcccagggccgctgctccctcagttgccgccgccgccgccggcgcccagggggccgccgcggctgtgaggtgggggcggcagcgggaggcggcggggcgggccgccggggccggggctgggggcgcagcgcggccggcgtaggtctatgtcgcgggcggcggcggcggcggcggccgcggagggacgatgcgcgagtacaaagtggtggtgctgggctcgggcggggtaggcaaatccgccctgaccgtgcagttcgtgaccggcaccttcatcgagaaatacgaccccaccatcgaggacttctaccgcaaggagatcgaggtggattcgtcgccgtcggtgctggagatcctggacacggcgggcaccgagcagttcgcgtccatgcgggacctgtacatcaagaacggccagggcttcatcctcgtctacagcctcgtcaaccagcagagcttccaggacatcaagcccatgcgggaccagatcatccgcgtgaagcggtatgagaaagtgccagtcatcttggttgggaacaaagtggacctggaaagtgagagagaagtatcgtccagcgaaggcagagcccttgctgaagagtggggctgcccctttatggaaacttccgctaagagtaaaacaatggtggacgaactctttgcagaaattgtgaggcagatgaactatgctgctcagcctgacaaagatgacccatgctgttctgcatgtaacatacaatagcatccaaatatggctgtcctggatgggatttgcccaatgtcgtaggtgatagaaaactcgcctactccactgcagaacttgcagaatgcgtggtgttaatctacagagaactgcagcccttattcagaattgagcagtgattgtcagttgatatctctgagtaacatttgggttcagtaactacagttttcaccatttgtcctcagtctcctttatgcatctgcaactttaaggcatagtccatcgatctacagggtgatctcatttgaaagctatgatggcattgtcgctgagttgacagaagcaactattgtacaaattaaaaataaccataagggagaaaccagaagaattcctctgaccacttacaattaaaatattttgtcttctttaaaaaaataagtaaaggagaaatattttcctacaagagtactgaatttcaggaaatgggatagagcttctaaccaatgtattccgtcaagtaagataataacagctgacctgccaacagcattacagggagattctttgctcagctaacacatttctgtttttcaaaattgatgcttaattgtagctgttattctaatttgtgacatggaactaactcatgcttcaatccttgatagagcaaaactcagaacaggttatgtaaaaatatagtctggctttagaatttgttaattcacctgctttgccacagaaaatggaggctttcacaagggtttgatcagaattaaaaccccaaacccgccctctgttaggggtggtctttataactttactgaacaagagggaagcaactgtgatgggaagagattacctagccttactaacaagaagcattctaatagataaactagtaccatcatgtaaggaagatgaagccatgttgcatccacatgttcccgtttgcagaaacctcacaggacagtacgaatatctggcatttttaagttcattaaagcagcaaattccttctcgcctttaagggctatggttgtagtgtgacccgtggctaacctgctttcaaaatcaagtatttgctgtagcagagctttattgcaggcattttaaaaattgaataaccatgtgaaataatttgggcttaaaagtgaacataaattatagagtggaaggtaagggacaaaagccttttacctttaattttcctggagaattatataaaggttttcttagaacaattttgccctgattactgaagcgtcaaataaagctggagtgaaaattttgttttgaaaaggtgctcaagctctgacatttttggttttcatagtcgtgaagtatttatcatttgcatgactaatggcacaggaaaaacctattcataagttttacaatcaagtatagaggggtcttcagctaacttagttatacataaatgctgaaaagattatcttgagctgggccttgggagaagaatttggccttcagaactgcaatatcactgagcctgcgatctatacaccaccccacattttgttggtttcacagtcttgtgcaagtaacctctggtcttacgtgtgtaactgagagaagagtgtgtgtttgtgtgtgcatgtgtgtttattgttcctaagaatttggcacaagtcagagataattgcctatactaagaatctatactgcagaatatagtgtatcaaaaacttttttcttttaaattattaaagtgtcttttatacttttatgaaatcattggtagccccccaagtgtttaataactggcattaagcttagagggtgaaaaaaaaaaaaaagattgatagtatttttcataatgaaaaaactgaagagatacgtgaatgaaaccaggccatagctgtcataaatctttgacttttgaatatttacattcttcagtataattttttataatcctcaattatgaaccaccttgtttataggacaaaaaaatttaaccaattttattgaaacgaatttcactgtgtaaaagttggtttgattcaaacatgtagagaagttgtagattcaagatatatgatttctctatggaaataaaaatatttgttagtgaattggttgagttttgattcctctaacttctcagaatgattctttagaattctataattcatagcaatttttgacaagtaagattgcaaaatagaaatatctataaagattccacagtttgacattatggcttgctatgcagatgtgaaaataggttaaataatatgaaagatatggcagaatgtaaagtggaaaagatgacctaaaattttgagttgtattaatagttaaaaacatttgtgtcagatgacagggtgggcttttactgtcaagacatgaataagaactgatctggctgcctgatgagtgtttccacgcagccctgcatatttagtgaccaaggcatcaaggacatcccgaaactggaaattcatatccatctggtatgaatatataactcagctggcaaatgaatgtgtttgttgagatattacagtaataaaacacttaagaacaggaagattacatttgttggcatacgaaaccttagtggctacagaagaaagttgaccttgtgtcactatttattttatgccctgatcagactagcaacttagataagtgaaagtttttctaacatgccttaaaaatattatggtttgatccaaagacccactttttctttagctcttgtgataagattttcttttttttacttttatacaaaggcagcatctttgaatttttttttcttttgatgttgcaacttttgggttcttttaaactgtgatagtgatggtaactgatgcctttcattttgttcaacttatacaaaacaagccagcatctgatcaaaagtattacataaaatattttcttaaactattgaaaggtgctttgatgattttctcctttggtttgtagaattaggactgaacttttgactcaaattgctacagttgccatcacctttctgtggtaatactactgatatttgcttttctatataaagaaatgttgcctaaggctgtctggtatttcttttcaagggttttccagtatgaatgttaatgttgtcagtgtatgtatgaatatgaaagtgctttgttttgtttgttgctgttttttgtttatgtgtgtgtttttaatttttttgttcttatcagcagtcttgtgttagcactgggtaagctttaattgtcccttagccaatcaaacattaaggactatggaggtctttttttttttatttaacatgtcattgttcatctattaaatcttgatcagggtttcaagaatgactgcagtgggttttggaaacagacttatcattattgatttgaggtttcccagagatatagttcacagttaattgttgcgctctaatacaactgaccatttaaaattgaacaagtttattgttttgtaacaatgtcagttgttaaaccttgacatttcaattaaaacatgaattgtagttataactcaatgcaaattcaacagttgtatttggagttaaattattttaacaaataaatttatttaatg

SEQ ID NO: 23618 - protein, 183 aa, Homo sapiens; identical to SEQ ID NO: 3137

SEQ ID NO: 23619 - DNA, 5584 bp, Homo sapiens
ggtctctctctctgctcgccctcagtcccacccggtgcctacggggccgcatcgccgcccggctcggcccggcccatgcccagggccgctgctccctcagttgccgccgccgccgccggcgcccagggggccgccgcggctgtgaggtgggggcggcagcgggaggcggcggggcgggccgccggggccggggctgggggcgcagcgcggccggcgtaggtctatgtcgcgggcggcggcggcggcggcggccgcggagggacgatgcgcgagtacaaagtggtggtgctgggctcgggcggggtaggcaaatccgccctgaccgtgcagttcgtgaccggcaccttcatcgagaaatacgaccccaccatcgaggacttctaccgcaaggagatcgaggtggattcgtcgccgtcggtgctggagatcctggacacggcgggcaccgagcagttcgcgtccatgcgggacctgtacatcaagaacggccagggcttcatcctcgtctacagcctcgtcaaccagcagagcttccaggacatcaagcccatgcgggaccagatcatccgcgtgaagcggcctatgttgtaaaaagagttttaagtactctaagtttttttggagtaataagagtttgaatacgagcagactttcaaacaaggtatgagaaagtgccagtcatcttggttgggaacaaagtggacctggaaagtgagagagaagtatcgtccagcgaaggcagagcccttgctgaagagtggggctgcccctttatggaaacttccgctaagagtaaaacaatggtggacgaactctttgcagaaattgtgaggcagatgaactatgctgctcagcctgacaaagatgacccatgctgttctgcatgtaacatacaatagcatccaaatatggctgtcctggatgggatttgcccaatgtcgtaggtgatagaaaactcgcctactccactgcagaacttgcagaatgcgtggtgttaatctacagagaactgcagcccttattcagaattgagcagtgattgtcagttgatatctctgagtaacatttgggttcagtaactacagttttcaccatttgtcctcagtctcctttatgcatctgcaactttaaggcatagtccatcgatctacagggtgatctcatttgaaagctatgatggcattgtcgctgagttgacagaagcaactattgtacaaattaaaaataaccataagggagaaaccagaagaattcctctgaccacttacaattaaaatattttgtcttctttaaaaaaataagtaaaggagaaatattttcctacaagagtactgaatttcaggaaatgggatagagcttctaaccaatgtattccgtcaagtaagataataacagctgacctgccaacagcattacagggagattctttgctcagctaacacatttctgtttttcaaaattgatgcttaattgtagctgttattctaatttgtgacatggaactaactcatgcttcaatccttgatagagcaaaactcagaacaggttatgtaaaaatatagtctggctttagaatttgttaattcacctgctttgccacagaaaatggaggctttcacaagggtttgatcagaattaaaaccccaaacccgccctctgttaggggtggtctttataactttactgaacaagagggaagcaactgtgatgggaagagattacctagccttactaacaagaagcattctaatagataaactagtaccatcatgtaaggaagatgaagccatgttgcatccacatgttcccgtttgcagaaacctcacaggacagtacgaatatctggcatttttaagttcattaaagcagcaaattccttctcgcctttaagggctatggttgtagtgtgacccgtggctaacctgctttcaaaatcaagtatttgctgtagcagagctttattgcaggcattttaaaaattgaataaccatgtgaaataatttgggcttaaaagtgaacataaattatagagtggaaggtaagggacaaaagccttttacctttaattttcctggagaattatataaaggttttcttagaacaattttgccctgattactgaagcgtcaaataaagctggagtgaaaattttgttttgaaaaggtgctcaagctctgacatttttggttttcatagtcgtgaagtatttatcatttgcatgactaatggcacaggaaaaacctattcataagttttacaatcaagtatagaggggtcttcagctaacttagttatacataaatgctgaaaagattatcttgagctgggccttgggagaagaatttggccttcagaactgcaatatcactgagcctgcgatctatacaccaccccacattttgttggtttcacagtcttgtgcaagtaacctctggtcttacgtgtgtaactgagagaagagtgtgtgtttgtgtgtgcatgtgtgtttattgttcctaagaatttggcacaagtcagagataattgcctatactaagaatctatactgcagaatatagtgtatcaaaaacttttttcttttaaattattaaagtgtcttttatacttttatgaaatcattggtagccccccaagtgtttaataactggcattaagcttagagggtgaaaaaaaaaaaaaagattgatagtatttttcataatgaaaaaactgaagagatacgtgaatgaaaccaggccatagctgtcataaatctttgacttttgaatatttacattcttcagtataattttttataatcctcaattatgaaccaccttgtttataggacaaaaaaatttaaccaattttattgaaacgaatttcactgtgtaaaagttggtttgattcaaacatgtagagaagttgtagattcaagatatatgatttctctatggaaataaaaatatttgttagtgaattggttgagttttgattcctctaacttctcagaatgattctttagaattctataattcatagcaatttttgacaagtaagattgcaaaatagaaatatctataaagattccacagtttgacattatggcttgctatgcagatgtgaaaataggttaaataatatgaaagatatggcagaatgtaaagtggaaaagatgacctaaaattttgagttgtattaatagttaaaaacatttgtgtcagatgacagggtgggcttttactgtcaagacatgaataagaactgatctggctgcctgatgagtgtttccacgcagccctgcatatttagtgaccaaggcatcaaggacatcccgaaactggaaattcatatccatctggtatgaatatataactcagctggcaaatgaatgtgtttgttgagatattacagtaataaaacacttaagaacaggaagattacatttgttggcatacgaaaccttagtggctacagaagaaagttgaccttgtgtcactatttattttatgccctgatcagactagcaacttagataagtgaaagtttttctaacatgccttaaaaatattatggtttgatccaaagacccactttttctttagctcttgtgataagattttcttttttttacttttatacaaaggcagcatctttgaatttttttttcttttgatgttgcaacttttgggttcttttaaactgtgatagtgatggtaactgatgcctttcattttgttcaacttatacaaaacaagccagcatctgatcaaaagtattacataaaatattttcttaaactattgaaaggtgctttgatgattttctcctttggtttgtagaattaggactgaacttttgactcaaattgctacagttgccatcacctttctgtggtaatactactgatatttgcttttctatataaagaaatgttgcctaaggctgtctggtatttcttttcaagggttttccagtatgaatgttaatgttgtcagtgtatgtatgaatatgaaagtgctttgttttgtttgttgctgttttttgtttatgtgtgtgtttttaatttttttgttcttatcagcagtcttgtgttagcactgggtaagctttaattgtcccttagccaatcaaacattaaggactatggaggtctttttttttttatttaacatgtcattgttcatctattaaatcttgatcagggtttcaagaatgactgcagtgggttttggaaacagacttatcattattgatttgaggtttcccagagatatagttcacagttaattgttgcgctctaatacaactgaccatttaaaattgaacaagtttattgttttgtaacaatgtcagttgttaaaccttgacatttcaattaaaacatgaattgtagttataactcaatgcaaattcaacagttgtatttggagttaaattattttaacaaataaatttatttaatgaaactctggatttgctttgttttgtacatgctcatgagagaaatgtattatatacaaaaacaattaaaaattgccatataatgaatttagtactcttcatacaaaaatattttagctgatttgagagttcatcatataaaaaggcaggtaggtagataattttcatagtctttaaaaataaaaataacatgtaagagactgtaaaatcagttattataaatataaacttatctctacaaatgattttatattttgaatggtagctggttaatttaaagcctgatgctaaggttaacagaattgttcaaataattaacattaattagcaatatcactaaaatgattcagaggccttctagtgatggcttgaagccgtctttctgttttcaggtcatgtggatccgaaggtgccagaagctgaaggttgccgccaggctgtagggcctgcttgttctatatggggccctatgaaagttgacagatgctgttaattgtatacagccttcagctgctctgataaggagcccattcatttcctaagccaatttaaactatgccttttggttatgttgccttcaaactctgttgaaatcctctggcagcattccaccagttgagaagcttcattgttttagattataagaataatttgaatgaatataacagaggcactgtagatagaatcccagatatttaaaggaaaacatgcctatattttaggaatatcttctgaagaacttcataattttatttgaagtgtttgtaaattttttaataaattatttaaatgtatcaatagtggatagttggaagaacgtctttgaggctaaaaagtagtactctgaaattctctcaagttatattatttgtctgttagaggtccacgaatgaaaatatatgtagctaaaggagtaaggtgctgcccaatttggaacccaactgacctctaggatctatgaagcagagaatattaccacaaacttctgaaagaagctgttgacctcgtttcttaatttaaaatatgttgccacataaatactaataaaacatagttgctcttcatctcttaaatggatcattccaactggttttacatcgttgaatattatctagtatttttaataaatattttcataaat

SEQ ID NO: 23620 - protein, 108 aa, Homo sapiens; identical to SEQ ID NO: 23614

SEQ ID NO: 23621 - DNA, 5501 bp, Homo sapiens
ggtctctctctctgctcgccctcagtcccacccggtgcctacggggccgcatcgccgcccggctcggcccggcccatgcccagggccgctgctccctcagttgccgccgccgccgccggcgcccagggggccgccgcggctgtgaggtgggggcggcagcgggaggcggcggggcgggccgccggggccggggctgggggcgcagcgcggccggcgtaggtctatgtcgcgggcggcggcggcggcggcggccgcggagggacgatgcgcgagtacaaagtggtggtgctgggctcgggcggggtaggcaaatccgccctgaccgtgcagttcgtgaccggcaccttcatcgagaaatacgaccccaccatcgaggacttctaccgcaaggagatcgaggtggattcgtcgccgtcggtgctggagatcctggacacggcgggcaccgagcagttcgcgtccatgcgggacctgtacatcaagaacggccagggcttcatcctcgtctacagcctcgtcaaccagcagagcttccaggacatcaagcccatgcgggaccagatcatccgcgtgaagcggtatgagaaagtgccagtcatcttggttgggaacaaagtggacctggaaagtgagagagaagtatcgtccagcgaaggcagagcccttgctgaagagtggggctgcccctttatggaaacttccgctaagagtaaaacaatggtggacgaactctttgcagaaattgtgaggcagatgaactatgctgctcagcctgacaaagatgacccatgctgttctgcatgtaacatacaatagcatccaaatatggctgtcctggatgggatttgcccaatgtcgtaggtgatagaaaactcgcctactccactgcagaacttgcagaatgcgtggtgttaatctacagagaactgcagcccttattcagaattgagcagtgattgtcagttgatatctctgagtaacatttgggttcagtaactacagttttcaccatttgtcctcagtctcctttatgcatctgcaactttaaggcatagtccatcgatctacagggtgatctcatttgaaagctatgatggcattgtcgctgagttgacagaagcaactattgtacaaattaaaaataaccataagggagaaaccagaagaattcctctgaccacttacaattaaaatattttgtcttctttaaaaaaataagtaaaggagaaatattttcctacaagagtactgaatttcaggaaatgggatagagcttctaaccaatgtattccgtcaagtaagataataacagctgacctgccaacagcattacagggagattctttgctcagctaacacatttctgtttttcaaaattgatgcttaattgtagctgttattctaatttgtgacatggaactaactcatgcttcaatccttgatagagcaaaactcagaacaggttatgtaaaaatatagtctggctttagaatttgttaattcacctgctttgccacagaaaatggaggctttcacaagggtttgatcagaattaaaaccccaaacccgccctctgttaggggtggtctttataactttactgaacaagagggaagcaactgtgatgggaagagattacctagccttactaacaagaagcattctaatagataaactagtaccatcatgtaaggaagatgaagccatgttgcatccacatgttcccgtttgcagaaacctcacaggacagtacgaatatctggcatttttaagttcattaaagcagcaaattccttctcgcctttaagggctatggttgtagtgtgacccgtggctaacctgctttcaaaatcaagtatttgctgtagcagagctttattgcaggcattttaaaaattgaataaccatgtgaaataatttgggcttaaaagtgaacataaattatagagtggaaggtaagggacaaaagccttttacctttaattttcctggagaattatataaaggttttcttagaacaattttgccctgattactgaagcgtcaaataaagctggagtgaaaattttgttttgaaaaggtgctcaagctctgacatttttggttttcatagtcgtgaagtatttatcatttgcatgactaatggcacaggaaaaacctattcataagttttacaatcaagtatagaggggtcttcagctaacttagttatacataaatgctgaaaagattatcttgagctgggccttgggagaagaatttggccttcagaactgcaatatcactgagcctgcgatctatacaccaccccacattttgttggtttcacagtcttgtgcaagtaacctctggtcttacgtgtgtaactgagagaagagtgtgtgtttgtgtgtgcatgtgtgtttattgttcctaagaatttggcacaagtcagagataattgcctatactaagaatctatactgcagaatatagtgtatcaaaaacttttttcttttaaattattaaagtgtcttttatacttttatgaaatcattggtagccccccaagtgtttaataactggcattaagcttagagggtgaaaaaaaaaaaaaagattgatagtatttttcataatgaaaaaactgaagagatacgtgaatgaaaccaggccatagctgtcataaatctttgacttttgaatatttacattcttcagtataattttttataatcctcaattatgaaccaccttgtttataggacaaaaaaatttaaccaattttattgaaacgaatttcactgtgtaaaagttggtttgattcaaacatgtagagaagttgtagattcaagatatatgatttctctatggaaataaaaatatttgttagtgaattggttgagttttgattcctctaacttctcagaatgattctttagaattctataattcatagcaatttttgacaagtaagattgcaaaatagaaatatctataaagattccacagtttgacattatggcttgctatgcagatgtgaaaataggttaaataatatgaaagatatggcagaatgtaaagtggaaaagatgacctaaaattttgagttgtattaatagttaaaaacatttgtgtcagatgacagggtgggcttttactgtcaagacatgaataagaactgatctggctgcctgatgagtgtttccacgcagccctgcatatttagtgaccaaggcatcaaggacatcccgaaactggaaattcatatccatctggtatgaatatataactcagctggcaaatgaatgtgtttgttgagatattacagtaataaaacacttaagaacaggaagattacatttgttggcatacgaaaccttagtggctacagaagaaagttgaccttgtgtcactatttattttatgccctgatcagactagcaacttagataagtgaaagtttttctaacatgccttaaaaatattatggtttgatccaaagacccactttttctttagctcttgtgataagattttcttttttttacttttatacaaaggcagcatctttgaatttttttttcttttgatgttgcaacttttgggttcttttaaactgtgatagtgatggtaactgatgcctttcattttgttcaacttatacaaaacaagccagcatctgatcaaaagtattacataaaatattttcttaaactattgaaaggtgctttgatgattttctcctttggtttgtagaattaggactgaacttttgactcaaattgctacagttgccatcacctttctgtggtaatactactgatatttgcttttctatataaagaaatgttgcctaaggctgtctggtatttcttttcaagggttttccagtatgaatgttaatgttgtcagtgtatgtatgaatatgaaagtgctttgttttgtttgttgctgttttttgtttatgtgtgtgtttttaatttttttgttcttatcagcagtcttgtgttagcactgggtaagctttaattgtcccttagccaatcaaacattaaggactatggaggtctttttttttttatttaacatgtcattgttcatctattaaatcttgatcagggtttcaagaatgactgcagtgggttttggaaacagacttatcattattgatttgaggtttcccagagatatagttcacagttaattgttgcgctctaatacaactgaccatttaaaattgaacaagtttattgttttgtaacaatgtcagttgttaaaccttgacatttcaattaaaacatgaattgtagttataactcaatgcaaattcaacagttgtatttggagttaaattattttaacaaataaatttatttaatgaaactctggatttgctttgttttgtacatgctcatgagagaaatgtattatatacaaaaacaattaaaaattgccatataatgaatttagtactcttcatacaaaaatattttagctgatttgagagttcatcatataaaaaggcaggtaggtagataattttcatagtctttaaaaataaaaataacatgtaagagactgtaaaatcagttattataaatataaacttatctctacaaatgattttatattttgaatggtagctggttaatttaaagcctgatgctaaggttaacagaattgttcaaataattaacattaattagcaatatcactaaaatgattcagaggccttctagtgatggcttgaagccgtctttctgttttcaggtcatgtggatccgaaggtgccagaagctgaaggttgccgccaggctgtagggcctgcttgttctatatggggccctatgaaagttgacagatgctgttaattgtatacagccttcagctgctctgataaggagcccattcatttcctaagccaatttaaactatgccttttggttatgttgccttcaaactctgttgaaatcctctggcagcattccaccagttgagaagcttcattgttttagattataagaataatttgaatgaatataacagaggcactgtagatagaatcccagatatttaaaggaaaacatgcctatattttaggaatatcttctgaagaacttcataattttatttgaagtgtttgtaaattttttaataaattatttaaatgtatcaatagtggatagttggaagaacgtctttgaggctaaaaagtagtactctgaaattctctcaagttatattatttgtctgttagaggtccacgaatgaaaatatatgtagctaaaggagtaaggtgctgcccaatttggaacccaactgacctctaggatctatgaagcagagaatattaccacaaacttctgaaagaagctgttgacctcgtttcttaatttaaaatatgttgccacataaatactaataaaacatagttgctcttcatctcttaaatggatcattccaactggttttacatcgttgaatattatctagtatttttaataaatattttcataaat

SEQ ID NO: 23622 - protein, 183 aa, Homo sapiens; identical to SEQ ID NO: 3137

SEQ ID NO: 23623 - DNA, 387 bp, Homo sapiens
taaggcactcgataaagacttcagtgatttttccagataatacaggggaagaattggaacttaaagccaggtcttctgtctccaaatcccatgacctttagagcatgtttgaaggagaaagttcacacattttcatctgagatacctactactctttctaaaactaaatgcggagtctcagctgcttctatgagctgggaggtcagtgctcctaacccccacattgttcaagagtcaactgtatcaggaaatacagagagaggcacgatgagaaggtggccatctgcagccaggaagaaaggcctcaggagaaaccaaacctgccgacaccctggtttcagactttcggcctccagaacttcaggaaaataaacttatgttctttaa

SEQ ID NO: 23624 - protein, 93 aa, Homo sapiens [sequence omitted]

SEQ ID NO: 23625 - DNA, 692 bp, Homo sapiens
aacaacagatgacacgagatgtccctgctggggagaaaaacttgatgatcccattggcaaaccagctcctgagatttgtatcaaggcctctgcatctcacagctaccttgtgtctcctctattgaaaagctgctgggactttcagagacattctactaatggcaagttctgagtgccatcatgaagaatttcaggaagagacgtgatttgaccttagtgttttaaatgggcatggtcctgctgtcaagttcagcaaaacagcagctactgctgtctgatgtactctgaaagcctgatcagtcagatcagccattagagacctgacctcatggacccagttgcagggttggctggatgatgggctgatatgaggacaactgctccatcgtgctcagcgctgctgggttgtactgcatgaggagccaagctcagttttatttccctgcctctttgcaaacaattattctagcaacatgcactaggcatacagaaaataatatgaaatggattctgatgttttttgtgcttggattagtttgcttcactgtagcccttgaactcttgaaacagaagtatcaagaacctgctattctcttagtgggctctgaccatgtggtgccccagaagttatctccaaatatacttcaaaatatcaggcagaggtttcctgtctaaagttaccatgtgccata

SEQ ID NO: 23626 - protein, 86 aa, Homo sapiens
MRSQAQFYFPASLQTIILATCTRHTENNMKWILMFFVLGLVCFTVALELLKQKYQEPAILLVGSDHVVPQKLSPNILQNIRQRFPV

SEQ ID NO: 23627 - DNA, 724 bp, Homo sapiens
agaactgtgggattgatgacctcccacaactggagcagccgggaacagctctgaccacagtaagtcatcccaaaacctcacattcagatgaaaccatttaagaatttcatctgcactgaggaacaatttagcgtgatactggagggaaagagtttccctgtgagatccaggaggtccctttagctcgtctcctgacgtcaccacagtcatacccaagaggaaggaaacgtcagagacaatgatttggagaacattctacacaaaaaccaagtatgaaacaatgacgatttcatgatggctcattgttctttggtattgtgccttacgtgagctggggactaactctgtatccttaaggaggcatcacttgattagagttgcccaaaagaatgtgggttattatcctaaaggtctgtgttgccatcctgaaacagtcagaaatcagtttttatttcacttaggtggttccggggagaagcctttccaggacccatgtgtaggcacaactgttttccctgatcaggatacttgcggcactcaacagaggaaagaaattcctaagggaacactgctcagaaagtactgcagcatgtcttcaaatgcctgaggatcaagttggaaaactagaagcaacagaaaacacaataaggtaactgatttcacctggggaaaagtcacttcctgttttgttttttttaaaagagacaaggtctcgccatgttgc

SEQ ID NO: 23628 - protein, 31 aa, Homo sapiens
MKPFKNFICTEEQFSVILEGKSFPVRSRRSL

SEQ ID NO: 23629 - DNA, 3587 bp, Homo sapiens
gacctcccacaactggagcagccgggaacagctctgaccacagtggttccggggagaagcctttccaggacccatgtgtaggcacaactgttttccctgatcaggatacttgcggcactcaacagaggaaagaaattcctaagggaacactgctcagaaagtactgcagcatgtcttcaaatgcctgaggatcaagttggaaaactagaagcaacagaaaacacaataagcgcaatggcggcggccgcggcggagcagcaacagttctacctgctcctgggaaacctgctcagccccgacaatgtggtccggaaacaggcagaggaaacctatgagaatatcccaggccagtcaaagatcacattcctcttacaagccatcagaaatacaacagctgctgaagaggctagacaaatggccgccgttctcctaagacgtctcttgtcctctgcatttgatgaagtctatccagcacttccctctgatgttcagactgccatcaagagtgagctactcatgattattcagatggaaacacaatctagcatgaggaaaaaagtttgtgatattgcggcagaactggccaggaatttaatagatgaggatggcaataaccagtggcccgaaggtttgaagttcctttttgattcagtcagctctcaaaatgtgggactgcgggaagctgcccttcacattttctggaactttcctggaatttttgggaaccagcaacaacactatttagatgtcatcaaacgaatgttagttcagtgtatgcaagatcaggaacacccgtcgatcaggacgttatctgctagagctacagctgcatttatacttgcaaatgagcataatgttgctctgttcaaacattttgcagacttgctaccgggattcctacaggcggtaaatgactcgtgctaccagaatgatgattctgtcctaaaatccctcgttgagattgcagatactgttccaaagtatttgcgtcctcacttggaagcaactctacagctaagtctaaagttgtgtggagacactagcctcaacaatatgcaacgccagcttgcccttgaagtgatcgtcaccctctctgagactgcagctgctatgttaagaaaacataccaatattgttgcacagactattcctcagatgttagcaatgatggttgatttggaagaagatgaggactgggcaaatgcagatgaactagaagatgatgattttgacagcaatgcagttgcaggcgagagtgctctagatcgaatggcttgcggacttggtggaaagctcgttctgccgatgatcaaggaacacattatgcaaatgcttcaaaatcctgactggaaataccggcatgcaggattgatggccttatctgccattggtgaagggtgccaccagcaaatggaaggaattctaaatgagatcgtaaattttgttttactttttctccaggatcctcatccaagagtaaggtatgcagcctgtaatgccgtgggacagatggctacagattttgcacctggtttccaaaagaaatttcatgagaaggtgattgcagctctgctgcagaccatggaagaccaaggcaatcaacgtgtgcaggcccatgcagctgctgccctcattaactttactgaagactgtcccaagtcactacttattccatacttggataatttggtgaaacatctgcattccattatggtactgaagcttcaagagctgattcagaaaggcaccaagttagttttggaacaagttgtgacatccattgcatcagttgccgatactgcagaagaaaaatttgtcccctactatgatttatttatgccatcactgaagcacatcgttgagaatgcggttcaaaaagaactgagacttctgagaggaaaaactattgaatgcattagcctcattggtctggctgttgggaaggaaaaattcatgcaggatgcatcagatgtgatgcagcttttgttaaagacccagacagacttcaatgatatggaagatgatgatcctcagatctcttacatgatctcagcatgggccagaatgtgcaaaatccttggaaaagaatttcagcaataccttccagtggttatggggcctttaatgaagacggcttcaattaagcccgaagtagcccttttagatacccaagacatggagaatatgagtgatgatgatggttgggaatttgtgaaccttggagatcagcaaagctttggtattaaaactgcaggactagaagaaaaatcaactgcttgccagatgttggtttgctatgctaaggagttaaaggaaggctttgtggagtacaccgaacaggttgtcaaactgatggtccctttactgaaattttatttccacgatggtgttcgagtggcagcagcggaatccatgcctcttctcctggagtgtgcaagagtccgtggtcctgagtatctcacacagatgtggcattttatgtgtgatgctctaattaaggccattggtacagaaccagattcagacgtcctctcagaaataatgcattcttttgcaaagtgcattgaagtaatgggagatggatgccttaataatgaacactttgaagaactgggaggtatattgaaagcaaagcttgaagaacattttaaaaatcaagaattacgacaagttaaaagacaagatgaagactatgatgaacaggtcgaagagtcactacaagatgaggatgataatgatgtttatattctgaccaaagtgtcagatattttacactcaatattcagtagctacaaagaaaaggtgttaccatggtttgaacagctgcttccattaattgtcaacctcatttgtccacatagaccatggccagacagacaatggggattatgcatctttgatgatgtcatagaacactgtagtccagcctcatttaaatacgcagaatatttcttaagaccaatgctccaatatgtatgtgacaacagcccagaagtcaggcaagcagctgcatatggcctgggagtcatggcacagtacggtggagataattatcgccctttttgtacagaagcacttcccctgctggtaagagttattcagtctgcggattctaagaccaaagaaaatgtcaatgctacagagaactgcatctcagcagtagggaaaatcatgaagttcaagcctgactgtgtaaacgttgaagaggtccttccacactggttgtcttggcttccactacatgaagataaagaagaagctgttcagactttcaattatctgtgtgacctgattgaaagtaatcatccaattgttcttggcccaaacaataccaatctgcccaaaatatttagtataattgcggaaggagaaatgcacgaggcaattaaacatgaagatccttgtgccaaacgtctggccaatgtcgttcgccaagtacagacttctggaggactgtggactgagtgcatagcacagctcagtcctgagcagcaggccgccattcaggagctcctgaactctgcgtgaagggccttaatgtcacccaccagaaaactaactccaaataaacgcttaccctttccttt

SEQ ID NO: 23630 - protein, 1115 aa, Homo sapiens; identical to SEQ ID NO: 3139

SEQ ID NO: 23631 - DNA, 6001 bp, Homo sapiens
gacctcccacaactggagcagccgggaacagctctgaccacagtggttccggggagaagcctttccaggacccatgtgtaggcacaactgttttccctgatcaggatacttgcggcactcaacagaggaaagaaattcctaagggaacactgctcagaaagtactgcagcatgtcttcaaatgcctgaggatcaagttggaaaactagaagcaacagaaaacacaataagcgcaatggcggcggccgcggcggagcagcaacagttctacctgctcctgggaaacctgctcagccccgacaatgtggtccggaaacaggcagaggaaacctatgagaatatcccaggccagtcaaagatcacattcctcttacaagccatcagaaatacaacagctgctgaagaggctagacaaatggccgccgttctcctaagacgtctcttgtcctctgcatttgatgaagtctatccagcacttccctctgatgttcagactgccatcaagagtgagctactcatgattattcagatggaaacacaatctagcatgaggaaaaaagtttgtgatattgcggcagaactggccaggaatttaatagatgaggatggcaataaccagtggcccgaaggtttgaagttcctttttgattcagtcagctctcaaaatgtgggactgcgggaagctgcccttcacattttctggaactttcctggaatttttgggaaccagcaacaacactatttagatgtcatcaaacgaatgttagttcagtgtatgcaagatcaggaacacccgtcgatcaggacgttatctgctagagctacagctgcatttatacttgcaaatgagcataatgttgctctgttcaaacattttgcagacttgctaccgggattcctacaggcggtaaatgactcgtgctaccagaatgatgattctgtcctaaaatccctcgttgagattgcagatactgttccaaagtatttgcgtcctcacttggaagcaactctacagctaagtctaaagttgtgtggagacactagcctcaacaatatgcaacgccagcttgcccttgaagtgatcgtcaccctctctgagactgcagctgctatgttaagaaaacataccaatattgttgcacagactattcctcagatgttagcaatgatggttgatttggaagaagatgaggactgggcaaatgcagatgaactagaagatgatgattttgacagcaatgcagttgcaggcgagagtgctctagatcgaatggcttgcggacttggtggaaagctcgttctgccgatgatcaaggaacacattatgcaaatgcttcaaaatcctgactggaaataccggcatgcaggattgatggccttatctgccattggtgaagggtgccaccagcaaatggaaggaattctaaatgagatcgtaaattttgttttactttttctccaggatcctcatccaagagtaaggtatgcagcctgtaatgccgtgggacagatggctacagattttgcacctggtttccaaaagaaatttcatgagaaggtgattgcagctctgctgcagaccatggaagaccaaggcaatcaacgtgtgcaggcccatgcagctgctgccctcattaactttactgaagactgtcccaagtcactacttattccatacttggataatttggtgaaacatctgcattccattatggtactgaagcttcaagagctgattcagaaaggcaccaagttagttttggaacaagttgtgacatccattgcatcagttgccgatactgcagaagaaaaatttgtcccctactatgatttatttatgccatcactgaagcacatcgttgagaatgcggttcaaaaagaactgagacttctgagaggaaaaactattgaatgcattagcctcattggtctggctgttgggaaggaaaaattcatgcaggatgcatcagatgtgatgcagcttttgttaaagacccagacagacttcaatgatatggaagatgatgatcctcagatctcttacatgatctcagcatgggccagaatgtgcaaaatccttggaaaagaatttcagcaataccttccagtggttatggggcctttaatgaagacggcttcaattaagcccgaagtagcccttttagatacccaagacatggagaatatgagtgatgatgatggttgggaatttgtgaaccttggagatcagcaaagctttggtattaaaactgcaggactagaagaaaaatcaactgcttgccagatgttggtttgctatgctaaggagttaaaggaaggctttgtggagtacaccgaacaggttgtcaaactgatggtccctttactgaaattttatttccacgatggtgttcgagtggcagcagcggaatccatgcctcttctcctggagtgtgcaagagtccgtggtcctgagtatctcacacagatgtggcattttatgtgtgatgctctaattaaggccattggtacagaaccagattcagacgtcctctcagaaataatgcattcttttgcaaagtgcattgaagtaatgggagatggatgccttaataatgaacactttgaagaactgggaggtatattgaaagcaaagcttgaagaacattttaaaaatcaagaattacgacaagttaaaagacaagatgaagactatgatgaacaggtcgaagagtcactacaagatgaggatgataatgatgtttatattctgaccaaagtgtcagatattttacactcaatattcagtagctacaaagaaaaggtgttaccatggtttgaacagctgcttccattaattgtcaacctcatttgtccacatagaccatggccagacagacaatggggattatgcatctttgatgatgtcatagaacactgtagtccagcctcatttaaatacgcagaatatttcttaagaccaatgctccaatatgtatgtgacaacagcccagaagtcaggcaagcagctgcatatggcctgggagtcatggcacagtacggtggagataattatcgccctttttgtacagaagcacttcccctgctggtaagagttattcagtctgcggattctaagaccaaagaaaatgtcaatgctacagagaactgcatctcagcagtagggaaaatcatgaagttcaagcctgactgtgtaaacgttgaagaggtccttccacactggttgtcttggcttccactacatgaagataaagaagaagctgttcagactttcaattatctgtgtgacctgattgaaagtaatcatccaattgttcttggcccaaacaataccaatctgcccaaaatatttagtataattgcggaaggagaaatgcacgaggcaattaaacatgaagatccttgtgccaaacgtctggccaatgtcgttcgccaagtacagacttctggaggactgtggactgagtgcatagcacagctcagtcctgagcagcaggccgccattcaggagctcctgaactctgcgtgaagggccttaatgtcacccaccagaaaactaactccaaataaacgcttaccctttcctttaggtttctttgttttgtttttgagcaaaagagatcggtagtgttgtgtgtaggccattcttctggagagccacaagcaggaagagcagcgctgtgttgcagaatggagtttccatggatttctaccagaccactgaaggagttcctggaagccctgcggtagctagcactgaagactatttttctattggtataacccgcccacctgaaggggaaagggaaatcaaattaatttttctcgttagacataaggaaatttaaggaaaaacagctttaagaacagttactcagcgtagatgtgtgttcacacaaattgctctgcattcagtgttcattgtgaattgggagtgtgagtctttctgtagggtagaaagaagcctcctacccagcaaaccagtagacccaaaagttgaaaaaaactgatgacagacaacaagcatgaagatggcatatttgatgtcactttggttctttttcccagaaggcttatacagtgactcagtcgggaagctttccagcttccagcccttgaatgtgaagtgtcattggcatgtctggcagtagtctctcattcactcctcaataaacaacattgaatacaaaagaggcttgtgtaaaaactcagtactgtctggcttggattcatttcatgtttttaatataagaatgatctaatatttttttaaagtaatagctatcagtaatagctgagtgttttttcccctaatattttccttgtgcaattcagacttaagcatcgagtttttaccatcttccactttaagctaagttatgatacctattccattcacaattggtgttctttttaaggtttgcaaatttcagccaattttgtagctaagattgttctgatcagctcaaaaagatttggcttagtgttttcattgcaaattataattgctgtagagccacacacaacttttgaacttttaattataagtgttatggctaaagttatttactgaaaatttcagtaaaatgtgtgaatgtttctttatgtattaacctcatagcagtaaatgacttgctgttgtttaatttttctaaggcatcttaatagacttctgttgaaaacttcagtgttaacatttttatagtttgtactaaatttaaccgtgatataaaaatgaattttatgcatagatcagaattttaaattaaaggttttttctttaaatgatttgtattactttattaaaactaaatctgaaatggaatagaaaatagaatggattacatacagatggtttccttgttagcagatgcccttcaaatatattttacgtttgcagcacaacaccattgcccggaggcttccgaatctagcaaagcagcatattaaatgactccacctgcgcagtccttgtgttcagtggatgaatacctgtgggctcttgtaatgtgtggtaatatttggagctttatagcctgtattccttgggagaaaaaaatgggaattggagtaaaaagtgtgtcaagacaacccctttctgctttcttatgtagcatctgcaaagccgattcatgtactgatgccaatcagctagagcaatgtaggctttttttaatttaaattattactacactttattactacacttgcagaaaagaaacatgttaaaatcatggcacacctgcagaatttcagatgacagtgtggtcagaagatgttttttgggagaacctagtgtttgctgggcactatgctaagcactttgggagcaagaacctcctaccttccagtttaaacactagtggtattgtcagatgccgttagtatctgagatgtacttacagcagggttctaagagctctgaaagaagcgctctgttagatgcagactggcagcatcctccttgataaaagcagaaaagcaaagaggtaattggagttgaatcaagttaatagggaaggttggtagtaaatgctgttagtgtgacatgattctgaaacccagagctcagaactaactgtgagatgtaccatgaactaacaattctttgaaaggacctgcagaagcatttttaatacctcattctgtctatgcaagatgaaaatccatggagttttttcttggcttttgtaccaaatttaggggtcttgcatgtcagcaagtgatatatattgtttataaatgcaagctatttctggaggggaaaaatgtgtgtggctcttacgttttctgggaattttgtaacaagttacacgcacaagtgttagaaactttggcataactcaatttggagtattttttaaatgctgtatctttaaagaaaagtaaaattgtcttaaatctaattgacacttctgtaatgagaggcaaccttataactctggagttgtagtttgacagaaccatcagtaaagacataagcaaataaatggtcttggtgc

SEQ ID NO: 23632 - protein, 1115 aa, Homo sapiens; identical to SEQ ID NO: 3139

SEQ ID NO: 23633 - DNA, 306 bp, Homo sapiens
gcagccgggaacagctctgaccacagtggttccggggagaagcctttccaggacccatgtgtaggcacaactgttttccctgatcaggatacttgcggcactcaaatactttcccagcaacatctagactgctgtttgaccaaacaacggggctccaacagcctagccaagtgaaacataaaactaaccatcacagtatccttgtcaaaaatcagtctgacaacacatcagaggaaagaaattcctaagggaacactgctcagaaagtactgcagcatgtcttcaaatgcctgaggatcaagttgg

SEQ ID NO: 23634 - protein, 57 aa, Homo sapiens
AAGNSSDHSGSGEKPFQDPCVGTTVFPDQDTCGTQILSQQHLDCCLTKQRGSNSLAK

SEQ ID NO: 23635 - DNA, 248 bp, Homo sapiens
tccaggacccatgtgtaggcacaactgttttccctgatcaggatacttgcggcactcaacagaggaaagaaattcctaagggaacactgctcagaaagtactgcagcatgtcttcaaatgcctgaggatcaagttggaaaactagaagcaacagaaaacacaataagccccaggcgtgagtcactggagagcgcgacgggaggaaggggcgccctgagtccacagccctgggggaggtcggagggtct

SEQ ID NO: 23636 - protein, 42 aa, Homo sapiens
MPEDQVGKLEATENTISPRRESLESATGGRGALSPQPWGRSE

SEQ ID NO: 23637 - DNA, 3418 bp, Homo sapiens
gcggcccgcgagcgcgcctcacggctcctgtctcccctccctccttctctctcacgcctagcgcaatggcggcggccgcggcggagcagcaacagttctacctgctcctgggaaacctgctcagccccgacaatgtggtccggaaacaggcagaggaaacctatgagaatatcccaggccagtcaaagatcacattcctcttacaagccatcagaaatacaacagctgctgaagaggctagacaaatggccgccgttctcctaagacgtctcttgtcctctgcatttgatgaagtctatccagcacttccctctgatgttcagactgccatcaagagtgagctactcatgattattcagatggaaacacaatctagcatgaggaaaaaagtttgtgatattgcggcagaactggccaggaatttaatagatgaggatggcaataaccagtggcccgaaggtttgaagttcctttttgattcagtcagctctcaaaatgtgggactgcgggaagctgcccttcacattttctggaactttcctggaatttttgggaaccagcaacaacactatttagatgtcatcaaacgaatgttagttcagtgtatgcaagatcaggaacacccgtcgatcaggacgttatctgctagagctacagctgcatttatacttgcaaatgagcataatgttgctctgttcaaacattttgcagacttgctaccgggattcctacaggcggtaaatgactcgtgctaccagaatgatgattctgtcctaaaatccctcgttgagattgcagatactgttccaaagtatttgcgtcctcacttggaagcaactctacagctaagtctaaagttgtgtggagacactagcctcaacaatatgcaacgccagcttgcccttgaagtgatcgtcaccctctctgagactgcagctgctatgttaagaaaacataccaatattgttgcacagactattcctcagatgttagcaatgatggttgatttggaagaagatgaggactgggcaaatgcagatgaactagaagatgatgattttgacagcaatgcagttgcaggcgagagtgctctagatcgaatggcttgcggacttggtggaaagctcgttctgccgatgatcaaggaacacattatgcaaatgcttcaaaatcctgactggaaataccggcatgcaggattgatggccttatctgccattggtgaagggtgccaccagcaaatggaaggaattctaaatgagatcgtaaattttgttttactttttctccaggatcctcatccaagagtaaggtatgcagcctgtaatgccgtgggacagatggctacagattttgcacctggtttccaaaagaaatttcatgagaaggtgattgcagctctgctgcagaccatggaagaccaaggcaatcaacgtgtgcaggcccatgcagctgctgccctcattaactttactgaagactgtcccaagtcactacttattccatacttggataatttggtgaaacatctgcattccattatggtactgaagcttcaagagctgattcagaaaggcaccaagttagttttggaacaagttgtgacatccattgcatcagttgccgatactgcagaagaaaaatttgtcccctactatgatttatttatgccatcactgaagcacatcgttgagaatgcggttcaaaaagaactgagacttctgagaggaaaaactattgaatgcattagcctcattggtctggctgttgggaaggaaaaattcatgcaggatgcatcagatgtgatgcagcttttgttaaagacccagacagacttcaatgatatggaagatgatgatcctcagatctcttacatgatctcagcatgggccagaatgtgcaaaatccttggaaaagaatttcagcaataccttccagtggttatggggcctttaatgaagacggcttcaattaagcccgaagtagcccttttagatacccaagacatggagaatatgagtgatgatgatggttgggaatttgtgaaccttggagatcagcaaagctttggtattaaaactgcaggactagaagaaaaatcaactgcttgccagatgttggtttgctatgctaaggagttaaaggaaggctttgtggagtacaccgaacaggttgtcaaactgatggtccctttactgaaattttatttccacgatggtgttcgagtggcagcagcggaatccatgcctcttctcctggagtgtgcaagagtccgtggtcctgagtatctcacacagatgtggcattttatgtgtgatgctctaattaaggccattggtacagaaccagattcagacgtcctctcagaaataatgcattcttttgcaaagtgcattgaagtaatgggagatggatgccttaataatgaacactttgaagaactgggaggtatattgaaagcaaagcttgaagaacattttaaaaatcaagaattacgacaagttaaaagacaagatgaagactatgatgaacaggtcgaagagtcactacaagatgaggatgataatgatgtttatattctgaccaaagtgtcagatattttacactcaatattcagtagctacaaagaaaaggtgttaccatggtttgaacagctgcttccattaattgtcaacctcatttgtccacatagaccatggccagacagacaatggggattatgcatctttgatgatgtcatagaacactgtagtccagcctcatttaaatacgcagaatatttcttaagaccaatgctccaatatgtatgtgacaacagcccagaagtcaggcaagcagctgcatatggcctgggagtcatggcacagtacggtggagataattatcgccctttttgtacagaagcacttcccctgctggtaagagttattcagtctgcggattctaagaccaaagaaaatgtcaatgctacagagaactgcatctcagcagtagggaaaatcatgaagttcaagcctgactgtgtaaacgttgaagaggtccttccacactggttgtcttggcttccactacatgaagataaagaagaagctgttcagactttcaattatctgtgtgacctgattgaaagtaatcatccaattgttcttggcccaaacaataccaatctgcccaaaatatttagtataattgcggaaggagaaatgcacgaggcaattaaacatgaagatccttgtgccaaacgtctggccaatgtcgttcgccaagtacagacttctggaggactgtggactgagtgcatagcacagctcagtcctgagcagcaggccgccattcaggagctcctgaactctgcgtgaagggccttaatgtcacccaccagaaaactaactccaaataaacgcttaccctttccttt

SEQ ID NO: 23638 - protein, 1097 aa, Homo sapiens
MAAAAAEQQQFYLLLGNLLSPDNVVRKQAEETYENIPGQSKITFLLQAIRNTTAAEEARQMAAVLLRRLLSSAFDEVYPALPSDVQTAIKSELLMIIQMETQSSMRKKVCDIAAELARNLIDEDGNNQWPEGLKFLFDSVSSQNVGLREAALHIFWNFPGIFGNQQQHYLDVIKRMLVQCMQDQEHPSIRTLSARATAAFILANEHNVALFKHFADLLPGFLQAVNDSCYQNDDSVLKSLVEIADTVPKYLRPHLEATLQLSLKLCGDTSLNNMQRQLALEVIVTLSETAAAMLRKHTNIVAQTIPQMLAMMVDLEEDEDWANADELEDDDFDSNAVAGESALDRMACGLGGKLVLPMIKEHIMQMLQNPDWKYRHAGLMALSAIGEGCHQQMEGILNEIVNFVLLFLQDPHPRVRYAACNAVGQMATDFAPGFQKKFHEKVIAALLQTMEDQGNQRVQAHAAAALINFTEDCPKSLLIPYLDNLVKHLHSIMVLKLQELIQKGTKLVLEQVVTSIASVADTAEEKFVPYYDLFMPSLKHIVENAVQKELRLLRGKTIECISLIGLAVGKEKFMQDASDVMQLLLKTQTDFNDMEDDDPQISYMISAWARMCKILGKEFQQYLPVVMGPLMKTASIKPEVALLDTQDMENMSDDDGWEFVNLGDQQSFGIKTAGLEEKSTACQMLVCYAKELKEGFVEYTEQVVKLMVPLLKFYFHDGVRVAAAESMPLLLECARVRGPEYLTQMWHFMCDALIKAIGTEPDSDVLSEIMHSFAKCIEVMGDGCLNNEHFEELGGILKAKLEEHFKNQELRQVKRQDEDYDEQVEESLQDEDDNDVYILTKVSDILHSIFSSYKEKVLPWFEQLLPLIVNLICPHRPWPDRQWGLCIFDDVIEHCSPASFKYAEYFLRPMLQYVCDNSPEVRQAAAYGLGVMAQYGGDNYRPFCTEALPLLVRVIQSADSKTKENVNATENCISAVGKIMKFKPDCVNVEEVLPHWLSWLPLHEDKEEAVQTFNYLCDLIESNHPIVLGPNNTNLPKIFSIIAEGEMHEAIKHEDPCAKRLANVVRQVQTSGGLWTECIAQLSPEQQAAIQELLNSA

SEQ ID NO: 23639 - DNA, 690 bp, Homo sapiens
agccttaagtattgtaatggttattatagtttcactgattttcattttgacttagatgtaaatctgttttgaatgtttctagttaacatccatcagaaggaaggtatacatgtgcctgcaggtagaacatttgcataatatagattgctaaattatttagtgaaaaatagtttagtaatatttctctattgtcagcatcttaggaatcttttggctaatgaggcattataaagtgaatcttcagcaccgactttctgtttcatcttttctaggcggtaaatgactcgtgctaccagaatgatgattctgtcctaaaatccctcgttgagattgcagatactgttccaaagtatttgcgtcctcacttggaagcaactctacagctaagtctaaagttgtgtggagacactagcctcaacaatatgcaacgccagcttgcccttgaagtgatcgtcaccctctctgagactgcagctgctatgttaagaaaacataccaatattgttgcacagactagtaagtcaatggtcttcagatagtttatgtgtattgtggccaaatttttggataaatttgctgagggttgtgtgatttctcagattgttgagaatataatgaatatccttttagaatcagatgaatttgggaaaatgcatctcaatacatgcaagcgtggacccccacattgtg

SEQ ID NO: 23640 - protein, 48 aa, Homo sapiens
MCIVAKFLDKFAEGCVISQIVENIMNILLESDEFGKMHLNTCKRGPPH

SEQ ID NO: 23641 - DNA, 2465 bp, Homo sapiens
tggggaacaggtggtgtttggtttagtggtgatttctgtgattttggtgcacccattacgggagcagtgtacactgtacccattgtgtagtcttttatccctcactcccctcccaccctttcccctgagtccccaaagtccgttgtatcattcttacacctttgcatcctcatagctcagctcccacttatgagttgagaatataactggttatttctatggggaaaaaaattccaactctagacagcttattaaaaaaacaggccgggcgcggtggctcacacctgcaatctcagcactttgggaggccgaggcaggtggatcacgaggtcaggagatcaagaccatcctggctaacactgtgaaaccccgtccctactaaaaaatgcaaaaaattagccgggcgtggtggcgggcgcctgtagtcccagcttctcgggaggccgaggcaggagaatggcgtgacccgggaggcagagcttgcagtgagccgagataccgccactgcactgcagcctgggcaacagagcaagactctgtctcaaaaataataataataataataataatttggggtctactcaagacctgaatattaccttgcacgctggaactagttaaaaaagttaagggctaaatattacagatatattttacaagtaatgcttaatagtagataattttctaagactgaatcacaaaccattgatgtaaacattgccaaattggcaaatgcgaaaacaattttttgaccaatcagatacaccataaatgaactgaaaaaataagccacaaactggaagaaaataattacagtgcacacaatcaacagttttgttatctagagaatacacaaaggctgagaagaggaaattcattgcttttttcttctttaagatggggtcttgctctgtcatccaggctagagtgcagtgacatgatctcagctcactgcagcctcccaagtagctgggactacaggcacgcactaccacacctggctaatttttgtgttttttggtagagatagggttttaccatgttgcccaggctggtcttgaactcctgggctcaagggatcctcccacctaagcctcccgaagtgctgggataacaggtgtgcaccagcaggcccagtcaggaaattcgtaaaagagggatctgaaatagctaatgaaccctgctaagtctcaataaaaacaagtgtaattgtggaatacaagttgtccagaagtttgacagtatcaattgttaataaaagatgtggaactgagaggacgcttattccacagcctgggcaacagagcaagactccatctcaaaaaaaataaaaagctgaaattattctcctgaaagacttggagtcagtataaactactaggttaataaaagtaaaaattaaagatttttggctttagaatatatatgcatttttgagacttaatcccattgttaaaaatgactgatttctggctttaatactgtcttgaagtatatgaaagtaatctttcactggaaatcacctgataacggctgaagagaagaccagggctaggtcgaatttcctttttggttcagttactgtaatgtgctgctacctgtcctttcatttgccctgcaaatggcacttaaatttatacagtttaagaaactttgttttctaaactagatgaataagattttctcatttgtgaaacagcataaatatattttcagggtgagatttttttaagtctaaaaacctgttctgaagataatttatagtttcatttttatagtattgtctttacatagtaaagataatgcacatgaaatacactactgatcctccagttctaagccaggataagtccaaatgcttttatgcccacattcctttggctttcagagaagacaatagaattgagtttcacatagctatgcatagtttttggcagtgcagtttgcacccctttaagggtgaataaactcacagtggggaagattatacattctctgcacccttttcagttttctatgttctgttcattgataggtttgaagactgtatttctaggaaatgaaatacatgaggctctttcaatactgcttttactggagtgttgaaagtgtcagaagctatttctgagaacagtttttagccagtagcgggtgggggtggtcttgaaaaataagattcaggctgggcacagtggctcacgcctgtaatcttagcattttgggaggcccaggcgggcgcatcacaaagtcaggagatcaagacaatcctggctaacatggtgaaaccccgtctctactaaaactacaaaaaaattagccaggcgtggtggcgggcacctgtagtcccagctactcgggaggctgaggtaggagaatagcatgaagctgggaggcggagcttgcagtgagccgagatcgtgccactgcgctccagcctgggtgacagagcgagactctgtctcaaa

SEQ ID NO: 23642 - protein, 68 aa, Homo sapiens
MQKISRAWWRAPVVPASREAEAGEWRDPGGRACSEPRYRHCTAAWATEQDSVSKIIIIIIIIWGLLKT

SEQ ID NO: 23643 - DNA, 3684 bp, Homo sapiens
gtacttttagtggagatggagtttctccatgttggccaggctggtctcaaactcctaacctcaagtgatccgcccaccctggcctcccaaaatgctgggattacaggcatgagccactgcacccggcctaatttttgtatttttagtagagacggggtttcgccatgttggccaggctggtcttgaactcctgactttaagtgatccacccgcctcaacctcccaaagtgctgggattacaggtgtgagccaccgcgcctggcctgatacatacttttagaatcaagtagtcacgcactttttctgttcatttttctaaaaagtaaatatacaaatgttttgttttttgttttttttgtttgtttgtttctgttttttttttgagacagagtctcgctctttcgcccagaccagagtgcagtggcgcgatctcggctcactgcaagctccgcccccccgggttcacaccattctcctgcctcagcctcccgagtagctgggaatacaggcgcctgccaccgtgcccggctaattttttgtatttttaagtagagacggggtttcaccacgttaaccaggatggtctcgatctcctgaccttgtgatccgcccgcctcagactcccaaagtgctgggattacaggcgcgagccaccgcgcccggcctatacaaatgtttttatattatatatacatatacccttttcaaaaaagttttgttactcttttccaaataagaacttttatacatctccctctaccagaatgacatgtttatagtgtgtaattgctattccatctgtaatttttttcggtagctgactggaaataccggcatgcaggattgatggccttatctgccattggtgaagggtgccaccagcaaatggaaggaattctaaatgagatcgtaaattttgttttactttttctccaggatcctcatccaagagtaaggtatgcagcctgtaatgccgtgggacagatggctacagattttgcacctggtttccaaaagaaatttcatgagaaggtgattgcagctctgctgcagaccatggaagaccaaggcaatcaacgtgtgcaggcccatgcagctgctgccctcattaactttactgaagactgtcccaagtcactacttattccatacttggataatttggtgaaacatctgcattccattatggtactgaagcttcaagagctgattcagaaaggcaccaagttagttttggaacaagttgtgacatccattgcatcagttgccgatactgcagaagaaaaatttgtcccctactatgatttatttatgccatcactgaagcacatcgttgagaatgcggttcaaaaagaactgagacttctgagaggaaaaactattgaatgcattagcctcattggtctggctgttgggaaggaaaaattcatgcaggatgcatcagatgtgatgcagcttttgttaaagacccagacagacttcaatgatatggaagatgatgatcctcagatctcttacatgatctcagcatgggccagaatgtgcaaaatccttggaaaagaatttcagcaataccttccagtggttatggggcctttaatgaagacggcttcaattaagcccgaagtagcccttttagatacccaagacatggagaatatgagtgatgatgatggttgggaatttgtgaaccttggagatcagcaaagctttggtattaaaactgcaggactagaagaaaaatcaactgcttgccagatgttggtttgctatgctaaggagttaaaggaaggctttgtggagtacaccgaacaggttgtcaaactgatggtccctttactgaaattttatttccacgatggtgttcgagtggcagcagcggaatccatgcctcttctcctggagtgtgcaagagtccgtggtcctgagtatctcacacagatgtggcattttatgtgtgatgctctaattaaggccattggtacagaaccagattcagacgtcctctcagaaataatgcattcttttgcaaagtgcattgaagtaatgggagatggatgccttaataatgaacactttgaagaactgggaggtatattgaaagcaaagcttgaagaacattttaaaaatcaagaattacgacaagttaaaagacaagatgaagactatgatgaacaggtcgaagagtcactacaagatgaggatgataatgatgtttatattctgaccaaagtgtcagatattttacactcaatattcagtagctacaaagaaaaggtgttaccatggtttgaacagctgcttccattaattgtcaacctcatttgtccacatagaccatggccagacagacaatggggattatgcatctttgatgatgtcatagaacactgtagtccagcctcatttaaatacgcagaatatttcttaagaccaatgctccaatatgtatgtgacaacagcccagaagtcaggcaagcagctgcatatggcctgggagtcatggcacagtacggtggagataattatcgccctttttgtacagaagcacttcccctgctggtaagagttattcagtctgcggattctaagaccaaagaaaatgtcaatgctacagagaactgcatctcagcagtagggaaaatcatgaagttcaagcctgactgtgtaaacgttgaagaggtccttccacactggttgtcttggcttccactacatgaagataaagaagaagctgttcagactttcaattatctgtgtgacctgattgaaagtaatcatccaattgttcttggcccaaacaataccaatctgcccaaaatatttagtataattgcggaaggagaaatgcacgaggcaattaaacatgaagatccttgtgccaaacgtctggccaatgtcgttcgccaagtacagacttctggaggactgtggactgagtgcatagcacagctcagtcctgagcagcaggccgccattcaggagctcctgaactctgcgtgaagggccttaatgtcacccaccagaaaactaactccaaataaacgcttaccctttcctttaggtttctttgttttgtttttgagcaaaagagatcggtagtgttgtgtgtaggccattcttctggagagccacaagcaggaagagcagcgctgtgttgcagaatggagtttccatggatttctaccagaccactgaaggagttcctggaagccctgcggtagctagcactgaagactatttttctattggtataacccgcccacctgaaggggaaagggaaatcaaattaatttttctcgttagacataaggaaatttaaggaaaaacagctttaagaacagttactcagcgtagatgtgtgttcacacaaattgctctgcattcagtgttcattgtgaattgggagtgtgagtctttctgtagggtagaaagaagcctcctacccagcaaaccagtagacccaaaagttgaaaaaaactgatgacagacaacaagcatgaagatggcatatttgatgtcactttggttctttttcccagaaggcttatacagtgactcagtcgggaagctttccagcttccagcccttgaatgtgaagtgtcattggcatgtctggcagtagtctctcattcactcctcaataaacaacattgaatacaaaagaggcttgtgtaaaaactc

SEQ ID NO: 23644 - protein, 718 aa, Homo sapiens
MALSAIGEGCHQQMEGILNEIVNFVLLFLQDPHPRVRYAACNAVGQMATDFAPGFQKKFHEKVIAALLQTMEDQGNQRVQAHAAAALINFTEDCPKSLLIPYLDNLVKHLHSIMVLKLQELIQKGTKLVLEQVVTSIASVADTAEEKFVPYYDLFMPSLKHIVENAVQKELRLLRGKTIECISLIGLAVGKEKFMQDASDVMQLLLKTQTDFNDMEDDDPQISYMISAWARMCKILGKEFQQYLPVVMGPLMKTASIKPEVALLDTQDMENMSDDDGWEFVNLGDQQSFGIKTAGLEEKSTACQMLVCYAKELKEGFVEYTEQVVKLMVPLLKFYFHDGVRVAAAESMPLLLECARVRGPEYLTQMWHFMCDALIKAIGTEPDSDVLSEIMHSFAKCIEVMGDGCLNNEHFEELGGILKAKLEEHFKNQELRQVKRQDEDYDEQVEESLQDEDDNDVYILTKVSDILHSIFSSYKEKVLPWFEQLLPLIVNLICPHRPWPDRQWGLCIFDDVIEHCSPASFKYAEYFLRPMLQYVCDNSPEVRQAAAYGLGVMAQYGGDNYRPFCTEALPLLVRVIQSADSKTKENVNATENCISAVGKIMKFKPDCVNVEEVLPHWLSWLPLHEDKEEAVQTFNYLCDLIESNHPIVLGPNNTNLPKIFSIIAEGEMHEAIKHEDPCAKRLANVVRQVQTSGGLWTECIAQLSPEQQAAIQELLNSA

SEQ ID NO: 23645 - DNA, 4256 bp, Homo sapiens
gtacttttagtggagatggagtttctccatgttggccaggctggtctcaaactcctaacctcaagtgatccgcccaccctggcctcccaaaatgctgggattacaggcatgagccactgcacccggcctaatttttgtatttttagtagagacggggtttcgccatgttggccaggctggtcttgaactcctgactttaagtgatccacccgcctcaacctcccaaagtgctgggattacaggtgtgagccaccgcgcctggcctgatacatacttttagaatcaagtagtcacgcactttttctgttcatttttctaaaaagtaaatatacaaatgttttgttttttgttttttttgtttgtttgtttctgttttttttttgagacagagtctcgctctttcgcccagaccagagtgcagtggcgcgatctcggctcactgcaagctccgcccccccgggttcacaccattctcctgcctcagcctcccgagtagctgggaatacaggcgcctgccaccgtgcccggctaattttttgtatttttaagtagagacggggtttcaccacgttaaccaggatggtctcgatctcctgaccttgtgatccgcccgcctcagactcccaaagtgctgggattacaggcgcgagccaccgcgcccggcctatacaaatgtttttatattatatatacatatacccttttcaaaaaagttttgttactcttttccaaataagaacttttatacatctccctctaccagaatgacatgtttatagtgtgtaattgctattccatctgtaatttttttcggtagctgactggaaataccggcatgcaggattgatggccttatctgccattggtgaagggtgccaccagcaaatggaaggaattctaaatgagatcgtaaattttgttttactttttctccaggatcctcatccaagagtaaggtatgcagcctgtaatgccgtgggacagatggctacagattttgcacctggtttccaaaagaaatttcatgagaaggtgattgcagctctgctgcagaccatggaagaccaaggcaatcaacgtgtgcaggcccatgcagctgctgccctcattaactttactgaagactgtcccaagtcactacttattccatacttggataatttggtgaaacatctgcattccattatggtactgaagcttcaagagctgattcagaaaggcaccaagttagttttggaacaagttgtgacatccattgcatcagttgccgatactgcagaagaaaaatttgtcccctactatgatttatttatgccatcactgaagcacatcgttgagaatgcggttcaaaaagaactgagacttctgagaggaaaaactattgaatgcattagcctcattggtctggctgttgggaaggaaaaattcatgcaggatgcatcagatgtgatgcagcttttgttaaagacccagacagacttcaatgatatggaagatgatgatcctcagatctcttacatgatctcagcatgggccagaatgtgcaaaatccttggaaaagaatttcagcaataccttccagtggttatggggcctttaatgaagacggcttcaattaagcccgaagtagcccttttagatacccaagacatggagaatatgagtgatgatgatggttgggaatttgtgaaccttggagatcagcaaagctttggtattaaaactgcaggactagaagaaaaatcaactgcttgccagatgttggtttgctatgctaaggagttaaaggaaggctttgtggagtacaccgaacaggttgtcaaactgatggtccctttactgaaattttatttccacgatggtgttcgagtggcagcagcggaatccatgcctcttctcctggagtgtgcaagagtccgtggtcctgagtatctcacacagatgtggcattttatgtgtgatgctctaattaaggccattggtacagaaccagattcagacgtcctctcagaaataatgcattcttttgcaaagtgcattgaagtaatgggagatggatgccttaataatgaacactttgaagaactgggaggtatattgaaagcaaagcttgaagaacattttaaaaatcaagaattacgacaagttaaaagacaagatgaagactatgatgaacaggtcgaagagtcactacaagatgaggatgataatgatgtttatattctgaccaaagtgtcagatattttacactcaatattcagtagctacaaagaaaaggtgttaccatggtttgaacagctgcttccattaattgtcaacctcatttgtccacatagaccatggccagacagacaatggggattatgcatctttgatgatgtcatagaacactgtagtccagcctcatttaaatacgcagaatatttcttaagaccaatgctccaatatgtatgtgacaacagcccagaagtcaggcaagcagctgcatatggcctgggagtcatggcacagtacggtggagataattatcgccctttttgtacagaagcacttcccctgctggtaagagttattcagtctgcggattctaagaccaaagaaaatgtcaatgctacagagaactgcatctcagcagtagggaaaatcatgaagttcaagcctgactgtgtaaacgttgaagaggtccttccacactggttgtcttggcttccactacatgaagataaagaagaagctgttcagactttcaattatctgtgtgacctgattgaaagtaatcatccaattgttcttggcccaaacaataccaatctgcccaaaatatttagtataattgcggaaggagaaatgcacgaggcaattaaacatgaagatccttgtgccaaacgtctggccaatgtcgttcgccaagtacagacttctggaggactgtggactgagtgcatagcacagctcagtcctgagcagcaggccgccattcaggagctcctgaactctgcgtgaagggccttaatgtcacccaccagaaaactaactccaaataaacgcttaccctttcctttaggtttctttgttttgtttttgagcaaaagagatcggtagtgttgtgtgtaggccattcttctggagagccacaagcaggaagagcagcgctgtgttgcagaatggagtttccatggatttctaccagaccactgaaggagttcctggaagccctgcggtagctagcactgaagactatttttctattggtataacccgcccacctgaaggggaaagggaaatcaaattaatttttctcgttagacataaggaaatttaaggaaaaacagctttaagaacagttactcagcgtagatgtgtgttcacacaaattgctctgcattcagtgttcattgtgaattgggagtgtgagtctttctgtagggtagaaagaagcctcctacccagcaaaccagtagacccaaaagttgaaaaaaactgatgacagacaacaagcatgaagatggcatatttgatgtcactttggttctttttcccagaaggcttatacagtgactcagtcgggaagctttccagcttccagcccttgaatgtgaagtgtcattggcatgtctggcagtagtctctcattcactcctcaataaacaacattgaatacaaaagaggcttgtgtaaaaactcagtactgtctggcttggattcatttcatgtttttaatataagaatgatctaatatttttttaaagtaatagctatcagtaatagctgagtgttttttcccctaatattttccttgtgcaattcagacttaagcatcgagtttttaccatcttccactttaagctaagttatgatacctattccattcacaattggtgttctttttaaggtttgcaaatttcagccaattttgtagctaagattgttctgatcagctcaaaaagatttggcttagtgttttcattgcaaattataattgctgtagagccacacacaacttttgaacttttaattataagtgttatggctaaagttatttactgaaaatttcagtaaaatgtgtgaatgtttctttatgtattaacctcatagcagtaaatgacttgctgttgtttaatttttctaaggcatcttaatagacttctgttgaaaacttcagtgttaacatttttatagtttgtactaaatttaaccgtgatataaaaatgaattttatgcatagatcagaattttaaattaaaggttttttcttt

SEQ ID NO: 23646 - protein, 718 aa, Homo sapiens; identical to SEQ ID NO: 23644

SEQ ID NO: 23647 - DNA, 4563 bp, Homo sapiens
gtacttttagtggagatggagtttctccatgttggccaggctggtctcaaactcctaacctcaagtgatccgcccaccctggcctcccaaaatgctgggattacaggcatgagccactgcacccggcctaatttttgtatttttagtagagacggggtttcgccatgttggccaggctggtcttgaactcctgactttaagtgatccacccgcctcaacctcccaaagtgctgggattacaggtgtgagccaccgcgcctggcctgatacatacttttagaatcaagtagtcacgcactttttctgttcatttttctaaaaagtaaatatacaaatgttttgttttttgttttttttgtttgtttgtttctgttttttttttgagacagagtctcgctctttcgcccagaccagagtgcagtggcgcgatctcggctcactgcaagctccgcccccccgggttcacaccattctcctgcctcagcctcccgagtagctgggaatacaggcgcctgccaccgtgcccggctaattttttgtatttttaagtagagacggggtttcaccacgttaaccaggatggtctcgatctcctgaccttgtgatccgcccgcctcagactcccaaagtgctgggattacaggcgcgagccaccgcgcccggcctatacaaatgtttttatattatatatacatatacccttttcaaaaaagttttgttactcttttccaaataagaacttttatacatctccctctaccagaatgacatgtttatagtgtgtaattgctattccatctgtaatttttttcggtagctgactggaaataccggcatgcaggattgatggccttatctgccattggtgaagggtgccaccagcaaatggaaggaattctaaatgagatcgtaaattttgttttactttttctccaggatcctcatccaagagtaaggtatgcagcctgtaatgccgtgggacagatggctacagattttgcacctggtttccaaaagaaatttcatgagaaggtgattgcagctctgctgcagaccatggaagaccaaggcaatcaacgtgtgcaggcccatgcagctgctgccctcattaactttactgaagactgtcccaagtcactacttattccatacttggataatttggtgaaacatctgcattccattatggtactgaagcttcaagagctgattcagaaaggcaccaagttagttttggaacaagttgtgacatccattgcatcagttgccgatactgcagaagaaaaatttgtcccctactatgatttatttatgccatcactgaagcacatcgttgagaatgcggttcaaaaagaactgagacttctgagaggaaaaactattgaatgcattagcctcattggtctggctgttgggaaggaaaaattcatgcaggatgcatcagatgtgatgcagcttttgttaaagacccagacagacttcaatgatatggaagatgatgatcctcagatctcttacatgatctcagcatgggccagaatgtgcaaaatccttggaaaagaatttcagcaataccttccagtggttatggggcctttaatgaagacggcttcaattaagcccgaagtagcccttttagatacccaagacatggagaatatgagtgatgatgatggttgggaatttgtgaaccttggagatcagcaaagctttggtattaaaactgcaggactagaagaaaaatcaactgcttgccagatgttggtttgctatgctaaggagttaaaggaaggctttgtggagtacaccgaacaggttgtcaaactgatggtccctttactgaaattttatttccacgatggtgttcgagtggcagcagcggaatccatgcctcttctcctggagtgtgcaagagtccgtggtcctgagtatctcacacagatgtggcattttatgtgtgatgctctaattaaggccattggtacagaaccagattcagacgtcctctcagaaataatgcattcttttgcaaagtgcattgaagtaatgggagatggatgccttaataatgaacactttgaagaactgggaggtatattgaaagcaaagcttgaagaacattttaaaaatcaagaattacgacaagttaaaagacaagatgaagactatgatgaacaggtcgaagagtcactacaagatgaggatgataatgatgtttatattctgaccaaagtgtcagatattttacactcaatattcagtagctacaaagaaaaggtgttaccatggtttgaacagctgcttccattaattgtcaacctcatttgtccacatagaccatggccagacagacaatggggattatgcatctttgatgatgtcatagaacactgtagtccagcctcatttaaatacgcagaatatttcttaagaccaatgctccaatatgtatgtgacaacagcccagaagtcaggcaagcagctgcatatggcctgggagtcatggcacagtacggtggagataattatcgccctttttgtacagaagcacttcccctgctggtaagagttattcagtctgcggattctaagaccaaagaaaatgtcaatgctacagagaactgcatctcagcagtagggaaaatcatgaagttcaagcctgactgtgtaaacgttgaagaggtccttccacactggttgtcttggcttccactacatgaagataaagaagaagctgttcagactttcaattatctgtgtgacctgattgaaagtaatcatccaattgttcttggcccaaacaataccaatctgcccaaaatatttagtataattgcggaaggagaaatgcacgaggcaattaaacatgaagatccttgtgccaaacgtctggccaatgtcgttcgccaagtacagacttctggaggactgtggactgagtgcatagcacagctcagtcctgagcagcaggccgccattcaggagctcctgaactctgcgtgaagggccttaatgtcacccaccagaaaactaactccaaataaacgcttaccctttcctttaggtttctttgttttgtttttgagcaaaagagatcggtagtgttgtgtgtaggccattcttctggagagccacaagcaggaagagcagcgctgtgttgcagaatggagtttccatggatttctaccagaccactgaaggagttcctggaagccctgcggtagctagcactgaagactatttttctattggtataacccgcccacctgaaggggaaagggaaatcaaattaatttttctcgttagacataaggaaatttaaggaaaaacagctttaagaacagttactcagcgtagatgtgtgttcacacaaattgctctgcattcagtgttcattgtgaattgggagtgtgagtctttctgtagggtagaaagaagcctcctacccagcaaaccagtagacccaaaagttgaaaaaaactgatgacagacaacaagcatgaagatggcatatttgatgtcactttggttctttttcccagaaggcttatacagtgactcagtcgggaagctttccagcttccagcccttgaatgtgaagtgtcattggcatgtctggcagtagtctctcattcactcctcaataaacaacattgaatacaaaagaggcttgtgtaaaaactcagtactgtctggcttggattcatttcatgtttttaatataagaatgatctaatatttttttaaagtaatagctatcagtaatagctgagtgttttttcccctaatattttccttgtgcaattcagacttaagcatcgagtttttaccatcttccactttaagctaagttatgatacctattccattcacaattggtgttctttttaaggtttgcaaatttcagccaattttgtagctaagattgttctgatcagctcaaaaagatttggcttagtgttttcattgcaaattataattgctgtagagccacacacaacttttgaacttttaattataagtgttatggctaaagttatttactgaaaatttcagtaaaatgtgtgaatgtttctttatgtattaacctcatagcagtaaatgacttgctgttgtttaatttttctaaggcatcttaatagacttctgttgaaaacttcagtgttaacatttttatagtttgtactaaatttaaccgtgatataaaaatgaattttatgcatagatcagaattttaaattaaaggttttttctttaaatgatttgtattactttattaaaactaaatctgaaatggaatagaaaatagaatggattacatacagatggtttccttgttagcagatgcccttcaaatatattttacgtttgcagcacaacaccattgcccggaggcttccgaatctagcaaagcagcatattaaatgactccacctgcgcagtccttgtgttcagtggatgaatacctgtgggctcttgtaatgtgtggtaatatttggagctttatagcctgtattccttgggagaaaaaaatgggaattggagtaaaaagtgtgtcaagac

SEQ ID NO: 23648 - protein, 718 aa, Homo sapiens; identical to SEQ ID NO: 23644

SEQ ID NO: 23649 - DNA, 5476 bp, Homo sapiens
gtacttttagtggagatggagtttctccatgttggccaggctggtctcaaactcctaacctcaagtgatccgcccaccctggcctcccaaaatgctgggattacaggcatgagccactgcacccggcctaatttttgtatttttagtagagacggggtttcgccatgttggccaggctggtcttgaactcctgactttaagtgatccacccgcctcaacctcccaaagtgctgggattacaggtgtgagccaccgcgcctggcctgatacatacttttagaatcaagtagtcacgcactttttctgttcatttttctaaaaagtaaatatacaaatgttttgttttttgttttttttgtttgtttgtttctgttttttttttgagacagagtctcgctctttcgcccagaccagagtgcagtggcgcgatctcggctcactgcaagctccgcccccccgggttcacaccattctcctgcctcagcctcccgagtagctgggaatacaggcgcctgccaccgtgcccggctaattttttgtatttttaagtagagacggggtttcaccacgttaaccaggatggtctcgatctcctgaccttgtgatccgcccgcctcagactcccaaagtgctgggattacaggcgcgagccaccgcgcccggcctatacaaatgtttttatattatatatacatatacccttttcaaaaaagttttgttactcttttccaaataagaacttttatacatctccctctaccagaatgacatgtttatagtgtgtaattgctattccatctgtaatttttttcggtagctgactggaaataccggcatgcaggattgatggccttatctgccattggtgaagggtgccaccagcaaatggaaggaattctaaatgagatcgtaaattttgttttactttttctccaggatcctcatccaagagtaaggtatgcagcctgtaatgccgtgggacagatggctacagattttgcacctggtttccaaaagaaatttcatgagaaggtgattgcagctctgctgcagaccatggaagaccaaggcaatcaacgtgtgcaggcccatgcagctgctgccctcattaactttactgaagactgtcccaagtcactacttattccatacttggataatttggtgaaacatctgcattccattatggtactgaagcttcaagagctgattcagaaaggcaccaagttagttttggaacaagttgtgacatccattgcatcagttgccgatactgcagaagaaaaatttgtcccctactatgatttatttatgccatcactgaagcacatcgttgagaatgcggttcaaaaagaactgagacttctgagaggaaaaactattgaatgcattagcctcattggtctggctgttgggaaggaaaaattcatgcaggatgcatcagatgtgatgcagcttttgttaaagacccagacagacttcaatgatatggaagatgatgatcctcagatctcttacatgatctcagcatgggccagaatgtgcaaaatccttggaaaagaatttcagcaataccttccagtggttatggggcctttaatgaagacggcttcaattaagcccgaagtagcccttttagatacccaagacatggagaatatgagtgatgatgatggttgggaatttgtgaaccttggagatcagcaaagctttggtattaaaactgcaggactagaagaaaaatcaactgcttgccagatgttggtttgctatgctaaggagttaaaggaaggctttgtggagtacaccgaacaggttgtcaaactgatggtccctttactgaaattttatttccacgatggtgttcgagtggcagcagcggaatccatgcctcttctcctggagtgtgcaagagtccgtggtcctgagtatctcacacagatgtggcattttatgtgtgatgctctaattaaggccattggtacagaaccagattcagacgtcctctcagaaataatgcattcttttgcaaagtgcattgaagtaatgggagatggatgccttaataatgaacactttgaagaactgggaggtatattgaaagcaaagcttgaagaacattttaaaaatcaagaattacgacaagttaaaagacaagatgaagactatgatgaacaggtcgaagagtcactacaagatgaggatgataatgatgtttatattctgaccaaagtgtcagatattttacactcaatattcagtagctacaaagaaaaggtgttaccatggtttgaacagctgcttccattaattgtcaacctcatttgtccacatagaccatggccagacagacaatggggattatgcatctttgatgatgtcatagaacactgtagtccagcctcatttaaatacgcagaatatttcttaagaccaatgctccaatatgtatgtgacaacagcccagaagtcaggcaagcagctgcatatggcctgggagtcatggcacagtacggtggagataattatcgccctttttgtacagaagcacttcccctgctggtaagagttattcagtctgcggattctaagaccaaagaaaatgtcaatgctacagagaactgcatctcagcagtagggaaaatcatgaagttcaagcctgactgtgtaaacgttgaagaggtccttccacactggttgtcttggcttccactacatgaagataaagaagaagctgttcagactttcaattatctgtgtgacctgattgaaagtaatcatccaattgttcttggcccaaacaataccaatctgcccaaaatatttagtataattgcggaaggagaaatgcacgaggcaattaaacatgaagatccttgtgccaaacgtctggccaatgtcgttcgccaagtacagacttctggaggactgtggactgagtgcatagcacagctcagtcctgagcagcaggccgccattcaggagctcctgaactctgcgtgaagggccttaatgtcacccaccagaaaactaactccaaataaacgcttaccctttcctttaggtttctttgttttgtttttgagcaaaagagatcggtagtgttgtgtgtaggccattcttctggagagccacaagcaggaagagcagcgctgtgttgcagaatggagtttccatggatttctaccagaccactgaaggagttcctggaagccctgcggtagctagcactgaagactatttttctattggtataacccgcccacctgaaggggaaagggaaatcaaattaatttttctcgttagacataaggaaatttaaggaaaaacagctttaagaacagttactcagcgtagatgtgtgttcacacaaattgctctgcattcagtgttcattgtgaattgggagtgtgagtctttctgtagggtagaaagaagcctcctacccagcaaaccagtagacccaaaagttgaaaaaaactgatgacagacaacaagcatgaagatggcatatttgatgtcactttggttctttttcccagaaggcttatacagtgactcagtcgggaagctttccagcttccagcccttgaatgtgaagtgtcattggcatgtctggcagtagtctctcattcactcctcaataaacaacattgaatacaaaagaggcttgtgtaaaaactcagtactgtctggcttggattcatttcatgtttttaatataagaatgatctaatatttttttaaagtaatagctatcagtaatagctgagtgttttttcccctaatattttccttgtgcaattcagacttaagcatcgagtttttaccatcttccactttaagctaagttatgatacctattccattcacaattggtgttctttttaaggtttgcaaatttcagccaattttgtagctaagattgttctgatcagctcaaaaagatttggcttagtgttttcattgcaaattataattgctgtagagccacacacaacttttgaacttttaattataagtgttatggctaaagttatttactgaaaatttcagtaaaatgtgtgaatgtttctttatgtattaacctcatagcagtaaatgacttgctgttgtttaatttttctaaggcatcttaatagacttctgttgaaaacttcagtgttaacatttttatagtttgtactaaatttaaccgtgatataaaaatgaattttatgcatagatcagaattttaaattaaaggttttttctttaaatgatttgtattactttattaaaactaaatctgaaatggaatagaaaatagaatggattacatacagatggtttccttgttagcagatgcccttcaaatatattttacgtttgcagcacaacaccattgcccggaggcttccgaatctagcaaagcagcatattaaatgactccacctgcgcagtccttgtgttcagtggatgaatacctgtgggctcttgtaatgtgtggtaatatttggagctttatagcctgtattccttgggagaaaaaaatgggaattggagtaaaaagtgtgtcaagacaacccctttctgctttcttatgtagcatctgcaaagccgattcatgtactgatgccaatcagctagagcaatgtaggctttttttaatttaaattattactacactttattactacacttgcagaaaagaaacatgttaaaatcatggcacacctgcagaatttcagatgacagtgtggtcagaagatgttttttgggagaacctagtgtttgctgggcactatgctaagcactttgggagcaagaacctcctaccttccagtttaaacactagtggtattgtcagatgccgttagtatctgagatgtacttacagcagggttctaagagctctgaaagaagcgctctgttagatgcagactggcagcatcctccttgataaaagcagaaaagcaaagaggtaattggagttgaatcaagttaatagggaaggttggtagtaaatgctgttagtgtgacatgattctgaaacccagagctcagaactaactgtgagatgtaccatgaactaacaattctttgaaaggacctgcagaagcatttttaatacctcattctgtctatgcaagatgaaaatccatggagttttttcttggcttttgtaccaaatttaggggtcttgcatgtcagcaagtgatatatattgtttataaatgcaagctatttctggaggggaaaaatgtgtgtggctcttacgttttctgggaattttgtaacaagttacacgcacaagtgttagaaactttggcataactcaatttggagtattttttaaatgctgtatctttaaagaaaagtaaaattgtcttaaatctaattgacacttctgtaatgagaggcaaccttataactctggagttgtagtttgacagaaccatcagtaaagacataagcaaataaatggtcttggtgc

SEQ ID NO: 23650 - protein, 718 aa, Homo sapiens; identical to SEQ ID NO: 23644

SEQ ID NO: 23651 - DNA, 5509 bp, Homo sapiens
gtacttttagtggagatggagtttctccatgttggccaggctggtctcaaactcctaacctcaagtgatccgcccaccctggcctcccaaaatgctgggattacaggcatgagccactgcacccggcctaatttttgtatttttagtagagacggggtttcgccatgttggccaggctggtcttgaactcctgactttaagtgatccacccgcctcaacctcccaaagtgctgggattacaggtgtgagccaccgcgcctggcctgatacatacttttagaatcaagtagtcacgcactttttctgttcatttttctaaaaagtaaatatacaaatgttttgttttttgttttttttgtttgtttgtttctgttttttttttgagacagagtctcgctctttcgcccagaccagagtgcagtggcgcgatctcggctcactgcaagctccgcccccccgggttcacaccattctcctgcctcagcctcccgagtagctgggaatacaggcgcctgccaccgtgcccggctaattttttgtatttttaagtagagacggggtttcaccacgttaaccaggatggtctcgatctcctgaccttgtgatccgcccgcctcagactcccaaagtgctgggattacaggcgcgagccaccgcgcccggcctatacaaatgtttttatattatatatacatatacccttttcaaaaaagttttgttactcttttccaaataagaacttttatacatctccctctaccagaatgacatgtttatagtgtgtaattgctattccatctgtaatttttttcggtagctgactggaaataccggcatgcaggattgatggccttatctgccattggtgaagggtgccaccagcaaatggaaggaattctaaatgagatcgtaaattttgttttactttttctccaggatcctcatccaagagtaaggtatgcagcctgtaatgccgtgggacagatggctacagattttgcacctggtttccaaaagaaatttcatgagaaggtgattgcagctctgctgcagaccatggaagaccaaggcaatcaacgtgtgcaggcccatgcagctgctgccctcattaactttactgaagactgtcccaagtcactacttattccatacttggataatttggtgaaacatctgcattccattatggtactgaagcttcaagagctgattcagaaaggcaccaagttagttttggaacaagttgtgacatccattgcatcagttgccgatactgcagaagaaaaatttgtcccctactatgatttatttatgccatcactgaagcacatcgttgagaatgcggttcaaaaagaactgagacttctgagaggaaaaactattgaatgcattagcctcattggtctggctgttgggaaggaaaaattcatgcaggatgcatcagatgtgatgcagcttttgttaaagacccagacagacttcaatgatatggaagatgatgatcctcagatctcttacatgatctcagcatgggccagaatgtgcaaaatccttggaaaagaatttcagcaataccttccagtggttatggggcctttaatgaagacggcttcaattaagcccgaagtagcccttttagatacccaagacatggagaatatgagtgatgatgatggttgggaatttgtgaaccttggagatcagcaaagctttggtattaaaactgcaggactagaagaaaaatcaactgcttgccagatgttggtttgctatgctaaggagttaaaggaaggctttgtggagtacaccgaacaggttgtcaaactgatggtccctttactgaaattttatttccacgatggtgttcgagtggcagcagcggaatccatgcctcttctcctggagtgtgcaagagtccgtggtcctgagtatctcacacagatgtggcattttatgtgtgatgctctaattaaggccattggtacagaaccagattcagacgtcctctcagaaataatgcattcttttgcaaagtgcattgaagtaatgggagatggatgccttaataatgaacactttgaagaactgggaggtatattgaaagcaaagcttgaagaacattttaaaaatcaagaattacgacaagttaaaagacaagatgaagactatgatgaacaggtcgaagagtcactacaagatgaggatgataatgatgtttatattctgaccaaagtgtcagatattttacactcaatattcagtagctacaaagaaaaggtgttaccatggtttgaacagctgcttccattaattgtcaacctcatttgtccacatagaccatggccagacagacaatggggattatgcatctttgatgatgtcatagaacactgtagtccagcctcatttaaatacgcagaatatttcttaagaccaatgctccaatatgtatgtgacaacagcccagaagtcaggcaagcagctgcatatggcctgggagtcatggcacagtacggtggagataattatcgccctttttgtacagaagcacttcccctgctggtaagagttattcagtctgcggattctaagaccaaagaaaatgtcaatgctacagagaactgcatctcagcagtagggaaaatcatgaagttcaagcctgactgtgtaaacgttgaagaggtccttccacactggttgtcttggcttccactacatgaagataaagaagaagctgttcagactttcaattatctgtgtgacctgattgaaagtaatcatccaattgttcttggcccaaacaataccaatctgcccaaaatatttagtataattgcggaaggagaaatgcacgaggcaattaaacatgaagatccttgtgccaaacgtctggccaatgtcgttcgccaagtacagacttctggaggactgtggactgagtgcatagcacagctcagtcctgagcagcaggccgccattcaggagctcctgaactctgcgtgaagggccttaatgtcacccaccagaaaactaactccaaataaacgcttaccctttcctttaggtttctttgttttgtttttgagcaaaagagatcggtagtgttgtgtgtaggccattcttctggagagccacaagcaggaagagcagcgctgtgttgcagaatggagtttccatggatttctaccagaccactgaaggagttcctggaagccctgcggtagctagcactgaagactatttttctattggtataacccgcccacctgaaggggaaagggaaatcaaattaatttttctcgttagacataaggaaatttaaggaaaaacagctttaagaacagttactcagcgtagatgtgtgttcacacaaattgctctgcattcagtgttcattgtgaattgggagtgtgagtctttctgtagggtagaaagaagcctcctacccagcaaaccagtagacccaaaagttgaaaaaaactgatgacagacaacaagcatgaagatggcatatttgatgtcactttggttctttttcccagaaggcttatacagtgactcagtcgggaagctttccagcttccagcccttgaatgtgaagtgtcattggcatgtctggcagtagtctctcattcactcctcaataaacaacattgaatacaaaagaggcttgtgtaaaaactcagtactgtctggcttggattcatttcatgtttttaatataagaatgatctaatatttttttaaagtaatagctatcagtaatagctgagtgttttttcccctaatattttccttgtgcaattcagacttaagcatcgagtttttaccatcttccactttaagctaagttatgatacctattccattcacaattggtgttctttttaaggtttgcaaatttcagccaattttgtagctaagattgttctgatcagctcaaaaagatttggcttagtgttttcattgcaaattataattgctgtagagccacacacaacttttgaacttttaattataagtgttatggctaaagttatttactgaaaatttcagtaaaatgtgtgaatgtttctttatgtattaacctcatagcagtaaatgacttgctgttgtttaatttttctaaggcatcttaatagacttctgttgaaaacttcagtgttaacatttttatagtttgtactaaatttaaccgtgatataaaaatgaattttatgcatagatcagaattttaaattaaaggttttttctttaaatgatttgtattactttattaaaactaaatctgaaatggaatagaaaatagaatggattacatacagatggtttccttgttagcagatgcccttcaaatatattttacgtttgcagcacaacaccattgcccggaggcttccgaatctagcaaagcagcatattaaatgactccacctgcgcagtccttgtgttcagtggatgaatacctgtgggctcttgtaatgtgtggtaatatttggagctttatagcctgtattccttgggagaaaaaaatgggaattggagtaaaaagtgtgtcaagacaacccctttctgctttcttatgtagcatctgcaaagccgattcatgtactgatgccaatcagctagagcaatgtaggctttttttaatttaaattattactacactttattactacacttgcagaaaagaaacatgttaaaatcatggcacacctgcagaatttcagatgacagtgtggtcagaagatgttttttgggagaacctagtgtttgctgggcactatgctaagcactttgggagcaagaacctcctaccttccagtttaaacactagtggtattgtcagatgccgttagtatctgagatgtacttacagcagggttctaagagctctgaaagaagcgctctgttagatgcagactggcagcatcctccttgataaaagcagaaaagcaaagaggtaattggagttgaatcaagttaatagggaaggttggtagtaaatgctgttagtgtgacatgattctgaaacccagagctcagaactaactgtgagatgtaccatgaactaacaattctttgaaaggacctgcagaagcatttttaatacctcattctgtctatgcaagatgaaaatccatggagttttttcttggcttttgtaccaaatttaggggtcttgcatgtcagcaagtgatatatattgtttataaatgcaagctatttctggaggggaaaaatgtgtgtggctcttacgttttctgggaattttgtaacaagttacacgcacaagtgttagaaactttggcataactcaatttggagtattttttaaatgctgtatctttaaagaaaagtaaaattgtcttaaatctaattgacacttctgtaatgagaggcaaccttataactctggagttgtagtttgacagaaccatcagtaaagacataagcaaataaatggtcttggtgcacctggtctgataataaataaggggggtgctta

SEQ ID NO: 23652 - protein, 718 aa, Homo sapiens; identical to SEQ ID NO: 23644

SEQ ID NO: 23653 - DNA, 3265 bp, Homo sapiens
cactacgagaaggtcagcggcgactacgggcacccggtgtacatcgtccaggagatgcccccgcagagcccggcgaacatttactacaaggtctgagagggaccctggtggtacctgtgctttcccagaggacacctaatgtcccgatgcctcccttgagggtttgagagcccgcgtgctggagaattgactgaagcacagcaccgggggagagggacactcctcctcgaagccatgtgctgcggtcactcaggcctctgcagaagccaagggaagacagtggtttgtggacgagagggctgtgagcatcctggcaggtgccccaggatgccacgcctggaagggccggcttctgcctggggtgcatttcccccgcagtgcataccggacttgtcacacggacctcgggctagttaaggtgtgcaaagatctctagagtttagtccttactgtctcactcgttctgttacccagggctctgcagcacctcacctgagacctccactccacatctgcatcactcatggaacactcatgtctggagtcccctcctccagccgctggcaacaacagcttcagtccatgggtaatccgttcatagaaattgtgtttgctaacaaggtgccctttagccagatgctaggctgtctgcgaagaaggctaggagttcatagaagggagtggggctggggaaagggctggctgcaattgcagctcactgctgctgcctctgaaacagaaagttggaaaggaaaaaagaaaaaagcaattaggtagcacagcactttggttttgctgagatcgaagaggccagtaggagacacgacagcacacacagtggattccagtgcatggggaggcactcgctgttatcaaatagcgatgtgcaggaagaaaagcccctcttcattccggggaacaaagacgggtattgttgggaaaggaacaggcttggagggaagggagaaagtaggccgctgatgatatattcgggcaggactgttgtggtactggcaataagatacacagctccgagctgtaggagagtcggtctgctttggatgattttttaagcagactcagctgctatacttatcacattttattaaacacagggaaagcatttaggagaatagcagagagccaaatctgacctaaaagttgaaaagccaaaggtcaaacaggctgtaattccatcatcatcgttgttattaaagaatccttatctataaaaggtaggtcagatccccctccccccaggttcctccttcccctcccgattgagccttacgacactttggtttatgcggtgctgtccgggtgccagggctgcagggtcggtactgatggaggctgcagcgcccggtgctctgtgtcaaggtgaagcacatacggcagacctcttagagtccttaagacggaagtaaattatgatgtccagggggagaaggaagataggacgtatttataataggtatatagaacacaagggatataaaatgaaagatttttactaatatatattttaaggttgcacacagtacacaccagaagatgtgaaattcatttgtggcaattaagtggtcccaatgctcagcgcttaaaaaaacaaattggacagctacttctgggaaaaacaacatcattccaaaaagaacaataatgagagcaaatgcaaaaataaccaagtcctccgaaggcatctcacggaaccgtagactaggaagtacgagccccacagagcaggaagccgatgtgactgcatcatatatttaacaatgacaagatgttccggcgtttatttctgcgttgggttttcccttgccttatgggctgaagtgttctctagaatccagcaggtcacactgggggcttcaggtgacgatttagctgtggctccctcctcctgtcctcccccgcaccccctcccttctgggaaacaagaagagtaaacaggaaacctactttttatgtgctatgcaaaatagacatctttaacatagtcctgttactatggtaacactttgctttctgaattggaagggaaaaaaaatgtagcgacagcattttaaggttctcagacctccagtgagtacctgcaaaaatgagttgtcacagaaattatgatcctctatttcctgaacctggaaatgatgttggtccaaagtgcgtgtgtgtatgtgtgagtgggtgcgtggtatacatgtgtacatatatgtataatatatatctacaatatatattatatatatctatatcatatttctgtggagggttgccatggtaaccagccacagtacatatgtaattctttccatcaccccaacctctcctttctgtgcattcatgcaagagtttcttgtaagccatcagaagttacttttaggatgggggagaggggcgagaaggggaaaaatgggaaatagtctgattttaatgaaatcaaatgtatgtatcatcagttggctacgttttggttctatgctaaactgtgaaaaatcagatgaattgataaaagagttccctgcaaccaattgaaaagtgttctgtgcgtctgttttgtgtctggtgcagaatatgacaatctaccaactgtccctttgtttgaagttggtttagctttggaaagttactgtaaatgccttgcttgtatgatcgtccctggtcacccgactttggaatttgcaccatcatgtttcagtgaagatgctgtaaataggttcagattttactgtctatggatttggggtgttacagtagccttattcacctttttaataaaaatacacatgaaaacaagaaagaaatggcttttcttacccagattgtgtacatagagcaatgttggttttttataaagtctaagcaagatgttttgtataaaatctgaattttgcaatgtatttagctacagcttgtttaacggcagtgtcattcccctttgcactgtaatgaggaaaaaatggtataaaaggttgccaaattgctgcatatttgtgccgtaattatgtaccatgaatatttatttaaaatttcgttgtccaatttgtaagtaacacagtattatgcctgagttataaatatttttttctttctttgttttattttaatagcctgtcataggttttaaatctgctttagtttcacattgcagttagccccagaaaatgaaatccgtgaagtcacattccacatctgtttcaaactgaatttgttcttaaaaaaataaaatatttttttcctatggaaaaagtgccttcaaagt

SEQ ID NO: 23654 - protein, 85 aa, Homo sapiens [sequence omitted]

SEQ ID NO: 23655 - DNA, 5026 bp, Homo sapiens
tgacagcgcggcggccgcgctgactctcctcggcggggaccgcggcgccggccggagcgaggagctgcgcacgcagcgggtcccggcgccctccccgcacacaaaggcccgcgcgcgtccggagcccgcggcggggaccgagctccctctttcctgccctgggggccgggagccgcgcggactgagaaggctcctgcgcgcccggaggcgccctactccgctccgtgctccgggacatggaaccgcgccgacgcggcgcccgcgcgctcgggccgctgcccgctgcactggatctatagtcacaggcggccccgctcggggcgcagcgcccgccgcccgcgccggtcgtctccgctccgggtctttgtgtcccagcccgcacccgccccgcgcccacccgccagccgcggccggcccggcaccctggagccgcacgggagtcggccgtccgagctgcgtccggcgcggcgccccggaaccccgagtccgccgcgccgccgcgccccgcgcgtgcgctcccgccccgcgccctgagggccccggagagcgagcgcacctggcccggcgaccgctggagctgcgcagcgcgcctcggagctgcctgcgggcgcacgccgtcttccccgccagtctgccccggaggattgggggtcccagcctgcgtcccgtcagtcccttcttggcccggagtgcgcggagctgggagtggcttcgccatggctgtgagaagggactccgtgtggaagtactgctggggtgttttgatggttttatgcagaactgcgatttccaaatcgatagttttagagcctatctattggaattcctcgaactccaaatttctacctggacaaggactggtactatacccacagataggagacaaattggatattatttgccccaaagtggactctaaaactgttggccagtatgaatattataaagtttatatggttgataaagaccaagcagacagatgcactattaagaaggaaaatacccctctcctcaactgtgccaaaccagaccaagatatcaaattcaccatcaagtttcaagaattcagccctaacctctggggtctagaatttcagaagaacaaagattattacattatatctacatcaaatgggtctttggagggcctggataaccaggagggaggggtgtgccagacaagagccatgaagatcctcatgaaagttggacaagatgcaagttctgctggatcaaccaggaataaagatccaacaagacgtccagaactagaagctggtacaaatggaagaagttcgacaacaagtccctttgtaaaaccaaatccaggttctagcacagacggcaacagcgccggacattcggggaacaacatcctcggttccgaagtggccttatttgcagggattgcttcaggatgcatcatcttcatcgtcatcatcatcacgctggtggtcctcttgctgaagtaccggaggagacacaggaagcactcgccgcagcacacgaccacgctgtcgctcagcacactggccacacccaagcgcagcggcaacaacaacggctcagagcccagtgacattatcatcccgctaaggactgcggacagcgtcttctgccctcactacgagaaggtcagcggcgactacgggcacccggtgtacatcgtccaggagatgcccccgcagagcccggcgaacatttactacaaggtctgagagggaccctggtggtacctgtgctttcccagaggacacctaatgtcccgatgcctcccttgagggtttgagagcccgcgtgctggagaattgactgaagcacagcaccgggggagagggacactcctcctcggaagagcccgtcgcgctggacagcttacctagtcttgtagcattcggccttggtgaacacacacgctccctggaagctggaagactgtgcagaagacgcccattcggactgctgtgccgcgtcccacgtctcctcctcgaagccatgtgctgcggtcactcaggcctctgcagaagccaagggaagacagtggtttgtggacgagagggctgtgagcatcctggcaggtgccccaggatgccacgcctggaagggccggcttctgcctggggtgcatttcccccgcagtgcataccggacttgtcacacggacctcgggctagttaaggtgtgcaaagatctctagagtttagtccttactgtctcactcgttctgttacccagggctctgcagcacctcacctgagacctccactccacatctgcatcactcatggaacactcatgtctggagtcccctcctccagccgctggcaacaacagcttcagtccatgggtaatccgttcatagaaattgtgtttgctaacaaggtgccctttagccagatgctaggctgtctgcgaagaaggctaggagttcatagaagggagtggggctggggaaagggctggctgcaattgcagctcactgctgctgcctctgaaacagaaagttggaaaggaaaaaagaaaaaagcaattaggtagcacagcactttggttttgctgagatcgaagaggccagtaggagacacgacagcacacacagtggattccagtgcatggggaggcactcgctgttatcaaatagcgatgtgcaggaagaaaagcccctcttcattccggggaacaaagacgggtattgttgggaaaggaacaggcttggagggaagggagaaagtaggccgctgatgatatattcgggcaggactgttgtggtactggcaataagatacacagctccgagctgtaggagagtcggtctgctttggatgattttttaagcagactcagctgctatacttatcacattttattaaacacagggaaagcatttaggagaatagcagagagccaaatctgacctaaaagttgaaaagccaaaggtcaaacaggctgtaattccatcatcatcgttgttattaaagaatccttatctataaaaggtaggtcagatccccctccccccaggttcctccttcccctcccgattgagccttacgacactttggtttatgcggtgctgtccgggtgccagggctgcagggtcggtactgatggaggctgcagcgcccggtgctctgtgtcaaggtgaagcacatacggcagacctcttagagtccttaagacggaagtaaattatgatgtccagggggagaaggaagataggacgtatttataataggtatatagaacacaagggatataaaatgaaagatttttactaatatatattttaaggttgcacacagtacacaccagaagatgtgaaattcatttgtggcaattaagtggtcccaatgctcagcgcttaaaaaaacaaattggacagctacttctgggaaaaacaacatcattccaaaaagaacaataatgagagcaaatgcaaaaataaccaagtcctccgaaggcatctcacggaaccgtagactaggaagtacgagccccacagagcaggaagccgatgtgactgcatcatatatttaacaatgacaagatgttccggcgtttatttctgcgttgggttttcccttgccttatgggctgaagtgttctctagaatccagcaggtcacactgggggcttcaggtgacgatttagctgtggctccctcctcctgtcctcccccgcaccccctcccttctgggaaacaagaagagtaaacaggaaacctactttttatgtgctatgcaaaatagacatctttaacatagtcctgttactatggtaacactttgctttctgaattggaagggaaaaaaaatgtagcgacagcattttaaggttctcagacctccagtgagtacctgcaaaaatgagttgtcacagaaattatgatcctctatttcctgaacctggaaatgatgttggtccaaagtgcgtgtgtgtatgtgtgagtgggtgcgtggtatacatgtgtacatatatgtataatatatatctacaatatatattatatatatctatatcatatttctgtggagggttgccatggtaaccagccacagtacatatgtaattctttccatcaccccaacctctcctttctgtgcattcatgcaagagtttcttgtaagccatcagaagttacttttaggatgggggagaggggcgagaaggggaaaaatgggaaatagtctgattttaatgaaatcaaatgtatgtatcatcagttggctacgttttggttctatgctaaactgtgaaaaatcagatgaattgataaaagagttccctgcaaccaattgaaaagtgttctgtgcgtctgttttgtgtctggtgcagaatatgacaatctaccaactgtccctttgtttgaagttggtttagctttggaaagttactgtaaatgccttgcttgtatgatcgtccctggtcacccgactttggaatttgcaccatcatgtttcagtgaagatgctgtaaataggttcagattttactgtctatggatttggggtgttacagtagccttattcacctttttaataaaaatacacatgaaaacaagaaagaaatggcttttcttacccagattgtgtacatagagcaatgttggttttttataaagtctaagcaagatgttttgtataaaatctgaattttgcaatgtatttagctacagcttgtttaacggcagtgtcattcccctttgcactgtaatgaggaaaaaatggtataaaaggttgccaaattgctgcatatttgtgccgtaattatgtaccatgaatatttatttaaaatttcgttgtccaatttgtaagtaacacagtattatgcctgagttataaatatttttttctttctttgttttattttaatagcctgtcataggttttaaatctgctttagtttcacattgcagttagccccagaaaatgaaatccgtgaagtcacattccacatctgtttcaaactgaatttgttcttaaaaaaataaaatatttttttcctatggaaaaagtgccttcaaagt

SEQ ID NO: 23656 - protein, 333 aa, Homo sapiens; identical to SEQ ID NO: 3141

SEQ ID NO: 23657 - DNA, 467 bp, Homo sapiens
agcagtccgaatgggcgtcttctgcacagtcttccagcttccagggagcgtgtgtgttcaccaaggccgaatgctacaagactagggaaacttgtagatcaatgagctttgctgtagggtgggtgagaaattggcttctatattttcccaagtatctgaaacgccttcctctgcctacgccatcgtggaagtctttcaactctgctgaaagtctcaactggacttcctggcaaacttcttagccctgagtcctccacccagcccttatgacagtcccccaaagcaacattcaaatagcctctcgtagtttcaaacttgagaccctcaattctgtattaagaaagattcatttatcccaggctaccatatgcttttgcatggtaaatcgtaactctaaggagagctctgatggccagagtagttcagtaactgcaatgaacctgttagtgtggtatgaagagtttcca

SEQ ID NO: 23658 - protein, 66 aa, Homo sapiens
MTVPQSNIQIASRSFKLETLNSVLRKIHLSQATICFCMVNRNSKESSDGQSSSVTAMNLLVWYEEF

SEQ ID NO: 23659 - DNA, 4093 bp, Homo sapiens
agtaatttgctactgaagctttatggcttgtttgcactgattactccaggatccaaaaacttggtgaaagtcactgaaacactcaaggcaaattactttacagccctgagtgtctgtcaccatagtttgcataatgaatatgaatcccattggtgtgtgatgtaggaaatcctgtagttgtattttcttgaactgaaatatttgactcaaaataattaagactcattgtcatttttcatcttggcattattgtggacaagttgacatattaaatctctttgctttctggtaagcttagcttttaaaatgcattttcccttgtcctgtctttaactagatatacatgcttatatttatagtgggtttcacagactataaaattgaatgtatgaaatttttatttatatcagtgcttttaataatgaagatatttttggagtaatggtgctgtcttgtagcgagttattaatcatagtaagatttttttctcttcatttgctttttttgtttcatattaacaattttttttttacacggacacaaccctctgacagtctttccaaatattaaaatcatttgaatatgtatgctgtgatctgaacactgctcaagccatcaagcagtcttcatacagtttgcattataaaatctcattaaattctccaagaaaaaataagttgaagaattttatttcctgaccatgcatcccctggatttctgagtttcagttcagattgtagatgacaatataagctgccttccgaaattgtcaacatctgaatgttaagtccattttccccatggaagaagcccgtagttccatgaagtatggattaccatttgtatttttcactaacagtaaatgtatttttcttattaattgtttgccttaggaatgatgaattacattttttgttccttcttaccataaacatctgcattcctcagctcagccttccttgtatgttgtttctttataaatggttgagctgctgatgcaggtattgccaagctaacagtacaaatcattttaaagaggaagctggcgcgtatggcagccgaggagcacactctgcaggacactggacaagacagtaaatattcaacttttaatgctgattaaaggagtataggtaaagaatacgtaggtatacataattggtgagacaaatattcactttatttatattttatatattatttttttaatttggtaaatactatccagttttgtagttgtccttgttgatttgtgtgatattaaagtattagtaataattgccaggaaactatcattagggagggtttagttggttgctgtttggactgggagggatgatttaaatttagtgctagaaaccaattttagtgactgcacagtttatcatttgtcagacagaaggtagctataaagctaccctgtaagtcatatcaaaaaagttcagaggaagattagtaaatatttatcaataaaaataaacattttgtttttctaatatcttaacatatcctcccctttaggaggaagaacgtgcaaaacgtgaggagctagagcgaatactggaagagaataaccgaaaaattgcagaagcacaagccaaactggccgaagaacagttgagaattgttgaagaacaaagaaagattcatgaggaaaggatgaaactagaacaagaacgacaacgtcaacaaaaagaagaacaaaaaattatcctgggcaaggggaagtccaggccaaaactgtccttctcattaaaaacccaggattaaattgcaaactctgaactttttacaaagaaaaatggaaaaactttgtatggtagcttcatgttgaagtggttttttgtttttgtttttgtttttttaatttgtaaaatctggaaagttagcttgttctaataggggctatgctctgcaattccctttttttttttttttttccttccactaagtcaaatccttatcagatcattgttgtattctaaggagtgacgtatttttcacctgtttggattctatattagtggtctgaggaagagcagatcacattgtaaaactatggatggtctgataaggcttttactgaccccactgacttcagagttatactctgtttgctacatcataatgctggttttgctgactttttgtttttttatatatttataaaaaaagaaaaagttggtgattgcattgggaaattcccagggtattactggacctatgtggtgtattgttaaaccagtgtccttgtgatactgttgctcttgatgttcctgatacaggtaaggaaacagttggtcaactctgatacaaagtatatatacagttcagtattgtctctgttcattttgtttttatttcattgacaaaatcaaaccagcattccccattgtgtaaataaatgattttgctgaataaagtaaagtcttaaattcatatgttgaagcaattttttttaatgttatgttaagtcttaaagagggtggttcactttttgatggtcaaccatttagaagtcttagaactatatttcctcttgtttatacttttaacatagggtttatatgtacattaaatatacttgtgaattagtatttaatggctatttttacaaatatcaactttatgctgatagagcaaatggcatcagtgttacctttaagaaagactaacaacatccagaagatttaaattctcaaacctgtgcctctgttttaggatataagtattatcacaaagtatacttaataaaggctagaaaaatgcttttaaattatggaatctgagatcgttttcagagtgggccatcagaaagaacttagctttatactgtcaaaaaaaggctaagatggtcgagtcattttcattgtgtagtgtacttgcacgtttatttttaggacaaacacatttgaactttatgaattttttttttttttttgcatgtgaaatcttatgaatggctttcattttatacactagaatctgcctcatttactcttaacatatgtttaagtatactggtattaaaacattcaagaaaaggatattgatctaaaatgctacctgagatgcataaacatgtcatcaagtagagaaaatatttttatttttgcccaatattttttagacagtttgattattcttaaaaattgaaaacataagctaaagagatgactaaatggtagattattttgtgtgtgcatgctaggaaaaatgctgttgctttagttttgagctcttcaatgagtctaattgtggtaaggaacaatataaaatcagtttaaagatctttaaaggtagaattttaaataggcatgaaatatagtgagaacttttagtaaacatactacttactctaaaatcaaacattttattttcctaaagaatataggttgccaaaaaatattttatctctaaatataggttagctgtaattatttcatgaatttttttttttttcaatgtaactttttttggtgaagattcatggttcctaagttctgtattcaagtttttggaaatgtttatttaaaaactgttctatacaagtgttcaaaacattgtatctaaagagagtagcctggacttaaaatatttgaaatcagcttatgcgtgccttttaattttttttttaagtttcttactgccacatatggtgtgaagtgacagtaagttgcttaatgacatcctgcagtatctgcttgcttttggagactccagtgagatgttgaaattgttcctgtgcttggtaactactttcctctgccaggctatgggaaagaggatgtaattgtgaataatatacaccatccagtctttaatgtgctgcaacaatgtagtaatttgtttttttcatttgttcccactgcctttgtgtacatagaaaacttaaaaatttcccccagtctattagaagttaagatgttccctaatttattaaatatgcctttattcacaatttgtttttttaggttattcttaatgcattatagaattaagtatgactttgtttatttttattacagtatgtagttattgacatattgtggtttgcagaattatcaattgtataaactaaacctttaaatta

SEQ ID NO: 23660 - protein, 61 aa, Homo sapiens
MYEIFIYISAFNNEDIFGVMVLSCSELLIIVRFFSLHLLFLFHINNFFFTRTQPSDSLSKY

SEQ ID NO: 23661 - DNA, 3666 bp, Homo sapiens
agtaatttgctactgaagctttatggcttgtttgcactgattactccaggatccaaaaacttggtgaaagtcactgaaacactcaaggcaaattactttacagccctgagtgtctgtcaccatagtttgcataatgaatatgaatcccattggtgtgtgatgtaggaaatcctgtagttgtattttcttgaactgaaatatttgactcaaaataattaagactcattgtcatttttcatcttggcattattgtggacaagttgacatattaaatctctttgctttctggtaagcttagcttttaaaatgcattttcccttgtcctgtctttaactagatatacatgcttatatttatagtgggtttcacagactataaaattgaatgtatgaaatttttatttatatcagtgcttttaataatgaagatatttttggagtaatggtgctgtcttgtagcgagttattaatcatagtaagatttttttctcttcatttgctttttttgtttcatattaacaattttttttttacacggacacaaccctctgacagtctttccaaatattaaaatcatttgaatatgtatgctgtgatctgaacactgctcaagccatcaagcagtcttcatacagtttgcattataaaatctcattaaattctccaagaaaaaataagttgaagaattttatttcctgaccatgcatcccctggatttctgagtttcagttcagattgtagatgacaatataagctgccttccgaaattgtcaacatctgaatgttaagtccattttccccatggaagaagcccgtagttccatgaagtatggattaccatttgtatttttcactaacagtaaatgtatttttcttattaattgtttgccttaggaatgatgaattacattttttgttccttcttaccataaacatctgcattcctcagctcagccttccttgtatgttgtttctttataaatggttgagctgctgatgcaggtattgccaagctaacagtacaaatcattttaaagaggaagctggcgcgtatggcagccgaggagcacactctgcaggacactggacaagacagaggaagaacgtgcaaaacgtgaggagctagagcgaatactggaagagaataaccgaaaaattgcagaagcacaagccaaactggccgaagaacagttgagaattgttgaagaacaaagaaagattcatgaggaaaggatgaaactagaacaagaacgacaacgtcaacaaaaagaagaacaaaaaattatcctgggcaaggggaagtccaggccaaaactgtccttctcattaaaaacccaggattaaattgcaaactctgaactttttacaaagaaaaatggaaaaactttgtatggtagcttcatgttgaagtggttttttgtttttgtttttgtttttttaatttgtaaaatctggaaagttagcttgttctaataggggctatgctctgcaattccctttttttttttttttttccttccactaagtcaaatccttatcagatcattgttgtattctaaggagtgacgtatttttcacctgtttggattctatattagtggtctgaggaagagcagatcacattgtaaaactatggatggtctgataaggcttttactgaccccactgacttcagagttatactctgtttgctacatcataatgctggttttgctgactttttgtttttttatatatttataaaaaaagaaaaagttggtgattgcattgggaaattcccagggtattactggacctatgtggtgtattgttaaaccagtgtccttgtgatactgttgctcttgatgttcctgatacaggtaaggaaacagttggtcaactctgatacaaagtatatatacagttcagtattgtctctgttcattttgtttttatttcattgacaaaatcaaaccagcattccccattgtgtaaataaatgattttgctgaataaagtaaagtcttaaattcatatgttgaagcaattttttttaatgttatgttaagtcttaaagagggtggttcactttttgatggtcaaccatttagaagtcttagaactatatttcctcttgtttatacttttaacatagggtttatatgtacattaaatatacttgtgaattagtatttaatggctatttttacaaatatcaactttatgctgatagagcaaatggcatcagtgttacctttaagaaagactaacaacatccagaagatttaaattctcaaacctgtgcctctgttttaggatataagtattatcacaaagtatacttaataaaggctagaaaaatgcttttaaattatggaatctgagatcgttttcagagtgggccatcagaaagaacttagctttatactgtcaaaaaaaggctaagatggtcgagtcattttcattgtgtagtgtacttgcacgtttatttttaggacaaacacatttgaactttatgaattttttttttttttttgcatgtgaaatcttatgaatggctttcattttatacactagaatctgcctcatttactcttaacatatgtttaagtatactggtattaaaacattcaagaaaaggatattgatctaaaatgctacctgagatgcataaacatgtcatcaagtagagaaaatatttttatttttgcccaatattttttagacagtttgattattcttaaaaattgaaaacataagctaaagagatgactaaatggtagattattttgtgtgtgcatgctaggaaaaatgctgttgctttagttttgagctcttcaatgagtctaattgtggtaaggaacaatataaaatcagtttaaagatctttaaaggtagaattttaaataggcatgaaatatagtgagaacttttagtaaacatactacttactctaaaatcaaacattttattttcctaaagaatataggttgccaaaaaatattttatctctaaatataggttagctgtaattatttcatgaatttttttttttttcaatgtaactttttttggtgaagattcatggttcctaagttctgtattcaagtttttggaaatgtttatttaaaaactgttctatacaagtgttcaaaacattgtatctaaagagagtagcctggacttaaaatatttgaaatcagcttatgcgtgccttttaattttttttttaagtttcttactgccacatatggtgtgaagtgacagtaagttgcttaatgacatcctgcagtatctgcttgcttttggagactccagtgagatgttgaaattgttcctgtgcttggtaactactttcctctgccaggctatgggaaagaggatgtaattgtgaataatatacaccatccagtctttaatgtgctgcaacaatgtagtaatttgtttttttcatttgttcccactgcctttgtgtacatagaaaacttaaaaatttcccccagtctattagaagttaagatgttccctaatttattaaatatgcctttattcacaatttgtttttttaggttattcttaatgcattatagaattaagtatgactttgtttatttttattacagtatgtagttattgacatattgtggtttgcagaattatcaattgtataaactaaacctttaaatta

SEQ ID NO: 23662 - protein, 61 aa, Homo sapiens; identical to SEQ ID NO: 23660

SEQ ID NO: 23663 - DNA, 2976 bp, Homo sapiens
gactccttagcagcggagcagcccacggcctgcctgtactgcctgttacatgggccctctggtttgatgtcatcagtggaaatagaagcagggaactgacattctgatttggcatttgcttcgacagcaagaaatagaagaaaaactcatcgaggaagaaacagcacgaagagtagaagaattggtagcaaaaagggtggaggaagaactggagaaaaggaaggatgaaattgaacgagaagttctccgaagggtggaggaagccaaacgcatcatggaaaagcagttgctcgaagaactcgagcgacagagacaagctgagcttgccgcacaaaaagctagagagaggaagctggcgcgtatggcagccgaggagcacactctgcaggacactggacaagacagaggaagaacgtgcaaaacgtgaggagctagagcgaatactggaagagaataaccgaaaaattgcagaagcacaagccaaactggccgaagaacagttgagaattgttgaagaacaaagaaagattcatgaggaaaggatgaaactagaacaagaacgacaacgtcaacaaaaagaagaacaaaaaattatcctgggcaaggggaagtccaggccaaaactgtccttctcattaaaaacccaggattaaattgcaaactctgaactttttacaaagaaaaatggaaaaactttgtatggtagcttcatgttgaagtggttttttgtttttgtttttgtttttttaatttgtaaaatctggaaagttagcttgttctaataggggctatgctctgcaattccctttttttttttttttttccttccactaagtcaaatccttatcagatcattgttgtattctaaggagtgacgtatttttcacctgtttggattctatattagtggtctgaggaagagcagatcacattgtaaaactatggatggtctgataaggcttttactgaccccactgacttcagagttatactctgtttgctacatcataatgctggttttgctgactttttgtttttttatatatttataaaaaaagaaaaagttggtgattgcattgggaaattcccagggtattactggacctatgtggtgtattgttaaaccagtgtccttgtgatactgttgctcttgatgttcctgatacaggtaaggaaacagttggtcaactctgatacaaagtatatatacagttcagtattgtctctgttcattttgtttttatttcattgacaaaatcaaaccagcattccccattgtgtaaataaatgattttgctgaataaagtaaagtcttaaattcatatgttgaagcaattttttttaatgttatgttaagtcttaaagagggtggttcactttttgatggtcaaccatttagaagtcttagaactatatttcctcttgtttatacttttaacatagggtttatatgtacattaaatatacttgtgaattagtatttaatggctatttttacaaatatcaactttatgctgatagagcaaatggcatcagtgttacctttaagaaagactaacaacatccagaagatttaaattctcaaacctgtgcctctgttttaggatataagtattatcacaaagtatacttaataaaggctagaaaaatgcttttaaattatggaatctgagatcgttttcagagtgggccatcagaaagaacttagctttatactgtcaaaaaaaggctaagatggtcgagtcattttcattgtgtagtgtacttgcacgtttatttttaggacaaacacatttgaactttatgaattttttttttttttttgcatgtgaaatcttatgaatggctttcattttatacactagaatctgcctcatttactcttaacatatgtttaagtatactggtattaaaacattcaagaaaaggatattgatctaaaatgctacctgagatgcataaacatgtcatcaagtagagaaaatatttttatttttgcccaatattttttagacagtttgattattcttaaaaattgaaaacataagctaaagagatgactaaatggtagattattttgtgtgtgcatgctaggaaaaatgctgttgctttagttttgagctcttcaatgagtctaattgtggtaaggaacaatataaaatcagtttaaagatctttaaaggtagaattttaaataggcatgaaatatagtgagaacttttagtaaacatactacttactctaaaatcaaacattttattttcctaaagaatataggttgccaaaaaatattttatctctaaatataggttagctgtaattatttcatgaatttttttttttttcaatgtaactttttttggtgaagattcatggttcctaagttctgtattcaagtttttggaaatgtttatttaaaaactgttctatacaagtgttcaaaacattgtatctaaagagagtagcctggacttaaaatatttgaaatcagcttatgcgtgccttttaattttttttttaagtttcttactgccacatatggtgtgaagtgacagtaagttgcttaatgacatcctgcagtatctgcttgcttttggagactccagtgagatgttgaaattgttcctgtgcttggtaactactttcctctgccaggctatgggaaagaggatgtaattgtgaataatatacaccatccagtctttaatgtgctgcaacaatgtagtaatttgtttttttcatttgttcccactgcctttgtgtacatagaaaacttaaaaatttcccccagtctattagaagttaagatgttccctaatttattaaatatgcctttattcacaatttgtttttttaggttattcttaatgcattatagaattaagtatgactttgtttatttttattacagtatgtagttattgacatattgtggtttgcagaattatcaattgtataaactaaacctttaaatta

SEQ ID NO: 23664 - protein, 142 aa, Homo sapiens
MKLNEKFSEGWRKPNASWKSSCSKNSSDRDKLSLPHKKLERGSWRVWQPRSTLCRTLDKTEEERAKREELERILEENNRKIAEAQAKLAEEQLRIVEEQRKIHEERMKLEQERQRQQKEEQKIILGKGKSRPKLSFSLKTQD

SEQ ID NO: 23665 - DNA, 3448 bp, Homo sapiens
attgtgggaagggcggccggtgcagccgcagctgccatcttaggggcgcctggcgctacgggtttctcgttggaggcggccttcgtggcagctgtagacgccgggaaaaggcataaagtccgttggccgacacctttctttcctccggcctcggtagaaccgccagcccgcgtccgaaggcggaggcgaggggaactggccgcgtgaggggcctgaggcgagcggttagagcgtctcccggaaggatgggccggtctcggagccggagctcgtcccgctccaagcacaccaagagcagcaagcacaacaagaagcgcagccggtcccggtcgcgatcccgggacaaggagcgcgtgcggaagcgttccaaatctcgggaaagtaaacggaaccggcggcgggagtcgcggtcccgttcgcgctccaccaacacggccgtgtcccggcgcgagcgggaccgggagcgcgcctcgtccccgcccgaccgcatcgacatcttcgggcgcacggtgagcaagcgcagcagcctggacgagaagcagaagcgagaggaggaggagaagaaagcggagttcgagcggcagcgaaaaattcgacagcaagaaatagaagaaaaactcatcgaggaagaaacagcacgaagagtagaagaattggtagcaaaaagggtggaggaagaactggagaaaaggaaggatgaaattgaacgagaagttctccgaagggtggaggaagccaaacgcatcatggaaaagcagttgctcgaagaactcgagcgacagagacaagctgagcttgccgcacaaaaagctagagagaggaagctggcgcgtatggcagccgaggagcacactctgcaggacactggacaagacagaggaagaacgtgcaaaacgtgaggagctagagcgaatactggaagagaataaccgaaaaattgcagaagcacaagccaaactggccgaagaacagttgagaattgttgaagaacaaagaaagattcatgaggaaaggatgaaactagaacaagaacgacaacgtcaacaaaaagaagaacaaaaaattatcctgggcaaggggaagtccaggccaaaactgtccttctcattaaaaacccaggattaaattgcaaactctgaactttttacaaagaaaaatggaaaaactttgtatggtagcttcatgttgaagtggttttttgtttttgtttttgtttttttaatttgtaaaatctggaaagttagcttgttctaataggggctatgctctgcaattccctttttttttttttttttccttccactaagtcaaatccttatcagatcattgttgtattctaaggagtgacgtatttttcacctgtttggattctatattagtggtctgaggaagagcagatcacattgtaaaactatggatggtctgataaggcttttactgaccccactgacttcagagttatactctgtttgctacatcataatgctggttttgctgactttttgtttttttatatatttataaaaaaagaaaaagttggtgattgcattgggaaattcccagggtattactggacctatgtggtgtattgttaaaccagtgtccttgtgatactgttgctcttgatgttcctgatacaggtaaggaaacagttggtcaactctgatacaaagtatatatacagttcagtattgtctctgttcattttgtttttatttcattgacaaaatcaaaccagcattccccattgtgtaaataaatgattttgctgaataaagtaaagtcttaaattcatatgttgaagcaattttttttaatgttatgttaagtcttaaagagggtggttcactttttgatggtcaaccatttagaagtcttagaactatatttcctcttgtttatacttttaacatagggtttatatgtacattaaatatacttgtgaattagtatttaatggctatttttacaaatatcaactttatgctgatagagcaaatggcatcagtgttacctttaagaaagactaacaacatccagaagatttaaattctcaaacctgtgcctctgttttaggatataagtattatcacaaagtatacttaataaaggctagaaaaatgcttttaaattatggaatctgagatcgttttcagagtgggccatcagaaagaacttagctttatactgtcaaaaaaaggctaagatggtcgagtcattttcattgtgtagtgtacttgcacgtttatttttaggacaaacacatttgaactttatgaattttttttttttttttgcatgtgaaatcttatgaatggctttcattttatacactagaatctgcctcatttactcttaacatatgtttaagtatactggtattaaaacattcaagaaaaggatattgatctaaaatgctacctgagatgcataaacatgtcatcaagtagagaaaatatttttatttttgcccaatattttttagacagtttgattattcttaaaaattgaaaacataagctaaagagatgactaaatggtagattattttgtgtgtgcatgctaggaaaaatgctgttgctttagttttgagctcttcaatgagtctaattgtggtaaggaacaatataaaatcagtttaaagatctttaaaggtagaattttaaataggcatgaaatatagtgagaacttttagtaaacatactacttactctaaaatcaaacattttattttcctaaagaatataggttgccaaaaaatattttatctctaaatataggttagctgtaattatttcatgaatttttttttttttcaatgtaactttttttggtgaagattcatggttcctaagttctgtattcaagtttttggaaatgtttatttaaaaactgttctatacaagtgttcaaaacattgtatctaaagagagtagcctggacttaaaatatttgaaatcagcttatgcgtgccttttaattttttttttaagtttcttactgccacatatggtgtgaagtgacagtaagttgcttaatgacatcctgcagtatctgcttgcttttggagactccagtgagatgttgaaattgttcctgtgcttggtaactactttcctctgccaggctatgggaaagaggatgtaattgtgaataatatacaccatccagtctttaatgtgctgcaacaatgtagtaatttgtttttttcatttgttcccactgcctttgtgtacatagaaaacttaaaaatttcccccagtctattagaagttaagatgttccctaatttattaaatatgcctttattcacaatttgtttttttaggttattcttaatgcattatagaattaagtatgactttgtttatttttattacagtatgtagttattgacatattgtggtttgcagaattatcaattgtataaactaaacctttaaatta

SEQ ID NO: 23666 - protein, 217 aa, Homo sapiens
MGRSRSRSSSRSKHTKSSKHNKKRSRSRSRSRDKERVRKRSKSRESKRNRRRESRSRSRSTNTAVSRRERDRERASSPPDRIDIFGRTVSKRSSLDEKQKREEEEKKAEFERQRKIRQQEIEEKLIEEETARRVEELVAKRVEEELEKRKDEIEREVLRRVEEAKRIMEKQLLEELERQRQAELAAQKARERKLARMAAEEHTLQDTGQDRGRTCKT

SEQ ID NO: 23667 - DNA, 3390 bp, Homo sapiens
attgtgggaagggcggccggtgcagccgcagctgccatcttaggggcgcctggcgctacgggtttctcgttggaggcggccttcgtggcagctgtagacgccgggaaaaggcataaagtccgttggccgacacctttctttcctccggcctcggtagaaccgccagcccgcgtccgaaggcggaggcgaggggaactggccgcgtgaggggcctgaggcgagcggttagagcgtctcccggaaggatgggccggtctcggagccggagctcgtcccgctccaagcacaccaagagcagcaagcacaacaagaagcgcagccggtcccggtcgcgatcccgggacaaggagcgcgtgcggaagcgttccaaatctcgggaaagtaaacggaaccggcggcgggagtcgcggtcccgttcgcgctccaccaacacggccgtgtcccggcgcgagcgggaccgggagcgcgcctcgtccccgcccgaccgcatcgacatcttcgggcgcacggtgagcaagcgcagcagcctggacgagaagcagaagcgagaggaggaggagaagaaagcggagttcgagcggcagcgaaaaattcgacagcaagaaatagaagaaaaactcatcgaggaagaaacagcacgaagagtagaagaattggtagcaaaaagggtggaggaagaactggagaaaaggaaggatgaaattgaacgagaagttctccgaagggtggaggaagccaaacgcatcatggaaaagcagttgctcgaagaactcgagcgacagagacaagctgagcttgccgcacaaaaagctagagaggaggaagaacgtgcaaaacgtgaggagctagagcgaatactggaagagaataaccgaaaaattgcagaagcacaagccaaactggccgaagaacagttgagaattgttgaagaacaaagaaagattcatgaggaaaggatgaaactagaacaagaacgacaacgtcaacaaaaagaagaacaaaaaattatcctgggcaaggggaagtccaggccaaaactgtccttctcattaaaaacccaggattaaattgcaaactctgaactttttacaaagaaaaatggaaaaactttgtatggtagcttcatgttgaagtggttttttgtttttgtttttgtttttttaatttgtaaaatctggaaagttagcttgttctaataggggctatgctctgcaattccctttttttttttttttttccttccactaagtcaaatccttatcagatcattgttgtattctaaggagtgacgtatttttcacctgtttggattctatattagtggtctgaggaagagcagatcacattgtaaaactatggatggtctgataaggcttttactgaccccactgacttcagagttatactctgtttgctacatcataatgctggttttgctgactttttgtttttttatatatttataaaaaaagaaaaagttggtgattgcattgggaaattcccagggtattactggacctatgtggtgtattgttaaaccagtgtccttgtgatactgttgctcttgatgttcctgatacaggtaaggaaacagttggtcaactctgatacaaagtatatatacagttcagtattgtctctgttcattttgtttttatttcattgacaaaatcaaaccagcattccccattgtgtaaataaatgattttgctgaataaagtaaagtcttaaattcatatgttgaagcaattttttttaatgttatgttaagtcttaaagagggtggttcactttttgatggtcaaccatttagaagtcttagaactatatttcctcttgtttatacttttaacatagggtttatatgtacattaaatatacttgtgaattagtatttaatggctatttttacaaatatcaactttatgctgatagagcaaatggcatcagtgttacctttaagaaagactaacaacatccagaagatttaaattctcaaacctgtgcctctgttttaggatataagtattatcacaaagtatacttaataaaggctagaaaaatgcttttaaattatggaatctgagatcgttttcagagtgggccatcagaaagaacttagctttatactgtcaaaaaaaggctaagatggtcgagtcattttcattgtgtagtgtacttgcacgtttatttttaggacaaacacatttgaactttatgaattttttttttttttttgcatgtgaaatcttatgaatggctttcattttatacactagaatctgcctcatttactcttaacatatgtttaagtatactggtattaaaacattcaagaaaaggatattgatctaaaatgctacctgagatgcataaacatgtcatcaagtagagaaaatatttttatttttgcccaatattttttagacagtttgattattcttaaaaattgaaaacataagctaaagagatgactaaatggtagattattttgtgtgtgcatgctaggaaaaatgctgttgctttagttttgagctcttcaatgagtctaattgtggtaaggaacaatataaaatcagtttaaagatctttaaaggtagaattttaaataggcatgaaatatagtgagaacttttagtaaacatactacttactctaaaatcaaacattttattttcctaaagaatataggttgccaaaaaatattttatctctaaatataggttagctgtaattatttcatgaatttttttttttttcaatgtaactttttttggtgaagattcatggttcctaagttctgtattcaagtttttggaaatgtttatttaaaaactgttctatacaagtgttcaaaacattgtatctaaagagagtagcctggacttaaaatatttgaaatcagcttatgcgtgccttttaattttttttttaagtttcttactgccacatatggtgtgaagtgacagtaagttgcttaatgacatcctgcagtatctgcttgcttttggagactccagtgagatgttgaaattgttcctgtgcttggtaactactttcctctgccaggctatgggaaagaggatgtaattgtgaataatatacaccatccagtctttaatgtgctgcaacaatgtagtaatttgtttttttcatttgttcccactgcctttgtgtacatagaaaacttaaaaatttcccccagtctattagaagttaagatgttccctaatttattaaatatgcctttattcacaatttgtttttttaggttattcttaatgcattatagaattaagtatgactttgtttatttttattacagtatgtagttattgacatattgtggtttgcagaattatcaattgtataaactaaacctttaaatta

SEQ ID NO: 23668 - protein, 273 aa, Homo sapiens
MGRSRSRSSSRSKHTKSSKHNKKRSRSRSRSRDKERVRKRSKSRESKRNRRRESRSRSRSTNTAVSRRERDRERASSPPDRIDIFGRTVSKRSSLDEKQKREEEEKKAEFERQRKIRQQEIEEKLIEEETARRVEELVAKRVEEELEKRKDEIEREVLRRVEEAKRIMEKQLLEELERQRQAELAAQKAREEEERAKREELERILEENNRKIAEAQAKLAEEQLRIVEEQRKIHEERMKLEQERQRQQKEEQKIILGKGKSRPKLSFSLKTQD

SEQ ID NO: 23669 - DNA, 2450 bp, Homo sapiens
agtaatttgctactgaagctttatggcttgtttgcactgattactccaggatccaaaaacttggtgaaagtcactgaaacactcaaggcaaattactttacagccctgagtgtctgtcaccatagtttgcataatgaatatgaatcccattggtgtgtgatgtaggaaatcctgtagttgtattttcttgaactgaaatatttgactcaaaataattaagactcattgtcatttttcatcttggcattattgtggacaagttgacatattaaatctctttgctttctggtaagcttagcttttaaaatgcattttcccttgtcctgtctttaactagatatacatgcttatatttatagtgggtttcacagactataaaattgaatgtatgaaatttttatttatatcagtgcttttaataatgaagatatttttggagtaatggtgctgtcttgtagcgagttattaatcatagtaagatttttttctcttcatttgctttttttgtttcatattaacaattttttttttacacggacacaaccctctgacagtctttccaaatattaaaatcatttgaatatgtatgctgtgatctgaacactgctcaagccatcaagcagtcttcatacagtttgcattataaaatctcattaaattctccaagaaaaaataagttgaagaattttatttcctgaccatgcatcccctggatttctgagtttcagttcagattgtagatgacaatataagctgccttccgaaattgtcaacatctgaatgttaagtccattttccccatggaagaagcccgtagttccatgaagtatggattaccatttgtatttttcactaacagtaaatgtatttttcttattaattgtttgccttaggaatgatgaattacattttttgttccttcttaccataaacatctgcattcctcagctcagccttccttgtatgttgtttctttataaatggttgagctgctgatgcaggtattgccaagctaacagtacaaatcattttaaagaggaagctggcgcgtatggcagccgaggagcacactctgcaggacactggacaagacagtaaatattcaacttttaatgctgattaaaggagtataggtaaagaatacgtaggtatacataattggtgagacaaatattcactttatttatattttatatattatttttttaatttggtaaatactatccagttttgtagttgtccttgttgatttgtgtgatattaaagtattagtaataattgccaggaaactatcattagggagggtttagttggttgctgtttggactgggagggatgatttaaatttagtgctagaaaccaattttagtgactgcacagtttatcatttgtcagacagaaggtagctataaagctaccctgtaagtcatatcaaaaaagttcagaggaagattagtaaatatttatcaataaaaataaacattttgtttttctaatatcttaacatatcctcccctttaggaggaagaacgtgcaaaacgtgaggagctagagcgaatactggaagagaataaccgaaaaattgcagaagcacaagccaaactggccgaagaacagttgagaattgttgaagaacaaagaaagattcatgaggaaaggatgaaactagaacaagaacgacaacgtcaacaaaaagaagaacaaaaaattatcctgggcaaggggaagtccaggccaaaactgtccttctcattaaaaacccaggattaaattgcaaactctgaactttttacaaagaaaaatggaaaaactttgtatggtagcttcatgttgaagtggttttttgtttttgtttttgtttttttaatttgtaaaatctggaaagttagcttgttctaataggggctatgctctgcaattccctttttttttttttttttccttccactaagtcaaatccttatcagatcattgttgtattctaaggagtgacgtatttttcacctgtttggattctatattagtggtctgaggaagagcagatcacattgtaaaactatggatggtctgataaggcttttactgaccccactgacttcagagttatactctgtttgctacatcataatgctggttttgctgactttttgtttttttatatatttataaaaaaagaaaaagttggtgattgcattgggaaattcccagggtattactggacctatgtggtgtattgttaaaccagtgtccttgtgatactgttgctcttgatgttcctgatacaggtaaggaaacagttggtcaactctgatacaaagtatatatacagttcagtattgtctctgttcattttgtttttatttcattgacaaaatcaaaccagcattccccattgtgtaaataaatgattttgctgaataaagtaaagtcttaaattcatatgttgaagc

SEQ ID NO: 23670 - protein, 61 aa, Homo sapiens; identical to SEQ ID NO: 23660

SEQ ID NO: 23671 - DNA, 2023 bp, Homo sapiens
agtaatttgctactgaagctttatggcttgtttgcactgattactccaggatccaaaaacttggtgaaagtcactgaaacactcaaggcaaattactttacagccctgagtgtctgtcaccatagtttgcataatgaatatgaatcccattggtgtgtgatgtaggaaatcctgtagttgtattttcttgaactgaaatatttgactcaaaataattaagactcattgtcatttttcatcttggcattattgtggacaagttgacatattaaatctctttgctttctggtaagcttagcttttaaaatgcattttcccttgtcctgtctttaactagatatacatgcttatatttatagtgggtttcacagactataaaattgaatgtatgaaatttttatttatatcagtgcttttaataatgaagatatttttggagtaatggtgctgtcttgtagcgagttattaatcatagtaagatttttttctcttcatttgctttttttgtttcatattaacaattttttttttacacggacacaaccctctgacagtctttccaaatattaaaatcatttgaatatgtatgctgtgatctgaacactgctcaagccatcaagcagtcttcatacagtttgcattataaaatctcattaaattctccaagaaaaaataagttgaagaattttatttcctgaccatgcatcccctggatttctgagtttcagttcagattgtagatgacaatataagctgccttccgaaattgtcaacatctgaatgttaagtccattttccccatggaagaagcccgtagttccatgaagtatggattaccatttgtatttttcactaacagtaaatgtatttttcttattaattgtttgccttaggaatgatgaattacattttttgttccttcttaccataaacatctgcattcctcagctcagccttccttgtatgttgtttctttataaatggttgagctgctgatgcaggtattgccaagctaacagtacaaatcattttaaagaggaagctggcgcgtatggcagccgaggagcacactctgcaggacactggacaagacagaggaagaacgtgcaaaacgtgaggagctagagcgaatactggaagagaataaccgaaaaattgcagaagcacaagccaaactggccgaagaacagttgagaattgttgaagaacaaagaaagattcatgaggaaaggatgaaactagaacaagaacgacaacgtcaacaaaaagaagaacaaaaaattatcctgggcaaggggaagtccaggccaaaactgtccttctcattaaaaacccaggattaaattgcaaactctgaactttttacaaagaaaaatggaaaaactttgtatggtagcttcatgttgaagtggttttttgtttttgtttttgtttttttaatttgtaaaatctggaaagttagcttgttctaataggggctatgctctgcaattccctttttttttttttttttccttccactaagtcaaatccttatcagatcattgttgtattctaaggagtgacgtatttttcacctgtttggattctatattagtggtctgaggaagagcagatcacattgtaaaactatggatggtctgataaggcttttactgaccccactgacttcagagttatactctgtttgctacatcataatgctggttttgctgactttttgtttttttatatatttataaaaaaagaaaaagttggtgattgcattgggaaattcccagggtattactggacctatgtggtgtattgttaaaccagtgtccttgtgatactgttgctcttgatgttcctgatacaggtaaggaaacagttggtcaactctgatacaaagtatatatacagttcagtattgtctctgttcattttgtttttatttcattgacaaaatcaaaccagcattccccattgtgtaaataaatgattttgctgaataaagtaaagtcttaaattcatatgttgaagc

SEQ ID NO: 23672 - protein, 61 aa, Homo sapiens; identical to SEQ ID NO: 23660

SEQ ID NO: 23673 - DNA, 1333 bp, Homo sapiens
gactccttagcagcggagcagcccacggcctgcctgtactgcctgttacatgggccctctggtttgatgtcatcagtggaaatagaagcagggaactgacattctgatttggcatttgcttcgacagcaagaaatagaagaaaaactcatcgaggaagaaacagcacgaagagtagaagaattggtagcaaaaagggtggaggaagaactggagaaaaggaaggatgaaattgaacgagaagttctccgaagggtggaggaagccaaacgcatcatggaaaagcagttgctcgaagaactcgagcgacagagacaagctgagcttgccgcacaaaaagctagagagaggaagctggcgcgtatggcagccgaggagcacactctgcaggacactggacaagacagaggaagaacgtgcaaaacgtgaggagctagagcgaatactggaagagaataaccgaaaaattgcagaagcacaagccaaactggccgaagaacagttgagaattgttgaagaacaaagaaagattcatgaggaaaggatgaaactagaacaagaacgacaacgtcaacaaaaagaagaacaaaaaattatcctgggcaaggggaagtccaggccaaaactgtccttctcattaaaaacccaggattaaattgcaaactctgaactttttacaaagaaaaatggaaaaactttgtatggtagcttcatgttgaagtggttttttgtttttgtttttgtttttttaatttgtaaaatctggaaagttagcttgttctaataggggctatgctctgcaattccctttttttttttttttttccttccactaagtcaaatccttatcagatcattgttgtattctaaggagtgacgtatttttcacctgtttggattctatattagtggtctgaggaagagcagatcacattgtaaaactatggatggtctgataaggcttttactgaccccactgacttcagagttatactctgtttgctacatcataatgctggttttgctgactttttgtttttttatatatttataaaaaaagaaaaagttggtgattgcattgggaaattcccagggtattactggacctatgtggtgtattgttaaaccagtgtccttgtgatactgttgctcttgatgttcctgatacaggtaaggaaacagttggtcaactctgatacaaagtatatatacagttcagtattgtctctgttcattttgtttttatttcattgacaaaatcaaaccagcattccccattgtgtaaataaatgattttgctgaataaagtaaagtcttaaattcatatgttgaagc

SEQ ID NO: 23674 - protein, 142 aa, Homo sapiens; identical to SEQ ID NO: 23664

SEQ ID NO: 23675 - DNA, 1747 bp, Homo sapiens
attgtgggaagggcggccggtgcagccgcagctgccatcttaggggcgcctggcgctacgggtttctcgttggaggcggccttcgtggcagctgtagacgccgggaaaaggcataaagtccgttggccgacacctttctttcctccggcctcggtagaaccgccagcccgcgtccgaaggcggaggcgaggggaactggccgcgtgaggggcctgaggcgagcggttagagcgtctcccggaaggatgggccggtctcggagccggagctcgtcccgctccaagcacaccaagagcagcaagcacaacaagaagcgcagccggtcccggtcgcgatcccgggacaaggagcgcgtgcggaagcgttccaaatctcgggaaagtaaacggaaccggcggcgggagtcgcggtcccgttcgcgctccaccaacacggccgtgtcccggcgcgagcgggaccgggagcgcgcctcgtccccgcccgaccgcatcgacatcttcgggcgcacggtgagcaagcgcagcagcctggacgagaagcagaagcgagaggaggaggagaagaaagcggagttcgagcggcagcgaaaaattcgacagcaagaaatagaagaaaaactcatcgaggaagaaacagcacgaagagtagaagaattggtagcaaaaagggtggaggaagaactggagaaaaggaaggatgaaattgaacgagaagttctccgaagggtggaggaagccaaacgcatcatggaaaagcagttgctcgaagaactcgagcgacagagacaagctgagcttgccgcacaaaaagctagagaggaggaagaacgtgcaaaacgtgaggagctagagcgaatactggaagagaataaccgaaaaattgcagaagcacaagccaaactggccgaagaacagttgagaattgttgaagaacaaagaaagattcatgaggaaaggatgaaactagaacaagaacgacaacgtcaacaaaaagaagaacaaaaaattatcctgggcaaggggaagtccaggccaaaactgtccttctcattaaaaacccaggattaaattgcaaactctgaactttttacaaagaaaaatggaaaaactttgtatggtagcttcatgttgaagtggttttttgtttttgtttttgtttttttaatttgtaaaatctggaaagttagcttgttctaataggggctatgctctgcaattccctttttttttttttttttccttccactaagtcaaatccttatcagatcattgttgtattctaaggagtgacgtatttttcacctgtttggattctatattagtggtctgaggaagagcagatcacattgtaaaactatggatggtctgataaggcttttactgaccccactgacttcagagttatactctgtttgctacatcataatgctggttttgctgactttttgtttttttatatatttataaaaaaagaaaaagttggtgattgcattgggaaattcccagggtattactggacctatgtggtgtattgttaaaccagtgtccttgtgatactgttgctcttgatgttcctgatacaggtaaggaaacagttggtcaactctgatacaaagtatatatacagttcagtattgtctctgttcattttgtttttatttcattgacaaaatcaaaccagcattccccattgtgtaaataaatgattttgctgaataaagtaaagtcttaaattcatatgttgaagc

SEQ ID NO: 23676 - protein, 273 aa, Homo sapiens; identical to SEQ ID NO: 23668

SEQ ID NO: 23677 - DNA, 1805 bp, Homo sapiens
attgtgggaagggcggccggtgcagccgcagctgccatcttaggggcgcctggcgctacgggtttctcgttggaggcggccttcgtggcagctgtagacgccgggaaaaggcataaagtccgttggccgacacctttctttcctccggcctcggtagaaccgccagcccgcgtccgaaggcggaggcgaggggaactggccgcgtgaggggcctgaggcgagcggttagagcgtctcccggaaggatgggccggtctcggagccggagctcgtcccgctccaagcacaccaagagcagcaagcacaacaagaagcgcagccggtcccggtcgcgatcccgggacaaggagcgcgtgcggaagcgttccaaatctcgggaaagtaaacggaaccggcggcgggagtcgcggtcccgttcgcgctccaccaacacggccgtgtcccggcgcgagcgggaccgggagcgcgcctcgtccccgcccgaccgcatcgacatcttcgggcgcacggtgagcaagcgcagcagcctggacgagaagcagaagcgagaggaggaggagaagaaagcggagttcgagcggcagcgaaaaattcgacagcaagaaatagaagaaaaactcatcgaggaagaaacagcacgaagagtagaagaattggtagcaaaaagggtggaggaagaactggagaaaaggaaggatgaaattgaacgagaagttctccgaagggtggaggaagccaaacgcatcatggaaaagcagttgctcgaagaactcgagcgacagagacaagctgagcttgccgcacaaaaagctagagagaggaagctggcgcgtatggcagccgaggagcacactctgcaggacactggacaagacagaggaagaacgtgcaaaacgtgaggagctagagcgaatactggaagagaataaccgaaaaattgcagaagcacaagccaaactggccgaagaacagttgagaattgttgaagaacaaagaaagattcatgaggaaaggatgaaactagaacaagaacgacaacgtcaacaaaaagaagaacaaaaaattatcctgggcaaggggaagtccaggccaaaactgtccttctcattaaaaacccaggattaaattgcaaactctgaactttttacaaagaaaaatggaaaaactttgtatggtagcttcatgttgaagtggttttttgtttttgtttttgtttttttaatttgtaaaatctggaaagttagcttgttctaataggggctatgctctgcaattccctttttttttttttttttccttccactaagtcaaatccttatcagatcattgttgtattctaaggagtgacgtatttttcacctgtttggattctatattagtggtctgaggaagagcagatcacattgtaaaactatggatggtctgataaggcttttactgaccccactgacttcagagttatactctgtttgctacatcataatgctggttttgctgactttttgtttttttatatatttataaaaaaagaaaaagttggtgattgcattgggaaattcccagggtattactggacctatgtggtgtattgttaaaccagtgtccttgtgatactgttgctcttgatgttcctgatacaggtaaggaaacagttggtcaactctgatacaaagtatatatacagttcagtattgtctctgttcattttgtttttatttcattgacaaaatcaaaccagcattccccattgtgtaaataaatgattttgctgaataaagtaaagtcttaaattcatatgttgaagc

SEQ ID NO: 23678 - protein, 217 aa, Homo sapiens; identical to SEQ ID NO: 23666

SEQ ID NO: 23679 - DNA, 3203 bp, Homo sapiens
attgtgggaagggcggccggtgcagccgcagctgccatcttaggggcgcctggcgctacgggtttctcgttggaggcggccttcgtggcagctgtagacgccgggaaaaggcataaagtccgttggccgacacctttctttcctccggcctcggtagaaccgccagcccgcgtccgaaggcggaggcgaggggaactggccgcgtgaggggcctgaggcgagcggttagagcgtctcccggaaggatgggccggtctcggagccggagctcgtcccgctccaagcacaccaagagcagcaagcacaacaagaagcgcagccggtcccggtcgcgatcccgggacaaggagcgcgtgcggaagcgttccaaatctcgggaaagtaaacggaaccggcggcgggagtcgcggtcccgttcgcgctccaccaacacggccgtgtcccggcgcgagcgggaccgggagcgcgcctcgtccccgcccgaccgcatcgacatcttcgggcgcacggtgagcaagcgcagcagcctggacgagaagcagaagcgagaggaggaggagaagaaagcggagttcgagcggcagcgaaaaattcgacagcaagaaatagaagaaaaactcatcgaggaagaaacagcacgaagagtagaagaattggtagcaaaaagggtggaggaagaactggagaaaaggaaggatgaaattgaacgagaagttctccgaagggtggaggaagccaaacgcatcatggaaaagcagttgctcgaagaactcgagcgacagagacaagctgagcttgccgcacaaaaagctagagaggtaacgctcggtcgtttggaaagtagagacagtccatggcaaaactttcagtgttgggttctgcctcctgctcagttcagaaagagatggaatacagactatctaattcctttctcgtctaaacttaacattgctgcgaaagttaattttttagcctattcagaagtgctgactgataacttaaaagttggaagcttttataaaacatattcaaggatactttttgatttaatggaactggctatttgagaagtgtttgaaacttttgccatggctgcaggacttacattcttttttgggaggacggtggggagacagggagtggtaaagggaaaaggttaaaaatccacctgtggttgtatattcttctattctgtcactctgttacctagactgtgagaggcttttgccttcagtcagattaaaaagagcagggcctaacattgagtgatagcacctgctttgataaataggttttctcactcttctttttttccttcttttatccctcactccctcccctaaaccctgcttcagcacaatggactaattctagcattctgatcataaggccctccattttcctaatgtgtttcaaggaatctttttaggaaaaatatccagattattcatccactttttttagtatctactaacaactcctttttttctctagagagttatgaaggaacaggttgtccttgtctggagtcaagctaaacacatgatttgttttatcagcagctggagcagaagttgaaaatgtctttctgtgagacagtaatttgctactgaagctttatggcttgtttgcactgattactccaggatccaaaaacttggtgaaagtcactgaaacactcaaggcaaattactttacagccctgagtgtctgtcaccatagtttgcataatgaatatgaatcccattggtgtgtgatgtaggaaatcctgtagttgtattttcttgaactgaaatatttgactcaaaataattaagactcattgtcatttttcatcttggcattattgtggacaagttgacatattaaatctctttgctttctggtaagcttagcttttaaaatgcattttcccttgtcctgtctttaactagatatacatgcttatatttatagtgggtttcacagactataaaattgaatgtatgaaatttttatttatatcagtgcttttaataatgaagatatttttggagtaatggtgctgtcttgtagcgagttattaatcatagtaagatttttttctcttcatttgctttttttgtttcatattaacaattttttttttacacggacacaaccctctgacagtctttccaaatattaaaatcatttgaatatgtatgctgtgatctgaacactgctcaagccatcaagcagtcttcatacagtttgcattataaaatctcattaaattctccaagaaaaaataagttgaagaattttatttcctgaccatgcatcccctggatttctgagtttcagttcagattgtagatgacaatataagctgccttccgaaattgtcaacatctgaatgttaagtccattttccccatggaagaagcccgtagttccatgaagtatggattaccatttgtatttttcactaacagtaaatgtatttttcttattaattgtttgccttaggaatgatgaattacattttttgttccttcttaccataaacatctgcattcctcagctcagccttccttgtatgttgtttctttataaatggttgagctgctgatgcaggtattgccaagctaacagtacaaatcattttaaagaggaagctggcgcgtatggcagccgaggagcacactctgcaggacactggacaagacagtaaatattcaacttttaatgctgattaaaggagtataggtaaagaatacgtaggtatacataattggtgagacaaatattcactttatttatattttatatattatttttttaatttggtaaatactatccagttttgtagttgtccttgttgatttgtgtgatattaaagtattagtaataattgccaggaaactatcattagggagggtttagttggttgctgtttggactgggagggatgatttaaatttagtgctagaaaccaattttagtgactgcacagtttatcatttgtcagacagaaggtagctataaagctaccctgtaagtcatatcaaaaaagttcagaggaagattagtaaatatttatcaataaaaataaacattttgtttttctaatatcttaacatatcctcccctttaggaggaagaacgtgcaaaacgtgaggagctagagcgaatactggaagagaataaccgaaaaattgcagaagcacaagccaaactgg

SEQ ID NO: 23680 - protein, 273 aa, Homo sapiens; identical to SEQ ID NO: 3143

SEQ ID NO: 23681 - DNA, 1967 bp, Homo sapiens
gagattgccatctaccagggtattctctcccacctctttcccaccccaggtcatcaccagtgaaagttctgacacttgcacttctccggcaagccagggccggggcttcactgccagccagcaggaggatgagccagctctgcagttccacttcagagtccatcttcttggatcactcttggcaccaactgtattgagttgagttctgggaaatagacttgcaggtcatacgaaaacaagtataataatgtattttgcctataggtgccaagacctgcattgtttcctttcagatacttttctttattgtatttgggaacaaaccagctatagcatgaggaagggatgtcaggtggagatagaagagaagaaaactggatgtgccaacactgtcatacacagggattttcagcagtttcatgaagctactggaagatcttttctttgcttgcctataaacccatgccatccagttctctcagtcatagtgagctattcctggaaaagcccttgcatcaatcagtgtcccaacaggaaatggttggcatcccagatgaagatgataaagggactgtttacaaagttttggggaaactccaaggaatagtttaatagcccagtcctgttaccacccctgcacccaaagtgacaaggggagggggtggagactgggacatgggaaaatcatctagggaaggatacctttactggatcagcagccttcagttggaggaacacagccagctcctggtgaccccacagggagagagcgggagcactaaggattccaaactcagtcctcctgatcttcatcagtattcgtcattggccaaacaaataactgaaattcagagggcaagagagctcattgttatctaaacaggtcagcatggcagacagcgaggcgaagagggaaggaaggtggatttggaagaacaaacgggagtgacctagtgcagccctgataaacccgaaagcagtgttcctctcaagatattatggggtcccagggagatgcagtgtccagggaagcagaggcagcagcacagctgcaggaagaagtcagggtggaatccacacagagcgcattcccaggctgggagctaccagagtatttgaccttgggcacagctggggtggccccgatggcgctgctgtctgctgatggtctccacagcttccccagcgaggccttcctggaaggagtgctgagcagcaaagctctgtggtcaccactcaggacaaaggggaaccagctgaacagagcctttcatgtgacaacaaaaaacgacctggctcaaacatcacgacaggcatctgtggagcctgggaaatgacctttctcatggggagaacacagaacacacaaagctttctcttaaaagtctacaaaattataatctgataacaacagaacgttttggtattttgagtaataggtgtcacatcggaattgatatttgccaaatttggcatgataattgaatgctttttgcttatttatatttcatattttagttgttttctaataaccaaaaacatttgtgtatttttaataatagtagaggtaaatgaaattttacatgtcagtaaaaaaactgaaagatgatgcttgtaatttcaagtcgattaaagaaaattattaataaaacaataaaatacaaattatacattttatattgtgatacttaaagtagatgacctggtttatccctgaagagaaagcatggatgcataaaccagaccatattgtaaatatttcaaattcattggtaaacattgttttaagaaggtgattagcaaatattgtttcaagaaggtgattaagaaggtgatgcaaaatttggagtactttctgttttgtatttttcgtgactatttgtgagcacttggtgcttaagacacactcaaagaggtactgacaatttatcatattctaaagcaataaaacaggttgaaaatatcta

SEQ ID NO: 23682 - protein, 112 aa, Homo sapiens
MGSQGDAVSREAEAAAQLQEEVRVESTQSAFPGWELPEYLTLGTAGVAPMALLSADGLHSFPSEAFLEGVLSSKALWSPLRTKGNQLNRAFHVTTKNDLAQTSRQASVEPGK

SEQ ID NO: 23683 - DNA, 1198 bp, Homo sapiens
gtgaagcagcttccccaaaggcgcatggctaagagtggttatttgtctccttgtcacgctgttttgagggaaggattcctacactaggattatgaagatcgccaaacagatgacgctggatcccagaaaagtggggcagaatgcagtttagttgtcacatatgctcacagcctagggaagaagacagcggacagcccacagggccacgcgatggttcaagaacagagtgaacagccagggcctgtgaaagggaggaatctcccagtgtttgtgccatgttttgatctgactgaaagccataaacatagccgaagcctgggccatccacagaagacccaatgttctctttttccaagtgggcattttgtatctctgaagagttctagactgagctacatcagtagacctctgcatttaaagggagcaattctcatccgaggatcctgattcttctactgtagtgcaatttcaccactctctccaaatgtctccaagcaaattcaaagcagctgaaaataactgcatgcctgagaggaccacgaagcttcaggccagccctgtcccgaagtcttctgtgcttcatgtcgagtggtctgcagtggactgtgtctgcttgaagcgatgctccggagggcttattgttgtgtggggtaaagcatgagatcactgaaaaatgagagaaatcgagcatacgaaatgtgaagcatatctgttgacaccatgcgctccctttgcttgcactggatggcgcatggtttccgtgcgcagtgcctgaggtgtggggcaggcgaggcccatgcagcctggctcctttccagaaggttgctgttcattacagctcgagtgtgctgggttctgcagatattatctattttaaattaacgctccgtaaaaggaatttaaagttttctgaaaagaaaccaatgaatgaagctaatagtaataatgcaaacacaagcaagctgccaagtaagccatttttctattacggagcccttcatcagtcatattattaaagaaaaaacaacaatactagtaataatgatcacctattcaagaccaagaggttgatcctccaaaattcaaacaaggaaaaatctctcccaatctctcctttcctccatcccttttctttacttctcatcccatatataatattatataatgcatacgtaataaaagacattcactattatta

SEQ ID NO: 23684 - protein, 78 aa, Homo sapiens
MVQEQSEQPGPVKGRNLPVFVPCFDLTESHKHSRSLGHPQKTQCSLFPSGHFVSLKSSRLSYISRPLHLKGAILIRGS

SEQ ID NO: 23685 - DNA, 1173 bp, Homo sapiens
atgggggatttgtttgttcatctgcacagtgggacccgattgccagtggaagcctgggcaggctgtgggaagagctcagtacctggtgtcctggcatcaatggacattgggtggcatgaggtgaacggacaggcactggatcctttcctgttaacctcgtttcagagggaggatgaaacgggacccggcatgaaggccttgaagtcggaaatggacaaggagggaaacagcctgaagatcctgagcatgccaatgtccattcttattcagctcgtgttagtcaggaaaccagggaaccagagaactaggggaaccaggaaaccagggcaacagggaaccagggcaccagagaacaagggcaccagggtatcagggaaccagagaaccaggggaaccaggaaaccagggaaccagggaaccagggaaccagggaaccagggaaacagggaaccaggggaaccaggaaaccagggaaccagggaaccaggaaacagtgaaacaggaaaccagggaaccagagaactaggggaaccaggaaaccagggcaacagggaaccagggcaccagagaaccagggcaccagggtatcagggaaccagagaaccaggggaaccaggaaaccagggcaccagggaaccagggaaccagggcaccagggaaccaggggaaccagggaaccaggaaaccagggaaccaggaaacagtgaaacaggaaaccagggaaccagagaactaggggaaccagggaaccaggaaaccagggaaccaggaaacagtgaaacaggaaaccagggaaccagggaaccaggggaaccagggaaccaggaaaccagggaaccaggaaacagtgaaacaggaaaccagggaaccagagaactaggggaaccaggaaaccagggcaacagggaaccagggcaccagagaaccagggcaccagggtatcagggaaccagagaaccaggggaaccaggaaaccagggcaccagggaaccaggggaaccaggggaaccaggaaaccaggggaaccaggaaaccaggggacccagggaaccagggaaccaggaaaccagggaaccaggaaaacagggaaccaggaaaacagggacccaggaaaccagggaaccaggggaccagggaaccaggggaccagggaaccgggaaacagggtgctga

SEQ ID NO: 23686 - protein, 390 aa, Homo sapiens
MGDLFVHLHSGTRLPVEAWAGCGKSSVPGVLASMDIGWHEVNGQALDPFLLTSFQREDETGPGMKALKSEMDKEGNSLKILSMPMSILIQLVLVRKPGNQRTRGTRKPGQQGTRAPENKGTRVSGNQRTRGTRKPGNQGTREPGNQGNREPGEPGNQGTREPGNSETGNQGTRELGEPGNQGNREPGHQRTRAPGYQGTREPGEPGNQGTREPGNQGTREPGEPGNQETREPGNSETGNQGTRELGEPGNQETREPGNSETGNQGTREPGEPGNQETREPGNSETGNQGTRELGEPGNQGNREPGHQRTRAPGYQGTREPGEPGNQGTREPGEPGEPGNQGNQETRGPREPGNQETREPGKQGTRKTGTQETREPGDQGTRGPGNRETGC

SEQ ID NO: 23687 - DNA, 888 bp, Homo sapiens
aggaagcactgagctgtgctcctctcctgccttctctgtaccttgctgggtgtctgactgtggagtctcaaggcaccctagctcttctctggtggggctgatttttccatccccgttttgtgaatagggaaacaccagtgaccagtgtcaggtgggccttgttcctttcaggagcgggagaaaaagagctccttacccatgtgtcatttctcctattgcaatgttcaaagaaaaaaaggcatgttctcatctccaccgccaccagaacccattaacaggtccgttctggttgatttctggagtctggcttccaatgccattgtttttcactcttatttcaagtacatgcagtttttgagaggcggggctgatgaagtcaacattcaaatctgtacaaatctcccagtttccaggttatctgcagagaaaaaccgagtggcacgccagcgggatccttggaatggcagcggatcccctgcacgggtacatccactgcttgctgtcaggagccgaggtccgggtgctccagggcctgcaggcccttcggagcaggaatctgactccctcctggggtctcaaggacgccttggccgggcgatgggcctcccccacgcattgtgtccaggaggttctgttcagagcgtgtgcttcgaagctcacgctgaggctaagaaccctctgttaattgaactagttgccaaagagaagcaaagtgctcgttctggagcaaacgcctcatgggacatggatgttgccagccaggccctggcacctccatcatcttcacagacagcggagcaggagaaagtcctttcccgagaggcaccaagttcacttcatgttcccaaggacgactgctcagagagtggccacatggagccagaataa

SEQ ID NO: 23688 - protein, 229 aa, Homo sapiens
MCHFSYCNVQRKKGMFSSPPPPEPINRSVLVDFWSLASNAIVFHSYFKYMQFLRGGADEVNIQICTNLPVSRLSAEKNRVARQRDPWNGSGSPARVHPLLAVRSRGPGAPGPAGPSEQESDSLLGSQGRLGRAMGLPHALCPGGSVQSVCFEAHAEAKNPLLIELVAKEKQSARSGANASWDMDVASQALAPPSSSQTAEQEKVLSREAPSSLHVPKDDCSESGHMEPE

SEQ ID NO: 23689 - DNA, 1938 bp, Homo sapiens
ccgctctggggggtttatcatcagaaggagagagacccgagggagccacctgcccactccagatgaggtgctccgtggaacacgaggagcacacgaaacccgatcagctttgtgtgacttccgcgtgtggggtggcacgcgtgtgcttgctattcattgtttctgctgggggcatttttatcttttgaaattctttcttctgaacctttcgtgcctaccagaaccagcctgtcaggatgcgcctgatctccacagcagcccctccatccgactctgaagaagccgtcagctcacagaagattccttttgtttaatgagtaacagctactgactcactccatggcccaccagaatgacagactcctgttcaaaagcctgatctgaagttgctgccatgacacaagcaatgcctgtgaagtgcctgcagcccacgcctctgagacaggccaggcgtgtggtggacacgcagctgcaggcgcttgctctctgtcatcacgagaaaaagtatccctgcaccggacaagaaaggacctgcaggcacactcacaatcaacttcctgatttcacaatgatggtagggagccctgtgggcactagaagcagcggggaggggttctagacctttggtgcccaagagacttccgtgcatggaaaatgttgacttctagcttccatctgcagcgaactctccatcgggacatgggacctggctgtacgagttaattcaaactgagccactttccattagggcaccaaatggagttagcaatccaagattattttattttctgggctatccagatgacttaaagcctcgctgaagttcccatgagaagagtttaaacaacccaaagaaagcacatcatggtcgactgcagggaactgaaactacagaaatgaacacttccaataagaggcaactactgttctcaaacggccctaaaaggcaccgagactttcaccttgtcacgaagatgcccagggagcccacggagaggtcaacatggcaagcactggaggtggaaggggtcatgggggtctggtcctcctgccacagtcaagctttcagatgatgcagcctgctgacattgtgactgaaggacaccaagctggaactacccatctaggcctctctggactcttggcccacagaagccaggtgaagcagaatcagagaaggcttgaagctcagcctccccaagctacgaatgcatgattgcaccagcgcaagacaggaatccccagtcccggctgcaggggccagggcagcttggactctccacggctcttcagcttggctttctgggcatttcaagacaggtcatggaaggtccactgggagccgaggatgctgttcttgcagtaaaggtctcagcttctgctatgccagtcaatcggggtgaaggaagtgacttttcttcagatggagaggccaagaattttatgcagatagcaacaaggtccctgacacagggaagcaatatccctgcacagaccagcttaagacaagattagtgtggagcacaggaggatcaagaggatctgcacggggtgagataaggaatctggacagaccagaaaagaggcgattccccagacacccagtgagaagtgacatttgggagatgaggatgggccatttacatacatcatgaatgggaatgcctgtattgttcatgtaactcgcagggaaaatgtcagaaaattcatccaaatctacattgtacacttgatgaggcagccgattggctgagaggcttgggaaaatcagccgggtctacccagagcttacgtagctcagattgcgggcacatggctgtggggcaccctaattcctgagggtccccccaacatgggctggcaaggcggggattgcaaaagtctccagttaccagcaccctgaacatgcaccctttgattaaatcaccccacaccaaa

SEQ ID NO: 23690 - protein, 100 aa, Homo sapiens; identical to SEQ ID NO: 3145

SEQ ID NO: 23691 - DNA, 369 bp, Homo sapiens
ccatgaatgctgccacaatcccacctcacgtgtgcacctcgtagtcactacttttcctccagacattttctcaagccagaagaatgagcacagcccacatctgaagcagcctgagaggctgggcctgcaggggagataccggccctatggaaggcagttggtgggcaaaagtccggtttctacgctttgaggggacacctgtggggcaccctgaggcccagccctgctggcctgctggcctttggactggagctacaccatcagctctcggaggtctccactcgccaactcaccctgcagatcacggaacttgtcagcctccataactgcaggagccaatgccttataataaaatctctttctcttgtc

SEQ ID NO: 23692 - protein, 59 aa, Homo sapiens
MEGSWWAKVRFLRFEGTPVGHPEAQPCWPAGLWTGATPSALGGLHSPTHPADHGTCQPP

SEQ ID NO: 23693 - DNA, 6904 bp, Homo sapiens
cagacaggtcaatatgaaccattctttcaggatgcagccaagtaagcatggaccatttcttgagaatggagcctggaaagcatggaccgttccttcagattgcagccaggtaaacaagaactattccttcacgatgaatccaggtaagcatggaccattccttcatgatggaaccacgtaaggatggaccatttcttcagaatgcagccaggtaagcctgaaccatttcttcaccatggagagaagtaagcatggaccattccttcaggatggagtcaggtaagcatgaaccattctttcagggtaaatgcaggtaagtatggatctgtctttcatcatgtggcctcgtaagcatggaccattccttcaggatggaaccaggtaagcatgagccattgcttttggatgcagccaggtaagtacaaaacattccttcaggatgcagccaggtaagcatgaacttttcattcatggtgtaggcaggaacgcatggaccattttttaaggatggactcaggtaaacatggaccattccttccaaatggagcgtggtaagcatggatcattcattcaggatgcagccaggtcaacacgaaacattttttctggatggagccaggtaagcatggaccattccatcaggatgcagccagataagtatggacaattccttcaggatggagccaggtaagcatgaaaaattcctccatgatgcagccaggtaagcgtggaccatttcttcaggatgcagccaggtaagcatggaccattccgtcagtatgtagccacataagcatggaccactccttcaagatggagccaggtaagagtggaccattccttcaggatgcagtcaggtaagcagggaccatttttttcaggatgcaggcaggaaagtatgaaccattcctttaggatgcagccaggtaagtgtgcacaattccttcaggatggagccaggttagcatgaaccatgttttccagactgtagccaggtaagcatggaccattatttcaggatgcagccaggtaagtatgaaccatgtttttcagactctagccagataagtatggaccattctttcaggatgcagccaggtaagcatggaccatgctttcagatggaatcagataagcatgtaacattcctttagaatgcagccaggtaagtgcggactattccctcaggatggagccaggtaagcctggaccattctgtcaggatgtagcctggtaagcatgaatcatttcttaaggatggagtcagacaagcacaccccattccttcagagtgcagctaggtaagtgtggaccattccctcaagatggagccaggtaagtgtggaccattccttcagaatgcagccaggtatgcagagaccatttttttcaggatgcaggcaagaaagtatgaaccattccttcaggatgcagccaggtaagtgtgcacagtttcttcaggatggagccaggttagcatgaaccatatttttcaaatgtggccaggtaagcatgaacatttctttcaggatgcagccaagtaagtatgaaccatttcttcagtatggagccaggtaagcatagactattctttcaggatgcagccaggaaagcaatgaccagtttttaaagatacagccaggtaattatgatacataccttcaggatgcagccaggtaagcatgaaccattttttcaggatgtatccaggtgtgcatagaccactccttcaggatgtggccaggtaggcgtggaccattttttcaggaccaagccaggtaagcaggaatcattctttaaggatgcagcaaggtaagtatggaccattccttcagaatgcagacaggtaggagtagatcatttattgaggatgcagccaggtaatcaggaaccatttcttcaggatccaaccaggtaagcatgacccattccttcaagatggagccaggtaactgtcaacaatcccttcaggttgcaactgggtaagcatggaccattccttcaggatggagcctgccaagtgtggaccattccttcaggatgcagccaggtaagcatcagccattccttcataatgcggccaggtaagcatggaccattccttcaggatggagcctgccaagtgtggaccattccttcaggatgcagccaggtaagcatcagccattccttcataatgcagccaggtaagcatcagccattccttcataatgcagtcaggtaagcatggaccattccttcaggatggagcctgccaagtgtggaccgttccttcaggataccgccaggtaagcatcagccattccttcataatgcggccaggtaagcatggaccattccttcaggatgccgccaggtaagcctgaaccattccttcagaatgcatccaggtaagcatggaccagtttttaagtatacagtcagttaagtatgacacataccctcaggatacagccaggtaagcatgaaccattccttcaggatgccaccaggtaagcatgaaccattccatcaggatggagccagataagtatgaaccattccatcaggatgcagcaaggtaaacatggactaatctgtcaggatgcagtcgggtaagcatgaaccatttcttaatagtggagtcaggtaagcacataccattcctttagaatgcagccagttaagcatggatcattcctttaggatgtagccaggtaagcatggaccattcttttagcacggaaccaggtaagaatggaccattctttagcatggaaccaggtaagcatggaccattccttcaggatgaagctaggtaataatggaccattcattcaggatgcatcctggtaagtatgaattattccttcaggatgcaaccaggtaagtatggccattccttcaggaaggagccaggtaagcaggaacaattctttcaggatggaacaaggtaagcatgcactattccttcagaaagcagtgaggttagcatggatcattccttcaggatgcaaacaggtacgtgtgggcattccttcaggatgtagccaggtaagcagggaccatttttttcaggatgcaggcaggaaagtatgaacctttcctcgggatgcagccaggtaagtctggacacttccttcaggatggagccaggtaagcatgaaccattttttcagaatgtggccaggtaagcatgaacttttcctttagggtggagcctggtaagcatggaccactccctcaggattcatccaggtaagcctggaccattccttcaggatggtgtgaggtaagcatggacagttccttcaggatgcaggcaggtaagcgtggaccattcctcctggatacagctaggcaaatatgaaccattccttcaagatggaggctggtaggcatggaccactgcttcaggatgcaggcaggtaagtgtggaccattccttcagtatggagccaggtaagtgtggaccatttcttcaggatggtgccaggtaaccagggaccattctttcaggatacagccaggaaaggatggaccattttttaaggatacagccacataaatacgatacatactttcaggataaagccaggtaagcatgaaccattccttcagaatgcagccatgtaggcagagaccaacccttcaggttggagccaggtaagcatgaaccattcctccatgatgaagccagttaagcataggcaattcctttaggatggagccaggtaagcatgggccattctttcagaatgcagtcaggtaagcatgaaccattccttcaggatcctgccaggtaagcgtggaccattatttcaggatgcagtcaggtaagcatgaaccattccttcaggatcctgccatgtaagcgtggaccattatttcaggatgcagtcaggtaagcatgaaccattacttcagaatggagccaggtaggcatggaccattccttcatgatgcagccaggtaagcatgaaccattacttcaccgtggagtgaggtaaacatgaaccaatccttcaggatgaatcctgataagtatggacctttcttttagggtgtagcctcataagagtggaccactccttcaggatggacccaggtaagtgtcaaccattccttcctaatgcagcatggtaagcatggatcactcattcaggatgcagccaggtaagtacaaaacattccttctggatggagccaggtaagcatggaccattctgtcaggatgcagccacgtaagcatgaaccatttcttcaggatggagtcagaaaagcatgtaccattttttcagaatgcagccaggtaactgtggacgattccctcaggatggagccaagtaagcatggaccattctctcagcatggagccaggtaagcatggaccattccttaagaatggagccaggtaagcatgaaccatttcatcaggatgcagccaggtaagcatgaaccattctgtcaggatacagccaggtaagggtggaccattctgtcaggatacagccaggtaagcatggaccattctttcagatggtgtcaggtaagcatgaaccattctgtcaggatgcagccaggtaaacatgggccgttccatcaggatgcagccctgtaagtgtgaaccatttcttaagaatggagccaggtaagcagggaccattttttcaggatgcagtcagaaactatgaaccatcccctcaggatggagccaggtaagcatggaccattccttcaggatgcagccaggtaagtaagaaccattctttcagtacagaagcaagcaagcatggaccattccttcaggatgcagccaggtaaacatagaccattccttcaggatagtgccaggtaggtgtggatcttccttcaggacggagccaggtaagcatggaccattccttcaggatgcagccaggtcagcatggaccattccttcaggatagtgccaggtaggtgtggatcttccttcaggacagagccaggtaagcatggaccattccttcaggatgcagccaggtaagcatggaccattccttcaggatagtgccaggtaggtgtggatcttccttcaggacggagccaggtaagcatggaccattccttcaggatgcagccaggtaaacatagaccattccttcaggatagtgccaggtaggtgtggatctttccttcaggacggagccaggtaagcatggaccattccttcaggatgcagccaggtaagcatggaccattccttcaggatagtgccaggtaggtgtggatcttccttcaggacggagccaggtaagcatggaccattccttcaggatgcagccaggtaagcatggaccattccttcaggatagtgccagataggtgtggatctttccttcaggacggagccaggtaagcatggaccattccttcaggatgcagccaggtaagcatggaccattccttcaggatagtgccaggtaggtgtggacatttccttcaggatggagccaggtaagtgcggaccattccatcaggatgcaacttggtaagcatgagccatttcttaaggatggagtcagataagcatgtagcattccttctgaatgcagccagctaagtgtgggccattccttcaggatgcagccaggtaagcatggaccattccttctggatggaggtaggtacgtatgcacctttttttcaggatggagtccggtaagcatggaccattccttcaggatggagccaggtaagcatggactacttcctcaggatggagtcggataagcatggccctctcctggatgcagccaggtaagggtggaccgttccttcaagatggagccatcaaacatgcagatcaccccacagcacccttgctccagttgactgggtttggtaacatggtggcaaaatcaaaaacttgtaaactagtagaaaaacgttttttagctcatgagtcctcttcaggccaagctcagaagctggtgccattggtcagcctcccttcgtggttggagttcttctcccacatcagcttctgccagggcgtgtgcctgtgcagcccgagtccagtgttcctgtgagctgaacttggcagggaaggctgctctgaggcggacaccacagcaacatcggtgcctggggaacttcagatccaagggcacctgaagacctagtatccacacggctcccttctcctgtaacccaccacgatgtgggcggcctcgaagaaggcccacgagcaacataccgagtgctccagggaagcgagagcacacaccgggcaggattcacaatcaagacaaggtgatgatggacaggcatgcacacatgagcacgtggagcacacagtgtgtttggctgcaggagaagaatccagttttcagcaggtgaatgcagagaagccctgctgctcaggacaaagaatgtttccagaatgaaccatgtttgcagctctccattgcccaggatgagcggcgtccccaggtgcctggcccttttatcacccaggctgatggtacatccagaggcagccatggctcagcccccaagcaaggccagcaatggccgggaagaagcttattcaatgggattctctgcagagttgttctgactttcagcttgcagggatgtgggcatagaaaacaagaggctgacttctcaatcaatcgtcacttaaggatgcagagccagtggaagccctttctttcatgacttttagcattttttcttcattttcagaaaatccacaccatctccatatatgcatgcacgcatgagtgtccgtccgccccctaactgtggggttaagaatcatgtgactgctcatgctggaaaaacaagacaatcaccatcataaaagcccacatcatttacagatcttggaacttgaactttctttaaaagataaatatagtagtttacattttggagctgg

SEQ ID NO: 23694 - protein, 75 aa, Homo sapiens
MWAASKKAHEQHTECSREARAHTGQDSQSRQGDDGQACTHEHVEHTVCLAAGEESSFQQVNAEKPCCSGQRMFPE

SEQ ID NO: 23695 - DNA, 657 bp, Homo sapiens
ggggctggacacccgctcatggccacagagggcagcttccgggcgacgctccagctctgcctctcggactcctcacggacacaggcgtgtgtttgaaacggatcgatgtccccccggttcctttcacagacaccagaaagcccgcgaacacacctcacaggctccgaagtctcactctgatcttggctcactgcaacctctgcctcctgagttcaactgattctcctgcctcagcctcaccagtagctgggattacagatgcccatcaccatgcccggctaattttgtatttttaatagagacagggttttgccatgttggccaggctggtctcgaactcctgacctcaagcgatccacctgcctcggcctctgggattacagatgtgagccatcgcacctgtgcgtgaaggttttctaaccttctatcagattttctaacctccccaagccacaggatgagaaaagtgtgcgatgctcccgcctgaggaagccagcccagccaacgcagagccaaggaccactgaaggcattgccactgctacacgcttggagccatccatgcctgcagccgcgttgaatgccttctgcttctttcctatgccagcttgaactgggttacttttgcttacaaatgaagtactctaactcaggaaat

SEQ ID NO: 23696 - protein, 45 aa, Homo sapiens
MLPPEEASPANAEPRTTEGIATATRLEPSMPAAALNAFCFFPMPA

SEQ ID NO: 23697 - DNA, 781 bp, Homo sapiens
gggaaactgtcaaccttcagaacgtccttctccctcagctggagggagcatggcagtgagccaaggagacgggaccctctgctttgtcctcctgctgtgctgttggcaagaaactgagctccggccgagaaccgtgattccaggttcacctactgaaataccattcagttcaaaacaggaggatatgtctgaattattagatgaaattctggtccaggagattttagatctgaataaaacaacaccgagcgaaatgccaagtacagcatcaacattatcaacaccgttacatgctggtattgatgagaattatcaagctggtggttctgagaattaccatgaattattagagaatttacaattctctcctggcattgaggtcaaaatttccaatgatgaagccaatgctaatgcaaatctccatggcgatccttctgagaattatcgtgggccacaggtgtctcctggcagtgagaagagtgtttccagtaaagaaaagaattcaaagaacactcagtatgaaaatctatccattctggaccaaatccttcaaaatattggaagatcttcaggaaacattttccataaagagcagcagaggaccagcgcacagaggaggagccaaggcagtcagtgaggccgcagccccagaccccctgcgcaggagaggagcctgctagaacccccacccaccagcctccggaacagggcacttgtgtgcacacgcccacgttctctgaaccattccacataaaggaaaatcgtttattcacacgatccc

SEQ ID NO: 23698 - protein, 195 aa, Homo sapiens
MAVSQGDGTLCFVLLLCCWQETELRPRTVIPGSPTEIPFSSKQEDMSELLDEILVQEILDLNKTTPSEMPSTASTLSTPLHAGIDENYQAGGSENYHELLENLQFSPGIEVKISNDEANANANLHGDPSENYRGPQVSPGSEKSVSSKEKNSKNTQYENLSILDQILQNIGRSSGNIFHKEQQRTSAQRRSQGSQ

SEQ ID NO: 23699 - DNA, 701 bp, Homo sapiens
gtgcctggccaataacaccttaatcttcaggtgcaggctgtgaagatgggaaaaggctgtcaatgctctggcttcttcccactgacaggggacgtagtgggaatgggaatgaaccccaagatgaaattctggtccaggagattttagatctgaataaaacaacaccgagcgaaatgccaagtacagcatcaacattatcaacaccgttacatgctggtattgatgagaattatcaagctggtggttctgagaattaccatgaattattagagaatttacaattctctcctggcattgaggtcaaaatttccaatgatgaagccaatgctaatgcaaatctccatggcgatccttctgagaattatcgtgggccacaggtgtctcctggcagtgagaagagtgtttccagtaaagaaaagaattcaaagaacactcagtatgaaaatctatccattctggaccaaatccttcaaaatattggaagatcttcaggaaacattttccataaagagcagcagaggaccagcgcacagaggaggagccaaggcagtcagtgaggccgcagccccagaccccctgcgcaggagaggagcctgctagaacccccacccaccagcctccggaacagggcacttgtgtgcacacgcccacgttctctgaaccattccacataaaggaaaatcgtttattcacacgatccc

SEQ ID NO: 23700 - protein, 164 aa, Homo sapiens
MLWLLPTDRGRSGNGNEPQDEILVQEILDLNKTTPSEMPSTASTLSTPLHAGIDENYQAGGSENYHELLENLQFSPGIEVKISNDEANANANLHGDPSENYRGPQVSPGSEKSVSSKEKNSKNTQYENLSILDQILQNIGRSSGNIFHKEQQRTSAQRRSQGSQ

SEQ ID NO: 23701 - DNA, 3900 bp, Homo sapiens
attgtgggaagcgcccgcgctttcggcgggttccgttaaaatggcgccctggtggccggcggcgcccgcgccttagcctgtcaggagcagggagcttgcggggcgcaggaagggcgcgggccgcggtccctgcgcgtgcggcggcagtggcggctctgcccggaccaccgtgcacggctccgggcgaggatggcgaccccggaccagaagtcgccgaacgttctgctgcagaacctgtgctgcaggatcctgggcaggagcgaagctgatgtagcccagcagttccagtatgctgtgcgggtgattggcagcaacttcgccccaactgttgaaagagatgaatttttagtagctgaaaaaatcaagaaagagcttattcgacaacgaagagaagcagatgctgcattattttcagaactccacagaaaacttcattcacagggagttttgaaaaataaatggtcaatactctacctcttgctgagcctcagtgaggacccacgcaggcagccaagcaaggtttctagctatgctacgttatttgctcaggccttaccaagagatgcccactcaaccccttactactatgccaggcctcagacccttcccctgagctaccaagatcggagtgcccagtcagcccagagctccggcagcgtgggcagcagtggcatcagcagcattggcctgtgtgccctcagtggccccgcgcctgcgccacaatctctcctcccaggacagtctaatcaagctccaggagtaggagattgccttcgacagcagttggggtcacgactcgcatggactttaactgcaaatcagccttcttcacaagccactacctcaaaaggtgtccccagtgctgtgtctcgcaacatgacaaggtccaggagagaaggggatacgggtggtactatggaaattacagaagcagctctggtaagggacattttgtacgtctttcagggcatagatggcaaaaacatcaaaatgaacaacactgaaaattgttacaaagtagaaggaaaggcaaatctaagtaggtctttgagagacacagcagtcaggctttctgagttgggatggttgcataataaaatcagaagatacacggaccagaggagcctggaccgctcattcggactcgtcgggcagagcttttgtgctgccttgcaccaggaactcagagaatactatcgattgctctctgttttacattctcagctacaactagaggatgaccagggtgtgaatttgggacttgagagtagtttaacacttcggcgcctcctggtttggacctatgatcccaaaatacgactgaagacccttgcggccctagtggaccactgccaaggaaggaaaggaggtgagctggcctcagctgtccacgcctacacaaaaacaggagacccgtacatgcggtctctggtgcagcacatcctcagcctcgtgtctcatcctgttttgagcttcctgtaccgctggatatatgatggggagcttgaggacacttaccacgaattttttgtagcatcagatccaacagttaaaacagatcgactgtggcacgacaagtatactttgaggaaatcgatgattccttcgtttatgacgatggatcagtctaggaaggtccttttgataggaaaatcaataaatttcttgcaccaagtttgtcatgatcagactcccactacaaagatgatagctgtgaccaagtctgcagagtcaccccaggacgctgcagacctattcacagacttggaaaatgcatttcaggggaagattgatgctgcttattttgagaccagcaaatacctgttggatgttctcaataaaaagtacagcttgctggaccacatgcaggcaatgaggcggtacctgcttcttggtcaaggagactttataaggcacttaatggacttgctaaaaccagaacttgtccgtccagctacgactttgtatcagcataacttgactggaattctagaaaccgctgtcagagccaccaacgcacagtttgacagtcctgagatcctgcgaaggctggacgtgcggctgctggaggtctctccaggtgacactggatgggatgtcttcagcctcgattatcatgttgacggaccaattgcaactgtgtttactcgagaatgtatgagccactacctaagagtatttaacttcctctggagggcgaagcggatggaatacatcctcactgacatacggaagggacacatgtgcaatgcaaagctcctgagaaacatgccagagttctccggggtgctgcaccagtgtcacattttggcctctgagatggtccatttcattcatcagatgcagtattacatcacatttgaggtgcttgaatgttcttgggatgagctttggaacaaagtccagcaggcccaggatttggatcacatcattgctgcacacgaggtgttcttagacaccatcatctcccgctgcctgctggacagtgactccagggcacttttaaatcaacttagagctgtgtttgatcaaattattgaacttcagaatgctcaagatgcaatatacagagctgctctggaagaattgcagagacgattacagtttgaagagaaaaagaaacagcgtgaaattgagggccagtggggagtgacggcagcagaggaagaggaggaaaataagaggattggagaatttaaagaatctataccaaaaatgtgctcacagttgcgaatattgacccatttctaccagggtatcgtgcagcagtttttggtgttactgacgaccagctctgacgagagtcttcggtttcttagcttcaggctggacttcaacgagcattacaaagccagggagcccaggctccgtgtgtctctgggtaccagggggcggcgcagctcccacacgtgaagctcgcggtcctcccagggagctgcgggtgatgttcgttgcactgctagacacgaaattcccattgacgtcctgcaggaactgcatgctgcaggtgtcctgcccttccgcccacgagtgcgccatgtttcagcggagcggcgtgtgggagaagccacgtcgtgtttcacatgtcggagtcgaatgcatttgtaaatccctaagtcaagtaggctggctgcactgttcacatttgtctctaaaagtcttcatcgctaaaagataccataatttgctgaggcttcttaagctttctatgttataatttatatttgtcactttaaaaaatccatttcttttagaaaaaattagggtgataggatattcattagttaagatggtaacgtcattgctatttttttaacatcctctttagaggtaatttttgttaacataaccaaaaattaaattgaaacaaaatgtcccaactaagaaaatatatagagcattttatttttttttagtgttgtaaaatattaacctctgtgagatcctttgtatcttaatgcattacctttacacatatttattcttattttctctcctttcagagtttacatttttatatttaatttactatttcagatttttaaaatagtatagaaaaaagtaggagtgatagagaacaaaaatactcttatacagtgcaacccaaataccgcgaatgcatcagctaaagcagcgtgtaaataggagtgacgagaaagttaatggagtattttattttcaaagttcctgataagcattggaaagaaatcgacatggataatgaagatttcctttttccttgcctattttttcattgtaaatatttatatactactgaccaagatgttggggtgggggggattgttttttgtaaaaatgtcattatcaggtcacataaatctgcctttatgttgcataagtgaaaatttagaaaattaaaagcaattatctttcagatgc

SEQ ID NO: 23702 - protein, 907 aa, Homo sapiens; identical to SEQ ID NO: 3149

SEQ ID NO: 23703 - DNA, 2765 bp, Homo sapiens
attgtgggaagcgcccgcgctttcggcgggttccgttaaaatggcgccctggtggccggcggcgcccgcgccttagcctgtcaggagcagggagcttgcggggcgcaggaagggcgcgggccgcggtccctgcgcgtgcggcggcagtggcggctctgcccggaccaccgtgcacggctccgggcgaggatggcgaccccggaccagaagtcgccgaacgttctgctgcagaacctgtgctgcaggatcctgggcaggagcgaagctgatgtagcccagcagttccagtatgctgtgcgggtgattggcagcaacttcgccccaactgttgaaagagatgaatttttagtagctgaaaaaatcaagaaagagcttattcgacaacgaagagaagcagatgctgcattattttcagaactccacagaaaacttcattcacagggagttttgaaaaataaatggtcaatactctacctcttgctgagcctcagtgaggacccacgcaggcagccaagcaaggtttctagctatgctacgttatttgctcaggccttaccaagagatgcccactcaaccccttactactatgccaggcctcagacccttcccctgagctaccaagatcggagtgcccagtcagcccagagctccggcagcgtgggcagcagtggcatcagcagcattggcctgtgtgccctcagtggccccgcgcctgcgccacaatctctcctcccaggacagtctaatcaagctccaggagtaggagattgccttcgacagcagttggggtcacgactcgcatggactttaactgcaaatcagccttcttcacaagccactacctcaaaaggtgtccccagtgctgtgtctcgcaacatgacaaggtccaggagagaaggggatacgggtggtactatggaaattacagaagcagctctggtaagggacattttgtacgtctttcagggcatagatggcaaaaacatcaaaatgaacaacactgaaaattgttacaaagtagaaggaaaggcaaatctaagtaggtctttgagagacacagcagtcaggctttctgagttgggatggttgcataataaaatcagaagatacacggaccagaggagcctggaccgctcattcggactcgtcgggcagagcttttgtgctgccttgcaccaggaactcagagaatactatcgattgctctctgttttacattctcagctacaactagaggatgaccagggtgtgaatttgggacttgagagtagtttaacacttcggcgcctcctggtttggacctatgatcccaaaatacgactgaagacccttgcggccctagtggaccactgccaaggaaggaaaggaggtgagctggcctcagctgtccacgcctacacaaaaacaggagacccgtacatgcggtctctggtgcagcacatcctcagcctcgtgtctcatcctgttttgagcttcctgtaccgctggatatatgatggggagcttgaggacacttaccacgaattttttgtagcatcagatccaacagttaaaacagatcgactgtggcacgacaagtatactttgaggaaatcgatgattccttcgtttatgacgatggatcagtctaggaaggtccttttgataggaaaatcaataaatttcttgcaccaagtttgtcatgatcagactcccactacaaagatgatagctgtgaccaagtctgcagagtcaccccaggacgctgcagacctattcacagacttggaaaatgcatttcaggggaagattgatgctgcttattttgagaccagcaaatacctgttggatgttctcaataaaaagtacagcttgctggaccacatgcaggcaatgaggcggtacctgcttcttggtcaaggagactttataaggcacttaatggacttgctaaaaccagaacttgtccgtccagctacgactttgtatcagcataacttgactggaattctagaaaccgctgtcagagccaccaacgcacagtttgacagtcctgagatcctgcgaaggctggacgtgcggctgctggaggtctctccaggtgacactggatgggatgtcttcagcctcgattatcatgttgacggaccaattgcaactgtgtttactcgagaatgtatgagccactacctaagagtatttaacttcctctggagggcgaagcggatggaatacatcctcactgacatacggaagggacacatgtgcaatgcaaagctcctgagaaacatgccagagttctccggggtgctgcaccagtgtcacattttggcctctgagatggtccatttcattcatcagatgcagtattacatcacatttgaggtgcttgaatgttcttgggatgagctttggaacaaagtccagcaggcccaggatttggatcacatcattgctgcacacgaggtgttcttagacaccatcatctcccgctgcctgctggacagtgactccagggcacttttaaatcaacttagagctgtgtttgatcaaattattgaacttcagaatgctcaagatgcaatatacagagctgctctggaagaattgcagagacgattacagtttgaagagaaaaagaaacagcgtgaaattgaggttgagatgtgcctatactgcgtttgaagtcccgagaaatcactgacagttgtaaagagggaggggccaccctcactggcatcatcatcctgtttcacaaaataaataaaaacagcagcattcatgag

SEQ ID NO: 23704 - protein, 824 aa, Homo sapiens
MATPDQKSPNVLLQNLCCRILGRSEADVAQQFQYAVRVIGSNFAPTVERDEFLVAEKIKKELIRQRREADAALFSELHRKLHSQGVLKNKWSILYLLLSLSEDPRRQPSKVSSYATLFAQALPRDAHSTPYYYARPQTLPLSYQDRSAQSAQSSGSVGSSGISSIGLCALSGPAPAPQSLLPGQSNQAPGVGDCLRQQLGSRLAWTLTANQPSSQATTSKGVPSAVSRNMTRSRREGDTGGTMEITEAALVRDILYVFQGIDGKNIKMNNTENCYKVEGKANLSRSLRDTAVRLSELGWLHNKIRRYTDQRSLDRSFGLVGQSFCAALHQELREYYRLLSVLHSQLQLEDDQGVNLGLESSLTLRRLLVWTYDPKIRLKTLAALVDHCQGRKGGELASAVHAYTKTGDPYMRSLVQHILSLVSHPVLSFLYRWIYDGELEDTYHEFFVASDPTVKTDRLWHDKYTLRKSMIPSFMTMDQSRKVLLIGKSINFLHQVCHDQTPTTKMIAVTKSAESPQDAADLFTDLENAFQGKIDAAYFETSKYLLDVLNKKYSLLDHMQAMRRYLLLGQGDFIRHLMDLLKPELVRPATTLYQHNLTGILETAVRATNAQFDSPEILRRLDVRLLEVSPGDTGWDVFSLDYHVDGPIATVFTRECMSHYLRVFNFLWRAKRMEYILTDIRKGHMCNAKLLRNMPEFSGVLHQCHILASEMVHFIHQMQYYITFEVLECSWDELWNKVQQAQDLDHIIAAHEVFLDTIISRCLLDSDSRALLNQLRAVFDQIIELQNAQDAIYRAALEELQRRLQFEEKKKQREIEVEMCLYCV

SEQ ID NO: 23705 - DNA, 1103 bp, Homo sapiens
ggaacctagagtactaaaggacaccagaacattgagagaaaagaattagcgacagcccccgccgcgcccagcctcgcgtccaagtgggacacagacagctccacacagccggtgcaccggtgccggagaaacccaagagggggccaagggacaggctgagctacacagcccctccatcgtttaaggagcatgcgacaaatgaaaacagaggtgaagtagccagtaaacccagtgaactgtgagttcttctcatttatcccatgttgttattcctgccactttaattagaaagacatcatttagggaacaaatgaatgttggtgatttgagtcttttcagcatgatcagggaagatgaaagtcgaccctaggtcaaattccaacttcattgcttaaaagtggaaaacaagcgtctctctgttctctgaggaaatgaaaataaaggtccatttctcagttgaaggtattccctctatttacatttatatttttttccttaggtcataattcctttgttgtgttttttttttttttttttttttgagatggagtcttgctctgttgcccaggctggagtgcagcagcgtgatcttggttcactgcaacccctgcctcccaggttcaagcaattctcctgcctcagcctcctaagtagctgggactacaggcatgtgccaccatgcccagctaatttttgtatttttagtggacacagggtttcactatgttggccaggcttgtctccaactcctgaccttgtgatctgctcgccttggcctcccaaagtgctgggattacaggtgtgagccaccacgcctggcccataattcctttatgttttgtttgacatttgaaagctgtattttataagattttcctcgacatgtaccaaggttactgattcacttaatttctttttatatgtgtaagaacccaattctaaactcctgtaacaacagtttctaagtatcctttttgtatttagtgtttctggttctaacagcataatttctttcagcagtgtcataagtatggctaaacccattggtctatgcatgcctaacagtgcccacatcatggccagcaataccatgcaagtggaag

SEQ ID NO: 23706 - protein, 86 aa, Homo sapiens
MESCSVAQAGVQQRDLGSLQPLPPRFKQFSCLSLLSSWDYRHVPPCPANFCIFSGHRVSLCWPGLSPTPDLVICSPWPPKVLGLQV

SEQ ID NO: 23707 - DNA, 3946 bp, Homo sapiens
atgtcacatctggtggaccctacatcaggagacttgccagttagagacatagatgctatacctctggtgctaccagcctcaaaaggtaagaatatgaaaactcaaccacccttgagcaggatgaaccgggaggaattggaggacagtttctttcgacttcgcgaagatcacatgttggtgaaggagctttcttggaagcaacaggatgagatcaaaaggctgaggaccaccttgctgcggttgaccgctgctggccgggacctgcgggtcgcggaggaggcggcgccgctctcggagaccgcaaggcgcgggcagaaggcgggatggcggcagcgcctctccatgcaccagcgcccccagatgcaccgactgcaagggcatttccactgcgtcggccctgccagcccccgccgcgcccagcctcgcgtccaagtgggacacagacagctccacacagccggtgcaccggtgccggagaaacccaagagggggccaagggacaggctgagctacacagcccctccatcgtttaaggagcatgcgacaaatgaaaacagaggtgaagtagccagtaaacccagtgaacttgtttctggttctaacagcataatttctttcagcagtgtcataagtatggctaaacccattggtctatgcatgcctaacagtgcccacatcatggccagcaataccatgcaagtggaagagccacccaagtctcctgagaaaatgtggcctaaagatgaaaattttgaacagagaagctcattggagtgtgctcagaaggctgcagagcttcgagcttccattaaagagaaggtagagctgattcgacttaagaagctcttacatgaaagaaatgcttcattggttatgacaaaagcacaattaacagaagttcaagaggcatacgaaaccttgctccagaagaatcagggaatcctgagtgcagcccatgaggccctcctcaagcaagtgaatgagctcagggcagagctgaaggaagaaagcaagaaggctgtgagcttgaagagccaactggaagatgtgtctatcttgcagatgactctgaaggagtttcaggagagagttgaagatttggaaaaagaacgaaaattgctgaatgacaattatgacaaactcttagaaagcatgctggacagcagtgacagctccagtcagccccactggagcaacgagctcatagcggaacagctacagcagcaagtctctcagctgcaggatcagctggatgctgagctggaggacaagagaaaagttttacttgagctgtccagggagaaagcccaaaatgaggatctgaagcttgaagtcaccaacatacttcagaagcataaacaggaagtagagctcctccaaaatgcagccacaatttcccaacctcctgacaggcaatctgaaccagccactcacccagctgtattgcaagagaacactcagatcgagccaagtgaacccaaaaaccaagaagaaaagaaactgtcccaggtgctaaatgagttgcaagtatcacacgcagagaccacattggaactagaaaagaccagggacatgcttattctgcagcgcaaaatcaacgtgtgttatcaggaggaactggaggcaatgatgacaaaagctgacaatgataatagagatcacaaagaaaagctggagaggttgactcgactactagacctcaagaataaccgtatcaagcagctggaaggtattttaagaagccatgaccttccaacatctgaacagctcaaagatgttgcttatggcacccgaccgttgtcgttatgtttggaaacactgccagcccatggagatgaggataaagtggatatttctctgctgcatcagggtgagaatctttttgaactgcacatccaccaggccttcctgacatctgccgccctagctcaggctggagatacccaacctaccactttctgcacctattccttctatgactttgaaacccactgtaccccattatctgtggggccacagcccctctatgacttcacctcccagtatgtgatggagacagattcgcttttcttacactaccttcaagaggcttcagcccggcttgacatacaccaggccatggccagtgaacacagcactcttgctgcaggatggatttgctttgacagggtgctagagactgtggagaaagtccatggcttggccacactgattggagctggtggagaagagttcggggttctagagtactggatgaggctgcgtttccccataaaacccagcctacaggcgtgcaataaacgaaagaaagcccaggtctacctgtcaaccgatgtgcttggaggccggaaggcccaggaagaggagttcagatcggagtcttgggaacctcagaacgagctgtggattgaaatcaccaagtgctgtggcctccggagtcgatggctgggaactcaacccagtccatatgctgtgtaccgcttcttcaccttttctgaccatgacactgccatcattccagccagtaacaacccctactttagagaccaggctcgattcccagtgcttgtgacctctgacctggaccattatctgagacgggaggccttgtctatacatgtttttgatgatgaagacttagagcctggctcgtatcttggccgagcccgagtgcctttactgcctcttgcaaaaaatgaatctatcaaaggtgattttaacctcactgaccctgcagagaaacccaacggatctattcaagtgcaactggattggaagtttccctacataccccctgagagcttcctgaaaccagaagctcagactaaggggaaggataccaaggacagttcaaagatctcatctgaagaggaaaaggcttcatttccttcccaggatcagatggcatctcctgaggttcccattgaagctggccagtatcgatctaagagaaaacctcctcatgggggagaaagaaaggagaaggagcaccaggttgtgagctactcaagaagaaaacatggcaaaagaataggtgttcaaggaaagaatagaatggagtatcttagccttaacatcttaaatggaaatacaccagagcaggtgaattacactgagtggaagttctcagagactaacagcttcataggtgatggctttaaaaatcagcacgaggaagaggaaatgacattatcccattcagcactgaaacagaaggaacctctacatcctgtaaatgacaaagaatcctctgaacaaggttctgaagtcagtgaagcacaaactaccgacagtgatgatgtcatagtgccacccatgtctcagaaatatcctaaggcagattcagagaagatgtgcattgaaattgtctccctggccttctacccagaggcagaagtgatgtctgatgagaacataaaacaggtgtatgtggagtacaaattctacgacctacccttgtcggagacagagactccagtgtccctaaggaagcctagggcaggagaagaaatccactttcactttagcaaggtaatagacctggacccacaggagcagcaaggccgaaggcggtttctgttcgacatgctgaatggacaagatcctgatcaaggacatttaaagtttacagtggtaagtgatcctctggatgaagaaaagaaagaatgtgaagaagtgggatatgcatatcttcaactgtggcagatcctggagtcaggaagagatattctagagcaagagctagacattgttagccctgaagatctggctaccccaataggaaggctgaaggtttcccttcaagcagctgctgtcctccatgctatttacaaggagatgactgaagatttgttttcatgaaggaacaagtgctattccaatctaaaagtctctgagggaaccatagtaaaaagtctcttataaagttagcttgctataacatgaa

SEQ ID NO: 23708 - protein, 1286 aa, Homo sapiens
MSHLVDPTSGDLPVRDIDAIPLVLPASKGKNMKTQPPLSRMNREELEDSFFRLREDHMLVKELSWKQQDEIKRLRTTLLRLTAAGRDLRVAEEAAPLSETARRGQKAGWRQRLSMHQRPQMHRLQGHFHCVGPASPRRAQPRVQVGHRQLHTAGAPVPEKPKRGPRDRLSYTAPPSFKEHATNENRGEVASKPSELVSGSNSIISFSSVISMAKPIGLCMPNSAHIMASNTMQVEEPPKSPEKMWPKDENFEQRSSLECAQKAAELRASIKEKVELIRLKKLLHERNASLVMTKAQLTEVQEAYETLLQKNQGILSAAHEALLKQVNELRAELKEESKKAVSLKSQLEDVSILQMTLKEFQERVEDLEKERKLLNDNYDKLLESMLDSSDSSSQPHWSNELIAEQLQQQVSQLQDQLDAELEDKRKVLLELSREKAQNEDLKLEVTNILQKHKQEVELLQNAATISQPPDRQSEPATHPAVLQENTQIEPSEPKNQEEKKLSQVLNELQVSHAETTLELEKTRDMLILQRKINVCYQEELEAMMTKADNDNRDHKEKLERLTRLLDLKNNRIKQLEGILRSHDLPTSEQLKDVAYGTRPLSLCLETLPAHGDEDKVDISLLHQGENLFELHIHQAFLTSAALAQAGDTQPTTFCTYSFYDFETHCTPLSVGPQPLYDFTSQYVMETDSLFLHYLQEASARLDIHQAMASEHSTLAAGWICFDRVLETVEKVHGLATLIGAGGEEFGVLEYWMRLRFPIKPSLQACNKRKKAQVYLSTDVLGGRKAQEEEFRSESWEPQNELWIEITKCCGLRSRWLGTQPSPYAVYRFFTFSDHDTAIIPASNNPYFRDQARFPVLVTSDLDHYLRREALSIHVFDDEDLEPGSYLGRARVPLLPLAKNESIKGDFNLTDPAEKPNGSIQVQLDWKFPYIPPESFLKPEAQTKGKDTKDSSKISSEEEKASFPSQDQMASPEVPIEAGQYRSKRKPPHGGERKEKEHQVVSYSRRKHGKRIGVQGKNRMEYLSLNILNGNTPEQVNYTEWKFSETNSFIGDGFKNQHEEEEMTLSHSALKQKEPLHPVNDKESSEQGSEVSEAQTTDSDDVIVPPMSQKYPKADSEKMCIEIVSLAFYPEAEVMSDENIKQVYVEYKFYDLPLSETETPVSLRKPRAGEEIHFHFSKVIDLDPQEQQGRRRFLFDMLNGQDPDQGHLKFTVVSDPLDEEKKECEEVGYAYLQLWQILESGRDILEQELDIVSPEDLATPIGRLKVSLQAAAVLHAIYKEMTEDLFS

SEQ ID NO: 23709 - DNA, 2938 bp, Homo sapiens
agttatgaataaagcaagggcagaaaaaaacatgtaggggagagaatgaggaactaggtccaggagatgctgaaactggataataaagacgtcatatcacaccccttggggtatccatctgagagcttgctttccattgccagcatgctggacagcagtgacagctccagtcagccccactggagcaacgagctcatagcggaacagctacagcagcaagtctctcagctgcaggatcagctggatgctgagctggaggacaagagaaaagttttacttgagctgtccagggagaaagcccaaaatgaggatctgaagcttgaagtcaccaacatacttcagaagcataaacaggaagtagagctcctccaaaatgcagccacaatttcccaacctcctgacaggcaatctgaaccagccactcacccagctgtattgcaagagaacactcagatcgagccaagtgaacccaaaaaccaagaagaaaagaaactgtcccaggtgctaaatgagttgcaagtatcacacgcagagaccacattggaactagaaaagaccagggacatgcttattctgcagcgcaaaatcaacgtgtgttatcaggaggaactggaggcaatgatgacaaaagctgacaatgataatagagatcacaaagaaaagctggagaggttgactcgactactagacctcaagaataaccgtatcaagcagctggaaggtattttaagaagccatgaccttccaacatctgaacagctcaaagatgttgcttatggcacccgaccgttgtcgttatgtttggaaacactgccagcccatggagatgaggataaagtggatatttctctgctgcatcagggtgagaatctttttgaactgcacatccaccaggccttcctgacatctgccgccctagctcaggctggagatacccaacctaccactttctgcacctattccttctatgactttgaaacccactgtaccccattatctgtggggccacagcccctctatgacttcacctcccagtatgtgatggagacagattcgcttttcttacactaccttcaagaggcttcagcccggcttgacatacaccaggccatggccagtgaacacagcactcttgctgcaggatggatttgctttgacagggtgctagagactgtggagaaagtccatggcttggccacactgattggagctggtggagaagagttcggggttctagagtactggatgaggctgcgtttccccataaaacccagcctacaggcgtgcaataaacgaaagaaagcccaggtctacctgtcaaccgatgtgcttggaggccggaaggcccaggaagaggagttcagatcggagtcttgggaacctcagaacgagctgtggattgaaatcaccaagtgctgtggcctccggagtcgatggctgggaactcaacccagtccatatgctgtgtaccgcttcttcaccttttctgaccatgacactgccatcattccagccagtaacaacccctactttagagaccaggctcgattcccagtgcttgtgacctctgacctggaccattatctgagacgggaggccttgtctatacatgtttttgatgatgaagacttagagcctggctcgtatcttggccgagcccgagtgcctttactgcctcttgcaaaaaatgaatctatcaaaggtgattttaacctcactgaccctgcagagaaacccaacggatctattcaagtgcaactggattggaagtttccctacataccccctgagagcttcctgaaaccagaagctcagactaaggggaaggataccaaggacagttcaaagatctcatctgaagaggaaaaggcttcatttccttcccaggatcagatggcatctcctgaggttcccattgaagctggccagtatcgatctaagagaaaacctcctcatgggggagaaagaaaggagaaggagcaccaggttgtgagctactcaagaagaaaacatggcaaaagaataggtgttcaaggaaagaatagaatggagtatcttagccttaacatcttaaatggaaatacaccagagcaggtgaattacactgagtggaagttctcagagactaacagcttcataggtgatggctttaaaaatcagcacgaggaagaggaaatgacattatcccattcagcactgaaacagaaggaacctctacatcctgtaaatgacaaagaatcctctgaacaaggttctgaagtcagtgaagcacaaactaccgacagtgatgatgtcatagtgccacccatgtctcagaaatatcctaaggcagattcagagaagatgtgcattgaaattgtctccctggccttctacccagaggcagaagtgatgtctgatgagaacataaaacaggtgtatgtggagtacaaattctacgacctacccttgtcggagacagagactccagtgtccctaaggaagcctagggcaggagaagaaatccactttcactttagcaaggtaatagacctggacccacaggagcagcaaggccgaaggcggtttctgttcgacatgctgaatggacaagatcctgatcaaggacatttaaagtttacagtggtaagtgatcctctggatgaagaaaagaaagaatgtgaagaagtgggatatgcatatcttcaactgtggcagatcctggagtcaggaagagatattctagagcaagagctagacattgttagccctgaagatctggctaccccaataggaaggctgaaggtttcccttcaagcagctgctgtcctccatgctatttacaaggagatgactgaagatttgttttcatgaaggaacaagtgctattccaatctaaaagtctctgagggaaccatagtaaaaagtctcttataaagttagcttgctataacatgaa

SEQ ID NO: 23710 - protein, 928 aa, Homo sapiens
MLKLDNKDVISHPLGYPSESLLSIASMLDSSDSSSQPHWSNELIAEQLQQQVSQLQDQLDAELEDKRKVLLELSREKAQNEDLKLEVTNILQKHKQEVELLQNAATISQPPDRQSEPATHPAVLQENTQIEPSEPKNQEEKKLSQVLNELQVSHAETTLELEKTRDMLILQRKINVCYQEELEAMMTKADNDNRDHKEKLERLTRLLDLKNNRIKQLEGILRSHDLPTSEQLKDVAYGTRPLSLCLETLPAHGDEDKVDISLLHQGENLFELHIHQAFLTSAALAQAGDTQPTTFCTYSFYDFETHCTPLSVGPQPLYDFTSQYVMETDSLFLHYLQEASARLDIHQAMASEHSTLAAGWICFDRVLETVEKVHGLATLIGAGGEEFGVLEYWMRLRFPIKPSLQACNKRKKAQVYLSTDVLGGRKAQEEEFRSESWEPQNELWIEITKCCGLRSRWLGTQPSPYAVYRFFTFSDHDTAIIPASNNPYFRDQARFPVLVTSDLDHYLRREALSIHVFDDEDLEPGSYLGRARVPLLPLAKNESIKGDFNLTDPAEKPNGSIQVQLDWKFPYIPPESFLKPEAQTKGKDTKDSSKISSEEEKASFPSQDQMASPEVPIEAGQYRSKRKPPHGGERKEKEHQVVSYSRRKHGKRIGVQGKNRMEYLSLNILNGNTPEQVNYTEWKFSETNSFIGDGFKNQHEEEEMTLSHSALKQKEPLHPVNDKESSEQGSEVSEAQTTDSDDVIVPPMSQKYPKADSEKMCIEIVSLAFYPEAEVMSDENIKQVYVEYKFYDLPLSETETPVSLRKPRAGEEIHFHFSKVIDLDPQEQQGRRRFLFDMLNGQDPDQGHLKFTVVSDPLDEEKKECEEVGYAYLQLWQILESGRDILEQELDIVSPEDLATPIGRLKVSLQAAAVLHAIYKEMTEDLFS

SEQ ID NO: 23711 - DNA, 1990 bp, Homo sapiens
agttatgaataaagcaagggcagaaaaaaacatgtaggggagagaatgaggaactaggtccaggagatgctgaaactggataataaagacgtcatatcacaccccttggggtatccatctgagagcttgctttccattgccagcatgctggacagcagtgacagctccagtcagccccactggagcaacgagctcatagcggaacagctacagcagcaagtctctcagctgcaggatcagctggatgctgagctggaggacaagagaaaagttttacttgagctgtccagggagaaagcccaaaatgaggatctgaagcttgaagtcaccaacatacttcagaagcataaacaggaagtagagctcctccaaaatgcagccacaatttcccaacctcctgacaggcaatctgaaccagccactcacccagctgtattgcaagagaacactcagatcgagccaagtgaacccaaaaaccaagaagaaaagaaactgtcccaggtgctaaatgagttgcaagtatcacacgcagagaccacattggaactagaaaagaccagggacatgcttattctgcagcgcaaaatcaacgtgtgttatcaggaggaactggaggcaatgatgacaaaagctgacaatgataatagagatcacaaagaaaagctggagaggttgactcgactactagacctcaagaataaccgtatcaagcagctggaaggtattttaagaagccatgaccttccaacatctggtgattttaacctcactgaccctgcagagaaacccaacggatctattcaagtgcaactggattggaagtttccctacataccccctgagagcttcctgaaaccagaagctcagactaaggggaaggataccaaggacagttcaaagatctcatctgaagaggaaaaggcttcatttccttcccaggatcagatggcatctcctgaggttcccattgaagctggccagtatcgatctaagagaaaacctcctcatgggggagaaagaaaggagaaggagcaccaggttgtgagctactcaagaagaaaacatggcaaaagaataggtgttcaaggaaagaatagaatggagtatcttagccttaacatcttaaatggaaatacaccagagcaggtgaattacactgagtggaagttctcagagactaacagcttcataggtgatggctttaaaaatcagcacgaggaagaggaaatgacattatcccattcagcactgaaacagaaggaacctctacatcctgtaaatgacaaagaatcctctgaacaaggttctgaagtcagtgaagcacaaactaccgacagtgatgatgtcatagtgccacccatgtctcagaaatatcctaaggcagattcagagaagatgtgcattgaaattgtctccctggccttctacccagaggcagaagtgatgtctgatgagaacataaaacaggtgtatgtggagtacaaattctacgacctacccttgtcggagacagagactccagtgtccctaaggaagcctagggcaggagaagaaatccactttcactttagcaaggtaatagacctggacccacaggagcagcaaggccgaaggcggtttctgttcgacatgctgaatggacaagatcctgatcaaggacatttaaagtttacagtggtaagtgatcctctggatgaagaaaagaaagaatgtgaagaagtgggatatgcatatcttcaactgtggcagatcctggagtcaggaagagatattctagagcaagagctagacattgttagccctgaagatctggctaccccaataggaaggctgaaggtttcccttcaagcagctgctgtcctccatgctatttacaaggagatgactgaagatttgttttcatgaaggaacaagtgctattccaatctaaaagtctctgagggaaccatagtaaaaagtctcttataaagttagcttgctataacatgaa

SEQ ID NO: 23712 - protein, 612 aa, Homo sapiens
MLKLDNKDVISHPLGYPSESLLSIASMLDSSDSSSQPHWSNELIAEQLQQQVSQLQDQLDAELEDKRKVLLELSREKAQNEDLKLEVTNILQKHKQEVELLQNAATISQPPDRQSEPATHPAVLQENTQIEPSEPKNQEEKKLSQVLNELQVSHAETTLELEKTRDMLILQRKINVCYQEELEAMMTKADNDNRDHKEKLERLTRLLDLKNNRIKQLEGILRSHDLPTSGDFNLTDPAEKPNGSIQVQLDWKFPYIPPESFLKPEAQTKGKDTKDSSKISSEEEKASFPSQDQMASPEVPIEAGQYRSKRKPPHGGERKEKEHQVVSYSRRKHGKRIGVQGKNRMEYLSLNILNGNTPEQVNYTEWKFSETNSFIGDGFKNQHEEEEMTLSHSALKQKEPLHPVNDKESSEQGSEVSEAQTTDSDDVIVPPMSQKYPKADSEKMCIEIVSLAFYPEAEVMSDENIKQVYVEYKFYDLPLSETETPVSLRKPRAGEEIHFHFSKVIDLDPQEQQGRRRFLFDMLNGQDPDQGHLKFTVVSDPLDEEKKECEEVGYAYLQLWQILESGRDILEQELDIVSPEDLATPIGRLKVSLQAAAVLHAIYKEMTEDLFS

SEQ ID NO: 23713 - DNA, 2855 bp, Homo sapiens
aggcacgtgccactgtgccctgcttgaggacactttttggaaaactgtgagaaggcagagcgtagagaacttcatgagctccacccatttcttccactctttgcagctcataaaatttagaatctttttcagatgaggacttgaaaagatctgtggaagagcaaacagccattagtggctgtatcatctcccttcactgctgctactgaacatgagaactaggggaaagagcacttgtgaagtcatacaggtccttgtttacattttggagtagtttctgctgctggcattttactactaccaacaactgttttatggagaatcattattactttacctgtcatatttatactcccttttaccaatgcgtttccctctacagccaagtgaacccaaaaaccaagaagaaaagaaactgtcccaggtgctaaatgagttgcaagtatcacacgcagagaccacattggaactagaaaagaccagggacatgcttattctgcagcgcaaaatcaacgtgtgttatcaggtgcaaggaaagatggtacaggaaggggatggataacaggaacgtgggaaccactcacaggactgggaatgaagcaagacctaagtttccagggctgataccaggaactggaggcaatgatgacaaaagctgacaatgataatagagatcacaaagaaaagctggagaggttgactcgactactagacctcaagaataaccgtatcaagcagctggaaggtattttaagaagccatgaccttccaacatctgggtgagaatctttttgaactgcacatccaccaggccttcctgacatctgccgccctagctcaggctggagatacccaacctaccactttctgcacctattccttctatgactttgaaacccactgtaccccattatctgtggggccacagcccctctatgacttcacctcccagtatgtgatggagacagattcgcttttcttacactaccttcaagaggcttcagcccggcttgacatacaccaggccatggccagtgaacacagcactcttgctgcaggatggatttgctttgacagggtgctagagactgtggagaaagtccatggcttggccacactgattggagctggtggagaagagttcggggttctagagtactggatgaggctgcgtttccccataaaacccagcctacaggcgtgcaataaacgaaagaaagcccaggtctacctgtcaaccgatgtgcttggaggccggaaggcccaggaagaggagttcagatcggagtcttgggaacctcagaacgagctgtggattgaaatcaccaagtgctgtggcctccggagtcgatggctgggaactcaacccagtccatatgctgtgtaccgcttcttcaccttttctgaccatgacactgccatcattccagccagtaacaacccctactttagagaccaggctcgattcccagtgcttgtgacctctgacctggaccattatctgagacgggaggccttgtctatacatgtttttgatgatgaagacttagagcctggctcgtatcttggccgagcccgagtgcctttactgcctcttgcaaaaaatgaatctatcaaaggtgattttaacctcactgaccctgcagagaaacccaacggatctattcaagtgcaactggattggaagtttccctacataccccctgagagcttcctgaaaccagaagctcagactaaggggaaggataccaaggacagttcaaagatctcatctgaagaggaaaaggcttcatttccttcccaggatcagatggcatctcctgaggttcccattgaagctggccagtatcgatctaagagaaaacctcctcatgggggagaaagaaaggagaaggagcaccaggttgtgagctactcaagaagaaaacatggcaaaagaataggtgttcaaggaaagaatagaatggagtatcttagccttaacatcttaaatggaaatacaccagagcaggtgaattacactgagtggaagttctcagagactaacagcttcataggtgatggctttaaaaatcagcacgaggaagaggaaatgacattatcccattcagcactgaaacagaaggaacctctacatcctgtaaatgacaaagaatcctctgaacaaggttctgaagtcagtgaagcacaaactaccgacagtgatgatgtcatagtgccacccatgtctcagaaatatcctaaggcagattcagagaagatgtgcattgaaattgtctccctggccttctacccagaggcagaagtgatgtctgatgagaacataaaacaggtgtatgtggagtacaaattctacgacctacccttgtcggagacagagactccagtgtccctaaggaagcctagggcaggagaagaaatccactttcactttagcaaggtaatagacctggacccacaggagcagcaaggccgaaggcggtttctgttcgacatgctgaatggacaagatcctgatcaaggacatttaaagtttacagtggtaagtgatcctctggatgaagaaaagaaagaatgtgaagaagtgggatatgcatatcttcaactgtggcagatcctggagtcaggaagagatattctagagcaagagctagacattgttagccctgaagatctggctaccccaataggaaggctgaaggtttcccttcaagcagctgctgtcctccatgctatttacaaggagatgactgaagatttgttttcatgaaggaacaagtgctattccaatctaaaagtctctgagggaaccatagtaaaaagtctcttataaagttagcttgctataacatgaa

SEQ ID NO: 23714 - protein, 669 aa, Homo sapiens
MTFQHLGENLFELHIHQAFLTSAALAQAGDTQPTTFCTYSFYDFETHCTPLSVGPQPLYDFTSQYVMETDSLFLHYLQEASARLDIHQAMASEHSTLAAGWICFDRVLETVEKVHGLATLIGAGGEEFGVLEYWMRLRFPIKPSLQACNKRKKAQVYLSTDVLGGRKAQEEEFRSESWEPQNELWIEITKCCGLRSRWLGTQPSPYAVYRFFTFSDHDTAIIPASNNPYFRDQARFPVLVTSDLDHYLRREALSIHVFDDEDLEPGSYLGRARVPLLPLAKNESIKGDFNLTDPAEKPNGSIQVQLDWKFPYIPPESFLKPEAQTKGKDTKDSSKISSEEEKASFPSQDQMASPEVPIEAGQYRSKRKPPHGGERKEKEHQVVSYSRRKHGKRIGVQGKNRMEYLSLNILNGNTPEQVNYTEWKFSETNSFIGDGFKNQHEEEEMTLSHSALKQKEPLHPVNDKESSEQGSEVSEAQTTDSDDVIVPPMSQKYPKADSEKMCIEIVSLAFYPEAEVMSDENIKQVYVEYKFYDLPLSETETPVSLRKPRAGEEIHFHFSKVIDLDPQEQQGRRRFLFDMLNGQDPDQGHLKFTVVSDPLDEEKKECEEVGYAYLQLWQILESGRDILEQELDIVSPEDLATPIGRLKVSLQAAAVLHAIYKEMTEDLFS

SEQ ID NO: 23715 - DNA, 2139 bp, Homo sapiens
gagaggttgactcgactactagacctcaagaataaccgtatcaagcagctggaagaaagagctccctaccctttaacggataggcagctttctttcccctctagaacagctcaaagatgttgcttatggcacccgaccgttgtcgttatgtttggaaacactgccagcccatggagatgaggataaagtggatatttctctgctgcatcaggcccctctatgacttcacctcccagtatgtgatggagacagattcgcttttcttacactaccttcaagaggcttcagcccggcttgacatacaccaggccatggccagtgaacacagcactcttgctgcaggatggatttgctttgacagggtgctagagactgtggagaaagtccatggcttggccacactgattggagctggtggagaagagttcggggttctagagtactggatgaggctgcgtttccccataaaacccagcctacaggcgtgcaataaacgaaagaaagcccaggtctacctgtcaaccgatgtgcttggaggccggaaggcccaggaagaggagttcagatcggagtcttgggaacctcagaacgagctgtggattgaaatcaccaagtgctgtggcctccggagtcgatggctgggaactcaacccagtccatatgctgtgtaccgcttcttcaccttttctgaccatgacactgccatcattccagccagtaacaacccctactttagagaccaggctcgattcccagtgcttgtgacctctgacctggaccattatctgagacgggaggccttgtctatacatgtttttgatgatgaagacttagagcctggctcgtatcttggccgagcccgagtgcctttactgcctcttgcaaaaaatgaatctatcaaaggtgattttaacctcactgaccctgcagagaaacccaacggatctattcaagtgcaactggattggaagtttccctacataccccctgagagcttcctgaaaccagaagctcagactaaggggaaggataccaaggacagttcaaagatctcatctgaagaggaaaaggcttcatttccttcccaggatcagatggcatctcctgaggttcccattgaagctggccagtatcgatctaagagaaaacctcctcatgggggagaaagaaaggagaaggagcaccaggttgtgagctactcaagaagaaaacatggcaaaagaataggtgttcaaggaaagaatagaatggagtatcttagccttaacatcttaaatggaaatacaccagagcaggtgaattacactgagtggaagttctcagagactaacagcttcataggtgatggctttaaaaatcagcacgaggaagaggaaatgacattatcccattcagcactgaaacagaaggaacctctacatcctgtaaatgacaaagaatcctctgaacaaggttctgaagtcagtgaagcacaaactaccgacagtgatgatgtcatagtgccacccatgtctcagaaatatcctaaggcagattcagagaagatgtgcattgaaattgtctccctggccttctacccagaggcagaagtgatgtctgatgagaacataaaacaggtgtatgtggagtacaaattctacgacctacccttgtcggagacagagactccagtgtccctaaggaagcctagggcaggagaagaaatccactttcactttagcaaggtaatagacctggacccacaggagcagcaaggccgaaggcggtttctgttcgacatgctgaatggacaagatcctgatcaaggacatttaaagtttacagtggtaagtgatcctctggatgaagaaaagaaagaatgtgaagaagtgggatatgcatatcttcaactgtggcagatcctggagtcaggaagagatattctagagcaagagctagacattgttagccctgaagatctggctaccccaataggaaggctgaaggtttcccttcaagcagctgctgtcctccatgctatttacaaggagatgactgaagatttgttttcatgaaggaacaagtgctattccaatctaaaagtctctgagggaaccatagtaaaaagtctcttataaagttagcttgctataacatgaa

SEQ ID NO: 23716 - protein, 645 aa, Homo sapiens
MLLMAPDRCRYVWKHCQPMEMRIKWIFLCCIRPLYDFTSQYVMETDSLFLHYLQEASARLDIHQAMASEHSTLAAGWICFDRVLETVEKVHGLATLIGAGGEEFGVLEYWMRLRFPIKPSLQACNKRKKAQVYLSTDVLGGRKAQEEEFRSESWEPQNELWIEITKCCGLRSRWLGTQPSPYAVYRFFTFSDHDTAIIPASNNPYFRDQARFPVLVTSDLDHYLRREALSIHVFDDEDLEPGSYLGRARVPLLPLAKNESIKGDFNLTDPAEKPNGSIQVQLDWKFPYIPPESFLKPEAQTKGKDTKDSSKISSEEEKASFPSQDQMASPEVPIEAGQYRSKRKPPHGGERKEKEHQVVSYSRRKHGKRIGVQGKNRMEYLSLNILNGNTPEQVNYTEWKFSETNSFIGDGFKNQHEEEEMTLSHSALKQKEPLHPVNDKESSEQGSEVSEAQTTDSDDVIVPPMSQKYPKADSEKMCIEIVSLAFYPEAEVMSDENIKQVYVEYKFYDLPLSETETPVSLRKPRAGEEIHFHFSKVIDLDPQEQQGRRRFLFDMLNGQDPDQGHLKFTVVSDPLDEEKKECEEVGYAYLQLWQILESGRDILEQELDIVSPEDLATPIGRLKVSLQAAAVLHAIYKEMTEDLFS

SEQ ID NO: 23717 - DNA, 533 bp, Homo sapiens
ctactagacctcaagaataaccgtatcaagcagctggaaggtattttaagaagccatgaccttccaacatctgaacagctcaaagatgttgcttatggcacccgaccgttgtcgttatgtttggaaacactgccagcccatggagatgaggataaagtggatatttctctgctgcatcagggtgagaatctttttgaactgcacatccaccaggccttcctgacatctgccgccctagctcaggctggagatacccaacctaccactttctgcacctattccttctatgactttgaaacccactgtaccccattatctgtggggccacagcccctctatgacttcacctcccagtatgtgatggagacagattcgcttttcttacactaccttcaagaggcttcagcccggcttgacatacaccaggccatggccagtgaacacagcactcttgctgcaggatggatttgctttgacagggtgctagagactgtggagaaagtccatggcttggccacactgattggtaagtg

SEQ ID NO: 23718 - protein, 55 aa, Homo sapiens
MTFQHLNSSKMLLMAPDRCRYVWKHCQPMEMRIKWIFLCCIRVRIFLNCTSTRPS

SEQ ID NO: 23719 - DNA, 2878 bp, Homo sapiens
atatcaaagtttctgattggttggacttgggagataatacccagatttgctagactgtctacctatctttgcgtcccactgccaatatttcctacctctttccagtaagtctcttttcccactttttactccattactctttaacttataatgtactttttgccttcttatgttgaaaccaaattctgaacagaatgaaagatctcctgactgacctggctagagaaggagaagcatttcttggtgggactcaatgtaatgtcatagacactatgtctgcaacttgctattatctccacggccaatataccaaacttgtagaaatattcatgtttttgtgtttctagtacttctcttatggaattaccagttaatcatagggccacgatgtacaccaaaacaatgtcatatataagataaaatgtgcccccagtgttttcctaagtttagcatctactttccagtcactccttttgtaccttctccctaaagctggcattggattatttggctatcggaattcaatgctcctggttgtccttctgttgcttttccttttgaatcacgtggtttcttgaaataatcacaacttggacttccaccatgtgttttatatttcttttgtccaccctcctctaccctaagaaagagctccctaccctttaacggataggcagctttctttcccctctagaacagctcaaagatgttgcttatggcacccgaccgttgtcgttatgtttggaaacactgccagcccatggagatgaggataaagtggatatttctctgctgcatcagggtgagaatctttttgaactgcacatccaccaggccttcctgacatctgccgccctagctcaggctggagatacccaacctaccactttctgcacctattccttctatgactttgaaacccactgtaccccattatctgtggggccacagcccctctatgacttcacctcccagtatgtgatggagacagattcgcttttcttacactaccttcaagaggcttcagcccggcttgacatacaccaggccatggccagtgaacacagcactcttgctgcaggatggatttgctttgacagggtgctagagactgtggagaaagtccatggcttggccacactgattggagctggtggagaagagttcggggttctagagtactggatgaggctgcgtttccccataaaacccagcctacaggcgtgcaataaacgaaagaaagcccaggtctacctgtcaaccgatgtgcttggaggccggaaggcccaggaagaggagttcagatcggagtcttgggaacctcagaacgagctgtggattgaaatcaccaagtgctgtggcctccggagtcgatggctgggaactcaacccagtccatatgctgtgtaccgcttcttcaccttttctgaccatgacactgccatcattccagccagtaacaacccctactttagagaccaggctcgattcccagtgcttgtgacctctgacctggaccattatctgagacgggaggccttgtctatacatgtttttgatgatgaagacttagagcctggctcgtatcttggccgagcccgagtgcctttactgcctcttgcaaaaaatgaatctatcaaaggtgattttaacctcactgaccctgcagagaaacccaacggatctattcaagtgcaactggattggaagtttccctacataccccctgagagcttcctgaaaccagaagctcagactaaggggaaggataccaaggacagttcaaagatctcatctgaagaggaaaaggcttcatttccttcccaggatcagatggcatctcctgaggttcccattgaagctggccagtatcgatctaagagaaaacctcctcatgggggagaaagaaaggagaaggagcaccaggttgtgagctactcaagaagaaaacatggcaaaagaataggtgttcaaggaaagaatagaatggagtatcttagccttaacatcttaaatggaaatacaccagagcaggtgaattacactgagtggaagttctcagagactaacagcttcataggtgatggctttaaaaatcagcacgaggaagaggaaatgacattatcccattcagcactgaaacagaaggaacctctacatcctgtaaatgacaaagaatcctctgaacaaggttctgaagtcagtgaagcacaaactaccgacagtgatgatgtcatagtgccacccatgtctcagaaatatcctaaggcagattcagagaagatgtgcattgaaattgtctccctggccttctacccagaggcagaagtgatgtctgatgagaacataaaacaggtgtatgtggagtacaaattctacgacctacccttgtcggagacagagactccagtgtccctaaggaagcctagggcaggagaagaaatccactttcactttagcaaggtaatagacctggacccacaggagcagcaaggccgaaggcggtttctgttcgacatgctgaatggacaagatcctgatcaaggacatttaaagtttacagtggtaagtgatcctctggatgaagaaaagaaagaatgtgaagaagtgggatatgcatatcttcaactgtggcagatcctggagtcaggaagagatattctagagcaagagctagacattgttagccctgaagatctggctaccccaataggaaggctgaaggtttcccttcaagcagctgctgtcctccatgctatttacaaggagatgactgaagatttgttttcatgaaggaacaagtgctattccaatctaaaagtctctgagggaaccatagtaaaaagtctcttataaagttagcttgctataacatgaa

SEQ ID NO: 23720 - protein, 603 aa, Homo sapiens
METDSLFLHYLQEASARLDIHQAMASEHSTLAAGWICFDRVLETVEKVHGLATLIGAGGEEFGVLEYWMRLRFPIKPSLQACNKRKKAQVYLSTDVLGGRKAQEEEFRSESWEPQNELWIEITKCCGLRSRWLGTQPSPYAVYRFFTFSDHDTAIIPASNNPYFRDQARFPVLVTSDLDHYLRREALSIHVFDDEDLEPGSYLGRARVPLLPLAKNESIKGDFNLTDPAEKPNGSIQVQLDWKFPYIPPESFLKPEAQTKGKDTKDSSKISSEEEKASFPSQDQMASPEVPIEAGQYRSKRKPPHGGERKEKEHQVVSYSRRKHGKRIGVQGKNRMEYLSLNILNGNTPEQVNYTEWKFSETNSFIGDGFKNQHEEEEMTLSHSALKQKEPLHPVNDKESSEQGSEVSEAQTTDSDDVIVPPMSQKYPKADSEKMCIEIVSLAFYPEAEVMSDENIKQVYVEYKFYDLPLSETETPVSLRKPRAGEEIHFHFSKVIDLDPQEQQGRRRFLFDMLNGQDPDQGHLKFTVVSDPLDEEKKECEEVGYAYLQLWQILESGRDILEQELDIVSPEDLATPIGRLKVSLQAAAVLHAIYKEMTEDLFS

SEQ ID NO: 23721 - DNA, 3371 bp, Homo sapiens
tgaaaacagcctttaaaaatttcattgagaaagtagaggctctaactaaggaggaactggaatttgaagtgccttttagggacttggggtaacctatcttatttttggcttgaagtttgactggtctgtcttttggtacaataaattattcttcctttaataataatttaacatatcatatccttttttcctatgactaataatctttgagacatccattttttcttgaaaatgtttaagggtttaggtgagtggctaactcttaagaggcttcctctggatgagtctccagtgagtatgctggagctgtttggaatggggagagggaagaagtttgtctgttgtggtaggagcagtctctctcgtgatgagctcagtcttaaaagtttgtctcttccagatttaacggagctccctataggagtacctgcctccttcagcccactagtagtgcgctggtaaatgctacggaatggccaccttttgtggtgacattggatgaggtagagctgatccactttgagcgggtccagtttcacctgaagaactttgatatggtaatcgtctacaaggactacagcaagaaagtgaccatgatcaacgccattcctgtagcctctcttgaccccatcaaggaatggttgaattcctgcgacctgaaatacacagaaggagtacagtccctcaactggactaaaatcatgaagaccattgttgatgaccctgagggcttcttcgaacaaggtggctggtctttcctggagcctgagggtgaggggagtgatgctgaagaaggggattcagagtctgaaattgaagatgagacttttaatccttcagaagatgactatgaagaggaagaggaggacagtgatgaagattattcatcagaagcagaagagtcagactattctaaggagtcattgggtagtgaagaagagagtggaaaggattgggatgaactggaggaagaagcccgaaaagcggaccgagaaagtcgttacgaggaagaagaagaacaaagtcgaagtatgagccggaagaggaaggcatctgtgcacagttcgggccgtggctctaaccgtggttccagacacagctctgcaccccccaagaaaaagaggaagtaacttctgaactttggccctgagctccattcttcctccagccaacccctgaaaattttacatgacatagaaactgtatttttcctttcgttttcatttgaagttttgccatttgtgtttatgggtttagggggccatttgtgtggaccaatctactcggggaattccaggcccaccaggacacgtgccaatggccccattcagatggcaagggaggaggtgttcttgaagacaggaggaggctcccgctgttaataaatattgtttcattcttctctcttcctgtcaccttctgccaagacattgatggcttctgacatcttatttggtgtctcaaagctgtatttccaagacagtggtacaaggtgacccttaattacccgtatcatggttcttgaccagcacattcaatcctccaacctaccctactgccatgaccttccgcacatctctaagttttatctttgcaatactcaaggttctcggaaatttgctaatggttgtgataaaccatacagcttgagccagtgaggcagattgggctggtgccttcgtctgagttttcctgctttcctgcctcgtgcagattctgaggtatatctgctgccttggaagacataagaagcagtgatactccctggctcggttattttctccatacaatgcacacatggtacaatgatagaaggcaaaattgccactgtcttcttttttttctcatatatctaaggaagatatatcaggttgtgcctcatgtaccgcttctagtgaaatgtagaggaaggctcaaaggagtcaacatttatatctggaagggacaagtcatgccttgggcctagaataccctgatgagaaaagagaagaggaagggaggccatatctacaacacagcctctcggcactgctgctccttattttaactttgtcttgcattgtcctgtatttatcacagtttctgttgaacagcttttcaagtatttggggagtttatcttgccatcctccccttctggttctctgcacccacctgtcccactgcagttccttccgtgctctgtgactttaagagaagaaggggggaggggtcccggattttatgtttgtttgttttttctccttagcagtaggacttgatattttcaattttggaagaactaaaagatgaataaactgggttttttttgttgtttgtttttgtaaattcacctgtgaccgttcattttcagttcttgaaagcaagcctgcttcctgcctggtaaagtgctaaggtactggagaaaaatgcctttagctagctagttttacaaatgaaactttcatcattctaaactttcatcattagattgagagacactagacatcacagtaaaccaaattcatgttatagcaagctaactttataagagactttttactatggttccctcagagacttttagattggaatagcacttgttccttcatgaaaacaaatcttcagtcatctccttgtaaatagcatggaggacagcagctgcttgaagggaaaccttcagccttcctattggggtagccagatcttcagggctaacaactgttgggaaagggaaaaaaacagcatcactcagttgaacactttgatacttggtatttgtcaggttaggtactggggatgctaaatgaatgaaattacccatttcataagaggactcaatctagtgaaggagaaaggaaaatggtatagtgtataggtgctatataataaatggaagcacaagttgctttggggacataacgaggcatctgcaccagaatggacaaattggaaaggatttctggagaaatcaccagaaaagtcttaagtggattttccctgtgcacatacaaatggcatggaggtcaggaagaacatagcatgtttaggaatggggataggagtgagttggaaaatagcccacaaagataacgtcacttgccttatgccaggcactaccctaagccccttaatcccttatttaagtgcttccttaatcttcacaactcagtaagatagagactgctgttattcccgttttatagatgaggaaaaagactaaggatcacagttggaaagatactagaggaatataattagaatcttatctaacatttgaactttgtaaaccttagggtctgaggagtattcctcaaaaaatgtttataatgatcagtaagaataattttataccatgattcattaaacaatacataaaacaagtttcacaag

SEQ ID NO: 23722 - protein, 191 aa, Homo sapiens
MVIVYKDYSKKVTMINAIPVASLDPIKEWLNSCDLKYTEGVQSLNWTKIMKTIVDDPEGFFEQGGWSFLEPEGEGSDAEEGDSESEIEDETFNPSEDDYEEEEEDSDEDYSSEAEESDYSKESLGSEEESGKDWDELEEEARKADRESRYEEEEEQSRSMSRKRKASVHSSGRGSNRGSRHSSAPPKKKRK

SEQ ID NO: 23723 - DNA, 5724 bp, Homo sapiens
ggcagaccgtcacgtgacgacgtcgattcgcgtgcggcagtggcgaagttgacaaaccccgcgaaaatcgactctttgcatcgcacattttgttgattttccctcgtttttctttctctctttcccccgtccatccgaaagagggttggaaaaaaacaaaacaaacaaacaaacaaaaaaaaaacctaacgctgttgggacccggaagcggaaagggcatctttgaggtcgatacttccgggtcattgggagagtgcgggattcctgggccgagagcgggtggctgagccgggacctcgcgtgattctcggaacccgaggagaagcggcgtccggggctatggctgtgactctggacaaagacgcttattatcggcgagtgaagagactgtacagcaattggcggaaaggagaagatgagtatgccaacgttgatgccattgttgtatcagtgggtgttgatgaagaaattgtttatgccaaatcaactgccttacagacatggctctttggttatgaactaactgatactatcatggtcttttgtgatgacaaaatcatctttatggccagcaagaaaaaagtggagttcttgaaacagattgccaacactaagggcaatgagaatgctaatggagcccctgccatcacactgctaatacgagaaaagaatgaaagtaataagagtagctttgacaaaatgattgaagccattaaagaaagcaagaatggcaagaagattggagtgttcagcaaagacaaattccctggagagttcatgaagagctggaatgactgcctcaacaaagaaggctttgacaaaatagatatcagtgcagttgtggcatataccatcgctgtaaaggaggatggggagctcaacctaatgaagaaagcagccagcatcacttctgaagtcttcaacaaattcttcaaggaaagagtcatggaaatagttgatgcagatgagaaagttcgacacagcaaactggctgagtctgtggaaaaggccattgaagagaaaaaataccttgctggggcagacccttctactgtggaaatgtgttaccctcctatcattcagagtggtggcaactataatctcaagttcagtgtggtgagtgacaagaatcatatgcactttggggctatcacttgtgccatgggtattcgcttcaagtcttactgctccaaccttgttcgcactttgatggttgatccttctcaagaagttcaagaaaattataactttttgctccagcttcaagaggagctgctgaaggaattaagacatggtgtgaagatatgtgacgtgtataacgctgtcatggacgtggttaaaaagcagaagccagaactgctgaacaaaattaccaaaaacctagggtttgggatgggaattgaattccgtgaaggctccctagtaatcaatagcaaaaatcaatacaaactgaagaaaggaatggttttcagcatcaatttaggattctcagacctgactaacaaggaggggaaaaagccagaagagaaaacctatgccctgttcattggtgacacagtgcttgtggatgaggatggcccagctactgttctcacttctgtgaagaagaaagtgaagaatgtggggattttcctaaagaatgaagatgaggaagaagaggaggaggagaaagatgaggcagaggaccttttgggaagaggttctcgggcagcattacttacagaaagaacaagaaatgaaatgactgcagaagagaagcgaagagcacatcagaaagaactagcggctcaactcaatgaagaagcaaagaggcgattgactgaacaaaagggagaacagcagattcagaaagctcgcaagtctaatgtgtcctataaaaacccatctctgatgcctaaggaaccacatattcgggaaatgaagatctacatcgataagaaatatgagactgtaataatgcccgtgtttggcattgcaacaccgtttcacattgccacaatcaagaatataagtatgtccgtggaaggagattatacttacttgcgaatcaacttttattgcccaggcagtgctctgggcaggaatgaaggcaacatctttcctaaccctgaagcgacttttgtcaaggaaattacataccgagcatcaaatattaaggcacccggagaacagacagtaccagccttgaaccttcagaatgctttccgaattattaaagaagtacagaaacgttataaaactcgagaagctgaagagaaagagaaggaggggattgtaaaacaagactcactggtgatcaatctaaaccggagtaatccgaaactgaaagatctatacattcgcccaaatattgcccaaaagaggatgcaaggctcactggaggcccatgtcaatggcttccgcttcacatctgttcgaggagacaaagtggatattttgtacaataatattaagcatgctttgttccagccctgtgatggagaaatgattattgtcttgcactttcacctcaagaatgccatcatgtttgggaagaagcggcacacggatgtgcagttctacacagaagtgggagagataaccacggacttggggaaacatcagcatatgcatgaccgagatgacctctatgctgagcagatggaacgagaaatgaggcacaaactgaaaacagcctttaaaaatttcattgagaaagtagaggctctaactaaggaggaactggaatttgaagtgccttttagggacttgggatttaacggagctccctataggagtacctgcctccttcagcccactagtagtgcgctggtaaatgctacggaatggccaccttttgtggtgacattggatgaggtagagctgatccactttgagcgggtccagtttcacctgaagaactttgatatggtaatcgtctacaaggactacagcaagaaagtgaccatgatcaacgccattcctgtagcctctcttgaccccatcaaggaatggttgaattcctgcgacctgaaatacacagaaggagtacagtccctcaactggactaaaatcatgaagaccattgttgatgaccctgagggcttcttcgaacaaggtggctggtctttcctggagcctgagggtgaggggagtgatgctgaagaaggggattcagagtctgaaattgaagatgagacttttaatccttcagaagatgactatgaagaggaagaggaggacagtgatgaagattattcatcagaagcagaagagtcagactattctaaggagtcattgggtagtgaagaagagagtggaaaggattgggatgaactggaggaagaagcccgaaaagcggaccgagaaagtcgttacgaggaagaagaagaacaaagtcgaagtatgagccggaagaggaaggcatctgtgcacagttcgggccgtggctctaaccgtggttccagacacagctctgcaccccccaagaaaaagaggaagtaacttctgaactttggccctgagctccattcttcctccagccaacccctgaaaattttacatgacatagaaactgtatttttcctttcgttttcatttgaagttttgccatttgtgtttatgggtttagggggccatttgtgtggaccaatctactcggggaattccaggcccaccaggacacgtgccaatggccccattcagatggcaagggaggaggtgttcttgaagacaggaggaggctcccgctgttaataaatattgtttcattcttctctcttcctgtcaccttctgccaagacattgatggcttctgacatcttatttggtgtctcaaagctgtatttccaagacagtggtacaaggtgacccttaattacccgtatcatggttcttgaccagcacattcaatcctccaacctaccctactgccatgaccttccgcacatctctaagttttatctttgcaatactcaaggttctcggaaatttgctaatggttgtgataaaccatacagcttgagccagtgaggcagattgggctggtgccttcgtctgagttttcctgctttcctgcctcgtgcagattctgaggtatatctgctgccttggaagacataagaagcagtgatactccctggctcggttattttctccatacaatgcacacatggtacaatgatagaaggcaaaattgccactgtcttcttttttttctcatatatctaaggaagatatatcaggttgtgcctcatgtaccgcttctagtgaaatgtagaggaaggctcaaaggagtcaacatttatatctggaagggacaagtcatgccttgggcctagaataccctgatgagaaaagagaagaggaagggaggccatatctacaacacagcctctcggcactgctgctccttattttaactttgtcttgcattgtcctgtatttatcacagtttctgttgaacagcttttcaagtatttggggagtttatcttgccatcctccccttctggttctctgcacccacctgtcccactgcagttccttccgtgctctgtgactttaagagaagaaggggggaggggtcccggattttatgtttgtttgttttttctccttagcagtaggacttgatattttcaattttggaagaactaaaagatgaataaactgggttttttttgttgtttgtttttgtaaattcacctgtgaccgttcattttcagttcttgaaagcaagcctgcttcctgcctggtaaagtgctaaggtactggagaaaaatgcctttagctagctagttttacaaatgaaactttcatcattctaaactttcatcattagattgagagacactagacatcacagtaaaccaaattcatgttatagcaagctaactttataagagactttttactatggttccctcagagacttttagattggaatagcacttgttccttcatgaaaacaaatcttcagtcatctccttgtaaatagcatggaggacagcagctgcttgaagggaaaccttcagccttcctattggggtagccagatcttcagggctaacaactgttgggaaagggaaaaaaacagcatcactcagttgaacactttgatacttggtatttgtcaggttaggtactggggatgctaaatgaatgaaattacccatttcataagaggactcaatctagtgaaggagaaaggaaaatggtatagtgtataggtgctatataataaatggaagcacaagttgctttggggacataacgaggcatctgcaccagaatggacaaattggaaaggatttctggagaaatcaccagaaaagtcttaagtggattttccctgtgcacatacaaatggcatggaggtcaggaagaacatagcatgtttaggaatggggataggagtgagttggaaaatagcccacaaagataacgtcacttgccttatgccaggcactaccctaagccccttaatcccttatttaagtgcttccttaatcttcacaactcagtaagatagagactgctgttattcccgttttatagatgaggaaaaagactaaggatcacagttggaaagatactagaggaatataattagaatcttatctaacatttgaactttgtaaaccttagggtctgaggagtattcctcaaaaaatgtttataatgatcagtaagaataattttataccatgattcattaaacaatacataaaacaagtttcacaag

SEQ ID NO: 23724 - protein, 1047 aa, Homo sapiens; identical to SEQ ID NO: 3153

SEQ ID NO: 23725 - DNA, 2330 bp, Homo sapiens
tgaaaacagcctttaaaaatttcattgagaaagtagaggctctaactaaggaggaactggaatttgaagtgccttttagggacttggggtaacctatcttatttttggcttgaagtttgactggtctgtcttttggtacaataaattattcttcctttaataataatttaacatatcatatccttttttcctatgactaataatctttgagacatccattttttcttgaaaatgtttaagggtttaggtgagtggctaactcttaagaggcttcctctggatgagtctccagtgagtatgctggagctgtttggaatggggagagggaagaagtttgtctgttgtggtaggagcagtctctctcgtgatgagctcagtcttaaaagtttgtctcttccagatttaacggagctccctataggagtacctgcctccttcagcccactagtagtgcgctggtaaatgctacggaatggccaccttttgtggtgacattggatgaggtagagctgatccactttgagcgggtccagtttcacctgaagaactttgatatggtaatcgtctacaaggactacagcaagaaagtgaccatgatcaacgccattcctgtagcctctcttgaccccatcaaggaatggttgaattcctgcgacctgaaatacacagaaggagtacagtccctcaactggactaaaatcatgaagaccattgttgatgaccctgagggcttcttcgaacaaggtggctggtctttcctggagcctgagggtgaggggagtgatgctgaagaaggggattcagagtctgaaattgaagatgagacttttaatccttcagaagatgactatgaagaggaagaggaggacagtgatgaagattattcatcagaagcagaagagtcagactattctaaggagtcattgggtagtgaagaagagagtggaaaggattgggatgaactggaggaagaagcccgaaaagcggaccgagaaagtcgttacgaggaagaagaagaacaaagtcgaagtatgagccggaagaggaaggcatctgtgcacagttcgggccgtggctctaaccgtggttccagacacagctctgcaccccccaagaaaaagaggaagtaacttctgaactttggccctgagctccattcttcctccagccaacccctgaaaattttacatgacatagaaactgtatttttcctttcgttttcatttgaagttttgccatttgtgtttatgggtttagggggccatttgtgtggaccaatctactcggggaattccaggcccaccaggacacgtgccaatggccccattcagatggcaagggaggaggtgttcttgaagacaggaggaggctcccgctgttaataaatattgtttcattcttctctcttcctgtcaccttctgccaagacattgatggcttctgacatcttatttggtgtctcaaagctgtatttccaagacagtggtacaaggtgacccttaattacccgtatcatggttcttgaccagcacattcaatcctccaacctaccctactgccatgaccttccgcacatctctaagttttatctttgcaatactcaaggttctcggaaatttgctaatggttgtgataaaccatacagcttgagccagtgaggcagattgggctggtgccttcgtctgagttttcctgctttcctgcctcgtgcagattctgaggtatatctgctgccttggaagacataagaagcagtgatactccctggctcggttattttctccatacaatgcacacatggtacaatgatagaaggcaaaattgccactgtcttcttttttttctcatatatctaaggaagatatatcaggttgtgcctcatgtaccgcttctagtgaaatgtagaggaaggctcaaaggagtcaacatttatatctggaagggacaagtcatgccttgggcctagaataccctgatgagaaaagagaagaggaagggaggccatatctacaacacagcctctcggcactgctgctccttattttaactttgtcttgcattgtcctgtatttatcacagtttctgttgaacagcttttcaagtatttggggagtttatcttgccatcctccccttctggttctctgcacccacctgtcccactgcagttccttccgtgctctgtgactttaagagaagaaggggggaggggtcccggattttatgtttgtttgttttttctccttagcagtaggacttgatattttcaattttggaagaactaaaagatgaataaactgggttttttttgttgtttgtttttgtaaattc

SEQ ID NO: 23726 - protein, 191 aa, Homo sapiens; identical to SEQ ID NO: 23722

SEQ ID NO: 23727 - DNA, 4683 bp, Homo sapiens
ggcagaccgtcacgtgacgacgtcgattcgcgtgcggcagtggcgaagttgacaaaccccgcgaaaatcgactctttgcatcgcacattttgttgattttccctcgtttttctttctctctttcccccgtccatccgaaagagggttggaaaaaaacaaaacaaacaaacaaacaaaaaaaaaacctaacgctgttgggacccggaagcggaaagggcatctttgaggtcgatacttccgggtcattgggagagtgcgggattcctgggccgagagcgggtggctgagccgggacctcgcgtgattctcggaacccgaggagaagcggcgtccggggctatggctgtgactctggacaaagacgcttattatcggcgagtgaagagactgtacagcaattggcggaaaggagaagatgagtatgccaacgttgatgccattgttgtatcagtgggtgttgatgaagaaattgtttatgccaaatcaactgccttacagacatggctctttggttatgaactaactgatactatcatggtcttttgtgatgacaaaatcatctttatggccagcaagaaaaaagtggagttcttgaaacagattgccaacactaagggcaatgagaatgctaatggagcccctgccatcacactgctaatacgagaaaagaatgaaagtaataagagtagctttgacaaaatgattgaagccattaaagaaagcaagaatggcaagaagattggagtgttcagcaaagacaaattccctggagagttcatgaagagctggaatgactgcctcaacaaagaaggctttgacaaaatagatatcagtgcagttgtggcatataccatcgctgtaaaggaggatggggagctcaacctaatgaagaaagcagccagcatcacttctgaagtcttcaacaaattcttcaaggaaagagtcatggaaatagttgatgcagatgagaaagttcgacacagcaaactggctgagtctgtggaaaaggccattgaagagaaaaaataccttgctggggcagacccttctactgtggaaatgtgttaccctcctatcattcagagtggtggcaactataatctcaagttcagtgtggtgagtgacaagaatcatatgcactttggggctatcacttgtgccatgggtattcgcttcaagtcttactgctccaaccttgttcgcactttgatggttgatccttctcaagaagttcaagaaaattataactttttgctccagcttcaagaggagctgctgaaggaattaagacatggtgtgaagatatgtgacgtgtataacgctgtcatggacgtggttaaaaagcagaagccagaactgctgaacaaaattaccaaaaacctagggtttgggatgggaattgaattccgtgaaggctccctagtaatcaatagcaaaaatcaatacaaactgaagaaaggaatggttttcagcatcaatttaggattctcagacctgactaacaaggaggggaaaaagccagaagagaaaacctatgccctgttcattggtgacacagtgcttgtggatgaggatggcccagctactgttctcacttctgtgaagaagaaagtgaagaatgtggggattttcctaaagaatgaagatgaggaagaagaggaggaggagaaagatgaggcagaggaccttttgggaagaggttctcgggcagcattacttacagaaagaacaagaaatgaaatgactgcagaagagaagcgaagagcacatcagaaagaactagcggctcaactcaatgaagaagcaaagaggcgattgactgaacaaaagggagaacagcagattcagaaagctcgcaagtctaatgtgtcctataaaaacccatctctgatgcctaaggaaccacatattcgggaaatgaagatctacatcgataagaaatatgagactgtaataatgcccgtgtttggcattgcaacaccgtttcacattgccacaatcaagaatataagtatgtccgtggaaggagattatacttacttgcgaatcaacttttattgcccaggcagtgctctgggcaggaatgaaggcaacatctttcctaaccctgaagcgacttttgtcaaggaaattacataccgagcatcaaatattaaggcacccggagaacagacagtaccagccttgaaccttcagaatgctttccgaattattaaagaagtacagaaacgttataaaactcgagaagctgaagagaaagagaaggaggggattgtaaaacaagactcactggtgatcaatctaaaccggagtaatccgaaactgaaagatctatacattcgcccaaatattgcccaaaagaggatgcaaggctcactggaggcccatgtcaatggcttccgcttcacatctgttcgaggagacaaagtggatattttgtacaataatattaagcatgctttgttccagccctgtgatggagaaatgattattgtcttgcactttcacctcaagaatgccatcatgtttgggaagaagcggcacacggatgtgcagttctacacagaagtgggagagataaccacggacttggggaaacatcagcatatgcatgaccgagatgacctctatgctgagcagatggaacgagaaatgaggcacaaactgaaaacagcctttaaaaatttcattgagaaagtagaggctctaactaaggaggaactggaatttgaagtgccttttagggacttgggatttaacggagctccctataggagtacctgcctccttcagcccactagtagtgcgctggtaaatgctacggaatggccaccttttgtggtgacattggatgaggtagagctgatccactttgagcgggtccagtttcacctgaagaactttgatatggtaatcgtctacaaggactacagcaagaaagtgaccatgatcaacgccattcctgtagcctctcttgaccccatcaaggaatggttgaattcctgcgacctgaaatacacagaaggagtacagtccctcaactggactaaaatcatgaagaccattgttgatgaccctgagggcttcttcgaacaaggtggctggtctttcctggagcctgagggtgaggggagtgatgctgaagaaggggattcagagtctgaaattgaagatgagacttttaatccttcagaagatgactatgaagaggaagaggaggacagtgatgaagattattcatcagaagcagaagagtcagactattctaaggagtcattgggtagtgaagaagagagtggaaaggattgggatgaactggaggaagaagcccgaaaagcggaccgagaaagtcgttacgaggaagaagaagaacaaagtcgaagtatgagccggaagaggaaggcatctgtgcacagttcgggccgtggctctaaccgtggttccagacacagctctgcaccccccaagaaaaagaggaagtaacttctgaactttggccctgagctccattcttcctccagccaacccctgaaaattttacatgacatagaaactgtatttttcctttcgttttcatttgaagttttgccatttgtgtttatgggtttagggggccatttgtgtggaccaatctactcggggaattccaggcccaccaggacacgtgccaatggccccattcagatggcaagggaggaggtgttcttgaagacaggaggaggctcccgctgttaataaatattgtttcattcttctctcttcctgtcaccttctgccaagacattgatggcttctgacatcttatttggtgtctcaaagctgtatttccaagacagtggtacaaggtgacccttaattacccgtatcatggttcttgaccagcacattcaatcctccaacctaccctactgccatgaccttccgcacatctctaagttttatctttgcaatactcaaggttctcggaaatttgctaatggttgtgataaaccatacagcttgagccagtgaggcagattgggctggtgccttcgtctgagttttcctgctttcctgcctcgtgcagattctgaggtatatctgctgccttggaagacataagaagcagtgatactccctggctcggttattttctccatacaatgcacacatggtacaatgatagaaggcaaaattgccactgtcttcttttttttctcatatatctaaggaagatatatcaggttgtgcctcatgtaccgcttctagtgaaatgtagaggaaggctcaaaggagtcaacatttatatctggaagggacaagtcatgccttgggcctagaataccctgatgagaaaagagaagaggaagggaggccatatctacaacacagcctctcggcactgctgctccttattttaactttgtcttgcattgtcctgtatttatcacagtttctgttgaacagcttttcaagtatttggggagtttatcttgccatcctccccttctggttctctgcacccacctgtcccactgcagttccttccgtgctctgtgactttaagagaagaaggggggaggggtcccggattttatgtttgtttgttttttctccttagcagtaggacttgatattttcaattttggaagaactaaaagatgaataaactgggttttttttgttgtttgtttttgtaaattc

SEQ ID NO: 23728 - protein, 1047 aa, Homo sapiens; identical to SEQ ID NO: 3153

SEQ ID NO: 23729 - DNA, 3755 bp, Homo sapiens
ggcagaccgtcacgtgacgacgtcgattcgcgtgcggcagtggcgaagttgacaaaccccgcgaaaatcgactctttgcatcgcacattttgttgattttccctcgtttttctttctctctttcccccgtccatccgaaagagggttggaaaaaaacaaaacaaacaaacaaacaaaaaaaaaacctaacgctgttgggacccggaagcggaaagggcatctttgaggtcgatacttccgggtcattgggagagtgcgggattcctgggccgagagcgggtggctgagccgggacctcgcgtgattctcggaacccgaggagaagcggcgtccggggctatggctgtgactctggacaaagacgcttattatcggcgagtgaagagactgtacagcaattggcggaaaggagaagatgagtatgccaacgttgatgccattgttgtatcagtgggtgttgatgaagaaattgtttatgccaaatcaactgccttacagacatggctctttggttatgaactaactgatactatcatggtcttttgtgatgacaaaatcatctttatggccagcaagaaaaaagtggagttcttgaaacagattgccaacactaagggcaatgagaatgctaatggagcccctgccatcacactgctaatacgagaaaagaatgaaagtaataagagtagctttgacaaaatgattgaagccattaaagaaagcaagaatggcaagaagattggagtgttcagcaaagacaaattccctggagagttcatgaagagctggaatgactgcctcaacaaagaaggctttgacaaaatagatatcagtgcagttgtggcatataccatcgctgtaaaggaggatggggagctcaacctaatgaagaaagcagccagcatcacttctgaagtcttcaacaaattcttcaaggaaagagtcatggaaatagttgatgcagatgagaaagttcgacacagcaaactggctgagtctgtggaaaaggccattgaagagaaaaaataccttgctggggcagacccttctactgtggaaatgtgttaccctcctatcattcagagtggtggcaactataatctcaagttcagtgtggtgagtgacaagaatcatatgcactttggggctatcacttgtgccatgggtattcgcttcaagtcttactgctccaaccttgttcgcactttgatggttgatccttctcaagaagttcaagaaaattataactttttgctccagcttcaagaggagctgctgaaggaattaagacatggtgtgaagatatgtgacgtgtataacgctgtcatggacgtggttaaaaagcagaagccagaactgctgaacaaaattaccaaaaacctagggtttgggatgggaattgaattccgtgaaggctccctagtaatcaatagcaaaaatcaatacaaactgaagaaaggaatggttttcagcatcaatttaggattctcagacctgactaacaaggaggggaaaaagccagaagagaaaacctatgccctgttcattggtgacacagtgcttgtggatgaggatggcccagctactgttctcacttctgtgaagaagaaagtgaagaatgtggggattttcctaaagaatgaagatgaggaagaagaggaggaggagaaagatgaggcagaggaccttttgggaagaggttctcgggcagcattacttacagaaagaacaagaaatgaaatgactgcagaagagaagcgaagagcacatcagaaagaactagcggctcaactcaatgaagaagcaaagaggcgattgactgaacaaaagggagaacagcagattcagaaagctcgcaagtctaatgtgtcctataaaaacccatctctgatgcctaaggaaccacatattcgggaaatgaagatctacatcgataagaaatatgagactgtaataatgcccgtgtttggcattgcaacaccgtttcacattgccacaatcaagaatataagtatgtccgtggaaggagattatacttacttgcgaatcaacttttattgcccaggcagtgctctgggcaggaatgaaggcaacatctttcctaaccctgaagcgacttttgtcaaggaaattacataccgagcatcaaatattaaggcacccggagaacagacagtaccagccttgaaccttcagaatgctttccgaattattaaagaagtacagaaacgttataaaactcgagaagctgaagagaaagagaaggaggggattgtaaaacaagactcactggtgatcaatctaaaccggagtaatccgaaactgaaagatctatacattcgcccaaatattgcccaaaagaggatgcaaggctcactggaggcccatgtcaatggcttccgcttcacatctgttcgaggagacaaagtggatattttgtacaataatattaagcatgctttgttccagccctgtgatggagaaatgattattgtcttgcactttcacctcaagaatgccatcatgtttgggaagaagcggcacacggatgtgcagttctacacagaagtgggagagataaccacggacttggggaaacatcagcatatgcatgaccgagatgacctctatgctgagcagatggaacgagaaatgaggcacaaactgaaaacagcctttaaaaatttcattgagaaagtagaggctctaactaaggaggaactggaatttgaagtgccttttagggacttgggatttaacggagctccctataggagtacctgcctccttcagcccactagtagtgcgctggtaaatgctacggaatggccaccttttgtggtgacattggatgaggtagagctgatccactttgagcgggtccagtttcacctgaagaactttgatatggtaatcgtctacaaggactacagcaagaaagtgaccatgatcaacgccattcctgtagcctctcttgaccccatcaaggaatggttgaattcctgcgacctgaaatacacagaaggagtacagtccctcaactggactaaaatcatgaagaccattgttgatgaccctgagggcttcttcgaacaaggtggctggtctttcctggagcctgagggtgaggggagtgatgctgaagaaggggattcagagtctgaaattgaagatgagacttttaatccttcagaagatgactatgaagaggaagaggaggacagtgatgaagattattcatcagaagcagaagagtcagactattctaaggagtcattgggtagtgaagaagagagtggaaaggattgggatgaactggaggaagaagcccgaaaagcggaccgagaaagtcgttacgaggaagaagaagaacaaagtcgaagtatgagccggaagaggaaggcatctgtgcacagttcgggccgtggctctaaccgtggttccagacacagctctgcaccccccaagaaaaagaggaagtaacttctgaactttggccctgagctccattcttcctccagccaacccctgaaaattttacatgacatagaaactgtatttttcctttcgttttcatttgaagttttgccatttgtgtttatgggtttagggggccatttgtgtggaccaatctactcggggaattccaggcccaccaggacacgtgccaatggccccattcagatggcaagggaggaggtgttcttgaagacaggaggaggctcccgctgttaataaatattgtttcattcttc

SEQ ID NO: 23730 - protein, 1047 aa, Homo sapiens; identical to SEQ ID NO: 3153

SEQ ID NO: 23731 - DNA, 1723 bp, Homo sapiens
ggcagaccgtcacgtgacgacgtcgattcgcgtgcggcagtggcgaagttgacaaaccccgcgaaaatcgactctttgcatcgcacattttgttgattttccctcgtttttctttctctctttcccccgtccatccgaaagagggttggaaaaaaacaaaacaaacaaacaaacaaaaaaaaaacctaacgctgttgggacccggaagcggaaagggcatctttgaggtcgatacttccgggtcattgggagagtgcgggattcctgggccgagagcgggtggctgagccgggacctcgcgtgattctcggaacccgaggagaagcggcgtccggggctatggctgtgactctggacaaagacgcttattatcggcgagtgaagagactgtacagcaattggcggaaaggagaagatgagtatgccaacgttgatgccattgttgtatcagtgggtgttgatgaagaaattgtttatgccaaatcaactgccttacagacatggctctttggttatgaactaactgatactatcatggtcttttgtgatgacaaaatcatctttatggccagcaagaaaaaagtggagttcttgaaacagattgccaacactaagggcaatgagaatgctaatggagcccctgccatcacactgctaatacgagaaaagaatgaaagtaataagagtagctttgacaaaatgattgaagccattaaagaaagcaagaatggcaagaagattggagtgttcagcaaagacaaattccctggagagttcatgaagagctggaatgactgcctcaacaaagaaggctttgacaaaatagatatcagtgcagttgtggcatataccatcgctgtaaaggaggatggggagctcaacctaatgaagaaagcagccagcatcacttctgaagtcttcaacaaattcttcaaggaaagagtcatggaaatagttgatgcagatgagaaagttcgacacagcaaactggctgagtctgtggaaaaggccattgaagagaaaaaataccttgctggggcagacccttctactgtggaaatgtgttaccctcctatcattcagagtggtggcaactataatctcaagttcagtgtggtgagtgacaagaatcatatgcactttggggctatcacttgtgccatgggtattcgcttcaagtcttactgctccaaccttgttcgcactttgatggttgatccttctcaagaagttcaagaaaattataactttttgctccagcttcaagaggagctgctgaaggaattaagacatggtgtgaagatatgtgacgtgtataacgctgtcatggacgtggttaaaaagcagaagccagaactgctgaacaaaattaccaaaaacctagggtttgggatgggaattgaattccgtgaaggctccctagtaatcaatagcaaaaatcaatacaaactgaagaaaggaatggttttcagcatcaatttaggattctcagacctgactaacaaggaggggaaaaagccagaagagaaaacctatgccctgttcattggtgacacagtgcttgtggatgaggatggcccagctactgttctcacttctgtgaagaagaaagtgaagaatgtggggattttcctaaagaatgaagatgaggaagaagaggaggaggagaaagatgaggcagaggaccttttgggaagaggttctcgggcagcattacttacag

SEQ ID NO: 23732 - protein, 460 aa, Homo sapiens
MAVTLDKDAYYRRVKRLYSNWRKGEDEYANVDAIVVSVGVDEEIVYAKSTALQTWLFGYELTDTIMVFCDDKIIFMASKKKVEFLKQIANTKGNENANGAPAITLLIREKNESNKSSFDKMIEAIKESKNGKKIGVFSKDKFPGEFMKSWNDCLNKEGFDKIDISAVVAYTIAVKEDGELNLMKKAASITSEVFNKFFKERVMEIVDADEKVRHSKLAESVEKAIEEKKYLAGADPSTVEMCYPPIIQSGGNYNLKFSVVSDKNHMHFGAITCAMGIRFKSYCSNLVRTLMVDPSQEVQENYNFLLQLQEELLKELRHGVKICDVYNAVMDVVKKQKPELLNKITKNLGFGMGIEFREGSLVINSKNQYKLKKGMVFSINLGFSDLTNKEGKKPEEKTYALFIGDTVLVDEDGPATVLTSVKKKVKNVGIFLKNEDEEEEEEEKDEAEDLLGRGSRAALL

SEQ ID NO: 23733 - DNA, 1210 bp, Homo sapiens
ggcagaccgtcacgtgacgacgtcgattcgcgtgcggcagtggcgaagttgacaaaccccgcgaaaatcgactctttgcatcgcacattttgttgattttccctcgtttttctttctctctttcccccgtccatccgaaagagggttggaaaaaaacaaaacaaacaaacaaacaaaaaaaaaacctaacgctgttgggacccggaagcggaaagggcatctttgaggtcgatacttccgggtcattgggagagtgcgggattcctgggccgagagcgggtggctgagccgggacctcgcgtgattctcggaacccgaggagaagcggcgtccggggctatggctgtgactctggacaaagacgcttattatcggcgagtgaagagactgtacagcaattggcggaaaggagaagatgagtatgccaacgttgatgccattgttgtatcagtgggtgttgatgaagaaattgtttatgccaaatcaactgccttacagacatggctctttggttatgaactaactgatactatcatggtcttttgtgatgacaaaatcatctttatggccagcaagaaaaaagtggagttcttgaaacagattgccaacactaagggcaatgagaatgctaatggagcccctgccatcacactgctaatacgagaaaagaatgaaagtaataagagtagctttgacaaaatgattgaagccattaaagaaagcaagaatggcaagaagattggagtgttcagcaaagacaaattccctggagagttcatgaagagctggaatgactgcctcaacaaagaaggctttgacaaaatagatatcagtgcagttgtggcatataccatcgctgtaaaggaggatggggagctcaacctaatgaagaaagcagccagcatcacttctgaagtcttcaacaaattcttcaaggaaagagtcatggaaatagttgatgcagatgaggtaaatggagatgagagggtctttttactgttttaatgaagcagtaataagtctaccatgcaaatctgttggtgtgttcttcagcttcctttgaaattaagactgacacttaagttggtggtaattacatcatctccctttcaaaataatggtaagcctgcgttatgttttcttgaggtaacccattattttacttgagaatcataggaatagctgtaagtcctacatattgttctccaaa

SEQ ID NO: 23734 - protein, 221 aa, Homo sapiens
MAVTLDKDAYYRRVKRLYSNWRKGEDEYANVDAIVVSVGVDEEIVYAKSTALQTWLFGYELTDTIMVFCDDKIIFMASKKKVEFLKQIANTKGNENANGAPAITLLIREKNESNKSSFDKMIEAIKESKNGKKIGVFSKDKFPGEFMKSWNDCLNKEGFDKIDISAVVAYTIAVKEDGELNLMKKAASITSEVFNKFFKERVMEIVDADEVNGDERVFLLF

SEQ ID NO: 23735 - DNA, 884 bp, Homo sapiens
gggattcctgggccgagagcgggtggctgagccgggacctcgcgtgattctcggaacccgaggagaagcggcgtccggggctatggctgtgactctggacaaagacgcttattatcggcgagtgaagagactgtacagcaattggcggaaaggagaagatgagtatgccaacgttgatgccattgttgtatcagtgggtgttgatgaagaaattgtttatgccaaatcaactgccttacagtcttcagggacccaggctttttccagttctctgttctgccacccaaagaacatagccctcttgcacgtggtacagaatggcttctagaactccaggtgtttcatctacattccaagcaaaaagagacagagaagaaaacaggaggccaccttttctttttaagaagacttgcttgaagctccacacactaccattttttacctattggccaaaatttgatcctaatgaccatacttacctgaaaggaaggtaaaatatcagttctttgagaaggagaaatgaataattggtagggaactggtaattgaggaggtaataacgcagggttctgtatcactctgtcccttgttttatgcatttctgtatcactaaacattgatatacttcctataaacacaaatcgtttaactgatttgatggttttaattatagaaagttcaagcatataaacgtagagaaaataatacattgaaccccattgtcctgttctaataaattgtcgactcttggccgatcttgcttaatttgtatccactccagactccccagcctgattaccttggagttaatttcagacatgttatttttgtctataagtatttctgtatatctatatgagtccattaatttttgtatctgtaaa

SEQ ID NO: 23736 - protein, 81 aa, Homo sapiens
MAVTLDKDAYYRRVKRLYSNWRKGEDEYANVDAIVVSVGVDEEIVYAKSTALQSSGTQAFSSSLFCHPKNIALLHVVQNGF

SEQ ID NO: 23737 - DNA, 1061 bp, Homo sapiens
agagtgcgggattcctgggccgagagcgggtggctgagccgggacctcgcgtgattctcggaacccgaggagaagcggcgtccggggctatggctgtgactctggacaaagacgcttattatcggcgagtgaagagactgtacagcaattggcgggaattcccgggttctgtgcctcacccttttcgttgctcccgaatcattcaccggaggcggccacgaacgctgccccttaacagggaatcccccgcattcaccctgtcctgcggccatcaccatcttccccgcgtgccagccttggtcatgcatagcagcacctctcgcagtctcttcccgccctagaagaggcaacatccttccctcctactccgtggtcacgtcttgctgccctcccctgccgtgttctcacgcactcgctctgtccctccagaaccacaatattccacccctggtcccgccaggattataaccgtcttcgtaaaggagagatggaagggcaaggaggatgtcaatcgggcttttagcgtttatcgtttgcggggcttttgctggagttaaaaaaagaaatactgctcacgcgcaaccgcctcatgttctaggccctgctgtgggttacagagagggacctaacgctgaaagcctgcaggcattagtaataacaaaacaaaacaaaacgatgcctaaaaccttattagttccttggtagcgtatccggggcacgtgttcattaaaagagctgtggcagttcccagttttttaaagattcggcagttttgctgctctaaaaacgtccacagttaaaacttatttttatgatgttaacttactaattgagcaaacatttggttgcattctgtgatgcagtctgagttggctagcttaagtcttgcccctgaaccctgtcatcaagggaagatacagctaataaagatttttttttaacctgaaaaacgttttgagaaaaatgatcagctctcatttcagcattgtaaattatctttcaaactggtcatctactaaaaccaagccattaaaattggtcgtttccttgccattcatatt

SEQ ID NO: 23738 - protein, 83 aa, Homo sapiens
MAVTLDKDAYYRRVKRLYSNWREFPGSVPHPFRCSRIIHRRRPRTLPLNRESPAFTLSCGHHHLPRVPALVMHSSTSRSLFPP

SEQ ID NO: 23739 - DNA, 8192 bp, Homo sapiens
gagttccaccatcttcctctgaagacgtagccatcttgctccatgaaggtcaggacaatctgacatgcacttgtttcttgcctctatacttgaagagtatccccttccctccctagaccttggagaagtaccctccattactttcccaagatggcagaccccatcatggatctgttcgatgacccaaatttatttggcctggactctctgactgatgacagctttaaccaggtcacacaagaccccattgaggaagcccttggactgccaagctctctggactccttggatcagatgaaccaggatggtggaggtggtgatgtggggaattcatcagcaagtgaactggtccctccaccagaggaaacagctcccacagaactttccaaagaatccacagctccagctccagaatccataaccttgcatgattataccactcagcctgccagccaggagcagccagcccaacctgtcttacagacatcgacgccaacatcaggacttttgcaagtctccaagagccaggagatcctgagccaagggaatcctttcatgggtgtctctgccacagctgtctcctccagtagtgctggagggcagccacctcagtcagcccctaagattgttatccttaaggccccaccaagctcctcagtcactggtgcccatgtggcacaaattcaggcccaaggtatcaccagcacagctcagcccctggtggcaggcacagccaatggtggaaaagtcacttttaccaaagtgctaaccggcacaccccttcgaccaggtgtttccattgtctctggtaatacagtgttggccgccaaggtccctgggaaccaggctgctgttcagcgcattgtccagcccagccgaccagtaaagcagctggtcctccagccagttaagggttcagctcctgctggaaaccctggggccacagggcccccactgaagcctgcagttacactgacctctacacctacccagggtgaatcgaaacgcatcaccctggtcctccagcagccacagtctggaggtccccaaggacatcggcatgttgtgctagggagtctaccaggcaagatagtgttacagggcaaccagctggcagccctgactcaagccaagaatgcccaagggcagcctgccaaggtagtaactatccagctgcaggtgcagcagccacagcaaaaaatccagattgtaccacaaccaccatcatcgcagccacagccccagcagccaccctccacccagccagtgactctgtcctctgtacagcaggctcagataatgggaccaggacaaagcccaggacaaagactttcagtaccagtcaaggtggtactgcagccacaggctggctcttcccaaggggcctcttctgggctctctgtagttaaagttctgagtgccagtgaagtggcagctttgtcatcaccagcaagctctgctcctcattcggggggaaagacaggaatggaggaaaaccgcagattggaacaccagaagaagcaagagaaagcaaatcggattgtagcagaggccattgcgagagcccgtgcccgcggtgagcagaacatacctcgagtcttaaatgaggacgagttgcccagcgttcggccagaggaggaaggcgagaagaaacgcaggaagaagagtgctggggagaggctgaaagaggagaagccaaagaagagtaaaacatctggtgcctccaaaacaaagggcaagagcaagctcaacaccatcactcctgtagtgggtaagaagagaaaacgtaatacctcatctgataattcagatgtggaagtcatgcctgcacagtcacctcgagaagatgaagaaagcagcattcagaagagacgctcaaaccgccaagttaagcgaaaaaaatatacagaggacctggatataaagatcacagatgatgaagaagaagaagaggtggatgtaactggtccaataaaacctgagcctatcctccctgaaccagtgcaagaaccagatggcgagactttgccttccatgcagttctttgtggagaatcccagtgaagaagatgcagccattgtagacaaagtgctttctatgcggattgtgaagaaggagctcccttctggacaatatactgaagcagaagaattctttgtcaagtacaagaactactcctatctgcattgtgaatgggctactatctcccaactagagaaggataagaggatacatcaaaaattaaagcgcttcaaaaccaaaatggctcagatgagacacttcttccatgaggatgaagagccctttaatccagactacgtagaggtggataggatattggatgagtctcacagtattgacaaggacaatggggagcccgttatttactacctggtgaaatggtgctctctgccctatgaggatagcacatgggagctaaaagaagatgttgatgagggcaagattcgagaatttaaacggattcagtcaaggcacccagaactcaaaagggtgaatcgtccgcaggcaagtgcctggaagaaattggagctatcacatgaatataaaaacagaaaccagctacgggaatatcagttggaaggggttaattggctgctctttaattggtataacaggcagaactgcatcctggctgatgagatgggattgggcaaaactattcagtccattgccttcttgcaggaagtatataatgtgggcatccatggtcccttcttggtcattgccccactgtccacaattactaactgggagcgagaatttaatacatggacagaaatgaacactattgtgtaccatggcagtctggccagcaggcagatgattcaacagtatgaaatgtactgcaaagattcacggggacgcctcatcccaggcgcatacaagtttgacgctctgatcaccacttttgagatgattttgtcagattgtcctgagcttcgtgaaattgaatggcgttgtgttatcattgatgaagcccatcgactgaaaaaccgtaattgcaagctgcttgatagtctcaagcacatggacctggaacacaaggtgctactcacaggaacaccattgcaaaatactgtagaagaactgtttagcttgcttcatttcttggaaccgtcacaatttccctcagaatcagagtttctcaaggactttggggatctcaagacagaggaacaggttcaaaagctacaggccattcttaagccaatgatgctgagaagactcaaagaggatgttgaaaaaaacttggcacccaaacaggaaacaattattgaagtagagctgactaatatccagaagaaatactatcgggctattttggagaagaatttctccttcctttccaaaggggcaggtcataccaacatgcctaatctacttaacacaatgatggagttgcgcaagtgctgcaaccacccatatctcatcaatggtgctgaagaaaaaatcctaacagaattccgtgaagcttgccatattatacctcatgactttcacctgcaggccatggttcgttcagccggcaaactggttcttattgacaagttgcttccaaagcttaaagctggtggccataaagttctgatcttctctcagatggtgcgctgcctagacatcctagaggattatttaatccagaggaggtacttatatgaacgtattgatgggcgagttagaggcaaccttcgacaggctgccattgaccgcttcagcaagcctgactcagaccgctttgtcttcttactgtgtacccgggctggtggacttggtattaatcttacagctgctgatacctgcatcatctttgattcagactggaatccacaaaatgacctgcaggcccaggcacgatgtcatcgaattgggcagagcaaagctgtgaaggtgtaccgcctcatcactcgtaattcctacgagagagagatgtttgataaggccagcctcaagttggggttggataaggctgtgcttcaatccatgagtggtcgggatggcaacattactggaatccaacagttctctaagaaggagattgaagatcttttaagaaaaggagcatatgcagccatcatggaggaagatgatgaaggctccaagttttgtgaagaggacattgaccagatcttgttaagacgaactacaaccatcaccattgaatctgaaggaaaaggttccacctttgctaaggcatctttgttgcttctgaaaacaggacagatatttctttggatgaccccaacttttggcaaaagtgggccaaaaaggctgacctagacatggatctgctcaacagcaagaataatttggtaattgacacacctagagtacgaaaacaaacgcgccactttagcactctgaaagatgatgacctggtggaattctctgatttggaaagtgaggatgatgagcggccacgctcccgcagacatgaccgtcatcatgcctatgggcgcactgactgctttcgggtggaaaagcatctcctggtatatggttggggacgatggcgagatattttatctcatggacgcttcaagcgacgtatgactgaacgagatgtggagaccatttgtcgggccattctcgtgtactgtcttctacactaccgtggggatgaaaatattaaaggcttcatctgggacttgattagcccagctgaaaatggcaagacaaaagaattgcagaatcattcaggtctatctatccctgtgcctcgtggacgcaaaggaaaaaaagtaaagtcacaaagcacttttgatatccataaggcagattggatccggaaatataaccctgacactttgttccaagatgaaagttataagaagcacttgaaacatcagtgtaacaaggtactgttgcgggtacgaatgctatactacctgaggcaggaggttattggagaccaagcagaaaaggtgttagggggtgcgattgccagtgagattgacatatggttcccagtagtggatcaactggaggttccaacaacttggtgggacagtgaggctgacaagtcgctgctcattggagtctttaaacatggctatgagaaatataataccatgagggcagacccagccttatgtttcctagaaaaggctggccgaccagatgacaaagcaattgcagcagaacatcgagtgttggataacttctctgacatagtagaaggggttgactttgataaagattgtgaagatcctgaatataaaccactccaaggtcccccaaaggaccaagatgatgagggtgatcccttgatgatgatggatgaggagatctcagtgattgatggagatgaagcccaggtgacccaacagccaggccatttattctggcctccgggctctgccctaacagctaggcttcggcgtctagtaacagcgtatcagcgcagctacaagagagaacaaatgaagatagaggctgcagaacgtggggaccggcgaaggcggcgttgtgaagcagccttcaagctgaaagaaattgcacggcgggagaaacaacaacgatggacaaggcgtgaacaaactgatttttatcgagtggtgtctacgtttggtgtggaatatgaccctgacaccatgcagttccattgggatcgcttccgcacttttgctcgactagacaaaaagacagatgaaagccttaccaagtacttccatggctttgtggccatgtgccgccaagtatgccgccttcccccagcagctggagatgaaccccccgaccctaacctgttcattgagcccatcactgaggagagagcctcacggactctctaccgtatagaattgcttcggcgcttacgggaacaagttttatgccacccccttttggaagatcggctggcattgtgtcagcctcctggtcctgaattgcccaaatggtgggagcctgttcggcatgatggggagcttctaagaggggcagcccgccatggggtgagccaaacagactgcaacatcatgcaggacccagacttctcttttctggctgcccgtatgaattatatgcagaaccatcaagcaggagcaccagctccatccttgtcacgctgctctactccactgctgcaccagcagtatacctcacgcactgcctcaccactgcccctgcgcccagatgctcctgttgaaaagtcacccgaggagacagctacccaggtccccagtctggagagtctgactttaaagctagagcacgaggtggtggccaggagccgaccaaccccacaagactatgagatgcgagtatccccctctgatactacccctctggtttcccggagtgttccaccagtcaaactggaggatgaggatgattcggactctgagctggacttgagcaagctgtcaccatcttcttcttcttcctcatcctcatccagctccagctccagcactgatgagagtgaggatgagaaggaagagaagctaactgaccagtcccgctcaaagctctatgatgaagagagtctcctgtccctcactatgtcccaagatggattcccaaatgaagatggagaacaaatgacccctgagcttctgctactgcaggaaagacaaagagcctctgagtggcccaaggatcgtgtcctgataaaccgtattgacctcgtctgccaggctgtactctcagggaagtggccttctagccgtaggagccaggaaatggtaacaggaggaattttggggccaggcaaccacttgctagacagtccctcattgactcctggagaatatggtgactctccagtccccacaccacgaagtagtagtgcagcttccatggcagaggaggaagcatctgcagtcagcacagcggcagcccagttcaccaaacttcgccgaggcatggatgaaaaggagtttacagttcaaatcaaagatgaggaaggattgaagttaacattccagaagcacaagttgatggcgaatggagtaatgggagatggacatccactgtttcataagaagaaggggaacagaaagaagctagtagagctggaggtggagtgcatggaagagcctaatcaccttgatgtggacctggagacccggatccctgtcatcaataaggtggatggtactttgctggtgggtgaggatgcccctcgccgggctgaactggagatgtggttacagggtcatccagagtttgctgttgatccccgatttctagcgtatatggaggatcgcagaaaacagaagtggcaaagatgtaaaaaaaataataaggcagaattgaactgtttgggaatggaaccagtacagacagctaactctagaaatgggaaaaagggtcatcacactgaaacggtgttcaaccgggttttgccagggcctattgcaccagagagcagcaagaagcgggcccgtaggatgcgaccagacctttctaagatgatggccctcatgcagggtggaagcactgggtctctatctctgcataacacgttccaacacagcagtagtggcctacagtctgtgtcatctttgggtcacagcagtgccacttctgcatctttgccttttatgccatttgtgatgggtggtgcaccatcatcccctcatgtagactccagcaccatgcttcatcaccaccaccaccacccccacccccaccatcaccaccatcaccatccaggcttgagagcccctggctacccctcttcaccagtgactaccgcctctggtactaccttgcggttgccaccactgcaacctgaggaggatgacgatgaggatgaagaagatgatgatgacttatctcagggctatgatagctcagaaagggacttctcactcattgatgatcctatgatgccagctaactcagactccagtgaagatgctgatgactgaagccccagcatgggccccattgcttgggcggctgctgtattttcatttactctggcccttggactatggaaacgtgggaggggcaggggagatgtggggaagtccaggactccaggaggtgaaaaggaaaaaaaaaaaaaaatgtacctgattgctcccaattatgagaggattgggtgggcaggggaactcctaaaataatacatgaccacttcctcatttctggggaaggaaaggagactagagcagctggtgtgctcacccctccctagtcacctccattaaccacagactatg

SEQ ID NO: 23740 - protein, 1382 aa, Homo sapiens
MADPIMDLFDDPNLFGLDSLTDDSFNQVTQDPIEEALGLPSSLDSLDQMNQDGGGGDVGNSSASELVPPPEETAPTELSKESTAPAPESITLHDYTTQPASQEQPAQPVLQTSTPTSGLLQVSKSQEILSQGNPFMGVSATAVSSSSAGGQPPQSAPKIVILKAPPSSSVTGAHVAQIQAQGITSTAQPLVAGTANGGKVTFTKVLTGTPLRPGVSIVSGNTVLAAKVPGNQAAVQRIVQPSRPVKQLVLQPVKGSAPAGNPGATGPPLKPAVTLTSTPTQGESKRITLVLQQPQSGGPQGHRHVVLGSLPGKIVLQGNQLAALTQAKNAQGQPAKVVTIQLQVQQPQQKIQIVPQPPSSQPQPQQPPSTQPVTLSSVQQAQIMGPGQSPGQRLSVPVKVVLQPQAGSSQGASSGLSVVKVLSASEVAALSSPASSAPHSGGKTGMEENRRLEHQKKQEKANRIVAEAIARARARGEQNIPRVLNEDELPSVRPEEEGEKKRRKKSAGERLKEEKPKKSKTSGASKTKGKSKLNTITPVVGKKRKRNTSSDNSDVEVMPAQSPREDEESSIQKRRSNRQVKRKKYTEDLDIKITDDEEEEEVDVTGPIKPEPILPEPVQEPDGETLPSMQFFVENPSEEDAAIVDKVLSMRIVKKELPSGQYTEAEEFFVKYKNYSYLHCEWATISQLEKDKRIHQKLKRFKTKMAQMRHFFHEDEEPFNPDYVEVDRILDESHSIDKDNGEPVIYYLVKWCSLPYEDSTWELKEDVDEGKIREFKRIQSRHPELKRVNRPQASAWKKLELSHEYKNRNQLREYQLEGVNWLLFNWYNRQNCILADEMGLGKTIQSIAFLQEVYNVGIHGPFLVIAPLSTITNWEREFNTWTEMNTIVYHGSLASRQMIQQYEMYCKDSRGRLIPGAYKFDALITTFEMILSDCPELREIEWRCVIIDEAHRLKNRNCKLLDSLKHMDLEHKVLLTGTPLQNTVEELFSLLHFLEPSQFPSESEFLKDFGDLKTEEQVQKLQAILKPMMLRRLKEDVEKNLAPKQETIIEVELTNIQKKYYRAILEKNFSFLSKGAGHTNMPNLLNTMMELRKCCNHPYLINGAEEKILTEFREACHIIPHDFHLQAMVRSAGKLVLIDKLLPKLKAGGHKVLIFSQMVRCLDILEDYLIQRRYLYERIDGRVRGNLRQAAIDRFSKPDSDRFVFLLCTRAGGLGINLTAADTCIIFDSDWNPQNDLQAQARCHRIGQSKAVKVYRLITRNSYEREMFDKASLKLGLDKAVLQSMSGRDGNITGIQQFSKKEIEDLLRKGAYAAIMEEDDEGSKFCEEDIDQILLRRTTTITIESEGKGSTFAKASLLLLKTGQIFLWMTPTFGKSGPKRLT

SEQ ID NO: 23741 - DNA, 7425 bp, Homo sapiens
gggcagccacctcagtcagcccctaagattgttatccttaaggccccaccaagctcctcagtcactggtgcccatgtggcacaaattcaggcccaaggtatcaccagcacagctcagcccctggtggcaggcacagccaatggtggaaaagtcacttttaccaaagtgctaaccggcacaccccttcgaccaggtgtttccattgtctctggtaatacagtgttggccgccaaggtccctgggaaccaggctgctgttcagcgcattgtccagcccagccgaccagtaaagcagctggtcctccagccagttaagggttcagctcctgctggaaaccctggggccacagggcccccactgaagcctgcagttacactgacctctacacctacccagggtgaatcgaaacgcatcaccctggtcctccagcagccacagtctggaggtccccaaggacatcggcatgttgtgctagggagtctaccaggcaagatagtgttacagggcaaccagctggcagccctgactcaagccaagaatgcccaagggcagcctgccaaggtagtaactatccagctgcaggtgcagcagccacagcaaaaaatccagattgtaccacaaccaccatcatcgcagccacagccccagcagccaccctccacccagccagtgactctgtcctctgtacagcaggctcagataatgggaccaggacaaagcccaggacaaagactttcagtaccagtcaaggtggtactgcagccacaggctggctcttcccaaggggcctcttctgggctctctgtagttaaagttctgagtgccagtgaagtggcagctttgtcatcaccagcaagctctgctcctcattcggggggaaagacaggaatggaggaaaaccgcagattggaacaccagaagaagcaagagaaagcaaatcggattgtagcagaggccattgcgagagcccgtgcccgcggtgagcagaacatacctcgagtcttaaatgaggacgagttgcccagcgttcggccagaggaggaaggcgagaagaaacgcaggaagaagagtgctggggagaggctgaaagaggagaagccaaagaagagtaaaacatctggtgcctccaaaacaaagggcaagagcaagctcaacaccatcactcctgtagtgggtaagaagagaaaacgtaatacctcatctgataattcagatgtggaagtcatgcctgcacagtcacctcgagaagatgaagaaagcagcattcagaagagacgctcaaaccgccaagttaagcgaaaaaaatatacagaggacctggatataaagatcacagatgatgaagaagaagaagaggtggatgtaactggtccaataaaacctgagcctatcctccctgaaccagtgcaagaaccagatggcgagactttgccttccatgcagttctttgtggagaatcccagtgaagaagatgcagccattgtagacaaagtgctttctatgcggattgtgaagaaggagctcccttctggacaatatactgaagcagaagaattctttgtcaagtacaagaactactcctatctgcattgtgaatgggctactatctcccaactagagaaggataagaggatacatcaaaaattaaagcgcttcaaaaccaaaatggctcagatgagacacttcttccatgaggatgaagagccctttaatccagactacgtagaggtggataggatattggatgagtctcacagtattgacaaggacaatggggagcccgttatttactacctggtgaaatggtgctctctgccctatgaggatagcacatgggagctaaaagaagatgttgatgagggcaagattcgagaatttaaacggattcagtcaaggcacccagaactcaaaagggtgaatcgtccgcaggcaagtgcctggaagaaattggagctatcacatgaatataaaaacagaaaccagctacgggaatatcagttggaaggggttaattggctgctctttaattggtataacaggcagaactgcatcctggctgatgagatgggattgggcaaaactattcagtccattgccttcttgcaggaagtatataatgtgggcatccatggtcccttcttggtcattgccccactgtccacaattactaactgggagcgagaatttaatacatggacagaaatgaacactattgtgtaccatggcagtctggccagcaggcagatgattcaacagtatgaaatgtactgcaaagattcacggggacgcctcatcccaggcgcatacaagtttgacgctctgatcaccacttttgagatgattttgtcagattgtcctgagcttcgtgaaattgaatggcgttgtgttatcattgatgaagcccatcgactgaaaaaccgtaattgcaagctgcttgatagtctcaagcacatggacctggaacacaaggtgctactcacaggaacaccattgcaaaatactgtagaagaactgtttagcttgcttcatttcttggaaccgtcacaatttccctcagaatcagagtttctcaaggactttggggatctcaagacagaggaacaggttcaaaagctacaggccattcttaagccaatgatgctgagaagactcaaagaggatgttgaaaaaaacttggcacccaaacaggaaacaattattgaagtagagctgactaatatccagaagaaatactatcgggctattttggagaagaatttctccttcctttccaaaggggcaggtcataccaacatgcctaatctacttaacacaatgatggagttgcgcaagtgctgcaaccacccatatctcatcaatggtgctgaagaaaaaatcctaacagaattccgtgaagcttgccatattatacctcatgactttcacctgcaggccatggttcgttcagccggcaaactggttcttattgacaagttgcttccaaagcttaaagctggtggccataaagttctgatcttctctcagatggtgcgctgcctagacatcctagaggattatttaatccagaggaggtacttatatgaacgtattgatgggcgagttagaggcaaccttcgacaggctgccattgaccgcttcagcaagcctgactcagaccgctttgtcttcttactgtgtacccgggctggtggacttggtattaatcttacagctgctgatacctgcatcatctttgattcagactggaatccacaaaatgacctgcaggcccaggcacgatgtcatcgaattgggcagagcaaagctgtgaaggtgtaccgcctcatcactcgtaattcctacgagagagagatgtttgataaggccagcctcaagttggggttggataaggctgtgcttcaatccatgagtggtcgggatggcaacattactggaatccaacagttctctaagaaggagattgaagatcttttaagaaaaggagcatatgcagccatcatggaggaagatgatgaaggctccaagttttgtgaagaggacattgaccagatcttgttaagacgaactacaaccatcaccattgaatctgaaggaaaaggttccacctttgctaaggcatctttgttgcttctgaaaacaggacagatatttctttggatgaccccaacttttggcaaaagtgggccaaaaaggctgacctagacatggatctgctcaacagcaagaataatttggtaattgacacacctagagtacgaaaacaaacgcgccactttagcactctgaaagatgatgacctggtggaattctctgatttggaaagtgaggatgatgagcggccacgctcccgcagacatgaccgtcatcatgcctatgggcgcactgactgctttcgggtggaaaagcatctcctggtatatggttggggacgatggcgagatattttatctcatggacgcttcaagcgacgtatgactgaacgagatgtggagaccatttgtcgggccattctcgtgtactgtcttctacactaccgtggggatgaaaatattaaaggcttcatctgggacttgattagcccagctgaaaatggcaagacaaaagaattgcagaatcattcaggtctatctatccctgtgcctcgtggacgcaaaggaaaaaaagtaaagtcacaaagcacttttgatatccataaggcagattggatccggaaatataaccctgacactttgttccaagatgaaagttataagaagcacttgaaacatcagtgtaacaaggtactgttgcgggtacgaatgctatactacctgaggcaggaggttattggagaccaagcagaaaaggtgttagggggtgcgattgccagtgagattgacatatggttcccagtagtggatcaactggaggttccaacaacttggtgggacagtgaggctgacaagtcgctgctcattggagtctttaaacatggctatgagaaatataataccatgagggcagacccagccttatgtttcctagaaaaggctggccgaccagatgacaaagcaattgcagcagaacatcgagtgttggataacttctctgacatagtagaaggggttgactttgataaagattgtgaagatcctgaatataaaccactccaaggtcccccaaaggaccaagatgatgagggtgatcccttgatgatgatggatgaggagatctcagtgattgatggagatgaagcccaggtgacccaacagccaggccatttattctggcctccgggctctgccctaacagctaggcttcggcgtctagtaacagcgtatcagcgcagctacaagagagaacaaatgaagatagaggctgcagaacgtggggaccggcgaaggcggcgttgtgaagcagccttcaagctgaaagaaattgcacggcgggagaaacaacaacgatggacaaggcgtgaacaaactgatttttatcgagtggtgtctacgtttggtgtggaatatgaccctgacaccatgcagttccattgggatcgcttccgcacttttgctcgactagacaaaaagacagatgaaagccttaccaagtacttccatggctttgtggccatgtgccgccaagtatgccgccttcccccagcagctggagatgaaccccccgaccctaacctgttcattgagcccatcactgaggagagagcctcacggactctctaccgtatagaattgcttcggcgcttacgggaacaagttttatgccacccccttttggaagatcggctggcattgtgtcagcctcctggtcctgaattgcccaaatggtgggagcctgttcggcatgatggggagcttctaagaggggcagcccgccatggggtgagccaaacagactgcaacatcatgcaggacccagacttctcttttctggctgcccgtatgaattatatgcagaaccatcaagcaggagcaccagctccatccttgtcacgctgctctactccactgctgcaccagcagtatacctcacgcactgcctcaccactgcccctgcgcccagatgctcctgttgaaaagtcacccgaggagacagctacccaggtccccagtctggagagtctgactttaaagctagagcacgaggtggtggccaggagccgaccaaccccacaagactatgagatgcgagtatccccctctgatactacccctctggtttcccggagtgttccaccagtcaaactggaggatgaggatgattcggactctgagctggacttgagcaagctgtcaccatcttcttcttcttcctcatcctcatccagctccagctccagcactgatgagagtgaggatgagaaggaagagaagctaactgaccagtcccgctcaaagctctatgatgaagagagtctcctgtccctcactatgtcccaagatggattcccaaatgaagatggagaacaaatgacccctgagcttctgctactgcaggaaagacaaagagcctctgagtggcccaaggatcgtgtcctgataaaccgtattgacctcgtctgccaggctgtactctcagggaagtggccttctagccgtaggagccaggaaatggtaacaggaggaattttggggccaggcaaccacttgctagacagtccctcattgactcctggagaatatggtgactctccagtccccacaccacgaagtagtagtgcagcttccatggcagaggaggaagcatctgcagtcagcacagcggcagcccagttcaccaaacttcgccgaggcatggatgaaaaggagtttacagttcaaatcaaagatgaggaaggattgaagttaacattccagaagcacaagttgatggcgaatggagtaatgggagatggacatccactgtttcataagaagaaggggaacagaaagaagctagtagagctggaggtggagtgcatggaagagcctaatcaccttgatgtggacctggagacccggatccctgtcatcaataaggtggatggtactttgctggtgggtgaggatgcccctcgccgggctgaactggagatgtggttacagggtcatccagagtttgctgttgatccccgatttctagcgtatatggaggatcgcagaaaacagaagtggcaaagatgtaaaaaaaataataaggcagaattgaactgtttgggaatggaaccagtacagacagctaactctagaaatgggaaaaagggtcatcacactgaaacggtgttcaaccgggttttgccagggcctattgcaccagagagcagcaagaagcgggcccgtaggatgcgaccagacctttctaagatgatggccctcatgcagggtggaagcactgggtctctatctctgcataacacgttccaacacagcagtagtggcctacagtctgtgtcatctttgggtcacagcagtgccacttctgcatctttgccttttatgccatttgtgatgggtggtgcaccatcatcccctcatgtagactccagcaccatgcttcatcaccaccaccaccacccccacccccaccatcaccaccatcaccatccaggcttgagagcccctggctacccctcttcaccagtgactaccgcctctggtactaccttgcggttgccaccactgcaacctgaggaggatgacgatgaggatgaagaagatgatgatgacttatctcagggctatgatagctcagaaagggacttctcactcattgatgatcctatgatgccagctaactcagactccagtgaagatgctgatgactgaagccccagcatgggccccattgcttgggcggctgctgtattttcatttactctggcccttggactatggaaacgtgggaggggcaggggagatgtggggaagtccaggactccaggaggtgaaaagg

SEQ ID NO: 23742 - protein, 1197 aa, Homo sapiens [sequence omitted]

SEQ ID NO: 23743 - DNA, 525 bp, Homo sapiens
gcaaatcggattgtagcagaggccattgcgagagcccgtgcccgcggtgagcagaacatacctcgagtcttaaatgaggacgagttgcccagcgttcggccagaggaggaaggcgagaagaaacgcaggaagaagagtgctggggagaggctgaaagaggagaagccaaagaagagtaaaacatctggtgcctccaaaacaaagggcaagagcaagctcaagtgagtactccttgctactgtgatgggacgtgcaagagtaagctcaagtgatgctccttgctattgtgatgggacgtgcaagagtaagctcaagtgagtgctccttgctattgtgatgggacgtgcaagagcaagctcaagtgagtgctccttgctattgtgatgggacgtgcaagagtaagctcaagtgagtgctccttgctactgggatgggacgggcaagagcaagctcaagtgagtgctccttgctattgggatgggacgggcaagagcaagctcaagattgagtactccttgctattgt

SEQ ID NO: 23744 - protein, 46 aa, Homo sapiens
MGRARVSSSECSLLLGWDGQEQAQVSAPCYWDGTGKSKLKIEYSLL

SEQ ID NO: 23745 - DNA, 628 bp, Homo sapiens
ggaggagggggaactggtgctggagagacagggagaggggcgaaccggccccccacagccactgcagttaccagaaatcttccgcctctgctgtatggaccttactggcaccaaccccggcagtatgagcaggagttccaccatcttcctctgaagacgtagccatcttgctccatgaaggtcacacaagaccccattgaggaagcccttggactgccaagctctctggactccttggatcagatgaaccaggatggtggaggtggtgatgtggggaattcatcagcaagtgaactggtccctccaccagaggaaacagctcccacagaactttccaaagaatccacagctccagctccagaatccataaccttgcatgattataccactcagcctgccagccaggagcagccagcccaacctgtcttacagacatcgacgccaacatcaggacttttgcaagtctccaagagccaggagatcctgagccaagggaatcctttcatgggtgtctctgccacagctgtctcctccagtagtgctggagggcagccacctcagtcagcccctaagattgttatccttaaggccccaccaagctcctcagtcactggtgcccatgtggcac

SEQ ID NO: 23746 - protein, 150 aa, Homo sapiens
MKVTQDPIEEALGLPSSLDSLDQMNQDGGGGDVGNSSASELVPPPEETAPTELSKESTAPAPESITLHDYTTQPASQEQPAQPVLQTSTPTSGLLQVSKSQEILSQGNPFMGVSATAVSSSSAGGQPPQSAPKIVILKAPPSSSVTGAHV

SEQ ID NO: 23747 - DNA, 728 bp, Homo sapiens
agggtgagttgaaacgctgcctggaaaggaagtaccaggacttgcacaggagttccaccatcttcctctgaagacgtagccatcttgctccatgaaggtcaggacaatctgacatgcacttgtttcttgcctctatacttgaagagtagtcctcttacattgtgtacatttttttcttaataggggaggggaggggagagccagtaccccccctccccttccctccctagaccttggagaagtaccctccattactttcccaagatggcagaccccatcatggatctgttcgatgacccaaatttatttggcctggactctctgactgatgacagctttaaccaggtcacacaagaccccattgaggaagcccttggactgccaagctctctggactccttggatcagatgaaccaggatggtggaggtggtgatgtggggaattcatcagcaagtgaactggtccctccaccagaggaaacagctcccacagaactttccaaagaatccacagctccagctccagaatccataaccttgcatgattataccactcagcctgccagccaggagcagccagcccaacctgtcttacagacatcgacgccaacatcaggacttttgcaagtctccaagagccaggagatcctgagccaagggaatcctttcatgggtgtctctgccacagctgtctcctccagtagtgctggagggcagccacctcagtc

SEQ ID NO: 23748 - protein, 153 aa, Homo sapiens
MADPIMDLFDDPNLFGLDSLTDDSFNQVTQDPIEEALGLPSSLDSLDQMNQDGGGGDVGNSSASELVPPPEETAPTELSKESTAPAPESITLHDYTTQPASQEQPAQPVLQTSTPTSGLLQVSKSQEILSQGNPFMGVSATAVSSSSAGGQPP

SEQ ID NO: 23749 - DNA, 254 bp, Homo sapiens
ggtgctggagagacagggagaggggcgaaccggccccccacagccactgcagttaccagaaatcttccgcctctgctgtatggaccttactggcaccaaccccggcagtatgagcaggagttccaccatcttcctctgaagacgtagccatcttgctccatgaaggtcaggacaatctgacatgcacttgtttcttgcctctatacttgaagagtagtcctcttacattgtgtacatttttttcttaatagggg

SEQ ID NO: 23750 - protein, 48 aa, Homo sapiens
GAGETGRGANRPPTATAVTRNLPPLLYGPYWHQPRQYEQEFHHLPLKT

SEQ ID NO: 23751 - DNA, 193 bp, Homo sapiens
ttctacaattttcaaaggcacagctttaacaggctactgaatacctacctgtctagtgctgtggtcaaagacagtttgcacacaggggtcagcactgaactttttttttgttttttgagacaccgtcttagtcacccaggctggaacttcatcgcaaaataaataaataaaataaaataaaaggaggttggct

SEQ ID NO: 23752 - protein, 53 aa, Homo sapiens [sequence omitted]

SEQ ID NO: 23753 - DNA, 1885 bp, Homo sapiens
gttccagggctgcgtgattccgggagtgtgctttctctttcaggtgtggggaagtcatgtctcctcctgcagtttacagataagcggttccagcctgtccacgacctcacaataggtgtggagtttggagctcgtatggtcaacattgatggaaaacaaatcaaactgcaaatctgggatacggctgggcaagaatccttccgttctatcacccgttcctactacaggggagcagctggagcacttgctggattacaggtgtgagccaccgtgcctggcctaaataaataatttcgtaagcatatacaatccacttcccactaagaattagggtcaaagacattctatttgaacacttgcaattacctagatctagttggcctttggttgatagatcctctgcctcggaatttcattgagtttttttcttccttgcctttgggtgtctgcttgccacttcctaagaattcttgtagaaggcagtttcctctacttgcccaagagcactgagtacttctctactatcctattattagcttctatctcttagtgtaacttcaaaacttttaagagcagtgaagttggtcagggacatgtggccacttattattacctaaagaaaacatttgttccctgttcattttattttaggggccagatctaacattgtagtgtctttcaccagatagacttctactgtttcatcaaactcccttcttaactagacctagactttctactccaatcaggctaatctacttactgaatgtgacatatttattcctagttccatacctttgcacatgccctactctccactaattatacttaaaagtccaaaaattttttctttagtaacagacttaggtactgctaagcagttattaacacaatattccttagttttcatatgttggttattcatatgtctatttatatgtatatttatttttatgtatgttactatgtaaatatggtttgcagttgtttttgtgtggaatcttgtctttccgtataagttgtaagctccttgagagcaggatccatgtcattcctttatttttataaattattccccctatcattcctttacagtgcctagtgctactcattatgtgttcattgaatttgactgacatagttaaaaacttaaggtttattttagactttcaaggaaacaaaagactttagagtcctctctctgtaattctgccccactcatttgtttaccctgggttttatacagttctcttccttctcccctcccacctttccctggctttttgcctccattccatgaggcatacagtaaggctgcctgctagtaagcagtcacataagtgggtacctatccagccattctcttttcagagcatataatactatcttagccaaacttgcctttgcttcactcatcatgcagccttctgggttggttgctatatatatcttttttccttgatgtcccgttctcttccacagccctgaggtcttacgaatttttctactttctttttgctgttgatgaattgtttcattattaaatatatgcatgtatcaaagctattcatactccatgtgtcatttctaattgtatcccaaacattagtagatactctcctctcagggaattaaatcaaagataatgaagaagcctctttgggattcatgctatactcgattctgaccccagtagtagtagtaatagttgacagtgcaccacaggaagttggaagacatttggggtattgctttggttatgcttttgttttgtttttaaaatcctatctgattccaaaaaggatttgaagctgttgaacttggagttagcctgcccccttacctctgggcgaaaactaaagtaataaaaactagtttctgtaca

SEQ ID NO: 23754 - protein, 44 aa, Homo sapiens
MENKSNCKSGIRLGKNPSVLSPVPTTGEQLEHLLDYRCEPPCLA

SEQ ID NO: 23755 - DNA, 2239 bp, Homo sapiens
aagggggagaagaagaagatcggtagattgagtggctagagaggtcggaggtaagtggctatagaagtcgggcggacccggaacccagaggacgcgacaccatgacttatgcttatctcttcaagtatatcatcatcggagacacaggtgtggggaagtcatgtctcctcctgcagtttacagataagcggttccagcctgtccacgacctcacaataggtgtggagtttggagctcgtatggtcaacattgatggaaaacaaatcaaactgcaaatctgggatacggctgggcaagaatccttccgttctatcacccgttcctactacaggggagcagctggagcactgctggtgtacgacattacaaggcgtgaaaccttcaaccacctgacctcatggttagaggatgcccggcagcactctagttccaacatggttatcatgctcattgggaataagagtgacctagagtcccgcagggatgtgaagagagaagaaggagaggcctttgctagggagcatggacttatattcatggaaacttcagccaaaacagcctgcaatgttgaagaggccttcattaacacagccaaagaatgctggattacaggtgtgagccaccgtgcctggcctaaataaataatttcgtaagcatatacaatccacttcccactaagaattagggtcaaagacattctatttgaacacttgcaattacctagatctagttggcctttggttgatagatcctctgcctcggaatttcattgagtttttttcttccttgcctttgggtgtctgcttgccacttcctaagaattcttgtagaaggcagtttcctctacttgcccaagagcactgagtacttctctactatcctattattagcttctatctcttagtgtaacttcaaaacttttaagagcagtgaagttggtcagggacatgtggccacttattattacctaaagaaaacatttgttccctgttcattttattttaggggccagatctaacattgtagtgtctttcaccagatagacttctactgtttcatcaaactcccttcttaactagacctagactttctactccaatcaggctaatctacttactgaatgtgacatatttattcctagttccatacctttgcacatgccctactctccactaattatacttaaaagtccaaaaattttttctttagtaacagacttaggtactgctaagcagttattaacacaatattccttagttttcatatgttggttattcatatgtctatttatatgtatatttatttttatgtatgttactatgtaaatatggtttgcagttgtttttgtgtggaatcttgtctttccgtataagttgtaagctccttgagagcaggatccatgtcattcctttatttttataaattattccccctatcattcctttacagtgcctagtgctactcattatgtgttcattgaatttgactgacatagttaaaaacttaaggtttattttagactttcaaggaaacaaaagactttagagtcctctctctgtaattctgccccactcatttgtttaccctgggttttatacagttctcttccttctcccctcccacctttccctggctttttgcctccattccatgaggcatacagtaaggctgcctgctagtaagcagtcacataagtgggtacctatccagccattctcttttcagagcatataatactatcttagccaaacttgcctttgcttcactcatcatgcagccttctgggttggttgctatatatatcttttttccttgatgtcccgttctcttccacagccctgaggtcttacgaatttttctactttctttttgctgttgatgaattgtttcattattaaatatatgcatgtatcaaagctattcatactccatgtgtcatttctaattgtatcccaaacattagtagatactctcctctcagggaattaaatcaaagataatgaagaagcctctttgggattcatgctatactcgattctgaccccagtagtagtagtaatagttgacagtgcaccacaggaagttggaagacatttggggtattgctttggttatgcttttgttttgtttttaaaatcctatctgattccaaaaaggatttgaagctgttgaacttggagttagcctgcccccttacctctgggcgaaaactaaagtaataaaaactagtttctgtaca

SEQ ID NO: 23756 - protein, 179 aa, Homo sapiens
MTYAYLFKYIIIGDTGVGKSCLLLQFTDKRFQPVHDLTIGVEFGARMVNIDGKQIKLQIWDTAGQESFRSITRSYYRGAAGALLVYDITRRETFNHLTSWLEDARQHSSSNMVIMLIGNKSDLESRRDVKREEGEAFAREHGLIFMETSAKTACNVEEAFINTAKECWITGVSHRAWPK

SEQ ID NO: 23757 - DNA, 2164 bp, Homo sapiens
aagggggagaagaagaagatcggtagattgagtggctagagaggtcggaggtaagtggctatagaagtcgggcggacccggaacccagaggacgcgacaccatgacttatgcttatctcttcaagtatatcatcatcggagacacaggtgtggggaagtcatgtctcctcctgcagtttacagataagcggttccagcctgtccacgacctcacaataggtgtggagtttggagctcgtatggtcaacattgatggaaaacaaatcaaactgcaaatctgggatacggggagcagctggagcactgctggtgtacgacattacaaggcgtgaaaccttcaaccacctgacctcatggttagaggatgcccggcagcactctagttccaacatggttatcatgctcattgggaataagagtgacctagagtcccgcagggatgtgaagagagaagaaggagaggcctttgctagggagcatggacttatattcatggaaacttcagccaaaacagcctgcaatgttgaagaggccttcattaacacagccaaagaaatatataggaagatccagcagggtttatttgattccacttcccactaagaattagggtcaaagacattctatttgaacacttgcaattacctagatctagttggcctttggttgatagatcctctgcctcggaatttcattgagtttttttcttccttgcctttgggtgtctgcttgccacttcctaagaattcttgtagaaggcagtttcctctacttgcccaagagcactgagtacttctctactatcctattattagcttctatctcttagtgtaacttcaaaacttttaagagcagtgaagttggtcagggacatgtggccacttattattacctaaagaaaacatttgttccctgttcattttattttaggggccagatctaacattgtagtgtctttcaccagatagacttctactgtttcatcaaactcccttcttaactagacctagactttctactccaatcaggctaatctacttactgaatgtgacatatttattcctagttccatacctttgcacatgccctactctccactaattatacttaaaagtccaaaaattttttctttagtaacagacttaggtactgctaagcagttattaacacaatattccttagttttcatatgttggttattcatatgtctatttatatgtatatttatttttatgtatgttactatgtaaatatggtttgcagttgtttttgtgtggaatcttgtctttccgtataagttgtaagctccttgagagcaggatccatgtcattcctttatttttataaattattccccctatcattcctttacagtgcctagtgctactcattatgtgttcattgaatttgactgacatagttaaaaacttaaggtttattttagactttcaaggaaacaaaagactttagagtcctctctctgtaattctgccccactcatttgtttaccctgggttttatacagttctcttccttctcccctcccacctttccctggctttttgcctccattccatgaggcatacagtaaggctgcctgctagtaagcagtcacataagtgggtacctatccagccattctcttttcagagcatataatactatcttagccaaacttgcctttgcttcactcatcatgcagccttctgggttggttgctatatatatcttttttccttgatgtcccgttctcttccacagccctgaggtcttacgaatttttctactttctttttgctgttgatgaattgtttcattattaaatatatgcatgtatcaaagctattcatactccatgtgtcatttctaattgtatcccaaacattagtagatactctcctctcagggaattaaatcaaagataatgaagaagcctctttgggattcatgctatactcgattctgaccccagtagtagtagtaatagttgacagtgcaccacaggaagttggaagacatttggggtattgctttggttatgcttttgttttgtttttaaaatcctatctgattccaaaaaggatttgaagctgttgaacttggagttagcctgcccccttacctctgggcgaaaactaaagtaataaaaactagtttctgtaca

SEQ ID NO: 23758 - protein, 116 aa, Homo sapiens
MENKSNCKSGIRGAAGALLVYDITRRETFNHLTSWLEDARQHSSSNMVIMLIGNKSDLESRRDVKREEGEAFAREHGLIFMETSAKTACNVEEAFINTAKEIYRKIQQGLFDSTSH

SEQ ID NO: 23759 - DNA, 2650 bp, Homo sapiens
agcggggggaagggggagaagaagaagatcggtagattgagtggctagagaggtcggaggtaagtggctatagaagtcgggcggacccggaacccagaggacgcgacaccatgacttatgcttatctcttcaagtatatcatcatcggagacacaggtgtggggaagtcatgtctcctcctgcagtttacagataagcggttccagcctgtccacgacctcacaataggtgtggagtttggagctcgtatggtcaacattgatggaaaacaaatcaaactgcaaatctgggatacggctgggcaagaatccttccgttctatcacccgttcctactacaggggagcagctggagcactgctggtgtacgacattacaaggcgtgaaaccttcaaccacctgacctcatggttagaggatgcccggcagcactctagttccaacatggttatcatgctcattgggaataagagtgacctagagtcccgcagggatgtgaagagagaagaaggagaggcctttgctagggagcatggacttatattcatggaaacttcagccaaaacagcctgcaatgttgaagaggccttcattaacacagccaaagaaatatataggaagatccagcagggtttatttgatgtccacaatgaggcaaatggcatcaagattgggccccaacagtcaatttcaacatcagtgggacccagtgcctcccagcggaactctcgtgacatagggtccaactctggctgctgctgaacatctggcttgaactttttttgtccttcctggaatagcttcagatcaataggcttaatgaaagaggtctttcttgctttggctgagagcagcctctttttaaagtgtgatgttttgcctttccacctaaagaccaggagagaatttgggcccttactgacctgtcctccttcagggacatgagcattccctatagattagggttcttcttatcctcctatacaaatttcttaaattgttaggatcaaatgctggattacaggtgtgagccaccgtgcctggcctaaataaataatttcgtaagcatatacaatccacttcccactaagaattagggtcaaagacattctatttgaacacttgcaattacctagatctagttggcctttggttgatagatcctctgcctcggaatttcattgagtttttttcttccttgcctttgggtgtctgcttgccacttcctaagaattcttgtagaaggcagtttcctctacttgcccaagagcactgagtacttctctactatcctattattagcttctatctcttagtgtaacttcaaaacttttaagagcagtgaagttggtcagggacatgtggccacttattattacctaaagaaaacatttgttccctgttcattttattttaggggccagatctaacattgtagtgtctttcaccagatagacttctactgtttcatcaaactcccttcttaactagacctagactttctactccaatcaggctaatctacttactgaatgtgacatatttattcctagttccatacctttgcacatgccctactctccactaattatacttaaaagtccaaaaattttttctttagtaacagacttaggtactgctaagcagttattaacacaatattccttagttttcatatgttggttattcatatgtctatttatatgtatatttatttttatgtatgttactatgtaaatatggtttgcagttgtttttgtgtggaatcttgtctttccgtataagttgtaagctccttgagagcaggatccatgtcattcctttatttttataaattattccccctatcattcctttacagtgcctagtgctactcattatgtgttcattgaatttgactgacatagttaaaaacttaaggtttattttagactttcaaggaaacaaaagactttagagtcctctctctgtaattctgccccactcatttgtttaccctgggttttatacagttctcttccttctcccctcccacctttccctggctttttgcctccattccatgaggcatacagtaaggctgcctgctagtaagcagtcacataagtgggtacctatccagccattctcttttcagagcatataatactatcttagccaaacttgcctttgcttcactcatcatgcagccttctgggttggttgctatatatatcttttttccttgatgtcccgttctcttccacagccctgaggtcttacgaatttttctactttctttttgctgttgatgaattgtttcattattaaatatatgcatgtatcaaagctattcatactccatgtgtcatttctaattgtatcccaaacattagtagatactctcctctcagggaattaaatcaaagataatgaagaagcctctttgggattcatgctatactcgattctgaccccagtagtagtagtaatagttgacagtgcaccacaggaagttggaagacatttggggtattgctttggttatgcttttgttttgtttttaaaatcctatctgattccaaaaaggatttgaagctgttgaacttggagttagcctgcccccttacctctgggcgaaaactaaagtaataaaaactagtttctgtaca

SEQ ID NO: 23760 - protein, 216 aa, Homo sapiens; identical to SEQ ID NO: 3157

SEQ ID NO: 23761 - DNA, 2361 bp, Homo sapiens
agcggggggaagggggagaagaagaagatcggtagattgagtggctagagaggtcggaggtaagtggctatagaagtcgggcggacccggaacccagaggacgcgacaccatgacttatgcttatctcttcaagtatatcatcatcggagacacaggtgtggggaagtcatgtctcctcctgcagtttacagataagcggttccagcctgtccacgacctcacaataggtgtggagtttggagctcgtatggtcaacattgatggaaaacaaatcaaactgcaaatctgggatacggctgggcaagaatccttccgttctatcacccgttcctactacaggggagcagctggagcactgctggtgtacgacattacaaggcgtgaaaccttcaaccacctgacctcatggttagaggatgcccggcagcactctagttccaacatggttatcatgctcattgggaataagagtgacctagagtcccgcagggatgtgaagagagaagaaggagaggcctttgctagggagcatggacttatattcatggaaacttcagccaaaacagcctgcaatgttgaagaggccttcattaacacagccaaagaaatatataggaagatccagcagggtttatttgatgtccacaatgaggcaaatggcatcaagattgggccccaacagtcaatttcaacatcagtgggacccagtgcctcccaaagtgctggattacaggtgtgagccaccgtgcctggcctaaataaataatttcgtaagcatatacaatccacttcccactaagaattagggtcaaagacattctatttgaacacttgcaattacctagatctagttggcctttggttgatagatcctctgcctcggaatttcattgagtttttttcttccttgcctttgggtgtctgcttgccacttcctaagaattcttgtagaaggcagtttcctctacttgcccaagagcactgagtacttctctactatcctattattagcttctatctcttagtgtaacttcaaaacttttaagagcagtgaagttggtcagggacatgtggccacttattattacctaaagaaaacatttgttccctgttcattttattttaggggccagatctaacattgtagtgtctttcaccagatagacttctactgtttcatcaaactcccttcttaactagacctagactttctactccaatcaggctaatctacttactgaatgtgacatatttattcctagttccatacctttgcacatgccctactctccactaattatacttaaaagtccaaaaattttttctttagtaacagacttaggtactgctaagcagttattaacacaatattccttagttttcatatgttggttattcatatgtctatttatatgtatatttatttttatgtatgttactatgtaaatatggtttgcagttgtttttgtgtggaatcttgtctttccgtataagttgtaagctccttgagagcaggatccatgtcattcctttatttttataaattattccccctatcattcctttacagtgcctagtgctactcattatgtgttcattgaatttgactgacatagttaaaaacttaaggtttattttagactttcaaggaaacaaaagactttagagtcctctctctgtaattctgccccactcatttgtttaccctgggttttatacagttctcttccttctcccctcccacctttccctggctttttgcctccattccatgaggcatacagtaaggctgcctgctagtaagcagtcacataagtgggtacctatccagccattctcttttcagagcatataatactatcttagccaaacttgcctttgcttcactcatcatgcagccttctgggttggttgctatatatatcttttttccttgatgtcccgttctcttccacagccctgaggtcttacgaatttttctactttctttttgctgttgatgaattgtttcattattaaatatatgcatgtatcaaagctattcatactccatgtgtcatttctaattgtatcccaaacattagtagatactctcctctcagggaattaaatcaaagataatgaagaagcctctttgggattcatgctatactcgattctgaccccagtagtagtagtaatagttgacagtgcaccacaggaagttggaagacatttggggtattgctttggttatgcttttgttttgtttttaaaatcctatctgattccaaaaaggatttgaagctgttgaacttggagttagcctgcccccttacctctgggcgaaaactaaagtaataaaaactagtttctgtaca

SEQ ID NO: 23762 - protein, 209 aa, Homo sapiens [sequence omitted]

SEQ ID NO: 23763 - DNA, 1565 bp, Homo sapiens
gttccagggctgcgtgattccgggagtgtgctttctctttcaggtgtggggaagtcatgtctcctcctgcagtttacagataagcggttccagcctgtccacgacctcacaataggtgtggagtttggagctcgtatggtcaacattgatggaaaacaaatcaaactgcaaatctgggatacggctgggcaagaatccttccgttctatcacccgttcctactacaggggagcagctggagcacttgctggattacaggtgtgagccaccgtgcctggcctaaataaataatttcgtaagcatatacaatccacttcccactaagaattagggtcaaagacattctatttgaacacttgcaattacctagatctagttggcctttggttgatagatcctctgcctcggaatttcattgagtttttttcttccttgcctttgggtgtctgcttgccacttcctaagaattcttgtagaaggcagtttcctctacttgcccaagagcactgagtacttctctactatcctattattagcttctatctcttagtgtaacttcaaaacttttaagagcagtgaagttggtcagggacatgtggccacttattattacctaaagaaaacatttgttccctgttcattttattttaggggccagatctaacattgtagtgtctttcaccagatagacttctactgtttcatcaaactcccttcttaactagacctagactttctactccaatcaggctaatctacttactgaatgtgacatatttattcctagttccatacctttgcacatgccctactctccactaattatacttaaaagtccaaaaattttttctttagtaacagacttaggtactgctaagcagttattaacacaatattccttagttttcatatgttggttattcatatgtctatttatatgtatatttatttttatgtatgttactatgtaaatatggtttgcagttgtttttgtgtggaatcttgtctttccgtataagttgtaagctccttgagagcaggatccatgtcattcctttatttttataaattattccccctatcattcctttacagtgcctagtgctactcattatgtgttcattgaatttgactgacatagttaaaaacttaaggtttattttagactttcaaggaaacaaaagactttagagtcctctctctgtaattctgccccactcatttgtttaccctgggttttatacagttctcttccttctcccctcccacctttccctggctttttgcctccattccatgaggcatacagtaaggctgcctgctagtaagcagtcacataagtgggtacctatccagccattctcttttcagagcatataatactatcttagccaaacttgcctttgcttcactcatcatgcagccttctgggttggttgctatatatatcttttttccttgatgtcccgttctcttccacagccctgaggtcttacgaatttttctactttctttttgctgttgatgaattgtttcattattaaatatatgcatgtatcaaagct

SEQ ID NO: 23764 - protein, 44 aa, Homo sapiens; identical to SEQ ID NO: 23754

SEQ ID NO: 23765 - DNA, 2504 bp, Homo sapiens
aagggggagaagaagaagatcggtagattgagtggctagagaggtcggaggtaagtggctatagaagtcgggcggacccggaacccagaggacgcgacaccatgacttatgcttatctcttcaagtatatcatcatcggagacacaggtgtggggaagtcatgtctcctcctgcagtttacagataagcggttccagcctgtccacgacctcacaataggtgtggagtttggagctcgtatggtcaacattgatggaaaacaaatcaaactgcaaatctgggatacggggagcagctggagcactgctggtgtacgacattacaaggcgtgaaaccttcaaccacctgacctcatggttagaggatgcccggcagcactctagttccaacatggttatcatgctcattgggaataagagtgacctagagtcccgcagggatgtgaagagagaagaaggagaggcctttgctagggagcatggacttatattcatggaaacttcagccaaaacagcctgcaatgttgaagaggccttcattaacacagccaaagaaatatataggaagatccagcagggtttatttgatgtccacaatgaggcaaatggcatcaagattgggccccaacagtcaatttcaacatcagtgggacccagtgcctcccagcggaactctcgtgacatagggtccaactctggctgctgctgaacatctggcttgaactttttttgtccttcctggaatagcttcagatcaataggcttaatgaaagaggtctttcttgctttggctgagagcagcctctttttaaagtgtgatgttttgcctttccacctaaagaccaggagagaatttgggcccttactgacctgtcctccttcagggacatgagcattccctatagattagggttcttcttatcctcctatacaaatttcttaaattgttaggatcaaagttgattatcacagtagttaaaaaataatttcatggcggggcgccatggctcatgcctgtaatcctagcactttgggaggccaaggtgggcagatcacctgaggtcaagagttcgagaccacacctggctcatttttgtatttttagtagagacagggtttcaccatgttggccaggatggtcttgatctcttgacctcgtgatccgcccaccttggcctcccaaagtgctggattacaggtgtgagccaccgtgcctggcctaaataaataatttcgtaagcatatacaatccacttcccactaagaattagggtcaaagacattctatttgaacacttgcaattacctagatctagttggcctttggttgatagatcctctgcctcggaatttcattgagtttttttcttccttgcctttgggtgtctgcttgccacttcctaagaattcttgtagaaggcagtttcctctacttgcccaagagcactgagtacttctctactatcctattattagcttctatctcttagtgtaacttcaaaacttttaagagcagtgaagttggtcagggacatgtggccacttattattacctaaagaaaacatttgttccctgttcattttattttaggggccagatctaacattgtagtgtctttcaccagatagacttctactgtttcatcaaactcccttcttaactagacctagactttctactccaatcaggctaatctacttactgaatgtgacatatttattcctagttccatacctttgcacatgccctactctccactaattatacttaaaagtccaaaaattttttctttagtaacagacttaggtactgctaagcagttattaacacaatattccttagttttcatatgttggttattcatatgtctatttatatgtatatttatttttatgtatgttactatgtaaatatggtttgcagttgtttttgtgtggaatcttgtctttccgtataagttgtaagctccttgagagcaggatccatgtcattcctttatttttataaattattccccctatcattcctttacagtgcctagtgctactcattatgtgttcattgaatttgactgacatagttaaaaacttaaggtttattttagactttcaaggaaacaaaagactttagagtcctctctctgtaattctgccccactcatttgtttaccctgggttttatacagttctcttccttctcccctcccacctttccctggctttttgcctccattccatgaggcatacagtaaggctgcctgctagtaagcagtcacataagtgggtacctatccagccattctcttttcagagcatataatactatcttagccaaacttgcctttgcttcactcatcatgcagccttctgggttggttgctatatatatcttttttccttgatgtcccgttctcttccacagccctgaggtcttacgaatttttctactttctttttgctgttgatgaattgtttcattattaaatatatgcatgtatcaaagct

SEQ ID NO: 23766 - protein, 151 aa, Homo sapiens
MENKSNCKSGIRGAAGALLVYDITRRETFNHLTSWLEDARQHSSSNMVIMLIGNKSDLESRRDVKREEGEAFAREHGLIFMETSAKTACNVEEAFINTAKEIYRKIQQGLFDVHNEANGIKIGPQQSISTSVGPSASQRNSRDIGSNSGCC

SEQ ID NO: 23767 - DNA, 1919 bp, Homo sapiens
aagggggagaagaagaagatcggtagattgagtggctagagaggtcggaggtaagtggctatagaagtcgggcggacccggaacccagaggacgcgacaccatgacttatgcttatctcttcaagtatatcatcatcggagacacaggtgtggggaagtcatgtctcctcctgcagtttacagataagcggttccagcctgtccacgacctcacaataggtgtggagtttggagctcgtatggtcaacattgatggaaaacaaatcaaactgcaaatctgggatacggctgggcaagaatccttccgttctatcacccgttcctactacaggggagcagctggagcactgctggtgtacgacattacaaggcgtgaaaccttcaaccacctgacctcatggttagaggatgcccggcagcactctagttccaacatggttatcatgctcattgggaataagagtgacctagagtcccgcagggatgtgaagagagaagaaggagaggcctttgctagggagcatggacttatattcatggaaacttcagccaaaacagcctgcaatgttgaagaggccttcattaacacagccaaagaatgctggattacaggtgtgagccaccgtgcctggcctaaataaataatttcgtaagcatatacaatccacttcccactaagaattagggtcaaagacattctatttgaacacttgcaattacctagatctagttggcctttggttgatagatcctctgcctcggaatttcattgagtttttttcttccttgcctttgggtgtctgcttgccacttcctaagaattcttgtagaaggcagtttcctctacttgcccaagagcactgagtacttctctactatcctattattagcttctatctcttagtgtaacttcaaaacttttaagagcagtgaagttggtcagggacatgtggccacttattattacctaaagaaaacatttgttccctgttcattttattttaggggccagatctaacattgtagtgtctttcaccagatagacttctactgtttcatcaaactcccttcttaactagacctagactttctactccaatcaggctaatctacttactgaatgtgacatatttattcctagttccatacctttgcacatgccctactctccactaattatacttaaaagtccaaaaattttttctttagtaacagacttaggtactgctaagcagttattaacacaatattccttagttttcatatgttggttattcatatgtctatttatatgtatatttatttttatgtatgttactatgtaaatatggtttgcagttgtttttgtgtggaatcttgtctttccgtataagttgtaagctccttgagagcaggatccatgtcattcctttatttttataaattattccccctatcattcctttacagtgcctagtgctactcattatgtgttcattgaatttgactgacatagttaaaaacttaaggtttattttagactttcaaggaaacaaaagactttagagtcctctctctgtaattctgccccactcatttgtttaccctgggttttatacagttctcttccttctcccctcccacctttccctggctttttgcctccattccatgaggcatacagtaaggctgcctgctagtaagcagtcacataagtgggtacctatccagccattctcttttcagagcatataatactatcttagccaaacttgcctttgcttcactcatcatgcagccttctgggttggttgctatatatatcttttttccttgatgtcccgttctcttccacagccctgaggtcttacgaatttttctactttctttttgctgttgatgaattgtttcattattaaatatatgcatgtatcaaagct

SEQ ID NO: 23768 - protein, 179 aa, Homo sapiens; identical to SEQ ID NO: 23756

SEQ ID NO: 23769 - DNA, 1844 bp, Homo sapiens
aagggggagaagaagaagatcggtagattgagtggctagagaggtcggaggtaagtggctatagaagtcgggcggacccggaacccagaggacgcgacaccatgacttatgcttatctcttcaagtatatcatcatcggagacacaggtgtggggaagtcatgtctcctcctgcagtttacagataagcggttccagcctgtccacgacctcacaataggtgtggagtttggagctcgtatggtcaacattgatggaaaacaaatcaaactgcaaatctgggatacggggagcagctggagcactgctggtgtacgacattacaaggcgtgaaaccttcaaccacctgacctcatggttagaggatgcccggcagcactctagttccaacatggttatcatgctcattgggaataagagtgacctagagtcccgcagggatgtgaagagagaagaaggagaggcctttgctagggagcatggacttatattcatggaaacttcagccaaaacagcctgcaatgttgaagaggccttcattaacacagccaaagaaatatataggaagatccagcagggtttatttgattccacttcccactaagaattagggtcaaagacattctatttgaacacttgcaattacctagatctagttggcctttggttgatagatcctctgcctcggaatttcattgagtttttttcttccttgcctttgggtgtctgcttgccacttcctaagaattcttgtagaaggcagtttcctctacttgcccaagagcactgagtacttctctactatcctattattagcttctatctcttagtgtaacttcaaaacttttaagagcagtgaagttggtcagggacatgtggccacttattattacctaaagaaaacatttgttccctgttcattttattttaggggccagatctaacattgtagtgtctttcaccagatagacttctactgtttcatcaaactcccttcttaactagacctagactttctactccaatcaggctaatctacttactgaatgtgacatatttattcctagttccatacctttgcacatgccctactctccactaattatacttaaaagtccaaaaattttttctttagtaacagacttaggtactgctaagcagttattaacacaatattccttagttttcatatgttggttattcatatgtctatttatatgtatatttatttttatgtatgttactatgtaaatatggtttgcagttgtttttgtgtggaatcttgtctttccgtataagttgtaagctccttgagagcaggatccatgtcattcctttatttttataaattattccccctatcattcctttacagtgcctagtgctactcattatgtgttcattgaatttgactgacatagttaaaaacttaaggtttattttagactttcaaggaaacaaaagactttagagtcctctctctgtaattctgccccactcatttgtttaccctgggttttatacagttctcttccttctcccctcccacctttccctggctttttgcctccattccatgaggcatacagtaaggctgcctgctagtaagcagtcacataagtgggtacctatccagccattctcttttcagagcatataatactatcttagccaaacttgcctttgcttcactcatcatgcagccttctgggttggttgctatatatatcttttttccttgatgtcccgttctcttccacagccctgaggtcttacgaatttttctactttctttttgctgttgatgaattgtttcattattaaatatatgcatgtatcaaagct

SEQ ID NO: 23770 - protein, 116 aa, Homo sapiens; identical to SEQ ID NO: 23758

SEQ ID NO: 23771 - DNA, 2330 bp, Homo sapiens
agcggggggaagggggagaagaagaagatcggtagattgagtggctagagaggtcggaggtaagtggctatagaagtcgggcggacccggaacccagaggacgcgacaccatgacttatgcttatctcttcaagtatatcatcatcggagacacaggtgtggggaagtcatgtctcctcctgcagtttacagataagcggttccagcctgtccacgacctcacaataggtgtggagtttggagctcgtatggtcaacattgatggaaaacaaatcaaactgcaaatctgggatacggctgggcaagaatccttccgttctatcacccgttcctactacaggggagcagctggagcactgctggtgtacgacattacaaggcgtgaaaccttcaaccacctgacctcatggttagaggatgcccggcagcactctagttccaacatggttatcatgctcattgggaataagagtgacctagagtcccgcagggatgtgaagagagaagaaggagaggcctttgctagggagcatggacttatattcatggaaacttcagccaaaacagcctgcaatgttgaagaggccttcattaacacagccaaagaaatatataggaagatccagcagggtttatttgatgtccacaatgaggcaaatggcatcaagattgggccccaacagtcaatttcaacatcagtgggacccagtgcctcccagcggaactctcgtgacatagggtccaactctggctgctgctgaacatctggcttgaactttttttgtccttcctggaatagcttcagatcaataggcttaatgaaagaggtctttcttgctttggctgagagcagcctctttttaaagtgtgatgttttgcctttccacctaaagaccaggagagaatttgggcccttactgacctgtcctccttcagggacatgagcattccctatagattagggttcttcttatcctcctatacaaatttcttaaattgttaggatcaaatgctggattacaggtgtgagccaccgtgcctggcctaaataaataatttcgtaagcatatacaatccacttcccactaagaattagggtcaaagacattctatttgaacacttgcaattacctagatctagttggcctttggttgatagatcctctgcctcggaatttcattgagtttttttcttccttgcctttgggtgtctgcttgccacttcctaagaattcttgtagaaggcagtttcctctacttgcccaagagcactgagtacttctctactatcctattattagcttctatctcttagtgtaacttcaaaacttttaagagcagtgaagttggtcagggacatgtggccacttattattacctaaagaaaacatttgttccctgttcattttattttaggggccagatctaacattgtagtgtctttcaccagatagacttctactgtttcatcaaactcccttcttaactagacctagactttctactccaatcaggctaatctacttactgaatgtgacatatttattcctagttccatacctttgcacatgccctactctccactaattatacttaaaagtccaaaaattttttctttagtaacagacttaggtactgctaagcagttattaacacaatattccttagttttcatatgttggttattcatatgtctatttatatgtatatttatttttatgtatgttactatgtaaatatggtttgcagttgtttttgtgtggaatcttgtctttccgtataagttgtaagctccttgagagcaggatccatgtcattcctttatttttataaattattccccctatcattcctttacagtgcctagtgctactcattatgtgttcattgaatttgactgacatagttaaaaacttaaggtttattttagactttcaaggaaacaaaagactttagagtcctctctctgtaattctgccccactcatttgtttaccctgggttttatacagttctcttccttctcccctcccacctttccctggctttttgcctccattccatgaggcatacagtaaggctgcctgctagtaagcagtcacataagtgggtacctatccagccattctcttttcagagcatataatactatcttagccaaacttgcctttgcttcactcatcatgcagccttctgggttggttgctatatatatcttttttccttgatgtcccgttctcttccacagccctgaggtcttacgaatttttctactttctttttgctgttgatgaattgtttcattattaaatatatgcatgtatcaaagct

SEQ ID NO: 23772 - protein, 216 aa, Homo sapiens; identical to SEQ ID NO: 3157

SEQ ID NO: 23773 - DNA, 2041 bp, Homo sapiens
agcggggggaagggggagaagaagaagatcggtagattgagtggctagagaggtcggaggtaagtggctatagaagtcgggcggacccggaacccagaggacgcgacaccatgacttatgcttatctcttcaagtatatcatcatcggagacacaggtgtggggaagtcatgtctcctcctgcagtttacagataagcggttccagcctgtccacgacctcacaataggtgtggagtttggagctcgtatggtcaacattgatggaaaacaaatcaaactgcaaatctgggatacggctgggcaagaatccttccgttctatcacccgttcctactacaggggagcagctggagcactgctggtgtacgacattacaaggcgtgaaaccttcaaccacctgacctcatggttagaggatgcccggcagcactctagttccaacatggttatcatgctcattgggaataagagtgacctagagtcccgcagggatgtgaagagagaagaaggagaggcctttgctagggagcatggacttatattcatggaaacttcagccaaaacagcctgcaatgttgaagaggccttcattaacacagccaaagaaatatataggaagatccagcagggtttatttgatgtccacaatgaggcaaatggcatcaagattgggccccaacagtcaatttcaacatcagtgggacccagtgcctcccaaagtgctggattacaggtgtgagccaccgtgcctggcctaaataaataatttcgtaagcatatacaatccacttcccactaagaattagggtcaaagacattctatttgaacacttgcaattacctagatctagttggcctttggttgatagatcctctgcctcggaatttcattgagtttttttcttccttgcctttgggtgtctgcttgccacttcctaagaattcttgtagaaggcagtttcctctacttgcccaagagcactgagtacttctctactatcctattattagcttctatctcttagtgtaacttcaaaacttttaagagcagtgaagttggtcagggacatgtggccacttattattacctaaagaaaacatttgttccctgttcattttattttaggggccagatctaacattgtagtgtctttcaccagatagacttctactgtttcatcaaactcccttcttaactagacctagactttctactccaatcaggctaatctacttactgaatgtgacatatttattcctagttccatacctttgcacatgccctactctccactaattatacttaaaagtccaaaaattttttctttagtaacagacttaggtactgctaagcagttattaacacaatattccttagttttcatatgttggttattcatatgtctatttatatgtatatttatttttatgtatgttactatgtaaatatggtttgcagttgtttttgtgtggaatcttgtctttccgtataagttgtaagctccttgagagcaggatccatgtcattcctttatttttataaattattccccctatcattcctttacagtgcctagtgctactcattatgtgttcattgaatttgactgacatagttaaaaacttaaggtttattttagactttcaaggaaacaaaagactttagagtcctctctctgtaattctgccccactcatttgtttaccctgggttttatacagttctcttccttctcccctcccacctttccctggctttttgcctccattccatgaggcatacagtaaggctgcctgctagtaagcagtcacataagtgggtacctatccagccattctcttttcagagcatataatactatcttagccaaacttgcctttgcttcactcatcatgcagccttctgggttggttgctatatatatcttttttccttgatgtcccgttctcttccacagccctgaggtcttacgaatttttctactttctttttgctgttgatgaattgtttcattattaaatatatgcatgtatcaaagct

SEQ ID NO: 23774 - protein, 209 aa, Homo sapiens [sequence omitted]

SEQ ID NO: 23775 - DNA, 846 bp, Homo sapiens
tctggtccgggaagtccatactctggaaggtgttccagggctgcgtgattccgggagtgtgctttctctttcaggtgtggggaagtcatgtctcctcctgcagtttacagataagcggttccagcctgtccacgacctcacaataggtgtggagtttggagctcgtatggtcaacattgatggaaaacaaatcaaactgcaaatctgggatacggctgggcaagaatccttccgttctatcacccgttcctactacaggggagcagctggagcactgctggtgtacgacattacaaggcgtgaaaccttcaaccacctgacctcatggttagaggatgcccggcagcactctagttccaacatggttatcatgctcattgggaataagagtgacctagagtcccgcagggatgtgaagagagaagaaggagaggcctttgctagggagcatggacttatattcatggaaacttcagccaaaacagcctgcaatgttgaagaggccttcattaacacagccaaagaaatatataggaagatccagcagggtttatttgatgtccacaatgaggcaaatggcatcaagattgggccccaacagtcaatttcaacatcagtgggacccagtgcctcccagcggaactctcgtgacatagggtccaactctggctgctgctgaacatctggcttgaactttttttgtccttcctggaatagcttcagatcaataggcttaatgaaagaggtctttcttgctttggctgagagcagcctctttttaaagtgtgatgttttgcctttccacctaaagaccaggagagaatttgggcccttactgacctgtcc

SEQ ID NO: 23776 - protein, 170 aa, Homo sapiens
MVNIDGKQIKLQIWDTAGQESFRSITRSYYRGAAGALLVYDITRRETFNHLTSWLEDARQHSSSNMVIMLIGNKSDLESRRDVKREEGEAFAREHGLIFMETSAKTACNVEEAFINTAKEIYRKIQQGLFDVHNEANGIKIGPQQSISTSVGPSASQRNSRDIGSNSGCC

SEQ ID NO: 23777 - DNA, 875 bp, Homo sapiens
aagggggagaagaagaagatcggtagattgagtggctagagaggtcggaggtaagtggctatagaagtcgggcggacccggaacccagaggacgcgacaccatgacttatgcttatctcttcaagtatatcatcatcggagacacaggtgtggggaagtcatgtctcctcctgcagtttacagataagcggttccagcctgtccacgacctcacaataggtgtggagtttggagctcgtatggtcaacattgatggaaaacaaatcaaactgcaaatctgggatacggggagcagctggagcactgctggtgtacgacattacaaggcgtgaaaccttcaaccacctgacctcatggttagaggatgcccggcagcactctagttccaacatggttatcatgctcattgggaataagagtgacctagagtcccgcagggatgtgaagagagaagaaggagaggcctttgctagggagcatggacttatattcatggaaacttcagccaaaacagcctgcaatgttgaagaggccttcattaacacagccaaagaaatatataggaagatccagcagggtttatttgatgtccacaatgaggcaaatggcatcaagattgggccccaacagtcaatttcaacatcagtgggacccagtgcctcccagcggaactctcgtgacatagggtccaactctggctgctgctgaacatctggcttgaactttttttgtccttcctggaatagcttcagatcaataggcttaatgaaagaggtctttcttgctttggctgagagcagcctctttttaaagtgtgatgttttgcctttccacctaaagaccaggagagaatttgggcccttactgacctgtcc

SEQ ID NO: 23778 - protein, 151 aa, Homo sapiens; identical to SEQ ID NO: 23766

SEQ ID NO: 23779 - DNA, 635 bp, Homo sapiens
acaagcaatagagcataagctttgtgtaactatgggggcttgcctaacccttgataagccattttctctgtaatagagtgaggtattatcttcaactatgcagcagctgtcccaaaactaaagaatattttccaagatgctacaaaaatcagtaactctgtataagagtatcatgtaggatctacattctttatgaaataactggcagttgaaaccacgacggaattcttttagaaatagactttcctctttcacttggatcttttttttaaattttctccttaattaatctcttgcagtgacctagagtcccgcagggatgtgaagagagaagaaggagaggcctttgctagggagcatggacttatattcatggaaacttcagccaaaacagcctgcaatgttgaagaggccttcattaacacagccaaagaaatatataggaagatccagcagggtttatttgatgtccacaatgaggcaaatggcatcaagattgggccccaacagtcaatttcaacatcagtgggacccagtgcctcccagcggaactctcgtgacatagggtccaactctggctgctgctgaacatctggcttgaactttttttgtccttcctggaatagcttcagatc

SEQ ID NO: 23780 - protein, 71 aa, Homo sapiens
METSAKTACNVEEAFINTAKEIYRKIQQGLFDVHNEANGIKIGPQQSISTSVGPSASQRNSRDIGSNSGCC

SEQ ID NO: 23781 - DNA, 614 bp, Homo sapiens
aagggggagaagaagaagatcggtagattgagtggctagagaggtcggaggtaagtggctatagaagtcgggcggacccggaacccagaggacgcgacaccatgacttatgcttatctcttcaagtatatcatcatcggagacacaggtgtggggaagtcatgtctcctcctgcagtttacagataagcggttccagcctgtccacgacctcacaataggtgtggagtttggagctcgtatggtcaacattgatggaaaacaaatcaaactgcaaatctgggatacggctgggcaagaatccttccgttctatcacccgttcctactacaggggagcagctggagcactgctggtgtacgacattacaaggcgtgaaaccttcaaccacctgacctcatggttagaggatgcccggcagcactctagttccaacatggttatcatgctcattgggaataagagtgacctagagtcccgcagggatgtgaagagagaagaaggagaggcctttgctagggagcatggacttatattcatggaaacttcagccaaaacagcctgcaatgttgaagaggccttcattaacacagccaaagaaatatataggaagatc

SEQ ID NO: 23782 - protein, 170 aa, Homo sapiens
MTYAYLFKYIIIGDTGVGKSCLLLQFTDKRFQPVHDLTIGVEFGARMVNIDGKQIKLQIWDTAGQESFRSITRSYYRGAAGALLVYDITRRETFNHLTSWLEDARQHSSSNMVIMLIGNKSDLESRRDVKREEGEAFAREHGLIFMETSAKTACNVEEAFINTAKEIYRK

SEQ ID NO: 23783 - DNA, 406 bp, Homo sapiens
agagaggtcggaggtaagtggctatagaagtcgggcggacccggaacccagaggacgcgacaccatgacttatgcttatctcttcaagtatatcatcatcggagacacaggtgtggggaagtcatgtctcctcctgcagtttacagataagcggttccagcctgtccacgacctcacaataggtaagtgcatctacttgttccagaacagatgataaaacctgactagctaaattgctaaagtggaaagttagcagccttcagtgttcgaagtaaaaagttacccctcactactttaaactagtccaaacttatgttaatgaagtgaccaatgaaacgttgatatgtggggagtagtgtaagggagagtatataattgaaaggtaactttttagagtgtgaggtat

SEQ ID NO: 23784 - protein, 49 aa, Homo sapiens
MTYAYLFKYIIIGDTGVGKSCLLLQFTDKRFQPVHDLTIGKCIYLFQNR

SEQ ID NO: 23785 - DNA, 3616 bp, Homo sapiens
gagaacacacgtccttgcggaagtgacggcagttccgagtccagtgggggcggtgggagcgatgagggtctgagacggtgggagcggttgtgtgaagatggagtttcccggaggaaatgacaattacctgacgatcacagggccttcgcaccccttcctgtcaggggccgagacattccatacaccaagcttgggtgatgaggaatttgaaatcccacctatctccttggattctgatccctcattggctgtctcagatgtggttggccactttgatgacctggcagacccttcctcttcacaggatggcagtttttcagcccagtatggggtccagacattggacatgcctgtgggcatgacccatggcttgatggagcagggcggggggctcctgagtgggggcttgaccatggtaaggggcaagacattgtcaggcttaccccagctaatgggcatggcattaggggagacaaagttactctattccctgctacacttgggtattacttgtttctcttcttgtggctaaaggctcaccaacaaagacttaatttcacctgaataaatgaaatttaccatgtaggtagattttacttgaaaaataatttaaaattgtacaatgtctggtttgaaaattatttattgtggtttttgggaaaaagtgttttctgcttttattatggccttcacatcctaggattcaaatttgaatgtgatagctggcacacggagggatttattcaaaaatggcctgaatcacgttgagcagccagcagaacagagcttaaaaaaaaaaaaaaagtctgagccaaatatagtattgtggattagtatgtaatataaatcagtatattgggcttccagcacatcgaaccagtaagcacatcttcatactctatatttgatgccagactttaatattggccttatttatgctgattgcctatgtattacaattttaaaagctattattttgggagagtacagataggaagtttttctttactcaatgtgttgtcactacctatatattactgaataagttgatagctctttgacttgtccaacagtgcgacttctctgattatttttagttcttcttttgagtgcaaagaagtaaattcattaatttctgtacttttttaaaaagcttatttttttattttcatttttgaagactattttatgttttgtattttaaatgatacaatttgggtaggcagggaatttataagctgtcttaaatttaggggggaaaagtggttttttttatatttagtgtttaattagtccttctgcttctctcaggacttggaccactctataggaactcagtatagtgccaacccacctgttacaattgatgtaccaatgacagacatgacatctggcttgatggggcatagccagttgaccaccattgatcagtcagaactgagttcccagctgggtttgagcctagggggtggcaccatcctgccacctgcccagtcacctgaagatcgtctttcaaccaccccttcacctactagttcacttcacgaggatggtgttgaggatttccggaggcaacttcccagccagaagacagtcgtggtggaagcagggaaaaagcagaaggccccaaagaagagaaaaaagaaagatcctaatgaacctcagaaaccagtttcagcatatgctttattctttcgtgatacacaggctgccatcaagggacagaatcctaatgccacttttggtgaggtttcaaaaattgtggcctccatgtgggatagtcttggagaggagcaaaaacaggtatataagaggaaaactgaggctgccaagaaagagtatctgaaggcactggctgcttacaaagacaaccaggagtgtcaggccactgtggaaacagtggaattggatccagcaccaccatcacaaactccttctccacctcctatggctactgttgacccagcatctccagcaccagcttcaatagagccccctgccctgtccccatccattgttgttaactccaccctttcatcctatgtggcaaaccaggcatcttctggagctgggggtcagcccaatatcaccaagttgattattaccaaacaaatgttgccctcttctattactatgtctcaaggagggatggttactgttatcccagccacagtggtgacctcccgggggctccaactaggccaaaccagtacagctactatccagcccagtcaacaagcccagattgtcactcggtcagtgttgcaggcagcagcagctgctgctgctgctgcttctatgcaactgcctccaccccgactacagccccctccattacaacagatgccacagcccccgactcagcagcaagttaccattctgcagcagcctcctccactccaggccatgcaacagcctccacctcagaaagttcgaatcaatttacagcaacagcctcctcctctgcagatcaagagtgtgcctctacccactttgaaaatgcagactaccttagtcccaccaactgtggaaagtagtcctgagcggcctatgaacaacagccctgaggcccatacagtggaggcaccttctcctgagactatctgtgagatgatcacagatgtagttcctgaggttgagtctccttctcagatggatgttgaattggtgagtgggtctcctgtggcactctcaccccagcctcgatgtgtgaggtctggttgtgagaaccctcccattgtgagtaaggactgggacaatgaatactgcagcaatgagtgtgtggtgaagcactgcaggtgagcttacagttctcccttttataattcagctactggtcaattctactgggaaacataggaatcttgagcataaaatcagcatctcagtgtcaccttaccttaggtagagtaggttgctgtatctggtctactagaaaagctcccctgcttaagagcttacatttgccacataagccaaagatgatgtaatcagcagttcacatttttcagttaccacatacctctcttatgtatgctctttaaaaatataataccttaagctgttagtgtttgcaaatattagcttttcaattcttggtgcaaatcagactacttagggaactagaatttggggagaaatggtaagtggaaagtaacacataataatttgcaatttgtgaaggaaatggggagatggttggaatattttacccctctccccaaattttcctgggaatttcctatagctgtaggacaaggcatttctatttcctatttcaaaaactctgcagtaaattagcattgcctctacttctgacttttaagcccactgttcttatattttcaaggtgatactatctcaccataatgctgtaggaaattatctgggaacctatttgtttaagacagataaaaaatccagctgggccatacagtgaaccccatctctactaaaaatacaaaaattagccgggcatggtggcaggcacctgtagtcctggctactcaggaggctgaagcaggagaatctcttgaacctgggaggtggaggttgcagtgagccaagaagatcacgccactgcactccagcctgggcaacagcgagactccatctc

SEQ ID NO: 23786 - protein, 475 aa, Homo sapiens
MTDMTSGLMGHSQLTTIDQSELSSQLGLSLGGGTILPPAQSPEDRLSTTPSPTSSLHEDGVEDFRRQLPSQKTVVVEAGKKQKAPKKRKKKDPNEPQKPVSAYALFFRDTQAAIKGQNPNATFGEVSKIVASMWDSLGEEQKQVYKRKTEAAKKEYLKALAAYKDNQECQATVETVELDPAPPSQTPSPPPMATVDPASPAPASIEPPALSPSIVVNSTLSSYVANQASSGAGGQPNITKLIITKQMLPSSITMSQGGMVTVIPATVVTSRGLQLGQTSTATIQPSQQAQIVTRSVLQAAAAAAAAASMQLPPPRLQPPPLQQMPQPPTQQQVTILQQPPPLQAMQQPPPQKVRINLQQQPPPLQIKSVPLPTLKMQTTLVPPTVESSPERPMNNSPEAHTVEAPSPETICEMITDVVPEVESPSQMDVELVSGSPVALSPQPRCVRSGCENPPIVSKDWDNEYCSNECVVKHCR

SEQ ID NO: 23787 - DNA, 792 bp, Homo sapiens
cttgcggaagtgacggcagttccgagtccagtgggggcggtgggagcgatgagggtctgagacggtgggagcggttgtgtgaagatggagtttcccggaggaaatgacaattacctgacgatcacagggccttcgcaccccttcctgtcaggggccgagacattccatacaccaagcttgggtgatgaggaatttgaaatcccacctatctccttggattctgatccctcattggctgtctcagatgtggttggccactttgatgacctggcagacccttcctcttcacaggatggcagtttttcagcccagtatggggtccagacattggacatgcctgtgggcatgacccatggcttgatggagcagggcggggggctcctgagtgggggcttgaccatggtaaggggcaagacattgtcaggcttaccccagctaatgggcatggcattaggggagacaaagttactctattccctgctacacttgggtattacttgtttctcttcttgtggctaaaggctcaccaacaaagacttaatttcacctgaataaatgaaatttaccatgacttggaccactctataggaactcagtatagtgccaacccacctgttacaattgatgtaccaatgacagacatgacatctggcttgatggggcatagccagttgaccaccattgatcagtcagaactgagttcccagctgggtttgagcctagggggtggcaccatcctgccacctgcccagtcacctgaagatcgtctttcaaccaccccttcacctacta

SEQ ID NO: 23788 - protein, 144 aa, Homo sapiens
MEFPGGNDNYLTITGPSHPFLSGAETFHTPSLGDEEFEIPPISLDSDPSLAVSDVVGHFDDLADPSSSQDGSFSAQYGVQTLDMPVGMTHGLMEQGGGLLSGGLTMVRGKTLSGLPQLMGMALGETKLLYSLLHLGITCFSSCG

SEQ ID NO: 23789 - DNA, 994 bp, Homo sapiens
cttgcggaagtgacggcagttccgagtccagtgggggcggtgggagcgatgagggtctgagacggtgggagcggttgtgtgaagatggagtttcccggaggaaatgacaattacctgacgatcacagggccttcgcaccccttcctgtcaggggccgagacattccatacaccaagcttgggtgatgaggaatttgaaatcccacctatctccttggattctgatccctcattggctgtctcagatgtggttggccactttgatgacctggcagacccttcctcttcacaggatggcagtttttcagcccagtatggggtccagacattggacatgcctgtgggcatccccctgccctgtccccatccattgttgttaactccaccctttcatcctatgtggcaaaccaggcatcttctggagctgggggtcagcccaatatcaccaagttgattattaccaaacaaatgttgccctcttctattactatgtctcaaggagggatggttactgttatcccagccacagtggtgacctcccgggggctccaactaggccaaaccagtacagctactatccagcccagtcaacaagcccagattgtcactcggtcagtgttgcaggcagcagcagctgctgctgctgctgcttctatgcaactgcctccaccccgactacagccccctccattacaacagatgccacagcccccgactcagcagcaagttaccattctgcagcagcctcctccactccaggccatgcaacagcctccacctcagaaagttcgaatcaatttacagcaacagcctcctcctctgcagatcaagagtgtgcctctacccactttgaaaatgcagactaccttagtcccaccaactgtggaaagtagtcctgagcggcctatgaacaacagccctgaggcccatacagtggaggcaccttctcctgagactatctgtgagatgatcacagatgtagttcctgaggtgag

SEQ ID NO: 23790 - protein, 122 aa, Homo sapiens
MEFPGGNDNYLTITGPSHPFLSGAETFHTPSLGDEEFEIPPISLDSDPSLAVSDVVGHFDDLADPSSSQDGSFSAQYGVQTLDMPVGIPLPCPHPLLLTPPFHPMWQTRHLLELGVSPISPS

SEQ ID NO: 23791 - DNA, 2324 bp, Homo sapiens
gcggaagtgacggcagttccgagtccagtgggggcggtgggagcgatgagggtctgagacggtgggagcggttgtgtgaagatggagtttcccggaggaaatgacaattacctgacgatcacagggccttcgcaccccttcctgtcaggggccgagacattccatacaccaagcttgggtgatgaggaatttgaaatcccacctatctccttggattctgatccctcattggctgtctcagatgtggttggccactttgatgacctggcagacccttcctcttcacaggatggcagtttttcagcccagtatggggtccagacattggacatgcctgtgggcatgacccatggcttgatggagcagggcggggggctcctgagtgggggcttgaccatggacttggaccactctataggaactcagtatagtgccaacccacctgttacaattgatgtaccaatgacagacatgacatctggcttgatggggcatagccagttgaccaccattgatcagtcagaactgagttcccagctgggtttgagcctagggggtggcaccatcctgccacctgcccagtcacctgaagatcgtctttcaaccaccccttcacctactagttcacttcacgaggatggtgttgaggatttccggaggcaacttcccagccagaagacagtcgtggtggaagcagggaaaaagcagaaggccccaaagaagagaaaaaagaaagatcctaatgaacctcagaaaccagtttcagcatatgctttattctttcgtgatacacaggctgccatcaagggacagaatcctaatgccacttttggtgaggtttcaaaaattgtggcctccatgtgggatagtcttggagaggagcaaaaacaggtatataagaggaaaactgaggctgccaagaaagagtatctgaaggcactggctgcttacaaagacaaccaggagtgtcaggccactgtggaaacagtggaattggatccagcaccaccatcacaaactccttctccacctcctatggctactgttgacccagcatctccagcaccagcttcaatagagccccctgccctgtccccatccattgttgttaactccaccctttcatcctatgtggcaaaccaggcatcttctggagctgggggtcagcccaatatcaccaagttgattattaccaaacaaatgttgccctcttctattactatgtctcaaggagggatggttactgttatcccagccacagtggtgacctcccgggggctccaactaggccaaaccagtacagctactatccagcccagtcaacaagcccagattgtcactcggtcagtgttgcaggcagcagcagctgctgctgctgctgcttctatgcaactgcctccaccccgactacagccccctccattacaacagatgccacagcccccgactcagcagcaagttaccattctgcagcagcctcctccactccaggccatgcaacagcctccacctcagaaagttcgaatcaatttacagcaacagcctcctcctctgcagatcaagagtgtgcctctacccactttgaaaatgcagactaccttagtcccaccaactgtggaaagtagtcctgagcggcctatgaacaacagccctgaggcccatacagtggaggcaccttctcctgagactatctgtgagatgatcacagatgtagttcctgaggttgagtctccttctcagatggatgttgaattggtgagtgggtctcctgtggcactctcaccccagcctcgatgtgtgaggtctggttgtgagaaccctcccattgtgagtaaggactgggacaatgaatactgcagcaatgagtgtgtggtgaagcactgcagggatgtattcttggcctgggtagcctctagaaattcaaacacagtggtgtttgtgaaatagtccttcctgttctccaagccagtgaagagttatctgctgggaaagtgtccaagagcctgtttttgaaacacaagctgggcttctggtagtgcctcatcacaacccatgatggctgttcatgtttcaccccttttcttccttcagcagaggccaggctatggagcagggccactgaatttgctgtaatctggagatgctttttactttcaaccataagcggtaatagcagaggaaagggtgaagggagtctgggcaagcaaagcatagagatggtggggtggtggtggggttgaagaaacttgttggtataattgtcataggacttgcctaaaatattattaaaattacgggagtgtactcagctttgagcctaggag

SEQ ID NO: 23792 - protein, 621 aa, Homo sapiens; identical to SEQ ID NO: 3159

SEQ ID NO: 23793 - DNA, 4238 bp, Homo sapiens
gcggaagtgacggcagttccgagtccagtgggggcggtgggagcgatgagggtctgagacggtgggagcggttgtgtgaagatggagtttcccggaggaaatgacaattacctgacgatcacagggccttcgcaccccttcctgtcaggggccgagacattccatacaccaagcttgggtgatgaggaatttgaaatcccacctatctccttggattctgatccctcattggctgtctcagatgtggttggccactttgatgacctggcagacccttcctcttcacaggatggcagtttttcagcccagtatggggtccagacattggacatgcctgtgggcatgacccatggcttgatggagcagggcggggggctcctgagtgggggcttgaccatggacttggaccactctataggaactcagtatagtgccaacccacctgttacaattgatgtaccaatgacagacatgacatctggcttgatggggcatagccagttgaccaccattgatcagtcagaactgagttcccagctgggtttgagcctagggggtggcaccatcctgccacctgcccagtcacctgaagatcgtctttcaaccaccccttcacctactagttcacttcacgaggatggtgttgaggatttccggaggcaacttcccagccagaagacagtcgtggtggaagcagggaaaaagcagaaggccccaaagaagagaaaaaagaaagatcctaatgaacctcagaaaccagtttcagcatatgctttattctttcgtgatacacaggctgccatcaagggacagaatcctaatgccacttttggtgaggtttcaaaaattgtggcctccatgtgggatagtcttggagaggagcaaaaacaggtatataagaggaaaactgaggctgccaagaaagagtatctgaaggcactggctgcttacaaagacaaccaggagtgtcaggccactgtggaaacagtggaattggatccagcaccaccatcacaaactccttctccacctcctatggctactgttgacccagcatctccagcaccagcttcaatagagccccctgccctgtccccatccattgttgttaactccaccctttcatcctatgtggcaaaccaggcatcttctggagctgggggtcagcccaatatcaccaagttgattattaccaaacaaatgttgccctcttctattactatgtctcaaggagggatggttactgttatcccagccacagtggtgacctcccgggggctccaactaggccaaaccagtacagctactatccagcccagtcaacaagcccagattgtcactcggtcagtgttgcaggcagcagcagctgctgctgctgctgcttctatgcaactgcctccaccccgactacagccccctccattacaacagatgccacagcccccgactcagcagcaagttaccattctgcagcagcctcctccactccaggccatgcaacagcctccacctcagaaagttcgaatcaatttacagcaacagcctcctcctctgcagatcaagagtgtgcctctacccactttgaaaatgcagactaccttagtcccaccaactgtggaaagtagtcctgagcggcctatgaacaacagccctgaggcccatacagtggaggcaccttctcctgagactatctgtgagatgatcacagatgtagttcctgaggttgagtctccttctcagatggatgttgaattggtgagtgggtctcctgtggcactctcaccccagcctcgatgtgtgaggtctggttgtgagaaccctcccattgtgagtaaggactgggacaatgaatactgcagcaatgagtgtgtggtgaagcactgcagggatgtattcttggcctgggtagcctctagaaattcaaacacagtggtgtttgtgaaatagtccttcctgttctccaagccagtgaagagttatctgctgggaaagtgtccaagagcctgtttttgaaacacaagctgggcttctggtagtgcctcatcacaacccatgatggctgttcatgtttcaccccttttcttccttcagcagaggccaggctatggagcagggccactgaatttgctgtaatctggagatgctttttactttcaaccataagcggtaatagcagaggaaagggtgaagggagtctgggcaagcaaagcatagagatggtggggtggtggtggggttgaagaaacttgttggtataattgtcataggacttgcctaaaatattattaaaattacgggagtgtactcagctttgagcctaggagaaaatgccactgtgtgcatccattttaaagggttccctcataaaaaaatgttattccccattatcacatcagtacactgctttgaaaacaaaacttttcaacatgggcatactgggctacatggaaaatgacatcacccaggagtgatttctctttatatatattatttctgcagttaccatccttatctgagttatcacagttcatgaatctaagaggcggaactctacatcattagtaagaggttccaccaaagtctaaagttgtattcacttgtgtttgatgaactatctttaaaagaccataggtctatcattatttcttagacataatctaaagaaaaacagactagagaagccacctggttgtaacagaataagcagaagtttacagcatgatagtccaagtggtgataactttaaataaaactcaaatttttactgtttgtagacaggaatgctgtcctagagaacctcctcctcaaccagctacgtacatagttttatcctatgcattcctgttttctgtgttttttgttttttttttttgagacagagtctcgctctgtcacccaggctggagtgcagtggtgcgacctcagctcactgaaacctctgcctcccgggttcaagcgattctcctgcatcagcctcccgagtagctaggattacaggcgcccgccactacgcccagctaatttgtggtatttttagtagagacagggtttcaccatgttggccaggctggtctcgaactcctgacctcatgatccgcccgccttgacctcccaaagtgctgggattacaggcatgagccaccgcacccagcctgcattcctgtttttttaatggttttggagggtagcagtagagatggggtctcactatgttgcccagtctagtcttgaactcctgggctacagttaccctcctacctcggcttcccaaagtgctcggattacaggtgtgagccactgtgcctagcctataatgatcattttaatgtttcccatgcactcatttagtttgaaccttcacagcaacccaatgaggtaatactcccatttcacatataatactgagagatgagttgcacaagattatacactgttaagtagcagagccagaatggacttcagaatcccaactacaatacaaatgtttatttaaataaagaagaaagctattgtacaaatatcactcttcaggtttagcttacagagccatggctatggattcttagctctgtaaggaagtgcttctataaattcttaggtttagagatgataccatctgggtacctttgcttgaaccgtgcaaccacatctgggtctagtaggtggatcccatccagttggtttccaagggtgatcctgaaacagtgtaaaaggaggggcaaaccagaaatcctggaattagagggtttaatattgttaaaaaatgcataccaaatgaagactgcctatcatcatatcaaatatgccaattctaaaaagagcttaacattagaatagtatatggtagaattactagttcagaattggcatagattctggtgttaaaatagactggatctgtattatctgagggttagtaactaatgcttagccaggcctgcttcacagagttgctaccagggagtattctttggataagcaaaatgctagcagcatgtgttttaagctctgttaaggggtgaaagatgtaattattgacagattaaatagataacttcgtaaccaccagggggcagattcaatacatcacagaatggctgaggaagatccttgggttgtgaagagagtagaaaccctagggagcagtgcttttgggtcctagaacctgttgagtttctaatgaatatttgtagaatctcataaaacagtttaaatacaagcttaagtggcttatgaat

SEQ ID NO: 23794 - protein, 621 aa, Homo sapiens; identical to SEQ ID NO: 3159

SEQ ID NO: 23795 - DNA, 4500 bp, Homo sapiens
gcggaagtgacggcagttccgagtccagtgggggcggtgggagcgatgagggtctgagacggtgggagcggttgtgtgaagatggagtttcccggaggaaatgacaattacctgacgatcacagggccttcgcaccccttcctgtcaggggccgagacattccatacaccaagcttgggtgatgaggaatttgaaatcccacctatctccttggattctgatccctcattggctgtctcagatgtggttggccactttgatgacctggcagacccttcctcttcacaggatggcagtttttcagcccagtatggggtccagacattggacatgcctgtgggcatgacccatggcttgatggagcagggcggggggctcctgagtgggggcttgaccatggacttggaccactctataggaactcagtatagtgccaacccacctgttacaattgatgtaccaatgacagacatgacatctggcttgatggggcatagccagttgaccaccattgatcagtcagaactgagttcccagctgggtttgagcctagggggtggcaccatcctgccacctgcccagtcacctgaagatcgtctttcaaccaccccttcacctactagttcacttcacgaggatggtgttgaggatttccggaggcaacttcccagccagaagacagtcgtggtggaagcagggaaaaagcagaaggccccaaagaagagaaaaaagaaagatcctaatgaacctcagaaaccagtttcagcatatgctttattctttcgtgatacacaggctgccatcaagggacagaatcctaatgccacttttggtgaggtttcaaaaattgtggcctccatgtgggatagtcttggagaggagcaaaaacaggtatataagaggaaaactgaggctgccaagaaagagtatctgaaggcactggctgcttacaaagacaaccaggagtgtcaggccactgtggaaacagtggaattggatccagcaccaccatcacaaactccttctccacctcctatggctactgttgacccagcatctccagcaccagcttcaatagagccccctgccctgtccccatccattgttgttaactccaccctttcatcctatgtggcaaaccaggcatcttctggagctgggggtcagcccaatatcaccaagttgattattaccaaacaaatgttgccctcttctattactatgtctcaaggagggatggttactgttatcccagccacagtggtgacctcccgggggctccaactaggccaaaccagtacagctactatccagcccagtcaacaagcccagattgtcactcggtcagtgttgcaggcagcagcagctgctgctgctgctgcttctatgcaactgcctccaccccgactacagccccctccattacaacagatgccacagcccccgactcagcagcaagttaccattctgcagcagcctcctccactccaggccatgcaacagcctccacctcagaaagttcgaatcaatttacagcaacagcctcctcctctgcagatcaagagtgtgcctctacccactttgaaaatgcagactaccttagtcccaccaactgtggaaagtagtcctgagcggcctatgaacaacagccctgaggcccatacagtggaggcaccttctcctgagactatctgtgagatgatcacagatgtagttcctgaggttgagtctccttctcagatggatgttgaattggtgagtgggtctcctgtggcactctcaccccagcctcgatgtgtgaggtctggttgtgagaaccctcccattgtgagtaaggactgggacaatgaatactgcagcaatgagtgtgtggtgaagcactgcagggatgtattcttggcctgggtagcctctagaaattcaaacacagtggtgtttgtgaaatagtccttcctgttctccaagccagtgaagagttatctgctgggaaagtgtccaagagcctgtttttgaaacacaagctgggcttctggtagtgcctcatcacaacccatgatggctgttcatgtttcaccccttttcttccttcagcagaggccaggctatggagcagggccactgaatttgctgtaatctggagatgctttttactttcaaccataagcggtaatagcagaggaaagggtgaagggagtctgggcaagcaaagcatagagatggtggggtggtggtggggttgaagaaacttgttggtataattgtcataggacttgcctaaaatattattaaaattacgggagtgtactcagctttgagcctaggagaaaatgccactgtgtgcatccattttaaagggttccctcataaaaaaatgttattccccattatcacatcagtacactgctttgaaaacaaaacttttcaacatgggcatactgggctacatggaaaatgacatcacccaggagtgatttctctttatatatattatttctgcagttaccatccttatctgagttatcacagttcatgaatctaagaggcggaactctacatcattagtaagaggttccaccaaagtctaaagttgtattcacttgtgtttgatgaactatctttaaaagaccataggtctatcattatttcttagacataatctaaagaaaaacagactagagaagccacctggttgtaacagaataagcagaagtttacagcatgatagtccaagtggtgataactttaaataaaactcaaatttttactgtttgtagacaggaatgctgtcctagagaacctcctcctcaaccagctacgtacatagttttatcctatgcattcctgttttctgtgttttttgttttttttttttgagacagagtctcgctctgtcacccaggctggagtgcagtggtgcgacctcagctcactgaaacctctgcctcccgggttcaagcgattctcctgcatcagcctcccgagtagctaggattacaggcgcccgccactacgcccagctaatttgtggtatttttagtagagacagggtttcaccatgttggccaggctggtctcgaactcctgacctcatgatccgcccgccttgacctcccaaagtgctgggattacaggcatgagccaccgcacccagcctgcattcctgtttttttaatggttttggagggtagcagtagagatggggtctcactatgttgcccagtctagtcttgaactcctgggctacagttaccctcctacctcggcttcccaaagtgctcggattacaggtgtgagccactgtgcctagcctataatgatcattttaatgtttcccatgcactcatttagtttgaaccttcacagcaacccaatgaggtaatactcccatttcacatataatactgagagatgagttgcacaagattatacactgttaagtagcagagccagaatggacttcagaatcccaactacaatacaaatgtttatttaaataaagaagaaagctattgtacaaatatcactcttcaggtttagcttacagagccatggctatggattcttagctctgtaaggaagtgcttctataaattcttaggtttagagatgataccatctgggtacctttgcttgaaccgtgcaaccacatctgggtctagtaggtggatcccatccagttggtttccaagggtgatcctgaaacagtgtaaaaggaggggcaaaccagaaatcctggaattagagggtttaatattgttaaaaaatgcataccaaatgaagactgcctatcatcatatcaaatatgccaattctaaaaagagcttaacattagaatagtatatggtagaattactagttcagaattggcatagattctggtgttaaaatagactggatctgtattatctgagggttagtaactaatgcttagccaggcctgcttcacagagttgctaccagggagtattctttggataagcaaaatgctagcagcatgtgttttaagctctgttaaggggtgaaagatgtaattattgacagattaaatagataacttcgtaaccaccagggggcagattcaatacatcacagaatggctgaggaagatccttgggttgtgaagagagtagaaaccctagggagcagtgcttttgggtcctagaacctgttgagtttctaatgaatatttgtagaatctcataaaacagtttaaatacaagcttaagtggcttatgaatcctgtgaagctcatttatggactagtgtaaaacaatgtgaagctctactaagttctgtccttaatcataaataatagccccttgaggactagcctgttctctggtcaccttaccagttgggttgcacattgtgtggtcgtccaaataactcaatcttgcgagtgccaggagatagtctttcaatcatgccatagatttcatctggtttatgactggtggaacgaacctaggaaataaaaactagctgctttttaagttacac

SEQ ID NO: 23796 - protein, 621 aa, Homo sapiens; identical to SEQ ID NO: 3159

SEQ ID NO: 23797 - DNA, 5305 bp, Homo sapiens
gcggaagtgacggcagttccgagtccagtgggggcggtgggagcgatgagggtctgagacggtgggagcggttgtgtgaagatggagtttcccggaggaaatgacaattacctgacgatcacagggccttcgcaccccttcctgtcaggggccgagacattccatacaccaagcttgggtgatgaggaatttgaaatcccacctatctccttggattctgatccctcattggctgtctcagatgtggttggccactttgatgacctggcagacccttcctcttcacaggatggcagtttttcagcccagtatggggtccagacattggacatgcctgtgggcatgacccatggcttgatggagcagggcggggggctcctgagtgggggcttgaccatggacttggaccactctataggaactcagtatagtgccaacccacctgttacaattgatgtaccaatgacagacatgacatctggcttgatggggcatagccagttgaccaccattgatcagtcagaactgagttcccagctgggtttgagcctagggggtggcaccatcctgccacctgcccagtcacctgaagatcgtctttcaaccaccccttcacctactagttcacttcacgaggatggtgttgaggatttccggaggcaacttcccagccagaagacagtcgtggtggaagcagggaaaaagcagaaggccccaaagaagagaaaaaagaaagatcctaatgaacctcagaaaccagtttcagcatatgctttattctttcgtgatacacaggctgccatcaagggacagaatcctaatgccacttttggtgaggtttcaaaaattgtggcctccatgtgggatagtcttggagaggagcaaaaacaggtatataagaggaaaactgaggctgccaagaaagagtatctgaaggcactggctgcttacaaagacaaccaggagtgtcaggccactgtggaaacagtggaattggatccagcaccaccatcacaaactccttctccacctcctatggctactgttgacccagcatctccagcaccagcttcaatagagccccctgccctgtccccatccattgttgttaactccaccctttcatcctatgtggcaaaccaggcatcttctggagctgggggtcagcccaatatcaccaagttgattattaccaaacaaatgttgccctcttctattactatgtctcaaggagggatggttactgttatcccagccacagtggtgacctcccgggggctccaactaggccaaaccagtacagctactatccagcccagtcaacaagcccagattgtcactcggtcagtgttgcaggcagcagcagctgctgctgctgctgcttctatgcaactgcctccaccccgactacagccccctccattacaacagatgccacagcccccgactcagcagcaagttaccattctgcagcagcctcctccactccaggccatgcaacagcctccacctcagaaagttcgaatcaatttacagcaacagcctcctcctctgcagatcaagagtgtgcctctacccactttgaaaatgcagactaccttagtcccaccaactgtggaaagtagtcctgagcggcctatgaacaacagccctgaggcccatacagtggaggcaccttctcctgagactatctgtgagatgatcacagatgtagttcctgaggttgagtctccttctcagatggatgttgaattggtgagtgggtctcctgtggcactctcaccccagcctcgatgtgtgaggtctggttgtgagaaccctcccattgtgagtaaggactgggacaatgaatactgcagcaatgagtgtgtggtgaagcactgcagggatgtattcttggcctgggtagcctctagaaattcaaacacagtggtgtttgtgaaatagtccttcctgttctccaagccagtgaagagttatctgctgggaaagtgtccaagagcctgtttttgaaacacaagctgggcttctggtagtgcctcatcacaacccatgatggctgttcatgtttcaccccttttcttccttcagcagaggccaggctatggagcagggccactgaatttgctgtaatctggagatgctttttactttcaaccataagcggtaatagcagaggaaagggtgaagggagtctgggcaagcaaagcatagagatggtggggtggtggtggggttgaagaaacttgttggtataattgtcataggacttgcctaaaatattattaaaattacgggagtgtactcagctttgagcctaggagaaaatgccactgtgtgcatccattttaaagggttccctcataaaaaaatgttattccccattatcacatcagtacactgctttgaaaacaaaacttttcaacatgggcatactgggctacatggaaaatgacatcacccaggagtgatttctctttatatatattatttctgcagttaccatccttatctgagttatcacagttcatgaatctaagaggcggaactctacatcattagtaagaggttccaccaaagtctaaagttgtattcacttgtgtttgatgaactatctttaaaagaccataggtctatcattatttcttagacataatctaaagaaaaacagactagagaagccacctggttgtaacagaataagcagaagtttacagcatgatagtccaagtggtgataactttaaataaaactcaaatttttactgtttgtagacaggaatgctgtcctagagaacctcctcctcaaccagctacgtacatagttttatcctatgcattcctgttttctgtgttttttgttttttttttttgagacagagtctcgctctgtcacccaggctggagtgcagtggtgcgacctcagctcactgaaacctctgcctcccgggttcaagcgattctcctgcatcagcctcccgagtagctaggattacaggcgcccgccactacgcccagctaatttgtggtatttttagtagagacagggtttcaccatgttggccaggctggtctcgaactcctgacctcatgatccgcccgccttgacctcccaaagtgctgggattacaggcatgagccaccgcacccagcctgcattcctgtttttttaatggttttggagggtagcagtagagatggggtctcactatgttgcccagtctagtcttgaactcctgggctacagttaccctcctacctcggcttcccaaagtgctcggattacaggtgtgagccactgtgcctagcctataatgatcattttaatgtttcccatgcactcatttagtttgaaccttcacagcaacccaatgaggtaatactcccatttcacatataatactgagagatgagttgcacaagattatacactgttaagtagcagagccagaatggacttcagaatcccaactacaatacaaatgtttatttaaataaagaagaaagctattgtacaaatatcactcttcaggtttagcttacagagccatggctatggattcttagctctgtaaggaagtgcttctataaattcttaggtttagagatgataccatctgggtacctttgcttgaaccgtgcaaccacatctgggtctagtaggtggatcccatccagttggtttccaagggtgatcctgaaacagtgtaaaaggaggggcaaaccagaaatcctggaattagagggtttaatattgttaaaaaatgcataccaaatgaagactgcctatcatcatatcaaatatgccaattctaaaaagagcttaacattagaatagtatatggtagaattactagttcagaattggcatagattctggtgttaaaatagactggatctgtattatctgagggttagtaactaatgcttagccaggcctgcttcacagagttgctaccagggagtattctttggataagcaaaatgctagcagcatgtgttttaagctctgttaaggggtgaaagatgtaattattgacagattaaatagataacttcgtaaccaccagggggcagattcaatacatcacagaatggctgaggaagatccttgggttgtgaagagagtagaaaccctagggagcagtgcttttgggtcctagaacctgttgagtttctaatgaatatttgtagaatctcataaaacagtttaaatacaagcttaagtggcttatgaatcctgtgaagctcatttatggactagtgtaaaacaatgtgaagctctactaagttctgtccttaatcataaataatagccccttgaggactagcctgttctctggtcaccttaccagttgggttgcacattgtgtggtcgtccaaataactcaatcttgcgagtgccaggagatagtctttcaatcatgccatagatttcatctggtttatgactggtggaacgaacctaggaaataaaaactagctgctttttaagttacacaagattgcaattctagccctttctattatgtttatgatctaaatgagaaaaatctgggatgagaatacacccaacatgaataactgataccaacaaaaatgtggaagctttggaggcctgggaagcacatacctcagctacgatcacatcacaatccagaccctggttgaagccttggggatttcctttgacaccaacctgctcaccacagataacagattaccttatgaaaccacacctttgaactttttctcagtaagaaatcaaatgattcttctttgtgctccacctattgaattgggccccactgctgctcaccaagcagtgttccttcccatggttcaaccagtgacctgtacggcctgtccgaatgatgcgttgcagttgatttgtcttcacccaaataatttcatctacccgttcatacctgtggggcataaaaaagaactagaattttagccaaacttttacagtttaggggtagtaccatttatagaagcaaggaatcacagaatagtctgggagaagagaacatgtatctcactgtaacagtattaccctcaaaagaaagcaacacaaccactacttacccccagagatttagacattctctccccaactccatggccctagaaagaaatgagttaaacaactatttgtatgcccatattttttttcccttcaaaatatgtgatgtgttaaaaacactataaacactttttcagtagacgctcagtgaacatttacatgcacaccaccaaaagcatggtggatctaagaacgaaaagataaaactatgctcaac

SEQ ID NO: 23798 - protein, 621 aa, Homo sapiens; identical to SEQ ID NO: 3159

SEQ ID NO: 23799 - DNA, 690 bp, Homo sapiens
agtgggggcggtgggagcgatgagggtctgagacggtgggagcggttgtgtgaagatggagtttcccggaggaaatgacaattacctgacgatcacagggccttcgcaccccttcctgtcaggggccgagcccaatatcaccaagttgattattaccaaacaaatgttgccctcttctattactatgtctcaaggagggatggttactgttatcccagccacagtggtgacctcccgggggctccaactaggccaaaccagtacagctactatccagcccagtcaacaagcccagattgtcactcggtcagtgttgcaggcagcagcagctgctgctgctgctgcttctatgcaactgcctccaccccgactacagccccctccattacaacagatgccacagcccccgactcagcagcaagttaccattctgcagcagcctcctccactccaggccatgcaacagcctccacctcagaaagttcgaatcaatttacagcaacagcctcctcctctgcagatcaagagtgtgcctctacccactttgaaaatgcagactaccttagtcccaccaactgtggaaagtagtcctgagcggcctatgaacaacagccctgaggcccatacagtggaggcaccttctcctgagactatctgtgagatgatcacagatgtagttcctgaggtgag

SEQ ID NO: 23800 - protein, 210 aa, Homo sapiens
MEFPGGNDNYLTITGPSHPFLSGAEPNITKLIITKQMLPSSITMSQGGMVTVIPATVVTSRGLQLGQTSTATIQPSQQAQIVTRSVLQAAAAAAAAASMQLPPPRLQPPPLQQMPQPPTQQQVTILQQPPPLQAMQQPPPQKVRINLQQQPPPLQIKSVPLPTLKMQTTLVPPTVESSPERPMNNSPEAHTVEAPSPETICEMITDVVPE

SEQ ID NO: 23801 - DNA, 1178 bp, Homo sapiens
gagcgatgagggtctgagacggtgggagcggttgtgtgaagatggagtttcccggaggaaatgacaattacctgacgatcacagggccttcgcaccccttcctgtcaggggccgagacattccatacaccaagcttgggtgatgaggaatttgaaatcccacctatctccttggattctgatccctcattggctgtctcagatgtggttggccactttgatgacctggcagacccttcctcttcacaggatggcagtttttcagcccagtatggggtccagacattggacatgcctgtgggcatgacccatggcttgatggagcagggcggggggctcctgagtgggggcttgaccatggacttggaccactctataggaactcagtatagtgccaacccacctgttacaattgatgtaccaatgacagacatgacatctggcttgatggggcatagccagttgaccaccattgatcagtcagaactgagttcccagctgggtttgagcctagggggtggcaccatcctagccccctgccctgtccccatccattgttgttaactccaccctttcatcctatgtggcaaaccaggcatcttctggagctgggggtcagcccaatatcaccaagttgattattaccaaacaaatgttgccctcttctattactatgtctcaaggagggatggttactgttatcccagccacagtggtgacctcccgggggctccaactaggccaaaccagtacagctactatccagcccagtcaacaagcccagattgtcactcggtcagtgttgcaggcagcagcagctgctgctgctgctgcttctatgcaactgcctccaccccgactacagccccctccattacaacagatgccacagcccccgactcagcagcaagttaccattctgcagcagcctcctccactccaggccatgcaacagcctccacctcagaaagttcgaatcaatttacagcaacagcctcctcctctgcagatcaagagtgtgcctctacccactttgaaaatgcagactaccttagtcccaccaactgtggaaagtagtcctgagcggcctatgaacaacagccctgaggcccatacagtggaggcaccttctcctgagactatctgtgagatgatcacagatgtagttcctgaggtgag

SEQ ID NO: 23802 - protein, 173 aa, Homo sapiens
MEFPGGNDNYLTITGPSHPFLSGAETFHTPSLGDEEFEIPPISLDSDPSLAVSDVVGHFDDLADPSSSQDGSFSAQYGVQTLDMPVGMTHGLMEQGGGLLSGGLTMDLDHSIGTQYSANPPVTIDVPMTDMTSGLMGHSQLTTIDQSELSSQLGLSLGGGTILAPCPVPIHCC

SEQ ID NO: 23803 - DNA, 487 bp, Homo sapiens
gatgagggtctgagacggtgggagcggttgtgtgaagatggagtttcccggaggaaatgacaattacctgacgatcacagggccttcgcaccccttcctgtcaggggccgagacattccatacaccaagcttgggtgatgaggaatttgaaatcccacctatctccttggattctgatccctcattggctgtctcagatgtggttggccactttgatgacctggcagacccttcctcttcacaggatggcagtttttcagcccagacttggaccactctataggaactcagtatagtgccaacccacctgttacaattgatgtaccaatgacagacatgacatctggcttgatggggcatagccagttgaccaccattgatcagtcagaactgagttcccagctgggtttgagcctagggggtggcaccatcctgccacctgcccagtcacctgaagatcgtctttcaaccaccccttcacctacta

SEQ ID NO: 23804 - protein, 81 aa, Homo sapiens
MEFPGGNDNYLTITGPSHPFLSGAETFHTPSLGDEEFEIPPISLDSDPSLAVSDVVGHFDDLADPSSSQDGSFSAQTWTTL

SEQ ID NO: 23805 - DNA, 2565 bp, Homo sapiens
gtcatggactggaagttaagaacttccacacaataacaaaaattatgggccagacacagtggctcacacttgtaatcctagaactttgggaggccaaggtgggaagatcacttgagcccaagagttcaaggctgcagtgagtggtgatggagccatgcactcagcctgggcgacagggtaagaccctgtctcagaattaaaaaaaacaacaacaaaacaacatacataaatacatgatttgtgtactactgagaaaagttcagttcttggggaaagtttcagtttttcccatcaagaactgcgtggtattttttgttatttgtgtgtgtgtgtgtgcgcgtgtgagacagagtcttgctctgtcatccaggctggagtgcagtgatgtgatcttggctcactgcagccttcaactcctgggttcaagcgattctcgtgcctcagccacctgggtagctgggattacagacgcacaccaccacacccagctaatttttgtatttttagtagagatggggttttccatgttggccaggctggtcccgaactcccgacttttcaagtgatccacccaccttggcttcccaaagtactgggattacaggtgtgagccaccactaccagctgagaactgtgtgttcttatgctccgtgtgctacttatatctcagacaacgaccagattttttaccataccaagtaaaatagtaaggagaagggaaactgtacatatatctttttgtcttttaggaaacttttacaaatgtgattcagagattgggcatttcacaggcacacttttttctccctagtttctgctagctggaaattttctttctagcaatgtctttttttttttttttttttttttttttttttttttttgagacagagtcttgctctgtcacccgggctggagtgcagtggcacaatctcggctcactgcagcctctgcctcctggattcaagtgattctcctgcctcagcttcccattttacagatgaagaaaacttgttcaaggtcttgtacccaggtctctctgacagcagtctcttgctattatttataaatgtctattgctgtaaatgccaccatttagattttagtgtcaaaacagaaccatagcagttcacatcttaatcagacattgtctgttagctgcatgagtggtggcctcattcagaaaagaaagaatgtgttattattgacctagttggactcagaggaagagattgggtctttagccaactggagtaatccttttcctctcttagagagaagcttggtcagagcaagactagcatttttggcattgttgaggttttctgaaaatcctatactaatgggaatctttatttgttgttaacattataatttctaaagtggagaagaagtaggaaactctgcaaatattttagagggggtaaagttcccatgacagtacattttagcatctgtttgaaaggaacctaaaacaacaaagtataattggctggctgacagcgaatttctgtgacctaacagtttagatgtaataattgtgaaataactgctctattagaatctttagagagagatttcaagaatcatagtaaacaggttataaaggctatgtcctaagtaatggtactgaaagaatttttcattagaaccataggcataatttaagacaaaagagacggtaatggtagaaaagagataaaagaattgaaaattgtgactgatgttagcagccttgaatgtaccaaatgaccaagggtatcagaagagagattggtaaaaataataggttctaagaaattgattataaaataggatcctaagcagaaaaaatgcatcctgagaatctctagtaccccattatgttcttcacttagtagtatgccatttctcctcttttcactaattcttttcccccttttttcccctacagacattccatacaccaagcttgggtgatgaggaatttgaaatcccacctatctccttggattctgatccctcattggctgtctcagatgtggttggccactttgatgacctggcagacccttcctcttcacaggatggcagtttttcagcccagtatggggtccagacattggacatgcctgtgggcatgacccatggcttgatggagcagggcggggggctcctgagtgggggcttgaccatggtaaggggcaagacattgtcaggcttaccccagctaatgggcatggcattaggggagacaaagttactctattccctgctacacttgggtattacttgtttctcttcttgtggctaaaggctcaccaacaaagacttaatttcacctgaataaatgaaatttaccatgtaggtagattttacttgaaaaataatttaaaattgtacaatgtctggtttgaaaattatttattgtggtttttgggaaaaagtgttttctgcttttattatggccttcacatcctaggattcaaatttgaatgtgatagctggcacacggagggatttattcaaaaatggcctgaatcacgttgagcagccagcagaacagagcttaaaaaaaaaaaaaaa

SEQ ID NO: 23806 - protein, 110 aa, Homo sapiens
MICVLLRKVQFLGKVSVFPIKNCVVFFVICVCVCARVRQSLALSSRLECSDVILAHCSLQLLGSSDSRASATWVAGITDAHHHTQLIFVFLVEMGFSMLARLVPNSRLFK

SEQ ID NO: 23807 - DNA, 650 bp, Homo sapiens
tagtccttcctgttctccaagccagtgaagagttatctgctgggaaagtgtccaagagcctgtttttgaaacacaagctgggcttctggtagtgcctcatcacaacccatgatggctgttcatgtttcaccccttttcttccttcagcagaggccaggctatggagcagggccactgaatttgctgtaatctggagatgctttttactttcaaccataagcgtggactgttggttcagaaggctctctatctccagatcaacatctgaggcagcatgtttccttgatttcttggctggctcctttgctggttccgatgctgaagagttcagaccagagactaacgaactggcaaaggcagctactgtagtcgagtcctgttctgcacgccgcttctgccctgtgacagtccctgctacctccccagggcccttcttttctgccacagcacccatcatggcagagagcttggaatggtcagcataggttacaagagtaggatgtgcatcatcttgtaggagacctcgctttacctcaatcaactcctgagctgcaaacttctgcaggaggctttctaccccatcttgagtggcaggagcatctggctagagaacgaggggaggtatgggcaataagacactgaccgtgaac

SEQ ID NO: 23808 - protein, 47 aa, Homo sapiens
DVHHLVGDLALPQSTPELQTSAGGFLPHLEWQEHLARERGEVWAIRH

SEQ ID NO: 23809 - DNA, 598 bp, Homo sapiens
ggttggtgtcaaaggaaatccccaaggcttcaaccagggtctggattgtgatgtgatcgtagctgaggttcgttccaccagtcataaaccagatgaaatctatggcatgattgaaagactatctcctggcactcgcaagattgagttatttggacgaccacacaatgtgcaacccaactggatcacccttggaaaccaactggatgggatccacctactagacccagatgtggttgcacggttcaagcaaaggtacccagatggtatcatctctaaacctaagaatttatagaagcacttccttacagagctaagaatccatagccatggctctgtaagctaaacctgaagagtgatatttgtacaatagctttcttctttatttaaataaacatttgtattgtagttgggattctgaagtccattctggctctgctacttaacagtgtataatcttgtgcaactcatctctcagtattatatgtgaaatgggagtattacctcattgggttgctgtgaaggttcaaactaaatgagtgcatgggaaacattaaaatgatcattataggctaggcacagtggctcacacctgtaatcc

SEQ ID NO: 23810 - protein, 61 aa, Homo sapiens
MIERLSPGTRKIELFGRPHNVQPNWITLGNQLDGIHLLDPDVVARFKQRYPDGIISKPKNL

SEQ ID NO: 23811 - DNA, 2176 bp, Homo sapiens
atctagtgctaaagttggtcacagaatttcctgcacaaaatgaaagatctgtgtatgggaatgctagagaatttgacttctcagaaatatatagaccaacagtggttgccttttttcattttcacttctcttcattcttagatctacggaatccagaggcagcattgtctccaaccttccgtagtgacagcccagtgcctactgcacccacctctggtggccctaagcccagcacagcttcagcagttcctgaattagctacagatcctgagttagagaagaagttgctacaccacctctctgatctggccttaacattgcccactgatgctgtgtccatctgtcttgccatctccacggtaatgacctgacagagttaggatttaccacttattttcagttcacggtcagtgtcttattgcccatacctcccctcgttctctagccagatgctcctgccactcaagatggggtagaaagcctcctgcagaagtttgcagctcaggagttgattgaggtaaagcgaggtctcctacaagatgatgcacatcctactcttgtaacctatgctgaccattccaagctctctgccatgatgggtgctgtggcagaaaagaagggccctggggaggtagcagggactgtcacagggcagaagcggcgtgcagaacaggactcgactacagtagctgcctttgccagttcgttagtctctggtctgaactcttcagcatcggaaccagcaaaggagccagccaagaaatcaaggaaacatgctgcctcagatgttgatctggagatagagagccttctgaaccaacagtccactaaggaacaacagagcaagaaggtcagtcaggagatcctagagctattaaatactacaacagccaaggaacaatccattgttgaaaaatttcgctctcgaggtcgggcccaagtgcaagaattctgtgactatggaaccaaggaggagtgcatgaaagccagtgatgctgatcgaccctgtcgcaagctgcacttcagacgaattatcaataaacacactgatgagtctttaggtgactgctctttccttaatacatgtttccacatggatacctgcaagtatgttcactatgaaattgatgcttgcatggattctgaggcccctggcagcaaagaccacacgccaagccaggagcttgctcttacacagagtgtcggaggtgattccagtgcagaccgactcttcccacctcagtggatctgttgtgatatccgctacctggacgtcagtatcttgggcaagtttgcagttgtgatggctgacccaccctgggatattcacatggaactgccctatgggaccctgacagatgatgagatgcgcaggctcaacatacccgtactacaggatgatggctttctcttcctctgggtcacaggcagggccatggagttggggagagaatgtctaaatctctgggggtatgaacgggtagatgaaattatttgggtgaagacaaatcaactgcaacgcatcattcggacaggccgtacaggtcactggttgaaccatgggaaggaacactgcttggttggtgtcaaaggaaatccccaaggcttcaaccagggtctggattgtgatgtgatcgtagctgaggttcgttccaccagtcataaaccagatgaaatctatggcatgattgaaagactatctcctggcactcgcaagattgagttatttggacgaccacacaatgtgcaacccaactggatcacccttggaaaccaactggatgggatccacctactagacccagatgtggttgcacggttcaagcaaaggtacccagatggtatcatctctaaacctaagaatttatagaagcacttccttacagagctaagaatccatagccatggctctgtaagctaaacctgaagagtgatatttgtacaatagctttcttctttatttaaataaacatttgtattgtagttgggattctgaagtccattctggctctgctacttaacagtgtataatcttgtgcaactcatctctcagtattatatgtgaaatgggagtattacctcattgggttgctgtgaaggttcaaactaaatgagtgcatgggaaacattaaaatgatcattataggctaggcacagtggctcacacctgtaatcc

SEQ ID NO: 23812 - protein, 425 aa, Homo sapiens
MMGAVAEKKGPGEVAGTVTGQKRRAEQDSTTVAAFASSLVSGLNSSASEPAKEPAKKSRKHAASDVDLEIESLLNQQSTKEQQSKKVSQEILELLNTTTAKEQSIVEKFRSRGRAQVQEFCDYGTKEECMKASDADRPCRKLHFRRIINKHTDESLGDCSFLNTCFHMDTCKYVHYEIDACMDSEAPGSKDHTPSQELALTQSVGGDSSADRLFPPQWICCDIRYLDVSILGKFAVVMADPPWDIHMELPYGTLTDDEMRRLNIPVLQDDGFLFLWVTGRAMELGRECLNLWGYERVDEIIWVKTNQLQRIIRTGRTGHWLNHGKEHCLVGVKGNPQGFNQGLDCDVIVAEVRSTSHKPDEIYGMIERLSPGTRKIELFGRPHNVQPNWITLGNQLDGIHLLDPDVVARFKQRYPDGIISKPKNL

SEQ ID NO: 23813 - DNA, 2717 bp, Homo sapiens
tttgagacagagtcttgctctgtcgcccagtctggagtgcagtggcatgatgttggctcactgcagcctctgcctcgtgggttcaagcaattctcctccttcagcctccccagtagctgggattataaccttgcatcaccacccccagctaaattttttttttttttgtattttagtagagatggggtttcaccatgttggccaggctggtctcgaactcctcacctcaagtgatccacccaccttggcctcccagagtgctgggattacaggcgtgagccccagtgccttaccagaatggaaatatttaagtaaacaaaatatttctaaatgtaaactaatggcctacttatttagcaatttcagttcagttcttaggagtttaatatttcatctatattttaattaaccacagatattaggctttctcaaagataacattttgtcctaattttagtttctcaaatcgttattaaggttatgatggcaacccagcttgtgaagtaatagatgataataatatagtcaggaaatatcatttggtaaccaaggcttcagcaaagtattaagatttttgtgtttgtgagtgttataggtaacactgttggcccccaacattgtcattttgtacactttgttgatcagtggcctgaattcattaaaattcacactacatgcctcaaaaagaatattggatcccagcctaggttgttgagtatattcctgtcctttattaaaatgtaggttgatagaaaggtggtagggatatttaaatctatcatgctaatttactttctttgtatcacagcaaggatagggaattaggaaaagattactcactcaatagagaaaaggtagatagaaaatccagtattatcttgacaaagcagtgaatgttttagtatgattgaggataggtaatctagtgctaaagttggtcacagaatttcctgcacaaaatgaaagatctgtgtatgggaatgctagagaatttgacttctcagaaatatatagaccaacagtggttgccttttttcattttcacttctcttcattcttagatctacggaatccagaggcagcattgtctccaaccttccgtagtgacagcccagtgcctactgcacccacctctggtggccctaagcccagcacagcttcagcagttcctgaattagctacagatcctgagttagagaagaagttgctacaccacctctctgatctggccttaacattgcccactgatgctgtgtccatctgtcttgccatctccacgccagatgctcctgccactcaagatggggtagaaagcctcctgcagaagtttgcagctcaggagttgattgaggtaaagcgaggtctcctacaagatgatgcacatcctactcttgtaacctatgctgaccattccaagctctctgccatgatgggtgctgtggcagaaaagaagggccctggggaggtagcagggactgtcacagggcagaagcggcgtgcagaacaggactcgactacagtagctgcctttgccagttcgttagtctctggtctgaactcttcagcatcggaaccagcaaaggagccagccaagaaatcaaggaaacatgctgcctcagatgttgatctggagatagagagccttctgaaccaacagtccactaaggaacaacagagcaagaagggccatggagttggggagagaatgtctaaatctctgggggtatgaacgggtagatgaaattatttgggtgaagacaaatcaactgcaacgcatcattcggacaggccgtacaggtcactggttgaaccatgggaaggaacactgcttggtgagcagcagtggggcccaattcaataggtggagcacaaagaagaatcatttgatttcttactgagaaaaagttcaaaggtgtggtttcataaggtaatctgttatctgtggtgagcaggttggtgtcaaaggaaatccccaaggcttcaaccagggtctggattgtgatgtgatcgtagctgaggtatgtgcttcccaggcctccaaagcttccacatttttgttggtatcagttattcatgttgggtgtattctcatcccagatttttctcatttagatcataaacataatagaaagggctagaattgcaatcttgtgtaacttaaaaagcagctagtttttatttcctaggttcgttccaccagtcataaaccagatgaaatctatggcatgattgaaagactatctcctggcactcgcaagattgagttatttggacgaccacacaatgtgcaacccaactggatcacccttggaaaccaactggatgggatccacctactagacccagatgtggttgcacggttcaagcaaaggtacccagatggtatcatctctaaacctaagaatttatagaagcacttccttacagagctaagaatccatagccatggctctgtaagctaaacctgaagagtgatatttgtacaatagctttcttctttatttaaataaacatttgtattgtagttgggattctgaagtccattctggctctgctacttaacagtgtataatcttgtgcaactcatctctcagtattatatgtgaaatgggagtattacctcattgggttgctgtgaaggttcaaactaaatgagtgcatgggaaacattaaaatgatcattataggctaggcacagtggctcacacctgtaatcc

SEQ ID NO: 23814 - protein, 100 aa, Homo sapiens
MMGAVAEKKGPGEVAGTVTGQKRRAEQDSTTVAAFASSLVSGLNSSASEPAKEPAKKSRKHAASDVDLEIESLLNQQSTKEQQSKKGHGVGERMSKSLGV

SEQ ID NO: 23815 - DNA, 2536 bp, Homo sapiens
tttgagacagagtcttgctctgtcgcccagtctggagtgcagtggcatgatgttggctcactgcagcctctgcctcgtgggttcaagcaattctcctccttcagcctccccagtagctgggattataaccttgcatcaccacccccagctaaattttttttttttttgtattttagtagagatggggtttcaccatgttggccaggctggtctcgaactcctcacctcaagtgatccacccaccttggcctcccagagtgctgggattacaggcgtgagccccagtgccttaccagaatggaaatatttaagtaaacaaaatatttctaaatgtaaactaatggcctacttatttagcaatttcagttcagttcttaggagtttaatatttcatctatattttaattaaccacagatattaggctttctcaaagataacattttgtcctaattttagtttctcaaatcgttattaaggttatgatggcaacccagcttgtgaagtaatagatgataataatatagtcaggaaatatcatttggtaaccaaggcttcagcaaagtattaagatttttgtgtttgtgagtgttataggtaacactgttggcccccaacattgtcattttgtacactttgttgatcagtggcctgaattcattaaaattcacactacatgcctcaaaaagaatattggatcccagcctaggttgttgagtatattcctgtcctttattaaaatgtaggttgatagaaaggtggtagggatatttaaatctatcatgctaatttactttctttgtatcacagcaaggatagggaattaggaaaagattactcactcaatagagaaaaggtagatagaaaatccagtattatcttgacaaagcagtgaatgttttagtatgattgaggataggtaatctagtgctaaagttggtcacagaatttcctgcacaaaatgaaagatctgtgtatgggaatgctagagaatttgacttctcagaaatatatagaccaacagtggttgccttttttcattttcacttctcttcattcttagatctacggaatccagaggcagcattgtctccaaccttccgtagtgacagcccagtgcctactgcacccacctctggtggccctaagcccagcacagcttcagcagttcctgaattagctacagatcctgagttagagaagaagttgctacaccacctctctgatctggccttaacattgcccactgatgctgtgtccatctgtcttgccatctccacgccagatgctcctgccactcaagatggggtagaaagcctcctgcagaagtttgcagctcaggagttgattgaggtaaagcgaggtctcctacaagatgatgcacatcctactcttgtaacctatgctgaccattccaagctctctgccatgatgggtgctgtggcagaaaagaagggccctggggaggtagcagggactgtcacagggcagaagcggcgtgcagaacaggactcgactacagtagctgcctttgccagttcgttagtctctggtctgaactcttcagcatcggaaccagcaaaggagccagccaagaaatcaaggaaacatgctgcctcagatgttgatctggagatagagagccttctgaaccaacagtccactaaggaacaacagagcaagaagggccatggagttggggagagaatgtctaaatctctgggggtatgaacgggtagatgaaattatttgggtgaagacaaatcaactgcaacgcatcattcggacaggccgtacaggtcactggttgaaccatgggaaggaacactgcttggtgagcagcagtggggcccaattcaataggtggagcacaaagaagaatcatttgatttcttactgagaaaaagttcaaaggtgtggtttcataaggtaatctgttatctgtggtgagcaggttggtgtcaaaggaaatccccaaggcttcaaccagggtctggattgtgatgtgatcgtagctgaggtatgtgcttcccaggcctccaaagcttccacatttttgttggtatcagttattcatgttgggtgtattctcatcccagatttttctcatttagatcataaacataatagaaagggctagaattgcaatcttgtgtaacttaaaaagcagctagtttttatttcctaggttcgttccaccagtcataaaccagatgaaatctatggcatgattgaaagactatctcctggcactcgcaagattgagttatttggacgaccacacaatgtgcaacccaactggatcacccttggaaaccaactggatgggatccacctactagacccagatgtggttgcacggttcaagcaaaggtacccagatggtatcatctctaaacctaagaatttatagaagcacttccttacagagctaagaatccatagccatggctctgtaagctaaacctgaagagtgatatttgtacaatagctttcttctttatttaaataaacatttgtattgtagttgggattctg

SEQ ID NO: 23816 - protein, 100 aa, Homo sapiens; identical to SEQ ID NO: 23814

SEQ ID NO: 23817 - DNA, 1990 bp, Homo sapiens
atctagtgctaaagttggtcacagaatttcctgcacaaaatgaaagatctgtgtatgggaatgctagagaatttgacttctcagaaatatatagaccaacagtggttgccttttttcattttcacttctcttcattcttagatctacggaatccagaggcagcattgtctccaaccttccgtagtgacagcccagtgcctactgcacccacctctggtggccctaagcccagcacagcttcagcagttcctgaattagctacagatcctgagttagagaagaagttgctacaccacctctctgatctggccttaacattgcccactgatgctgtgtccatctgtcttgccatctccacggtaatgacctgacagagttaggatttaccacttattttcagttcacggtcagtgtcttattgcccatacctcccctcgttctctagccagatgctcctgccactcaagatggggtagaaagcctcctgcagaagtttgcagctcaggagttgattgaggtaaagcgaggtctcctacaagatgatgcacatcctactcttgtaacctatgctgaccattccaagctctctgccatgatgggtgctgtggcagaaaagaagggccctggggaggtagcagggactgtcacagggcagaagcggcgtgcagaacaggactcgactacagtagctgcctttgccagttcgttagtctctggtctgaactcttcagcatcggaaccagcaaaggagccagccaagaaatcaaggaaacatgctgcctcagatgttgatctggagatagagagccttctgaaccaacagtccactaaggaacaacagagcaagaaggtcagtcaggagatcctagagctattaaatactacaacagccaaggaacaatccattgttgaaaaatttcgctctcgaggtcgggcccaagtgcaagaattctgtgactatggaaccaaggaggagtgcatgaaagccagtgatgctgatcgaccctgtcgcaagctgcacttcagacgaattatcaataaacacactgatgagtctttaggtgactgctctttccttaatacatgtttccacatggatacctgcaagtatgttcactatgaaattgatgcttgcatggattctgaggcccctggcagcaaagaccacacgccaagccaggagcttgctcttacacagagtgtcggaggtgattccagtgcagaccgactcttcccacctcagtggatctgttgtgatatccgctacctggacgtcagtatcttgggcaagtttgcagttgtgatggctgacccaccctgggatattcacatggaactgccctatgggaccctgacagatgatgagatgcgcaggctcaacatacccgtactacaggatgatggctttctcttcctctgggtcacaggcagggccatggagttggggagagaatgtctaaatctctgggggtatgaacgggtagatgaaattatttgggtgaagacaaatcaactgcaacgcatcattcggacaggccgtacaggtcactggttgaaccatgggaaggaacactgcttggttggtgtcaaaggaaatccccaaggcttcaaccagggtctggattgtgatgtgatcgtagctgaggttcgttccaccagtcataaaccagatgaaatctatggcatgattgaaagactatctcctggcactcgcaagattgagttatttggacgaccacacaatgtgcaacccaactggatcacccttggaaaccaactggatgggatccacctactagacccagatgtggttgcacggttcaagcaaaggtacccagatggtatcatctctaaacctaagaatttatagaagcacttccttacagagctaagaatccatagccatggctctgtaagctaaacctgaagagtgatatttgtacaatagctttcttctttatttaaataaacatttgtattgtagttggga

SEQ ID NO: 23818 - protein, 425 aa, Homo sapiens; identical to SEQ ID NO: 23812

SEQ ID NO: 23819 - DNA, 1995 bp, Homo sapiens
tcagctccaggggtcattttccggttagccttcggggtgtccgcgtgagaattggctatatcctggagcgagtgctgggaggtgctagtccgccgcgccttattcgagaggtgtcagggctgggagactaggatgtcggacacgtggagctctatccaggcccacaagaagcagctggactctctgcgggagaggctgcagcggaggcggaagcaggactcggggcacttggatctacggaatccagaggcagcattgtctccaaccttccgtagtgacagcccagtgcctactgcacccacctctggtggccctaagcccagcacagcttcagcagttcctgaattagctacagatcctgagttagagaagaagttgctacaccacctctctgatctggccttaacattgcccactgatgctgtgtccatctgtcttgccatctccacgccagatgctcctgccactcaagatggggtagaaagcctcctgcagaagtttgcagctcaggagttgattgaggtaaagcgaggtctcctacaagatgatgcacatcctactcttgtaacctatgctgaccattccaagctctctgccatgatgggtgctgtggcagaaaagaagggccctggggaggtagcagggactgtcacagggcagaagcggcgtgcagaacaggactcgactacagtagctgcctttgccagttcgttagtctctggtctgaactcttcagcatcggaaccagcaaaggagccagccaagaaatcaaggaaacatgctgcctcagatgttgatctggagatagagagccttctgaaccaacagtccactaaggaacaacagagcaagaaggtcagtcaggagatcctagagctattaaatactacaacagccaaggaacaatccattgttgaaaaatttcgctctcgaggtcgggcccaagtgcaagaattctgtgactatggaaccaaggaggagtgcatgaaagccagtgatgctgatcgaccctgtcgcaagctgcacttcagacgaattatcaataaacacactgatgagtctttaggtgactgctctttccttaatacatgtttccacatggatacctgcaagtatgttcactatgaaattgatgcttgcatggattctgaggcccctggcagcaaagaccacacgccaagccaggagcttgctcttacacagagtgtcggaggtgattccagtgcagaccgactcttcccacctcagtggatctgttgtgatatccgctacctggacgtcagtatcttgggcaagtttgcagttgtgatggctgacccaccctgggatattcacatggaactgccctatgggaccctgacagatgatgagatgcgcaggctcaacatacccgtactacaggatgatggctttctcttcctctgggtcacaggcagggccatggagttggggagagaatgtctaaatctctgggggtatgaacgggtagatgaaattatttgggtgaagacaaatcaactgcaacgcatcattcggacaggccgtacaggtcactggttgaaccatgggaaggaacactgcttggttggtgtcaaaggaaatccccaaggcttcaaccagggtctggattgtgatgtgatcgtagctgaggttcgttccaccagtcataaaccagatgaaatctatggcatgattgaaagactatctcctggcactcgcaagattgagttatttggacgaccacacaatgtgcaacccaactggatcacccttggaaaccaactggatgggatccacctactagacccagatgtggttgcacggttcaagcaaaggtacccagatggtatcatctctaaacctaagaatttatagaagcacttccttacagagctaagaatccatagccatggctctgtaagctaaacctgaagagtgatatttgtacaatagctttcttctttatttaaataaacatttgtattgtagttggga

SEQ ID NO: 23820 - protein, 580 aa, Homo sapiens
MSDTWSSIQAHKKQLDSLRERLQRRRKQDSGHLDLRNPEAALSPTFRSDSPVPTAPTSGGPKPSTASAVPELATDPELEKKLLHHLSDLALTLPTDAVSICLAISTPDAPATQDGVESLLQKFAAQELIEVKRGLLQDDAHPTLVTYADHSKLSAMMGAVAEKKGPGEVAGTVTGQKRRAEQDSTTVAAFASSLVSGLNSSASEPAKEPAKKSRKHAASDVDLEIESLLNQQSTKEQQSKKVSQEILELLNTTTAKEQSIVEKFRSRGRAQVQEFCDYGTKEECMKASDADRPCRKLHFRRIINKHTDESLGDCSFLNTCFHMDTCKYVHYEIDACMDSEAPGSKDHTPSQELALTQSVGGDSSADRLFPPQWICCDIRYLDVSILGKFAVVMADPPWDIHMELPYGTLTDDEMRRLNIPVLQDDGFLFLWVTGRAMELGRECLNLWGYERVDEIIWVKTNQLQRIIRTGRTGHWLNHGKEHCLVGVKGNPQGFNQGLDCDVIVAEVRSTSHKPDEIYGMIERLSPGTRKIELFGRPHNVQPNWITLGNQLDGIHLLDPDVVARFKQRYPDGIISKPKNL

SEQ ID NO: 23821 - DNA, 1973 bp, Homo sapiens
gttagccttcggggtgtccgcgtgagaattggctatatcctggagcgagtgctgggaggtgctagtccgccgcgccttattcgagaggtgtcagggctgggagactaggatgtcggacacgtggagctctatccaggcccacaagaagcagctggactctctgcgggagaggctgcagcggaggcggaagcaggactcggggcacttggatctacggaatccagaggcagcattgtctccaaccttccgtagtgacagcccagtgcctactgcacccacctctggtggccctaagcccagcacagcttcagcagttcctgaattagctacagatcctgagttagagaagaagttgctacaccacctctctgatctggccttaacattgcccactgatgctgtgtccatctgtcttgccatctccacgccagatgctcctgccactcaagatggggtagaaagcctcctgcagaagtttgcagctcaggagttgattgaggtaaagcgaggtctcctacaagatgatgcacatcctactcttgtaacctatgctgaccattccaagctctctgccatgatgggtgctgtggcagaaaagaagggccctggggaggtagcagggactgtcacagggcagaagcggcgtgcagaacaggactcgactacagtagctgcctttgccagttcgttagtctctggtctgaactcttcagcatcggaaccagcaaaggagccagccaagaaatcaaggaaacatgctgcctcagatgttgatctggagatagagagccttctgaaccaacagtccactaaggaacaacagagcaagaaggtaggggtcatgtgaaaatactctcacaatatgctcttaattatagctttgtttgacagggatttacccctagggcaaggaactgtttacagcagtggttctcaactggggatgattccctactgcccaactcccaggggatctggtaatgtccggagacatttttattgtcacacacatgggggagtgctattggcatctagtgggggtagaggccagggatgttgtcaaacatcctacagtgcatagtgggacaaacccccacaacaaacagttgtctgtcccaaagtgtcaacaatgccaatgtcgacaaattcttatttagataatctgtcactgaatctgaaagaattggatcaagagaagaggaatccaaatatatagaaatatagggagatgaatggagaggaatactagaccaattatggaaattgactaaataatgtgaattggttctgagtataagtattggcctgacatgagttcttatctgtttggtacttctagtgcgtgagtttgaacaagttaattaacttctcttgagccttagtcttctcatctgtaacatgaagataataccagcgtatcctgccttatagaattgaatagactctgagctaaaaagtaaagtgtttagcactatactttttagttcagcacccagtaaatatgttttttgtagaaggaatgccttcctggggaggggatgttaacataatgcttagcggtaggaaccaggcctcttccattttaatttcatcccaaatgcatatttgtgaggaaggactgaacccctaacaaatctcttatctgaaggctccaattttccaatattaagttagctaatttaggtctaggcacaatggctcattcctgtaatctcaacactttgggaggccaaggcgtgaggatcacctgaggcgaggagttcaagactggcctgggcaacatagaccctatccctatagaaagtaaagtaattaaaacattagctggcatggtgtcacgcacctatattcccagctacaattgaaggctgagctgggaggatcacttgagcctgggagttcagtgggagaaacagtgagttatgattacacaactacactctggcctgggtgacagcaagatcccatctctt

SEQ ID NO: 23822 - protein, 245 aa, Homo sapiens [sequence omitted]

SEQ ID NO: 23823 - DNA, 398 bp, Homo sapiens
gtgagaattggctatatcctggagcgagtgctgggaggtgctagtccgccgcgccttattcgagaggtgtcagggctgggagactaggatgtcggacacgtggagctctatccaggcccacaagaagcagctggactctctgcgggagaggctgcagcggaggcggaagcaggactcggggcacttggcagcagacgttcgcccttctgcaagtagttcgcggttcctcctcacgctgggcctcggttcttccagctcacttttaccggacggacgcttgagccccaccctcgtccgccttgcccactcctcttcagactgcgaggacgtcgcctttgtgaggctgctcagccccctatcccgcgaagcagcaagaacccctttttgttgctgctttg

SEQ ID NO: 23824 - protein, 102 aa, Homo sapiens
MSDTWSSIQAHKKQLDSLRERLQRRRKQDSGHLAADVRPSASSSRFLLTLGLGSSSSLLPDGRLSPTLVRLAHSSSDCEDVAFVRLLSPLSREAARTPFCCC

SEQ ID NO: 23825 - DNA, 1635 bp, Homo sapiens
gctgggtgcagaggctgccgcagacccagcggccatcgcctccctcaatcccaatatccattgtctcccaccccacctggccctccacttcccccacaaccatggcgcacgaatccgagaggagctctcgtctcggggtgccctgcggggagccggcagagctcggaggtgatgctagcgaggaggatcacccccaagtctgtgccaagtgctgcgcacaattcactgacccaactgaattcctcgcccaccagaacgcatgttctactgaccctcctgtaatggtgataattgggggccaggagaaccccaacaactcttcggcctcctctgaaccccggcctgagggtcacaataatcctcaggtcatggacacagagcatagcaaccccccagattctgggtcctccgtgcccacggatcccacctggggcccagagaggagaggagaggagtctccagggcatttcctggtcgctgccacagaaccagtatgtggcattcctgtcaaatggcctgcccatgaagccctggaattccagctccacctccactaccactccaagcctggccccaccagtgctgtttggcctaggaactgtggctgggaaggtgcctccaacaatgggatccagggaagccaaggagaagacagcccccctcctatttcagcctcctgcacccaaggcagtgcctgagaagcccatcatagacaagaagtagcaaactgtacattccttcttcctccccctgctccagaaggtgccggtactgaagatgctccagtaattggtgacccaaccctaggaagtagggagaaatgaaggaagggcataggaaaattttcccagtaaatcccctgatggtcacattaaggtaaaggttttggctggtcagtgtgccaagacctctccagcttctcattcatgatgacctctcaaagttgggaaacaagctgatttcttgccaagaggtctcccaggagatatttgggaaatgtgaagttcgtatctttaaggagcatttttggtcagcatggttgatgaactaatgatgagagagttaaggaatgttgctagaacatagggcttgctggtacctatgtgactaagaaagggacatgatgtaagggaaaaggcctcaaattcttgtgaatgtggacattctcgttaatattcttttgggctaatagtgacatagtgtgcagaggtgtaccagggatcatgggggatttcctagcactagtatgcttctagttttagataactccctcctttattccctggccccttgtattttccttatcttcctctttcaagacccctacccattttgcctatccgtaggctggggcttgtgtctttgtcattgtctggttcttaagagtcccagctccaggtggcgtcctccctgcctctccgtcttgtaatgagttgtagtatttactcttaacataggatcatttggaacaggagttctgaggaggagagagtgagggttttgctattgactgacttgaacgatggcttctcctcaagctgtaggctccagagcttcctaacctagtaaaatgtcaagaacagacgggagatattagtgtctttccctctatcattaaaggtgttttaaccaaat

SEQ ID NO: 23826 - protein, 198 aa, Homo sapiens
MAHESERSSRLGVPCGEPAELGGDASEEDHPQVCAKCCAQFTDPTEFLAHQNACSTDPPVMVIIGGQENPNNSSASSEPRPEGHNNPQVMDTEHSNPPDSGSSVPTDPTWGPERRGEESPGHFLVAATEPVCGIPVKWPAHEALEFQLHLHYHSKPGPTSAVWPRNCGWEGASNNGIQGSQGEDSPPPISASCTQGSA

SEQ ID NO: 23827 - DNA, 4914 bp, Homo sapiens
gagctgcagaagcgtagggaagaagctgaagaaaaaaagggggcgtctcccctttaaagacttgcaaagattgagagagaaagagagagagtcaagaacagagaatcagagagagagagagagtctgtgtctctgggaaagaagaacatctctgcttcacagtgatttgcgctgggggagaggcatcaattggcttcggacccaagggggagacgagaccaggtcaccccggttaagaccaagtgagcgttgcccctccctctcccaactctctacccgggaatgtctcggcgaaagcagcggaaaccccaacagttaatctcggactgcgaaggtcccagcgcgtctgagaacggtgatgctagcgaggaggatcacccccaagtctgtgccaagtgctgcgcacaattcactgacccaactgaattcctcgcccaccagaacgcatgttctactgaccctcctgtaatggtgataattgggggccaggagaaccccaacaactcttcggcctcctctgaaccccggcctgagggtcacaataatcctcaggtcatggacacagagcatagcaaccccccagattctgggtcctccgtgcccacggatcccacctggggcccagagaggagaggagaggagtctccagggcatttcctggtcgctgccacaggtacagcggctgggggaggcgggggcctgatcttggccagtcccaagctgggagcaaccccattacctccagaatcgacccctgcaccccctcctcctccaccaccccctccgcccccaggggtaggcagtggccacttgaatatccccctgatcttggaagagctacgggtgctgcagcagcggcagatccatcagatgcagatgactgagcaaatctgcaggcaggtgctgttgcttggctccttaggccagacggtgggtgcccctgccagtccctcagagctacctgggacagggactgcctcttccaccaagcccctactacccctcttcagccccatcaagcctgtccaaaccagcaagacactggcatcttcctcctcctcctcctcttcctcttcaggggcagaaacgcccaagcaggccttcttccacctttaccacccactggggtcacagcatcctttctctgctggaggggttgggcgaagccacaaacccacccctgccccttccccagccttgccaggcagcacagatcagctgattgcctcgcctcatctggcattcccaagcaccacgggactactggcagcacagtgtcttggggcagcccgaggccttgaggccactgcctccccagggctcctgaagccaaagaatggaagtggtgagctgagctacggagaagtgatgggtcccttggagaagcctggtggaaggcacaaatgccgcttctgtgccaaagtatttggcagtgacagtgccctgcagatccaccttcgttcccacacgggtgagaggccctataagtgcaatgtctgtggaaaccgttttaccacccgtggcaacctcaaagtgcatttccaccggcatcgtgagaagtacccacatgtgcagatgaacccacacccagtaccagagcacctagactatgtcattaccagcagtggcttgccttatggtatgtccgtgccaccagagaaggccgaggaggaggcagccactccaggtggaggggttgagcgcaagcctctggtggcctccacaacagcactcagtgccacagagagcctgactctgctctccaccagtgcaggcacagccacggctccaggactccctgctttcaataagtttgtgctcatgaaagcagtggaacccaagaataaagctgatgaaaacacccccccagggagtgagggctcagccatcagtggagtggcagaaagtagcacggcaactcgcatgcaactaagtaagttggtgacttcactaccaagctgggcactgcttaccaaccacttcaagtccactggcagcttccccttcccctatgtgctagagcccttgggggcctcaccctctgagacatcaaagctgcagcaactggtagaaaagattgaccggcaaggagctgtggcggtgacctcagctgcctcaggagcccccaccacctctgcccctgcaccttcatcctcagcctcttctggacctaaccagtgtgtcatctgtctccgagtgcttagctgtcctcgggccctacgccttcattatggccaacatggaggtgagaggcccttcaaatgcaaagtgtgtggcagagccttctccaccaggggtaatctgcgtgcacatttcgtgggccacaaggccagtccagctgcccgggcacagaattcctgccccatctgccagaagaagttcaccaatgctgtcactctgcagcagcatgtccggatgcacctggggggccagatccccaacggtggtactgcactccctgaaggtggaggagctgctcaggagaatggctccgagcaatctacagtctccggggcagggagtttcccccagcagcagtcccagcagccatcaccggaagaggagttgtctgaggaggaggaagaggaggatgaggaagaagaggaagatgtgactgatgaagattccctggcagggagaggctcagagagtggaggtgagaaggcaatatcagtgagaggtgattcagaagaggcatctggggcagaggaggaggtggggacagtggcggcagcagccacagctgggaaggagatggacagtaatgagaaaactactcaacagtcttctttgccaccaccaccaccacctgacagcctggatcagcctcagccaatggagcagggaagcagtggtgttttaggaggcaaggaagaggggggcaaaccggagagaagctcaagtccggcatcagcactcaccccagaaggggaagccaccagcgtgaccttggtagaggagctgagcctgcaggaggcaatgagaaaggagccaggagagagcagcagcagaaaggcctgcgaagtgtgtggccaggcctttccctcccaggcagctctggaggagcatcagaagacccaccccaaggaggggccgctcttcacttgtgttttctgcaggcagggctttcttgagcgggctaccctcaagaagcatatgctcctggcacaccaccaggtacagccctttgccccccatggccctcagaatattgctgctctttctctagtccctggctgttcgccttccatcacctccacagggctctccccctttccccgaaaagatgaccccacgatcccatgagcctgtttttctgtacctgctgctctttgtcccacagagcagaaacagcttcacaaaaggacctcccagagttatgagccctgattttgtctttttctctaagttcttaacatgttatgtccctagtggcttttctgtagtccctgagcttggaaattactgtgcttacaaggggatggccccctaaggaatttttcttccctcctcattctttgtacctgaggaacatagattctctgcagctttctcaaggggaaccctctccagcttccctggtgtgacccttcttccccctcctctctcctctccctttccctttggtaggtgcacctgagcacctacatttggcattgcagcctagccaaaaagggctggcagctgtctctggagggcccagtgccactcctctggggtgacctttctgctcagctggtgggtatgggtcccctatctttctagaaccagtatgtggcattcctgtcaaatggcctgcccatgaagccctggaattccagctccacctccactaccactccaagcctggccccaccagtgctgtttggcctaggaactgtggctgggaaggtgcctccaacaatgggatccagggaagccaaggagaagacagcccccctcctatttcagcctcctgcacccaaggcagtgcctgagaagcccatcatagacaagaagtagcaaactgtacattccttcttcctccccctgctccagaaggtgccggtactgaagatgctccagtaattggtgacccaaccctaggaagtagggagaaatgaaggaagggcataggaaaattttcccagtaaatcccctgatggtcacattaaggtaaaggttttggctggtcagtgtgccaagacctctccagcttctcattcatgatgacctctcaaagttgggaaacaagctgatttcttgccaagaggtctcccaggagatatttgggaaatgtgaagttcgtatctttaaggagcatttttggtcagcatggttgatgaactaatgatgagagagttaaggaatgttgctagaacatagggcttgctggtacctatgtgactaagaaagggacatgatgtaagggaaaaggcctcaaattcttgtgaatgtggacattctcgttaatattcttttgggctaatagtgacatagtgtgcagaggtgtaccagggatcatgggggatttcctagcactagtatgcttctagttttagataactccctcctttattccctggccccttgtattttccttatcttcctctttcaagacccctacccattttgcctatccgtaggctggggcttgtgtctttgtcattgtctggttcttaagagtcccagctccaggtggcgtcctccctgcctctccgtcttgtaatgagttgtagtatttactcttaacataggatcatttggaacaggagttctgaggaggagagagtgagggttttgctattgactgacttgaacgatggcttctcctcaagctgtaggctccagagcttcctaacctagtaaaatgtcaagaacagacgggagatattagtgtctttccctctatcattaaaggtgttttaaccaaat

SEQ ID NO: 23828 - protein, 1007 aa, Homo sapiens
MSRRKQRKPQQLISDCEGPSASENGDASEEDHPQVCAKCCAQFTDPTEFLAHQNACSTDPPVMVIIGGQENPNNSSASSEPRPEGHNNPQVMDTEHSNPPDSGSSVPTDPTWGPERRGEESPGHFLVAATGTAAGGGGGLILASPKLGATPLPPESTPAPPPPPPPPPPPGVGSGHLNIPLILEELRVLQQRQIHQMQMTEQICRQVLLLGSLGQTVGAPASPSELPGTGTASSTKPLLPLFSPIKPVQTSKTLASSSSSSSSSSGAETPKQAFFHLYHPLGSQHPFSAGGVGRSHKPTPAPSPALPGSTDQLIASPHLAFPSTTGLLAAQCLGAARGLEATASPGLLKPKNGSGELSYGEVMGPLEKPGGRHKCRFCAKVFGSDSALQIHLRSHTGERPYKCNVCGNRFTTRGNLKVHFHRHREKYPHVQMNPHPVPEHLDYVITSSGLPYGMSVPPEKAEEEAATPGGGVERKPLVASTTALSATESLTLLSTSAGTATAPGLPAFNKFVLMKAVEPKNKADENTPPGSEGSAISGVAESSTATRMQLSKLVTSLPSWALLTNHFKSTGSFPFPYVLEPLGASPSETSKLQQLVEKIDRQGAVAVTSAASGAPTTSAPAPSSSASSGPNQCVICLRVLSCPRALRLHYGQHGGERPFKCKVCGRAFSTRGNLRAHFVGHKASPAARAQNSCPICQKKFTNAVTLQQHVRMHLGGQIPNGGTALPEGGGAAQENGSEQSTVSGAGSFPQQQSQQPSPEEELSEEEEEEDEEEEEDVTDEDSLAGRGSESGGEKAISVRGDSEEASGAEEEVGTVAAAATAGKEMDSNEKTTQQSSLPPPPPPDSLDQPQPMEQGSSGVLGGKEEGGKPERSSSPASALTPEGEATSVTLVEELSLQEAMRKEPGESSSRKACEVCGQAFPSQAALEEHQKTHPKEGPLFTCVFCRQGFLERATLKKHMLLAHHQVQPFAPHGPQNIAALSLVPGCSPSITSTGLSPFPRKDDPTIP

SEQ ID NO: 23829 - DNA, 1835 bp, Homo sapiens
gcttttacaatgggagctgcagaagcgtagggaagaagctgaagaaaaaaagggggcgtctcccctttaaagacttgcaaagattgagagagaaagagagagagtcaagaacagagaatcagagagagagagagagtctgtgtctctgggaaagaagaacatctctgcttcacagtgatttgcgctgggggagaggcatcaattggcttcggacccaagggggagacgagaccaggtcaccccggttaagaccaagtgagcgttgcccctccctctcccaactctctacccgggaatgtctcggcgaaagcagcggaaaccccaacagttaatctcggactgcgaaggtcccagcgcgtctgagaacggtgatgctagcgaggaggatcacccccaagtctgtgccaagtgctgcgcacaattcactgacccaactgaattcctcgcccaccagaacgcatgttctactgaccctcctgtaatggtgataattgggggccaggagaaccccaacaactcttcggcctcctctgaaccccggcctgagggtcacaataatcctcaggtcatggacacagagcatagcaaccccccagattctgggtcctccgtgcccacggatcccacctggggcccagagaggagaggagaggagtctccagggcatttcctggtcgctgccacagaaccagtatgtggcattcctgtcaaatggcctgcccatgaagccctggaattccagctccacctccactaccactccaagcctggccccaccagtgctgtttggcctaggaactgtggctgggaaggtgcctccaacaatgggatccagggaagccaaggagaagacagcccccctcctatttcagcctcctgcacccaaggcagtgcctgagaagcccatcatagacaagaagtagcaaactgtacattccttcttcctccccctgctccagaaggtgccggtactgaagatgctccagtaattggtgacccaaccctaggaagtagggagaaatgaaggaagggcataggaaaattttcccagtaaatcccctgatggtcacattaaggtaaaggttttggctggtcagtgtgccaagacctctccagcttctcattcatgatgacctctcaaagttgggaaacaagctgatttcttgccaagaggtctcccaggagatatttgggaaatgtgaagttcgtatctttaaggagcatttttggtcagcatggttgatgaactaatgatgagagagttaaggaatgttgctagaacatagggcttgctggtacctatgtgactaagaaagggacatgatgtaagggaaaaggcctcaaattcttgtgaatgtggacattctcgttaatattcttttgggctaatagtgacatagtgtgcagaggtgtaccagggatcatgggggatttcctagcactagtatgcttctagttttagataactccctcctttattccctggccccttgtattttccttatcttcctctttcaagacccctacccattttgcctatccgtaggctggggcttgtgtctttgtcattgtctggttcttaagagtcccagctccaggtggcgtcctccctgcctctccgtcttgtaatgagttgtagtatttactcttaacataggatcatttggaacaggagttctgaggaggagagagtgagggttttgctattgactgacttgaacgatggcttctcctcaagctgtaggctccagagcttcctaacctagtaaaatgtcaagaacagacgggagatattagtgtctttccctctatcattaaaggtgttttaaccaaat

SEQ ID NO: 23830 - protein, 200 aa, Homo sapiens
MSRRKQRKPQQLISDCEGPSASENGDASEEDHPQVCAKCCAQFTDPTEFLAHQNACSTDPPVMVIIGGQENPNNSSASSEPRPEGHNNPQVMDTEHSNPPDSGSSVPTDPTWGPERRGEESPGHFLVAATEPVCGIPVKWPAHEALEFQLHLHYHSKPGPTSAVWPRNCGWEGASNNGIQGSQGEDSPPPISASCTQGSA

SEQ ID NO: 23831 - DNA, 1158 bp, Homo sapiens
gcaatatcagtgagaggtgattcagaagaggcatctggggcagaggaggaggtggggacagtggcggcagcagccacagctgggaaggagatggacagtaatgagaaaactactcaacagtcttctttgccaccaccaccaccacctgacagcctggatcagcctcagccaatggagcagggaagcagtggtgttttaggaggcaaggaagaggggggcaaaccggagagaagctcaagtccggcatcagcactcaccccagaaggggaagccaccagcgtgaccttggtagaggagctgagcctgcaggaggcaatgagaaaggagccaggagagagcagcagcagaaaggcctgcgaagtgtgtggccaggcctttccctcccaggcagctctggaggagcatcagaagacccaccccaaggaggggccgctcttcacttgtgttttctgcaggcagggctttcttgagcgggctaccctcaagaagcatatgctcctggcacaccaccaggtacagccctttgccccccatggccctcagaatattgctgctctttctctagtccctggctgttcgccttccatcacctccacagggctctccccctttccccgaaaagatgaccccacgatcccatgagcctgtttttctgtacctgctgctctttgtcccacagagcagaaacagcttcacaaaaggacctcccagagttatgagccctgattttgtctttttctctaagttcttaacatgttatgtccctagtggcttttctgtagtccctgagcttggaaattactgtgcttacaaggggatggccccctaaggaatttttcttccctcctcattctttgtacctgaggaacatagattctctgcagctttctcaaggggaaccctctccagcttccctggtgtgacccttcttccccctcctctctccgtcttgtaatgagttgtagtatttactcttaacataggatcatttggaacaggagttctgaggaggagagagtgagggttttgctattgactgacttgaacgatggcttctcctcaagctgtaggctccagagcttcctaacctagtaaaatgtcaagaacagacgggagatattagtgtctttccctctatcattaaaggtgttttaacca

SEQ ID NO: 23832 - protein, 183 aa, Homo sapiens
MDSNEKTTQQSSLPPPPPPDSLDQPQPMEQGSSGVLGGKEEGGKPERSSSPASALTPEGEATSVTLVEELSLQEAMRKEPGESSSRKACEVCGQAFPSQAALEEHQKTHPKEGPLFTCVFCRQGFLERATLKKHMLLAHHQVQPFAPHGPQNIAALSLVPGCSPSITSTGLSPFPRKDDPTIP

SEQ ID NO: 23833 - DNA, 1142 bp, Homo sapiens
gcaatatcagtgagaggtgattcagaagaggcatctggggcagaggaggaggtggggacagtggcggcagcagccacagctgggaaggagatggacagtaatgagaaaactactcaacagtcttctttgccaccaccaccaccacctgacagcctggatcagcctcagccaatggagcagggaagcagtggtgttttaggaggcaaggaagaggggggcaaaccggagagaagctcaagtccggcatcagcactcaccccagaaggggaagccaccagcgtgaccttggtagaggagctgagcctgcaggaggcaatgagaaaggagccaggagagagcagcagcagaaaggcctgcgaagtgtgtggccaggcctttccctcccaggcagctctggaggagcatcagaagacccaccccaaggaggggccgctcttcacttgtgttttctgcaggcagggctttcttgagcgggctaccctcaagaagcatatgctcctggcacaccaccaggtacagccctttgccccccatggccctcagaatattgctgctctttctctagtccctggctgttcgccttccatcacctccacagggctctccccctttccccgaaaagatgaccccacgatcccatgagcctgtttttctgtacctgctgctctttgtcccacagagcagaaacagcttcacaaaaggacctcccagagttatgagccctgattttgtctttttctctaagttcttaacatgttatgtccctagtggcttttctgtagtccctgagcttggaaattactgtgcttacaaggggatggccccctaaggaatttttcttccctcctcattctttgtacctgaggaacatagattctctgcagctttctcaaggggaacccttccaggtggcgtcctccctgcctctccgtcttgtaatgagttgtagtatttactcttaacataggatcatttggaacaggagttctgaggaggagagagtgagggttttgctattgactgacttgaacgatggcttctcctcaagctgtaggctccagagcttcctaacctagtaaaatgtcaagaacagacgggagatattagtgtctttccctctatcattaaaggtgttttaacca

SEQ ID NO: 23834 - protein, 183 aa, Homo sapiens; identical to SEQ ID NO: 23832

SEQ ID NO: 23835 - DNA, 659 bp, Homo sapiens
tgccgcagacccagcggccatcgcctccctcaatcccaatatccattgtctcccaccccacctggccctccacttcccccacaaccatggcgcacgaatccgagaggagctctcgtctcggggtgccctgcggggagccggcagagctcggaggtgatgctagcgaggaggatcacccccaagtctgtgccaagtgctgcgcacaattcactgacccaactgaattcctcgcccaccagaacgcatgttctactgaccctcctgtaatggtgataattgggggccaggagaaccccaacaactcttcggcctcctctgaaccccggcctgagggtcacaataatcctcaggtcatggacacagagcatagcaaccccccagattctgggtcctccgtgcccacggatcccacctggggcccagagaggagaggagaggagtctccagggcatttcctggtcgctgccacaggtacagcggctgggggaggcgggggcctgatcttggccagtcccaagctgggagcaaccccattacctccagaatcgacccctgcaccccctcctcctccaccaccccctccgcccccaggggtaggcagtggccacttgaatatccccctgatcttggaagagctacgggtgctgcagcagcggcag

SEQ ID NO: 23836 - protein, 190 aa, Homo sapiens
MAHESERSSRLGVPCGEPAELGGDASEEDHPQVCAKCCAQFTDPTEFLAHQNACSTDPPVMVIIGGQENPNNSSASSEPRPEGHNNPQVMDTEHSNPPDSGSSVPTDPTWGPERRGEESPGHFLVAATGTAAGGGGGLILASPKLGATPLPPESTPAPPPPPPPPPPPGVGSGHLNIPLILEELRVLQQR

SEQ ID NO: 23837 - DNA, 1572 bp, Homo sapiens
acagagagaagataccggtgtcgggaagcaccagtgccctgaggaagggccatttccaaaagccctgtgctgacacagggttgctggttcctcttcaagagcccactctctggggtggggccatatctccagcagaggtgggctggaaaggacccccccaatcccgcccgccgtgagcttagctggagccatggcctctgcacccatctcgatgcttgcgatgctcttcacattgagtgggctgagagctcagtcagtggctcagccggaagatcaggtcaacgttgctgaagggaatcctctgactgtgaaatgcacctattcagtctctggaaacccttatcttttttggtatgttcaataccccaaccgaggcctccagttccttctgaaatacatcacaggggataacctggttaaaggcagctatggctttgaagctgaatttaacaagagccaaacctccttccacctgaagaaaccatctgcccttgtgagcgactccgctttgtacttctgtgctgtgagagacacacactgctgcaggcaacaagctaacttttggaggaggaaccagggtgctagttaaaccaaatatccagaaccctgaccctgccgtgtaccagctgagagactctaaatccagtgacaagtctgtctgcctattcaccgattttgattctcaaacaaatgtgtcacaaagtaaggattctgatgtgtatatcacagacaaaactgtgctagacatgaggtctatggacttcaagagcaacagtgctgtggcctggagcaacaaatctgactttgcatgtgcaaacgccttcaacaacagcattattccagaagacaccttcttccccagcccagaaagttcctgtgatgtcaagctggtcgagaaaagctttgaaacagatacgaacctaaactttcaaaacctgtcagtgattgggttccgaatcctcctcctgaaagtggccgggtttaatctgctcatgacgctgcggctgtggtccagctgagatctgcaagattgtaagacagcctgtgctccctcgctccttcctctgcattgcccctcttctccctctccaaacagagggaactctcctacccccaaggaggtgaaagctgctaccacctctgtgcccccccggcaatgcaccaactggatcctacccgaatttatgattaagattgctgaagagctgccaaacactgctgccaccccctctgttcccttattgctgcttgtcactgcctgacattcacggcagaggcaaggctgctgcagctccgctggctgtgcacattccctcctgctccccagagactgcctccgccatcccacagatgatggatcttcagtgggttctcttgggctctaggtcccggagaatgttgtgaggggtttatttttttttaatagtgttcataaagaaagacatagtattcttcttctcaagacgtggggggaaattatctcattatcgaggccctgctatgctgtgtgtctgggcgtgttgtatgtcctgctgccgatgccttcattaaaatgatttggaagagcagaga

SEQ ID NO: 23838 - protein, 132 aa, Homo sapiens
MASAPISMLAMLFTLSGLRAQSVAQPEDQVNVAEGNPLTVKCTYSVSGNPYLFWYVQYPNRGLQFLLKYITGDNLVKGSYGFEAEFNKSQTSFHLKKPSALVSDSALYFCAVRDTHCCRQQANFWRRNQGAS

SEQ ID NO: 23839 - DNA, 1644 bp, Homo sapiens
atccactgagcctcctccctgcagctggctgatgtagctcactggtgtctgtgtagatagggagctgtgatgagaacaagaggtcagaacacatccaggctccttaagagaaagcctttctttaaccatttttgaaacccttcaaaggcagagacttgtccagcctaacctgcctgctgctcctagctcctgaggctcagggcccttggcttctgtccgctctgctcagggccctccagcgtggccactgctcagccatgctcctgctgctcgtcccagtgctcgaggtgatttttaccctgggaggaaccagagcccagtcggtgacccagcttggcagccacgtctctgtctctgaaggagccctggttctgctgaggtgcaactactcatcgtctgttccaccatatctcttctggtatgtgcaataccccaaccaaggactccagcttctcctgaagtacacatcagcggccaccctggttaaaggcatcaacggttttgaggctgaatttaagaagagtgaaacctccttccacctgacgaaaccctcagcccatatgagcgacgcggctgagtacttctgtgctgtgagtgacacatgggggtacagcagtgcttccaagataatctttggatcagggaccagactcagcatccggccaaatatccagaaccctgaccctgccgtgtaccagctgagagactctaaatccagtgacaagtctgtctgcctattcaccgattttgattctcaaacaaatgtgtcacaaagtaaggattctgatgtgtatatcacagacaaaactgtgctagacatgaggtctatggacttcaagagcaacagtgctgtggcctggagcaacaaatctgactttgcatgtgcaaacgccttcaacaacagcattattccagaagacaccttcttccccagcccagaaagttcctgtgatgtcaagctggtcgagaaaagctttgaaacagatacgaacctaaactttcaaaacctgtcagtgattgggttccgaatcctcctcctgaaagtggccgggtttaatctgctcatgacgctgcggctgtggtccagctgagatctgcaagattgtaagacagcctgtgctccctcgctccttcctctgcattgcccctcttctccctctccaaacagagggaactctcctacccccaaggaggtgaaagctgctaccacctctgtgcccccccggcaatgcaccaactggatcctacccgaatttatgattaagattgctgaagagctgccaaacactgctgccaccccctctgttcccttattgctgcttgtcactgcctgacattcacggcagaggcaaggctgctgcagctccgctggctgtgcacattccctcctgctccccagagactgcctccgccatcccacagatgatggatcttcagtgggttctcttgggctctaggtcccggagaatgttgtgaggggtttatttttttttaatagtgttcataaagaaagacatagtattcttcttctcaagacgtggggggaaattatctcattatcgaggccctgctatgctgtgtgtctgggcgtgttgtatgtcctgctgccgatgccttcattaaaatgatttggaagagcagaga

SEQ ID NO: 23840 - protein, 277 aa, Homo sapiens
MLLLLVPVLEVIFTLGGTRAQSVTQLGSHVSVSEGALVLLRCNYSSSVPPYLFWYVQYPNQGLQLLLKYTSAATLVKGINGFEAEFKKSETSFHLTKPSAHMSDAAEYFCAVSDTWGYSSASKIIFGSGTRLSIRPNIQNPDPAVYQLRDSKSSDKSVCLFTDFDSQTNVSQSKDSDVYITDKTVLDMRSMDFKSNSAVAWSNKSDFACANAFNNSIIPEDTFFPSPESSCDVKLVEKSFETDTNLNFQNLSVIGFRILLLKVAGFNLLMTLRLWSS

SEQ ID NO: 23841 - DNA, 1615 bp, Homo sapiens
gcagctggctgatgtagctcactggtgtctgtgtagatagggagctgtgatgagaacaagaggtcagaacacatccaggctccttaagagaaagcctttctttaaccatttttgaaacccttcaaaggcagagacttgtccagcctaacctgcctgctgctcctagctcctgaggctcagggcccttggcttctgtccgctctgctcagggccctccagcgtggccactgctcagccatgctcctgctgctcgtcccagtgctcgaggtgatttttaccctgggaggaaccagagcccagtcggtgacccagcttggcagccacgtctctgtctctgaaggagccctggttctgctgaggtgcaactactcatcgtctgttccaccatatctcttctggtatgtgcaataccccaaccaaggactccagcttctcctgaagtacacatcagcggccaccctggttaaaggcatcaacggttttgaggctgaatttaagaagagtgaaacctccttccacctgacgaaaccctcagcccatatgagcgacgcggctgagtacttctgtgctgtgagtgacacatttggaaatgagaaattaacctttgggactggaacaagactcaccatcatacccaatatccagaaccctgaccctgccgtgtaccagctgagagactctaaatccagtgacaagtctgtctgcctattcaccgattttgattctcaaacaaatgtgtcacaaagtaaggattctgatgtgtatatcacagacaaaactgtgctagacatgaggtctatggacttcaagagcaacagtgctgtggcctggagcaacaaatctgactttgcatgtgcaaacgccttcaacaacagcattattccagaagacaccttcttccccagcccagaaagttcctgtgatgtcaagctggtcgagaaaagctttgaaacagatacgaacctaaactttcaaaacctgtcagtgattgggttccgaatcctcctcctgaaagtggccgggtttaatctgctcatgacgctgcggctgtggtccagctgagatctgcaagattgtaagacagcctgtgctccctcgctccttcctctgcattgcccctcttctccctctccaaacagagggaactctcctacccccaaggaggtgaaagctgctaccacctctgtgcccccccggcaatgcaccaactggatcctacccgaatttatgattaagattgctgaagagctgccaaacactgctgccaccccctctgttcccttattgctgcttgtcactgcctgacattcacggcagaggcaaggctgctgcagctccgctggctgtgcacattccctcctgctccccagagactgcctccgccatcccacagatgatggatcttcagtgggttctcttgggctctaggtcccggagaatgttgtgaggggtttatttttttttaatagtgttcataaagaaagacatagtattcttcttctcaagacgtggggggaaattatctcattatcgaggccctgctatgctgtgtgtctgggcgtgttgtatgtcctgctgccgatgccttcattaaaatgatttggaagagcagaga

SEQ ID NO: 23842 - protein, 274 aa, Homo sapiens
MLLLLVPVLEVIFTLGGTRAQSVTQLGSHVSVSEGALVLLRCNYSSSVPPYLFWYVQYPNQGLQLLLKYTSAATLVKGINGFEAEFKKSETSFHLTKPSAHMSDAAEYFCAVSDTFGNEKLTFGTGTRLTIIPNIQNPDPAVYQLRDSKSSDKSVCLFTDFDSQTNVSQSKDSDVYITDKTVLDMRSMDFKSNSAVAWSNKSDFACANAFNNSIIPEDTFFPSPESSCDVKLVEKSFETDTNLNFQNLSVIGFRILLLKVAGFNLLMTLRLWSS

SEQ ID NO: 23843 - DNA, 1468 bp, Homo sapiens
ggaaagaaaggaatacccgatgatggaagtagctcttatggctggagattgcaggtttatgactgatcctatttgggaagaacaatgatggcaggcattcgagctttatttatgtacttgtggctgcagctggactgggtgagcagaggagagagtgtggggctgcatcttcctaccctgagtgtccaggagggtgacaactctattatcaactgtgcttattcaaacagcgcctcagactacttcatttggtacaagcaagaatctggaaaaggtcctcaattcattatagacattcgttcaaatatggacaaaaggcaaggccaaagagtcaccgttttattgaataagacagtgaaacatctctctctgcaaattgcagctactcaacctggagactcagctgtctacttttgtgcagatgtgatactcacgggaggaggaaacaaactcacctttgggacaggcactcagctaaaagtggaactcaatatccagaaccctgaccctgccgtgtaccagctgagagactctaaatccagtgacaagtctgtctgcctattcaccgattttgattctcaaacaaatgtgtcacaaagtaaggattctgatgtgtatatcacagacaaaactgtgctagacatgaggtctatggacttcaagagcaacagtgctgtggcctggagcaacaaatctgactttgcatgtgcaaacgccttcaacaacagcattattccagaagacaccttcttccccagcccagaaagttcctgtgatgtcaagctggtcgagaaaagctttgaaacagatacgaacctaaactttcaaaacctgtcagtgattgggttccgaatcctcctcctgaaagtggccgggtttaatctgctcatgacgctgcggctgtggtccagctgagatctgcaagattgtaagacagcctgtgctccctcgctccttcctctgcattgcccctcttctccctctccaaacagagggaactctcctacccccaaggaggtgaaagctgctaccacctctgtgcccccccggcaatgcaccaactggatcctacccgaatttatgattaagattgctgaagagctgccaaacactgctgccaccccctctgttcccttattgctgcttgtcactgcctgacattcacggcagaggcaaggctgctgcagctccgctggctgtgcacattccctcctgctccccagagactgcctccgccatcccacagatgatggatcttcagtgggttctcttgggctctaggtcccggagaatgttgtgaggggtttatttttttttaatagtgttcataaagaaagacatagtattcttcttctcaagacgtggggggaaattatctcattatcgaggccctgctatgctgtgtgtctgggcgtgttgtatgtcctgctgccgatgccttcattaaaatgatttggaagagcagaga

SEQ ID NO: 23844 - protein, 276 aa, Homo sapiens [sequence omitted]

SEQ ID NO: 23845 - DNA, 1226 bp, Homo sapiens
gttcacctcacagtacagagtcctgaaaataaagaagaagatttttttttatctagaaaaggaaccaaacatgtcactttctagcctgctgaaggtggtcacagcttcactgtggctaggacctggcattgcccagaagataactcaaacccaaccaggaatgttcgtgcaggaaaaggaggctgtgactctggactgcacatatgacaccagtgatcaaagttatggtctattctggtacaagcagcccagcagtggggaaatgatttttcttatttatcaggggtcttatgacgagcaaaatgcaacagaaggtcgctactcattgaatttccagaaggcaagaaaatccgccaaccttgtcatctccgcttcacaactgggggactcagcaatgtatttctgtgcaatgagatgctgtgacaccgataaactcatctttggaaaaggaacccgtgtgactgtggaaccaagaagtcagcctcataccaaaccatccgtttttgtcatgaaaaatggaacaaatgtcgcttgtctggtgaaggaattctaccccaaggatataagaataaatctcgtgtcatccaagaagataacagagtttgatcctgctattgtcatctctcccagtgggaagtacaatgctgtcaagcttggtaaatatgaagattcaaattcagtgacatgttcagttcaacacgacaataaaactgtgcactccactgactttgaagtgaagacagattctacagatcacgtaaaaccaaaggaaactgaaaacacaaagcaaccttcaaagagctgccataaacccaaagccatagttcataccgagaaggtgaacatgatgtccctcacagtgcttgggctacgaatgctgtttgcaaagactgttgccgtcaattttctcttgactgccaagttatttttcttgtaaggctgactggcatgaggaagctacactcctgaagaaaccaaaggcttacaaaaatgcatctccttggcttctgacttctttgtgattcaagttgacctgtcatagccttgttaaaatggctgctagccaaaccactttttcttcaaagacaacaaacccagctcatcctccagcttgatgggaagacaaaagtcctggggaaggggggtttatgtcctaactgctttgtatgctgttttataaagggatagaaggatataaaaagatataggactctttttttactcct

SEQ ID NO: 23846 - protein, 288 aa, Homo sapiens
MSLSSLLKVVTASLWLGPGIAQKITQTQPGMFVQEKEAVTLDCTYDTSDQSYGLFWYKQPSSGEMIFLIYQGSYDEQNATEGRYSLNFQKARKSANLVISASQLGDSAMYFCAMRCCDTDKLIFGKGTRVTVEPRSQPHTKPSVFVMKNGTNVACLVKEFYPKDIRINLVSSKKITEFDPAIVISPSGKYNAVKLGKYEDSNSVTCSVQHDNKTVHSTDFEVKTDSTDHVKPKETENTKQPSKSCHKPKAIVHTEKVNMMSLTVLGLRMLFAKTVAVNFLLTAKLFFL

SEQ ID NO: 23847 - DNA, 1988 bp, Homo sapiens
gttcacctcacagtacagagtcctgaaaataaagaagaagatttttttttatctagaaaaggaaccaaacatgtcactttctagcctgctgaaggtggtcacagcttcactgtggctaggacctggcattgcccagaagataactcaaacccaaccaggaatgttcgtgcaggaaaaggaggctgtgactctggactgcacatatgacaccagtgatcaaagttatggtctattctggtacaagcagcccagcagtggggaaatgatttttcttatttatcaggggtcttatgacgagcaaaatgcaacagaaggtcgctactcattgaatttccagaaggcaagaaaatccgccaaccttgtcatctccgcttcacaactgggggactcagcaatgtatttctgtgcaatgagatgctgtgacaccgataaactcatctttggaaaaggaacccgtgtgactgtggaaccaagaagtcagcctcataccaaaccatccgtttttgtcatgaaaaatggaacaaatgtcgcttgtctggtgaaggaattctaccccaaggatataagaataaatctcgtgtcatccaagaagataacagagtttgatcctgctattgtcatctctcccagtgggaagtacaatgctgtcaagcttggtaaatatgaagattcaaattcagtgacatgttcagttcaacacgacaataaaactgtgcactccactgactttgaagtgaagacagattctacagatcacgtaaaaccaaaggaaactgaaaacacaaagcaaccttcaaagagctgccataaacccaaagccatagttcataccgagaaggtgaacatgatgtccctcacagtgcttgggctacgaatgctgtttgcaaagactgttgccgtcaattttctcttgactgccaagttatttttcttgtaaggctgactggcatgaggaagctacactcctgaagaaaccaaaggcttacaaaaatgcatctccttggcttctgacttctttgtgattcaagttgacctgtcatagccttgttaaaatggctgctagccaaaccactttttcttcaaagacaacaaacccagctcatcctccagcttgatgggaagacaaaagtcctggggaaggggggtttatgtcctaactgctttgtatgctgttttataaagggatagaaggatataaaaagatataggactctttttttactcctacaagtgatacactttgaaaatgatgttttgttccttttgactttctttaccttttgaagtagaaagtgggaaccaacaggttcacagcttcattcctcatgaggcaaataggccttgggagaagaagagcgggtgcccttttatctaaacatggaaggctctgctcaactgagcactagatttgctacaaaccagcatcatcttcttcctcctgtcctcacggcttgtcccaccctctatgttcacttcaggagccacactagagattctgcatggcgtggaggaggacaaagtttcagcactttctgcctctcctaatactttacaaatgagattacatttgaatttgctaatactttatgagcaggcaatgaggtttccaaaatctcatctaaatactctccaatctattagcaaaaatcagagtaaaatacagaggaaaggcactgctttctgttaattgatttaacatgcatgaattagctccctctgagttccaggcactatgctgagagtacaaagaagacacaagtctgctttcaagcaactcactgtgaaagtgtttttgaagggaggaacagaaatgagacccctatctttccctataaaaacaacatttttactgtcttttgcctgccaatctgtatttgaaaccattggacactgattctctggcctgggactttggcattgatggttttctgcctttcttctcagcctctgcctctattgcatttattaaactgcattgtgtgcacctc

SEQ ID NO: 23848 - protein, 288 aa, Homo sapiens; identical to SEQ ID NO: 23846

SEQ ID NO: 23849 - DNA, 624 bp, Homo sapiens
gtagctcgttgatatctgtgtggatagggagctgtgacgagagcaagaggtcagaacacatccaggctccttaagggaaagcctctttctgtttctgaaacttttcaaagccagggacttgtccaatccaacctcctcacagttcctagctcctgaggctcagcgcccttggcttctgtccgcccagctcaaggtcctgcagcattgccactgctcagccatgctcctgctgctcgtcccagcgttccaggtgatttttaccctgggaggaaccagagcccagtctgtgacccagcttgacagccaagtccctgtctttgaagaagcccctgtggagctgaggtgcaactactcatcgtctgtttcagtgtatctcttctggtatgtgcaataccccaaccaaggactccagcttctcctgaagtatttatcaggatccaccctggttaaaggcatcaacggttttgaggctgaatttaacaagagtcaaacttccttccacttgaggaaaccctcagtccatataagcgacacggctgagtacttctgtgctgtgagtgacacatcagggcggatctgaaaagctggtctttggaaagggaacgaaactgacagtaaacccat

SEQ ID NO: 23850 - protein, 119 aa, Homo sapiens
MLLLLVPAFQVIFTLGGTRAQSVTQLDSQVPVFEEAPVELRCNYSSSVSVYLFWYVQYPNQGLQLLLKYLSGSTLVKGINGFEAEFNKSQTSFHLRKPSVHISDTAEYFCAVSDTSGRI

SEQ ID NO: 23851 - DNA, 1789 bp, Homo sapiens
gattttgtagaagattccgccaaagactcaacaacataaagaaatatatatacctttcggtttggatatctctcaacaaaaccttctactgcttctcagccagccatgctgtctgcttcctgctcaggacttgtgatcttgttgatattcagaaggaccagtggagactcggttacccagacagaaggcccagttaccctccctgagagggcagctctgacattaaactgcacttatcagtccagctattcaacttttctattctggtatgtccagtatctaaacaaagagcctgagctcctcctgaaaagttcagaaaaccaggagacggacagcagaggttttcaggccagtcctatcaagagtgacagttccttccacctggagaagccctcggtgcagctgtcggactctgccgtgtactactgcgctctgagagacagagtgggagggactgcagcgagagcccagcacaaaccctggggaacgcagtatccagcatggctcagaaggtaactcaagcgcagactgaaatttctgtggtggagaaggaggatgtgaccttggactgtgtgtatgaaacccgtgatactacttattacttattctggtacaagcaaccaccaagtggagaattggttttccttattcgtcggaactcttttgatgagcaaaatgaaataagtggtcggtattcttggaacttccagaaatccaccagttccttcaacttcaccatcacagcctcacaagtcctcaggaacctacaaatacatctttggaacaggcaccaggctgaaggttttagcaaatatccagaaccctgaccctgccgtgtaccagctgagagactctaaatccagtgacaagtctgtctgcctattcaccgattttgattctcaaacaaatgtgtcacaaagtaaggattctgatgtgtatatcacagacaaaactgtgctagacatgaggtctatggacttcaagagcaacagtgctgtggcctggagcaacaaatctgactttgcatgtgcaaacgccttcaacaacagcattattccagaagacaccttcttccccagcccagaaagttcctgtgatgtcaagctggtcgagaaaagctttgaaacagatacgaacctaaactttcaaaacctgtcagtgattgggttccgaatcctcctcctgaaagtggccgggtttaatctgctcatgacgctgcggctgtggtccagctgagatctgcaagattgtaagacagcctgtgctccctcgctccttcctctgcattgcccctcttctccctctccaaacagagggaactctcctacccccaaggaggtgaaagctgctaccacctctgtgcccccccggcaatgcaccaactggatcctacccgaatttatgattaagattgctgaagagctgccaaacactgctgccaccccctctgttcccttattgctgcttgtcactgcctgacattcacggcagaggcaaggctgctgcagctccgctggctgtgcacattccctcctgctccccagagactgcctccgccatcccacagatgatggatcttcagtgggttctcttgggctctaggtcccggagaatgttgtgaggggtttatttttttttaatagtgttcataaagaaagacatagtattcttcttctcaagacgtggggggaaattatctcattatcgaggccctgctatgctgtgtgtctgggcgtgttgtatgtcctgctgccgatgccttcattaaaatgatttggaagagcagaga

SEQ ID NO: 23852 - protein, 136 aa, Homo sapiens [sequence omitted]

SEQ ID NO: 23853 - DNA, 1504 bp, Homo sapiens
gtaaaaggcagaagcctcacacagcccagtaactttgctagtacctcttgagtgcaaggtggagaattaagatctggatttgagacggagcacggaacatttcactcaggggaagagctatgaacatgctgactgccagcctgttgagggcagtcatagcctccatctgtgttgtatccagcatggctcagaaggtaactcaagcgcagactgaaatttctgtggtggagaaggaggatgtgaccttggactgtgtgtatgaaacccgtgatactacttattacttattctggtacaagcaaccaccaagtggagaattggttttccttattcgtcggaactcttttgatgagcaaaatgaaataagtggtcggtattcttggaacttccagaaatccaccagttccttcaacttcaccatcacagcctcacaagtcgtggactcagcagtatacttctgtgctctgagtgagcagtgcttccaagataatctttggatcagggaccagactcagcatccggccaaatatccagaaccctgaccctgccgtgtaccagctgagagactctaaatccagtgacaagtctgtctgcctattcaccgattttgattctcaaacaaatgtgtcacaaagtaaggattctgatgtgtatatcacagacaaaactgtgctagacatgaggtctatggacttcaagagcaacagtgctgtggcctggagcaacaaatctgactttgcatgtgcaaacgccttcaacaacagcattattccagaagacaccttcttccccagcccagaaagttcctgtgatgtcaagctggtcgagaaaagctttgaaacagatacgaacctaaactttcaaaacctgtcagtgattgggttccgaatcctcctcctgaaagtggccgggtttaatctgctcatgacgctgcggctgtggtccagctgagatctgcaagattgtaagacagcctgtgctccctcgctccttcctctgcattgcccctcttctccctctccaaacagagggaactctcctacccccaaggaggtgaaagctgctaccacctctgtgcccccccggcaatgcaccaactggatcctacccgaatttatgattaagattgctgaagagctgccaaacactgctgccaccccctctgttcccttattgctgcttgtcactgcctgacattcacggcagaggcaaggctgctgcagctccgctggctgtgcacattccctcctgctccccagagactgcctccgccatcccacagatgatggatcttcagtgggttctcttgggctctaggtcccggagaatgttgtgaggggtttatttttttttaatagtgttcataaagaaagacatagtattcttcttctcaagacgtggggggaaattatctcattatcgaggccctgctatgctgtgtgtctgggcgtgttgtatgtcctgctgccgatgccttcattaaaatgatttggaagagcagaga

SEQ ID NO: 23854 - protein, 140 aa, Homo sapiens
MNMLTASLLRAVIASICVVSSMAQKVTQAQTEISVVEKEDVTLDCVYETRDTTYYLFWYKQPPSGELVFLIRRNSFDEQNEISGRYSWNFQKSTSSFNFTITASQVVDSAVYFCALSEQCFQDNLWIRDQTQHPAKYPEP

SEQ ID NO: 23855 - DNA, 1472 bp, Homo sapiens
gcattacagaatatgaactaagatacagaagtggcgcctctgagaaaagaaggttggaattatcgtaatttgtttctaggctgagataccagcatggagaaaatgttggagtgtgcattcatagtcttgtggcttcagcttggctggttgagtggagaagaccaggtgacgcagagtcccgaggccctgagactccaggagggagagagtagcagtcttaactgcagttacacagtcagcggtttaagagggctgttctggtataggcaagatcctgggaaaggccctgaattcctcttcaccctgtattcagctggggaagaaaaggagaaagaaaggctaaaagccacattaacaaagaaggaaagctttctgcacatcacagcccctaaacctgaagactcagccacttatctctgtgctgtgcaggcacagcggaggaagccaaggaaatctcatctttggaaaaggcactaaactctctgttaaaccaaatatccagaaccctgaccctgccgtgtaccagctgagagactctaaatccagtgacaagtctgtctgcctattcaccgattttgattctcaaacaaatgtgtcacaaagtaaggattctgatgtgtatatcacagacaaaactgtgctagacatgaggtctatggacttcaagagcaacagtgctgtggcctggagcaacaaatctgactttgcatgtgcaaacgccttcaacaacagcattattccagaagacaccttcttccccagcccagaaagttcctgtgatgtcaagctggtcgagaaaagctttgaaacagatacgaacctaaactttcaaaacctgtcagtgattgggttccgaatcctcctcctgaaagtggccgggtttaatctgctcatgacgctgcggctgtggtccagctgagatctgcaagattgtaagacagcctgtgctccctcgctccttcctctgcattgcccctcttctccctctccaaacagagggaactctcctacccccaaggaggtgaaagctgctaccacctctgtgcccccccggcaatgcaccaactggatcctacccgaatttatgattaagattgctgaagagctgccaaacactgctgccaccccctctgttcccttattgctgcttgtcactgcctgacattcacggcagaggcaaggctgctgcagctccgctggctgtgcacattccctcctgctccccagagactgcctccgccatcccacagatgatggatcttcagtgggttctcttgggctctaggtcccggagaatgttgtgaggggtttatttttttttaatagtgttcataaagaaagacatagtattcttcttctcaagacgtggggggaaattatctcattatcgaggccctgctatgctgtgtgtctgggcgtgttgtatgtcctgctgccgatgccttcattaaaatgatttggaagagcagaga

SEQ ID NO: 23856 - protein, 127 aa, Homo sapiens
MEKMLECAFIVLWLQLGWLSGEDQVTQSPEALRLQEGESSSLNCSYTVSGLRGLFWYRQDPGKGPEFLFTLYSAGEEKEKERLKATLTKKESFLHITAPKPEDSATYLCAVQAQRRKPRKSHLWKRH

SEQ ID NO: 23857 - DNA, 478 bp, Homo sapiens
aaagcagagtgtttatcttgtgagccattctccatatttcagatataagatttcagttctcagtgagtctaagtgacagaaggaatggagaccctcttgggcctgcttatcctttggctgcagctgcaatgggtgagcagcaaacaggaggtgacgcagattcctgcagctctgagtgtcccagaaggagaaaacttggttctcaactgcagtttcactgatagcgctatttacaacctccagtggtttaggcaggaccctgggaaaggtctcacatctctgttgcttattcagtcaagtcagagagagcaaacaagtggaagacttaatgcctcgctggataaatcatcaggacgtagtactttatacattgcagcttctcagcctggtgactcagccacctacctctgtgctggtgtggacacgggcaggagagcacttacttttgggagtggaacaagactccaagtgcaaccaa

SEQ ID NO: 23858 - protein, 130 aa, Homo sapiens
METLLGLLILWLQLQWVSSKQEVTQIPAALSVPEGENLVLNCSFTDSAIYNLQWFRQDPGKGLTSLLLIQSSQREQTSGRLNASLDKSSGRSTLYIAASQPGDSATYLCAGVDTGRRALTFGSGTRLQVQ

SEQ ID NO: 23859 - DNA, 478 bp, Homo sapiens
agagtgtttatcttgtgagccattctccatatttcagatataagatttcagttctcagtgagtctaagtgacagaaggaatggagaccctcttgggcctgcttatcctttggctgcagctgcaatgggtgagcagcaaacaggaggtgacgcagattcctgcagctctgagtgtcccagaaggagaaaacttggttctcaactgcagtttcactgatagcgctatttacaacctccagtggtttaggcaggaccctgggaaaggtctcacatctctgttgcttattcagtcaagtcagagagagcaaacaagtggaagacttaatgcctcgctggataaatcatcaggacgtagtactttatacattgcagcttctcagcctggtgactcagccacctacctctgtgctgtgaggcacatggaggtagcaactataaactgacatttggaaaaggaactctcttaaccgtgaatccaa

SEQ ID NO: 23860 - protein, 120 aa, Homo sapiens
METLLGLLILWLQLQWVSSKQEVTQIPAALSVPEGENLVLNCSFTDSAIYNLQWFRQDPGKGLTSLLLIQSSQREQTSGRLNASLDKSSGRSTLYIAASQPGDSATYLCAVRHMEVATIN

SEQ ID NO: 23861 - DNA, 542 bp, Homo sapiens
gagcaggctttgtcgggtggagctgattggttgcaggagcagcaacagttccagagccaagtcatgacaccgacctccccaaggtttagttaaatatatcttatggtgaaaatgcccggagcaagaaggcaaagcatcatgaagaggatattgggagctctgctggggctcttgagtgcccaggtttgctgtgtgagaggaatacaagtggagcagagtcctccagacctgattctccaggagggagccaattccacgctgcggtgcaatttttctgactctgtgaacaatttgcagtggtttcatcaaaacccttggggacagctcatcaacctgttttacattccctcagggacaaaacagaatggaagattaagcgccacgactgtcgctacggaacgctacagcttattgtacatttcctcttcccagaccacagactcaggcgtttatttctgtgctgtggagccacagtgtctggggctgggagttaccaactcactttcgggaaggggaccaaactctcggtcataccaagtaag

SEQ ID NO: 23862 - protein, 145 aa, Homo sapiens
MVKMPGARRQSIMKRILGALLGLLSAQVCCVRGIQVEQSPPDLILQEGANSTLRCNFSDSVNNLQWFHQNPWGQLINLFYIPSGTKQNGRLSATTVATERYSLLYISSSQTTDSGVYFCAVEPQCLGLGVTNSLSGRGPNSRSYQ

SEQ ID NO: 23863 - DNA, 430 bp, Homo sapiens
aatatatcttatggtgaaaatgcccggagcaagaaggcaaagcatcatgaagaggatattgggagctctgctggggctcttgagtgcccaggtttgctgtgtgagaggaatacaagtggagcagagtcctccagacctgattctccaggagggagccaattccacgctgcggtgcaatttttctgactctgtgaacaatttgcagtggtttcatcaaaacccttggggacagctcatcaacctgttttacattccctcagggacaaaacagaatggaagattaagcgccacgactgtcgctacggaacgctacagcttattgtacatttcctcttcccagaccacagactcaggcgtttatttctgtgtgtgtcttataacaccgacaagctcatctttgggactgggaccagattacaagtctttccaa

SEQ ID NO: 23864 - protein, 139 aa, Homo sapiens
MVKMPGARRQSIMKRILGALLGLLSAQVCCVRGIQVEQSPPDLILQEGANSTLRCNFSDSVNNLQWFHQNPWGQLINLFYIPSGTKQNGRLSATTVATERYSLLYISSSQTTDSGVYFCVCLITPTSSSLGLGPDYKSF

SEQ ID NO: 23865 - DNA, 580 bp, Homo sapiens
gacagagacagctttaagtgaaagcacttgtgaaagggcggggcctgctgaaagaattcagttgagggtgaatttacagagtttcagctggttgggaagactggaagaccacctgggctgtcattgagctctggtgccaggaggaatggacaagatcttaggagcatcatttttagttctgtggcttcaactatgctgggtgagtggccaacagaaggagaaaagtgaccagcagcaggtgaaacaaagtcctcaatctttgatagtccagaaaggagggatttcaattataaactgtgcttatgagaacactgcgtttgactactttccatggtaccaacaattccctgggaaaggccctgcattattgatagccatacgtccagatgtgagtgaaaagaaagaaggaagattcacaatctccttcaataaaagtgccaagcagttctcattgcatatcatggattcccagcctggagactcagccacctacttctgtgcagcaagcacacagtggctggtggtactagctatggaaagctgacatttggacaagggaccatcttgactgtccatccaa

SEQ ID NO: 23866 - protein, 132 aa, Homo sapiens
MDKILGASFLVLWLQLCWVSGQQKEKSDQQQVKQSPQSLIVQKGGISIINCAYENTAFDYFPWYQQFPGKGPALLIAIRPDVSEKKEGRFTISFNKSAKQFSLHIMDSQPGDSATYFCAASTQWLVVLAMES

SEQ ID NO: 23867 - DNA, 479 bp, Homo sapiens
agctggttgggaagactggaagaccacctgggctgtcattgagctctggtgccaggaggaatggacaagatcttaggagcatcatttttagttctgtggcttcaactatgctgggtgagtggccaacagaaggagaaaagtgaccagcagcaggtgaaacaaagtcctcaatctttgatagtccagaaaggagggatttcaattataaactgtgcttatgagaacactgcgtttgactactttccatggtaccaacaattccctgggaaaggccctgcattattgatagccatacgtccagatgtgagtgaaaagaaagaaggaagattcacaatctccttcaataaaagtgccaagcagttctcattgcatatcatggattcccagcctggagactcagccacctacttctgtgcagcaagtggggcaaacaacctcttctttgggactggaacgagactcaccgttattcccctgta

SEQ ID NO: 23868 - protein, 138 aa, Homo sapiens
MDKILGASFLVLWLQLCWVSGQQKEKSDQQQVKQSPQSLIVQKGGISIINCAYENTAFDYFPWYQQFPGKGPALLIAIRPDVSEKKEGRFTISFNKSAKQFSLHIMDSQPGDSATYFCAASGANNLFFGTGTRLTVIP

SEQ ID NO: 23869 - DNA, 1202 bp, Homo sapiens
actgaactttgagcttcaggcagcacaactcacatttgtgcaaagagctacatgccacatgctgttctccagcctgctgtgtgtatttgtggccttcagctactctggatcaagtgtggcccagaaggttactcaagcccagtcatcagtatccatgccagtgaggaaagcagtcaccctgaactgcctgtatgaaacaagttggtggtcatattatattttttggtacaagcaacttcccagcaaagagatgattttccttattcgccagggttctgatgaacagaatgcaaaaagtggtcgctattctgtcaacttcaagaaagcagcgaaatccgtcgccttaaccatttcagccttacagctagaagattcagcaaagtacttttgtgctcttggggccgataaactcatctttggaaaaggaacccgtgtgactgtggaaccaagaagtcagcctcataccaaaccatccgtttttgtcatgaaaaatggaacaaatgtcgcttgtctggtgaaggaattctaccccaaggatataagaataaatctcgtgtcatccaagaagataacagagtttgatcctgctattgtcatctctcccagtgggaagtacaatgctgtcaagcttggtaaatatgaagattcaaattcagtgacatgttcagttcaacacgacaataaaactgtgcactccactgactttgaagtgaagacagattctacagatcacgtaaaaccaaaggaaactgaaaacacaaagcaaccttcaaagagctgccataaacccaaagccatagttcataccgagaaggtgaacatgatgtccctcacagtgcttgggctacgaatgctgtttgcaaagactgttgccgtcaattttctcttgactgccaagttatttttcttgtaaggctgactggcatgaggaagctacactcctgaagaaaccaaaggcttacaaaaatgcatctccttggcttctgacttctttgtgattcaagttgacctgtcatagccttgttaaaatggctgctagccaaaccactttttcttcaaagacaacaaacccagctcatcctccagcttgatgggaagacaaaagtcctggggaaggggggtttatgtcctaactgctttgtatgctgttttataaagggatagaaggatataaaaagatataggactctttttttactcct

SEQ ID NO: 23870 - protein, 284 aa, Homo sapiens
MLFSSLLCVFVAFSYSGSSVAQKVTQAQSSVSMPVRKAVTLNCLYETSWWSYYIFWYKQLPSKEMIFLIRQGSDEQNAKSGRYSVNFKKAAKSVALTISALQLEDSAKYFCALGADKLIFGKGTRVTVEPRSQPHTKPSVFVMKNGTNVACLVKEFYPKDIRINLVSSKKITEFDPAIVISPSGKYNAVKLGKYEDSNSVTCSVQHDNKTVHSTDFEVKTDSTDHVKPKETENTKQPSKSCHKPKAIVHTEKVNMMSLTVLGLRMLFAKTVAVNFLLTAKLFFL

SEQ ID NO: 23871 - DNA, 1964 bp, Homo sapiens
actgaactttgagcttcaggcagcacaactcacatttgtgcaaagagctacatgccacatgctgttctccagcctgctgtgtgtatttgtggccttcagctactctggatcaagtgtggcccagaaggttactcaagcccagtcatcagtatccatgccagtgaggaaagcagtcaccctgaactgcctgtatgaaacaagttggtggtcatattatattttttggtacaagcaacttcccagcaaagagatgattttccttattcgccagggttctgatgaacagaatgcaaaaagtggtcgctattctgtcaacttcaagaaagcagcgaaatccgtcgccttaaccatttcagccttacagctagaagattcagcaaagtacttttgtgctcttggggccgataaactcatctttggaaaaggaacccgtgtgactgtggaaccaagaagtcagcctcataccaaaccatccgtttttgtcatgaaaaatggaacaaatgtcgcttgtctggtgaaggaattctaccccaaggatataagaataaatctcgtgtcatccaagaagataacagagtttgatcctgctattgtcatctctcccagtgggaagtacaatgctgtcaagcttggtaaatatgaagattcaaattcagtgacatgttcagttcaacacgacaataaaactgtgcactccactgactttgaagtgaagacagattctacagatcacgtaaaaccaaaggaaactgaaaacacaaagcaaccttcaaagagctgccataaacccaaagccatagttcataccgagaaggtgaacatgatgtccctcacagtgcttgggctacgaatgctgtttgcaaagactgttgccgtcaattttctcttgactgccaagttatttttcttgtaaggctgactggcatgaggaagctacactcctgaagaaaccaaaggcttacaaaaatgcatctccttggcttctgacttctttgtgattcaagttgacctgtcatagccttgttaaaatggctgctagccaaaccactttttcttcaaagacaacaaacccagctcatcctccagcttgatgggaagacaaaagtcctggggaaggggggtttatgtcctaactgctttgtatgctgttttataaagggatagaaggatataaaaagatataggactctttttttactcctacaagtgatacactttgaaaatgatgttttgttccttttgactttctttaccttttgaagtagaaagtgggaaccaacaggttcacagcttcattcctcatgaggcaaataggccttgggagaagaagagcgggtgcccttttatctaaacatggaaggctctgctcaactgagcactagatttgctacaaaccagcatcatcttcttcctcctgtcctcacggcttgtcccaccctctatgttcacttcaggagccacactagagattctgcatggcgtggaggaggacaaagtttcagcactttctgcctctcctaatactttacaaatgagattacatttgaatttgctaatactttatgagcaggcaatgaggtttccaaaatctcatctaaatactctccaatctattagcaaaaatcagagtaaaatacagaggaaaggcactgctttctgttaattgatttaacatgcatgaattagctccctctgagttccaggcactatgctgagagtacaaagaagacacaagtctgctttcaagcaactcactgtgaaagtgtttttgaagggaggaacagaaatgagacccctatctttccctataaaaacaacatttttactgtcttttgcctgccaatctgtatttgaaaccattggacactgattctctggcctgggactttggcattgatggttttctgcctttcttctcagcctctgcctctattgcatttattaaactgcattgtgtgcacctc

SEQ ID NO: 23872 - protein, 284 aa, Homo sapiens; identical to SEQ ID NO: 23870

SEQ ID NO: 23873 - DNA, 527 bp, Homo sapiens
gcagtcacctctttccctttctttccaaaatgcacacatctactttccaaaatagaccgcaactatttctattgatctggaagaagcttgtaccaggcaacccatttaggagaagttggatgaagagggagagggagatgctactcatcacatcaatgttggtcttatggatgcaattgtcacaggtgaatggacaacaggtaatgcaaattcctcagtaccagcatgtacaagaaggagaggacttcaccacgtactgcaattcctcaactactttaagcaatatacagtggtataagcaaaggcctggtggacatcccgtttttttgatacagttagtgaagagtggagaagtgaagaagcagaaaagactgacatttcagtttggagaagcaaaaaagaacagctccctgcacatcacagccacccagactacagatgtaggaacctacttctgtgcagggcacagtgtggcaacaaccgtaagctgatttggggattgggaacaagcctggcagtaaatccga

SEQ ID NO: 23874 - protein, 153 aa, Homo sapiens
MHTSTFQNRPQLFLLIWKKLVPGNPFRRSWMKREREMLLITSMLVLWMQLSQVNGQQVMQIPQYQHVQEGEDFTTYCNSSTTLSNIQWYKQRPGGHPVFLIQLVKSGEVKKQKRLTFQFGEAKKNSSLHITATQTTDVGTYFCAGHSVATTVS

SEQ ID NO: 23875 - DNA, 581 bp, Homo sapiens
aggaacatgactaaacctggggaggaagacatagaaaagcaactgctctatcattggctgacaagatcctgacaacaacacaatgagagctgcactccttgcaagtctttactagtagctgttgcttctgttctctggaaattctttaaacctagaatcagacacaaaaactgaactctgggtccacaatcctcatttgtccttgaagtatgaggctggtggcaagagtaactgtgtttctgacctttggaactataattgatgctaagaccacccagcccccctccatggattgcgctgaaggaagagctgcaaacctgccttgtaatcactctaccatcagtggaaatgagtatgtgtattggtatcgacagattcactcccaggggccacagtatatcattcatggtctaaaaaacaatgaaaccaatgaaatggcctctctgatcatcacagaagacagaaagtccagcaccttgatcctgccccacgctacgctgagagacactgctgtgtactattgcatcgaggaagctacatacctacatttggaagaggaaccagccttattgttcatccgt

SEQ ID NO: 23876 - protein, 123 aa, Homo sapiens
MRLVARVTVFLTFGTIIDAKTTQPPSMDCAEGRAANLPCNHSTISGNEYVYWYRQIHSQGPQYIIHGLKNNETNEMASLIITEDRKSSTLILPHATLRDTAVYYCIEEATYLHLEEEPALLFI

SEQ ID NO: 23877 - DNA, 1351 bp, Homo sapiens
aaacctggggaggaagacatagaaaagcaactgctctatcattggctgacaagatcctgacaacaacacaatgagagctgcactccttgcaagtctttactagtagctgttgcttctgttctctggaaattctttaaacctagaatcagacacaaaaactgaactctgggtccacaatcctcatttgtccttgaagtatgaggctggtggcaagagtaactgtgtttctgacctttggaactataattgatgctaagaccacccagcccccctccatggattgcgctgaaggaagagctgcaaacctgccttgtaatcactctaccatcagtggaaatgagtatgtgtattggtatcgacagattcactcccaggggccacagtatatcattcatggtctaaaaaacaatgaaaccaatgaaatggcctctctgatcatcacagaagacagaaagtccagcaccttgatcctgccccacgctacgctgagagacactgctgtgtactattgcatcgtcagatgaataataatgcaggcaacatgctcacctttggagggggaacaaggttaatggtcaaaccccatatccagaaccctgaccctgccgtgtaccagctgagagactctaaatccagtgacaagtctgtctgcctattcaccgattttgattctcaaacaaatgtgtcacaaagtaaggattctgatgtgtatatcacagacaaaactgtgctagacatgaggtctatggacttcaagagcaacagtgctgtggcctggagcaacaaatctgactttgcatgtgcaaacgccttcaacaacagcattattccagaagacaccttcttccccagcccagaaagttcctgtgatgtcaagctggtcgagaaaagctttgaaacagatacgaacctaaactttcaaaacctgtcagtgattgggttccgaatcctcctcctgaaagtggccgggtttaatctgctcatgacgctgcggctgtggtccagctgagatctgcaagattgtaagacagcctgtgctccctcgctccttcctctgcattgcccctcttctccctctccaaacagagggaatccctcctgctccccagagactgcctccgccatcccacagatgatggatcttcagtgggttctcttgggctctaggtcccggagaatgttgtgaggggtttatttttttttaatagtgttcataaagaaagacatagtattcttcttctcaagacgtggggggaaattatctcattatcgaggccctgctatgctgtgtgtctgggcgtgttgtatgtcctgctgccgatgccttcattaaaatgatttggaagagcag

SEQ ID NO: 23878 - protein, 162 aa, Homo sapiens
MNNNAGNMLTFGGGTRLMVKPHIQNPDPAVYQLRDSKSSDKSVCLFTDFDSQTNVSQSKDSDVYITDKTVLDMRSMDFKSNSAVAWSNKSDFACANAFNNSIIPEDTFFPSPESSCDVKLVEKSFETDTNLNFQNLSVIGFRILLLKVAGFNLLMTLRLWSS

SEQ ID NO: 23879 - DNA, 1466 bp, Homo sapiens
gtgggtggcagcaagcactcttctagcccagagaagtctgttccaggacgggctctttcaggagcagctaaagtcaggggccatgtccaccatgtgatagaaagacaagatggtcctgaaattctccgtgtccattctttggattcagttggcatgggtgagcacccagctgctggagcagagccctcagtttctaagcatccaagagggagaaaatctcactgtgtactgcaactcctcaagtgttttttccagcttacaatggtacagacaggagcctggggaaggtcctgtcctcctggtgacagtagttacgggtggagaagtgaagaagctgaagagactaacctttcagtttggtgatgcaagaaaggacagttctctccacatcactgcagcccagcctggtgatacaggcctctacctctctaactttggaaatgagaaattaacctttgggactggaacaagactcaccatcatacccaatatccagaaccctgaccctgccgtgtaccagctgagagactctaaatccagtgacaagtctgtctgcctattcaccgattttgattctcaaacaaatgtgtcacaaagtaaggattctgatgtgtatatcacagacaaaactgtgctagacatgaggtctatggacttcaagagcaacagtgctgtggcctggagcaacaaatctgactttgcatgtgcaaacgccttcaacaacagcattattccagaagacaccttcttccccagcccagaaagttcctgtgatgtcaagctggtcgagaaaagctttgaaacagatacgaacctaaactttcaaaacctgtcagtgattgggttccgaatcctcctcctgaaagtggccgggtttaatctgctcatgacgctgcggctgtggtccagctgagatctgcaagattgtaagacagcctgtgctccctcgctccttcctctgcattgcccctcttctccctctccaaacagagggaactctcctacccccaaggaggtgaaagctgctaccacctctgtgcccccccggcaatgcaccaactggatcctacccgaatttatgattaagattgctgaagagctgccaaacactgctgccaccccctctgttcccttattgctgcttgtcactgcctgacattcacggcagaggcaaggctgctgcagctccgctggctgtgcacattccctcctgctccccagagactgcctccgccatcccacagatgatggatcttcagtgggttctcttgggctctaggtcccggagaatgttgtgaggggtttatttttttttaatagtgttcataaagaaagacatagtattcttcttctcaagacgtggggggaaattatctcattatcgaggccctgctatgctgtgtgtctgggcgtgttgtatgtcctgctgccgatgccttcattaaaatgatttggaagagcagaga

SEQ ID NO: 23880 - protein, 267 aa, Homo sapiens
MVLKFSVSILWIQLAWVSTQLLEQSPQFLSIQEGENLTVYCNSSSVFSSLQWYRQEPGEGPVLLVTVVTGGEVKKLKRLTFQFGDARKDSSLHITAAQPGDTGLYLSNFGNEKLTFGTGTRLTIIPNIQNPDPAVYQLRDSKSSDKSVCLFTDFDSQTNVSQSKDSDVYITDKTVLDMRSMDFKSNSAVAWSNKSDFACANAFNNSIIPEDTFFPSPESSCDVKLVEKSFETDTNLNFQNLSVIGFRILLLKVAGFNLLMTLRLWSS

SEQ ID NO: 23881 - DNA, 1511 bp, Homo sapiens
gttcatatgtaaaatgaagggtctgtggaaggacatgaataaagcacaggaggttgaagtcagatttgcagctttctaggcaggagacaagacaatctgcatcttcacaggagggatggccatgctcctgggggcatcagtgctgattctgtggcttcagccagactgggtaaacagtcaacagaagaatgatgaccagcaagttaagcaaaattcaccatccctgagcgtccaggaaggaagaatttctattctgaactgtgactatactaacagcatgtttgattatttcctatggtacaaaaaataccctgctgaaggtcctacattcctgatatctataagttccattaaggataaaaatgaagatggaagattcactgtcttcttaaacaaaagtgccaagcacctctctctgcacattgtgccctcccagcctggagactctgcagtgtacttctgtgcagcaagcgcacacggcactgccagtaaactcacctttgggactggaacaagacttcaggtcacgctcgatatccagaaccctgaccctgccgtgtaccagctgagagactctaaatccagtgacaagtctgtctgcctattcaccgattttgattctcaaacaaatgtgtcacaaagtaaggattctgatgtgtatatcacagacaaaactgtgctagacatgaggtctatggacttcaagagcaacagtgctgtggcctggagcaacaaatctgactttgcatgtgcaaacgccttcaacaacagcattattccagaagacaccttcttccccagcccagaaagttcctgtgatgtcaagctggtcgagaaaagctttgaaacagatacgaacctaaactttcaaaacctgtcagtgattgggttccgaatcctcctcctgaaagtggccgggtttaatctgctcatgacgctgcggctgtggtccagctgagatctgcaagattgtaagacagcctgtgctccctcgctccttcctctgcattgcccctcttctccctctccaaacagagggaactctcctacccccaaggaggtgaaagctgctaccacctctgtgcccccccggcaatgcaccaactggatcctacccgaatttatgattaagattgctgaagagctgccaaacactgctgccaccccctctgttcccttattgctgcttgtcactgcctgacattcacggcagaggcaaggctgctgcagctccgctggctgtgcacattccctcctgctccccagagactgcctccgccatcccacagatgatggatcttcagtgggttctcttgggctctaggtcccggagaatgttgtgaggggtttatttttttttaatagtgttcataaagaaagacatagtattcttcttctcaagacgtggggggaaattatctcattatcgaggccctgctatgctgtgtgtctgggcgtgttgtatgtcctgctgccgatgccttcattaaaatgatttggaagagcagaga

SEQ ID NO: 23882 - protein, 280 aa, Homo sapiens
MAMLLGASVLILWLQPDWVNSQQKNDDQQVKQNSPSLSVQEGRISILNCDYTNSMFDYFLWYKKYPAEGPTFLISISSIKDKNEDGRFTVFLNKSAKHLSLHIVPSQPGDSAVYFCAASAHGTASKLTFGTGTRLQVTLDIQNPDPAVYQLRDSKSSDKSVCLFTDFDSQTNVSQSKDSDVYITDKTVLDMRSMDFKSNSAVAWSNKSDFACANAFNNSIIPEDTFFPSPESSCDVKLVEKSFETDTNLNFQNLSVIGFRILLLKVAGFNLLMTLRLWSS

SEQ ID NO: 23883 - DNA, 524 bp, Homo sapiens
atatgtaaaatgaagggtctgtggaaggacatgaataaagcacaggaggttgaagtcagatttgcagctttctaggcaggagacaagacaatctgcatcttcacaggagggatggccatgctcctgggggcatcagtgctgattctgtggcttcagccagactgggtaaacagtcaacagaagaatgatgaccagcaagttaagcaaaattcaccatccctgagcgtccaggaaggaagaatttctattctgaactgtgactatactaacagcatgtttgattatttcctatggtacaaaaaataccctgctgaaggtcctacattcctgatatctataagttccattaaggataaaaatgaagatggaagattcactgtcttcttaaacaaaagtgccaagcacctctctctgcacattgtgccctcccagcctggagactctgcagtgtacttctgtgcagcaatggaacaccggtaaccagttctattttgggacagggacaagtttgacggtcattccaa

SEQ ID NO: 23884 - protein, 122 aa, Homo sapiens
MAMLLGASVLILWLQPDWVNSQQKNDDQQVKQNSPSLSVQEGRISILNCDYTNSMFDYFLWYKKYPAEGPTFLISISSIKDKNEDGRFTVFLNKSAKHLSLHIVPSQPGDSAVYFCAAMEHR

SEQ ID NO: 23885 - DNA, 450 bp, Homo sapiens
ctgcatcttcacaggagggatggccatgctcctgggggcatcagtgctgattctgtggcttcagccagactgggtaaacagtcaacagaagaatgatgaccagcaagttaagcaaaattcaccatccctgagcgtccaggaaggaagaatttctattctgaactgtgactatactaacagcatgtttgattatttcctatggtacaaaaaataccctgctgaaggtcctacattcctgatatctataagttccattaaggataaaaatgaagatggaagattcactgtcttcttaaacaaaagtgccaagcacctctctctgcacattgtgccctcccagcctggagactctgcagtgtacttctgtgcagcaagcgcacagtgcttgtggggataactatggtcagaattttgtctttggtcccggaaccagattgtccgtgctgccct

SEQ ID NO: 23886 - protein, 125 aa, Homo sapiens
MAMLLGASVLILWLQPDWVNSQQKNDDQQVKQNSPSLSVQEGRISILNCDYTNSMFDYFLWYKKYPAEGPTFLISISSIKDKNEDGRFTVFLNKSAKHLSLHIVPSQPGDSAVYFCAASAQCLWG

SEQ ID NO: 23887 - DNA, 339 bp, Homo sapiens
atgacacgagttagcttgctgtgggcagtcgtggtctccacctgtcttgaatccggcatggcccagacagtcactcagtctcaaccagagatgtctgtgcaggaggcagagactgtgaccctgagttgcacatatgacaccagtgagaataattattatttgttctggtacaagcagcctcccagcaggcagatgattctcgttattcgccaagaagcttataagcaacagaatgcaacggagaatcgtttctctgtgaacttccagaaagcagccaaatccttcagtctcaagatctcagactcacagctgggggacactgcgatgtatttctgtgct

SEQ ID NO: 23888 - protein, 112 aa, Homo sapiens
MTRVSLLWAVVVSTCLESGMAQTVTQSQPEMSVQEAETVTLSCTYDTSENNYYLFWYKQPPSRQMILVIRQEAYKQQNATENRFSVNFQKAAKSFSLKISDSQLGDTAMYFC

SEQ ID NO: 23889 - DNA, 458 bp, Homo sapiens
agaagaggaggcttctcaccctgcagcagggacctgtgagcatggcatgccctggcttcctgtgggcacttgtgatctccacctgtcttgaatttagcatggctcagacagtcactcagtctcaaccagagatgtctgtgcaggaggcagagaccgtgaccctgagctgcacatatgacaccagtgagagtgattattatttattctggtacaagcagcctcccagcaggcagatgattctcgttattcgccaagaagcttataagcaacagaatgcaacagagaatcgtttctctgtgaacttccagaaagcagccaaatccttcagtctcaagatctcagactcacagctgggggatgccgcgatgtatttctgtgcttataggagcgcacatggaggtagcaactataaactgacatttggaaaaggaactctcttaaccgtgaatccaagtaag

SEQ ID NO: 23890 - protein, 138 aa, Homo sapiens
MACPGFLWALVISTCLEFSMAQTVTQSQPEMSVQEAETVTLSCTYDTSESDYYLFWYKQPPSRQMILVIRQEAYKQQNATENRFSVNFQKAAKSFSLKISDSQLGDAAMYFCAYRSAHGGSNYKLTFGKGTLLTVNPS

SEQ ID NO: 23891 - DNA, 335 bp, Homo sapiens
agaaaaaaaaaatgaagaagctactagcaatgattctgtggcttcaactagaccggttaagtggagagctgaaagtggaacaaaaccctctgttcctgagcatgcaggagggaaaaaactataccatctactgcaattattcaaccacttcagacagactgtattggtacaggcaggatcctgggaaaagtctggaatctctgtttgtgttgctatcaaatggagcagtgaagcaggagggacgattaatggcctcacttgataccaaagcccgtctcagcaccctccacatcacagctgccgtgcatgacctctctgccacctacttctgtgcc

SEQ ID NO: 23892 - protein, 107 aa, Homo sapiens
MKKLLAMILWLQLDRLSGELKVEQNPLFLSMQEGKNYTIYCNYSTTSDRLYWYRQDPGKSLESLFVLLSNGAVKQEGRLMASLDTKARLSTLHITAAVHDLSATYFC

SEQ ID NO: 23893 - DNA, 346 bp, Homo sapiens
aacagtgatgccctctgctaggccagagacactaacaatgaactcctctctggactttctaattctgatcttaatgtttggaggaaccagcagcaattcagtcaagcagacgggccaaataaccgtctcggagggagcatctgtgactatgaactgcacatacacatccacggggtaccctacccttttctggtatgtggaataccccagcaaacctctgcagcttcttcagagagagacaatggaaaacagcaaaaacttcggaggcggaaatattaaagacaaaaactcccccattgtgaaatattcagtccaggtatcagactcagccgtgtactactgtctt

SEQ ID NO: 23894 - protein, 112 aa, Homo sapiens
MPSARPETLTMNSSLDFLILILMFGGTSSNSVKQTGQITVSEGASVTMNCTYTSTGYPTLFWYVEYPSKPLQLLQRETMENSKNFGGGNIKDKNSPIVKYSVQVSDSAVYYC

SEQ ID NO: 23895 - DNA, 563 bp, Homo sapiens
aaactgtaaatgttcttaagtgtgcatttctgctgcttctgatgggctgaaaatcccctttgatttctaaagtaaatgtagagacgttttaaaaataaaggactcctttgtccaagatatattccgaaatcctccaacagagacctgtgtgagcttctgctgcagtaataatggtgaagatccggcaatttttgttggctattttgtggcttcagctaagctgtgtaagtgccgccaaaaatgaagtggagcagagtcctcagaacctgactgcccaggaaggagaatttatcacaatcaactgcagttactcggtaggaataagtgccttacactggctgcaacagcatccaggaggaggcattgtttccttgtttatgctgagctcagggaagaagaagcatggaagattaattgccacaataaacatacaggaaaagcacagctccctgcacatcacagcctcccatcccagagactctgccgtctacatctgtgctgtgtaattcagggagcccagaagctggtatttggccaaggaaccaggctgactatcaacccaa

SEQ ID NO: 23896 - protein, 111 aa, Homo sapiens
MVKIRQFLLAILWLQLSCVSAAKNEVEQSPQNLTAQEGEFITINCSYSVGISALHWLQQHPGGGIVSLFMLSSGKKKHGRLIATINIQEKHSSLHITASHPRDSAVYICAV

SEQ ID NO: 23897 - DNA, 403 bp, Homo sapiens
atggtgaagatccggcaatttttgttggctattttgtggcttcagctaagctgtgtaagtgccgccaaaaatgaagtggagcagagtcctcagaacctgactgcccaggaaggagaatttatcacaatcaactgcagttactcggtaggaataagtgccttacactggctgcaacagcatccaggaggaggcattgtttccttgtttatgctgagctcagggaagaagaagcatggaagattaattgccacaataaacatacaggaaaagcacagctccctgcacatcacagcctcccatcccagagactctgccgtctacatctgtgctgtcagacacatggaacaccggtaaccagttctattttgggacagggacaagtttgacggtcattccaagtaag

SEQ ID NO: 23898 - protein, 117 aa, Homo sapiens
MVKIRQFLLAILWLQLSCVSAAKNEVEQSPQNLTAQEGEFITINCSYSVGISALHWLQQHPGGGIVSLFMLSSGKKKHGRLIATINIQEKHSSLHITASHPRDSAVYICAVRHMEHR

SEQ ID NO: 23899 - DNA, 411 bp, Homo sapiens
atggtgaagatccggcaatttttgttggctattttgtggcttcagctaagctgtgtaagtgccgccaaaaatgaagtggagcagagtcctcagaacctgactgcccaggaaggagaatttatcacaatcaactgcagttactcggtaggaataagtgccttacactggctgcaacagcatccaggaggaggcattgtttccttgtttatgctgagctcagggaagaagaagcatggaagattaattgccacaataaacatacaggaaaagcacagctccctgcacatcacagcctcccatcccagagactctgccgtctacatctgtgctgtcagacacatgaattatggaggaagccaaggaaatctcatctttggaaaaggcactaaactctctgttaaaccaagtaag

SEQ ID NO: 23900 - protein, 136 aa, Homo sapiens
MVKIRQFLLAILWLQLSCVSAAKNEVEQSPQNLTAQEGEFITINCSYSVGISALHWLQQHPGGGIVSLFMLSSGKKKHGRLIATINIQEKHSSLHITASHPRDSAVYICAVRHMNYGGSQGNLIFGKGTKLSVKPS

SEQ ID NO: 23901 - DNA, 397 bp, Homo sapiens
atggtgaagatccggcaatttttgttggctattttgtggcttcagctaagctgtgtaagtgccgccaaaaatgaagtggagcagagtcctcagaacctgactgcccaggaaggagaatttatcacaatcaactgcagttactcggtaggaataagtgccttacactggctgcaacagcatccaggaggaggcattgtttccttgtttatgctgagctcagggaagaagaagcatggaagattaattgccacaataaacatacaggaaaagcacagctccctgcacatcacagcctcccatcccagagactctgccgtctacatctgtgctgtcagacacagtgaccgacaagctcatctttgggactgggaccagattacaagtctttccaagtaag

SEQ ID NO: 23902 - protein, 131 aa, Homo sapiens
MVKIRQFLLAILWLQLSCVSAAKNEVEQSPQNLTAQEGEFITINCSYSVGISALHWLQQHPGGGIVSLFMLSSGKKKHGRLIATINIQEKHSSLHITASHPRDSAVYICAVRHSDRQAHLWDWDQITSLSK

SEQ ID NO: 23903 - DNA, 393 bp, Homo sapiens
atggtgaagatccggcaatttttgttggctattttgtggcttcagctaagctgtgtaagtgccgccaaaaatgaagtggagcagagtcctcagaacctgactgcccaggaaggagaatttatcacaatcaactgcagttactcggtaggaataagtgccttacactggctgcaacagcatccaggaggaggcattgtttccttgtttatgctgagctcagggaagaagaagcatggaagattaattgccacaataaacatacaggaaaagcacagctccctgcacatcacagcctcccatcccagagactctgccgtctacatctgtgctgtcagacacaatgacaagatcatctttggaaaagggacacgacttcatattctccccagtaag

SEQ ID NO: 23904 - protein, 130 aa, Homo sapiens
MVKIRQFLLAILWLQLSCVSAAKNEVEQSPQNLTAQEGEFITINCSYSVGISALHWLQQHPGGGIVSLFMLSSGKKKHGRLIATINIQEKHSSLHITASHPRDSAVYICAVRHNDKIIFGKGTRLHILPS

SEQ ID NO: 23905 - DNA, 540 bp, Homo sapiens
gtggcttcagctaagctgtgtaagtgccgccaaaaatgaagtggagcagagtcctcagaacctgactgcccaggaaggagaatttatcacaatcaactgcagttactcggtaggaataagtgccttacactggctgcaacagcatccaggaggaggcattgtttccttgtttatgctgagctcagggaagaagaagcatggaagattaattgccacaataaacatacaggaaaagcacagctccctgcacatcacagcctcccatcccagagactctgccgtctacatctgtgctgtcagacacagtgctccccaggcacctggagcccgtacctaaactctaaagttgaggcatcatttcttactcctgtctttcagacttgtctgtctctatccttggtcagatgatgtaaaatgtttaagtttttaaaatataatattctccccttctagaccatctctcttctctacaacatcatcaccaattatgttaaccagacagtatgtgatttttatcttgaaagtaaaatatacagggta

SEQ ID NO: 23906 - protein, 54 aa, Homo sapiens
MLSSGKKKHGRLIATINIQEKHSSLHITASHPRDSAVYICAVRHSAPQAPGART

SEQ ID NO: 23907 - DNA, 1948 bp, Homo sapiens
gcagaagggtcctgggggtcaatatagtcacgattgctcaactcttcattaagctacaggtttataggttatttgataataagtccagaatgcagctgctgtaggagcttctaatgcacttctctattacttcaagaacactgtgtataataataaactctacagaaataaaccaaatcacaagaagctttcaggtctggaggctgacatttctcaagacagatgaagaacctgaggctcaccttgcttaagtgacttgagcagcttcatgcatcttgtaagtagtagagacagagtcaaaaccagatcttcctgccctctctatcatataaaccacttacactgaattacaaagtgaaactgatctatggtgaattgtactaatgttctgcttctgccatgggcaccagaggagatacctttctttgttgacactaatctcaaaggctaaattagatcccccaaactcatttccattaataacatgtcaaaggcttgtgtcatgcgttaatttatccaaagtgatcttgattctatttacattttggtgccaccttttaatgtcaccatttttataaattaaatatgtaatatataaagccagtcttcacttactgatatgttaatttttaacccaaacttcttagtctgacattccagcaataccggagcattaacagttgataatagctctatgtgctacctctccaagaaacaaatttgcattttaacctgccccttcaatggctgaacttcaaagggtcactgatgaatgccacagcaggttggtgggaatataattctttttatggataatatttgtgtgtgtatgtgtgtgtgtgtgttaaatcctaccacataagtcactaacctatgggtaaggccagtcttgacctaaaatgaggaattctgtaaaatttcaaatgcaaatcacattttatttttgatgttagagaaaactgcaaattggaacagcagagctgtgcctctggccatttcctggaactacagaggagcaacttgccccggtttccagtgggtgatgttcctcttctgccacagtccccagcgatgttgatgtgattgccatcagagctcagaagcacagagcagaatcatcccctggaggaggattcccttcagtgtaagaagttcttacagaattaatcctcaaagactgtgggtggactctgccaggtttttccccgggtgtaccagaagagaggaagagccctcaaatacaggaaagtgctcttttcagtgacagtatttcttttgggccctgtggctaagtgtgctcccaccccagcagtaagatcacagctaatcctgagaggcaagagctcacaccaggctactgaaagaaaaagtgtcctttgtggattgcaagaggaactgggacacactgctggaaatgaagtggcaggtcataaactatcataaactcaggaggagaggtgttcctttttgagacactcatcacaactagagagaatgcagctaagaaaatgcagtctttagggggacctggactgttgaagtatttgagctattcggaggaaatagaaacttggaagagatctttgttccactattatttggcagccccttacccgcagctgccattactccagattctctctgatgatcctgcatcaggagaatgagttgactgggcaccactgggaaatgtgggcagctccaggctgaactagagaaggggcatgtcaaaggtcacttatttgtggcttgaccctttggaggccagatgtaagaatcaatttctcacaggtcccatgctaacgcttttcatatttatttccatctgagactcacttaggctaggcaaatatcccatgggtctgtacctctccagtgctttcttgctcatgtaaaattagctcattggaatgaataaagagaatggtattactttggctcgaacacg

SEQ ID NO: 23908 - protein, 45 aa, Homo sapiens
MHFSITSRTLCIIINSTEINQITRSFQVWRLTFLKTDEEPEAHLA

SEQ ID NO: 23909 - DNA, 455 bp, Homo sapiens
tggtctccagcacacctttcttggtagagttgagaattcaaccagccagttcttcctggagattctcagagccacattgagagagcagaggacttacaagtgctgccctatccatggtgactccccttggcctctaggcttgtctgagcagaggtagagtgaccctgccgcctgttcctcaacagtctgtgcaaattcaaagaaatagagtgtgaattcaaggaactcatttgaagaacaggaaaagcaactctctccttgaggttatcggggaaatgaaggttgaaacatggatcagaagacttgctgaggtcccttccaccctcagctcttccattctgttcccaaatgaggcccaaaacacagctttctccatcactctttaatctgttggttgatttgtctggtgcacccaaccagcactgtggccctgaaaataaaatgttaattacatc

SEQ ID NO: 23910 - protein, 36 aa, Homo sapiens
MKVETWIRRLAEVPSTLSSSILFPNEAQNTAFSITL

SEQ ID NO: 23911 - DNA, 657 bp, Homo sapiens
agtttttgagaatcatgatgaggcattaaagaagaggaggagtgtctcaagggaggtgagctggaggtgatgcaaggatgtctgatctgaaagcatgttgtggtccgctacacacaagagcaaaagaagagcaggaaggagctcagtgccaagaccatagccacaggaagaaaaccagctcttagggctgcagctctaaagacaggccaggtcattacaggaacgtctgctcccttagccttgccagacagaggagggttaagaaaggaactgctgaccctgatatgcaaactgccacgagtgcttcctgcctttctatcagcatcagatggctagcgatggatggctgtaagattgatgtaattaacattttattttcagggccacagtgctggttgggtgcaccagacaaatcaaccaacagattaaagagtgatggagaaagctgtgttttgggcctcatttgggaacagaatggaagagctgagggtggaagggacctcagcaagtcttctgatccatgtttcaaccttcatttccccgataacctcaaggagagagttgcttttcctgttcttcaaatgagttccttgaattcacactctatttctttgaatttgcacagactgttgaggaacaggcggcagggtcactcta

SEQ ID NO: 23912 - protein, 123 aa, Homo sapiens
MQTATSASCLSISIRWLAMDGCKIDVINILFSGPQCWLGAPDKSTNRLKSDGESCVLGLIWEQNGRAEGGRDLSKSSDPCFNLHFPDNLKERVAFPVLQMSSLNSHSISLNLHRLLRNRRQGH

SEQ ID NO: 23913 - DNA, 1472 bp, Homo sapiens
caagtgtttcacaagtgtgttggttcagaggagggaccaggcagaaggtggttgagaggcagagctgcccctgagtgagccatgcagaggatctcctccctcatccatctctctctcttctgggcaggagtcatgtcagccattgagttggtgcctgaacaccaaacagtgcctgtgtcaataggggtccctgccaccctcaggtgctccatgaaaggagaagcgatcggtaactactatatcaactggtacaggaagacccaaggtaacacaatgactttcatataccgagaaaaggacatctatggccctggtttcaaagacaatttccaaggtgacattgatattgcaaagaacctggctgtacttaagatacttgcaccatcagagagagatgaagggtcttactactgtgcctggaggaaatcactgtgggaattcaggaaacacacctcttgtctttggaaagggcacaagactttctgtgattgcaaatatccagaaccctgaccctgccgtgtaccagctgagagactctaaatccagtgacaagtctgtctgcctattcaccgattttgattctcaaacaaatgtgtcacaaagtaaggattctgatgtgtatatcacagacaaaactgtgctagacatgaggtctatggacttcaagagcaacagtgctgtggcctggagcaacaaatctgactttgcatgtgcaaacgccttcaacaacagcattattccagaagacaccttcttccccagcccagaaagttcctgtgatgtcaagctggtcgagaaaagctttgaaacagatacgaacctaaactttcaaaacctgtcagtgattgggttccgaatcctcctcctgaaagtggccgggtttaatctgctcatgacgctgcggctgtggtccagctgagatctgcaagattgtaagacagcctgtgctccctcgctccttcctctgcattgcccctcttctccctctccaaacagagggaactctcctacccccaaggaggtgaaagctgctaccacctctgtgcccccccggcaatgcaccaactggatcctacccgaatttatgattaagattgctgaagagctgccaaacactgctgccaccccctctgttcccttattgctgcttgtcactgcctgacattcacggcagaggcaaggctgctgcagctccgctggctgtgcacattccctcctgctccccagagactgcctccgccatcccacagatgatggatcttcagtgggttctcttgggctctaggtcccggagaatgttgtgaggggtttatttttttttaatagtgttcataaagaaagacatagtattcttcttctcaagacgtggggggaaattatctcattatcgaggccctgctatgctgtgtgtctgggcgtgttgtatgtcctgctgccgatgccttcattaaaatgatttggaagagcagaga

SEQ ID NO: 23914 - protein, 204 aa, Homo sapiens
MALVSKTISKVTLILQRTWLYLRYLHHQREMKGLTTVPGGNHCGNSGNTPLVFGKGTRLSVIANIQNPDPAVYQLRDSKSSDKSVCLFTDFDSQTNVSQSKDSDVYITDKTVLDMRSMDFKSNSAVAWSNKSDFACANAFNNSIIPEDTFFPSPESSCDVKLVEKSFETDTNLNFQNLSVIGFRILLLKVAGFNLLMTLRLWSS

SEQ ID NO: 23915 - DNA, 1238 bp, Homo sapiens
gtttcacaagtgtgttggttcagaggagggaccaggcagaaggtggttgagaggcagagctgcccctgagtgagccatgcagaggatctcctccctcatccatctctctctcttctgggcaggagtcatgtcagccattgagttggtgcctgaacaccaaacagtgcctgtgtcaataggggtccctgccaccctcaggtgctccatgaaaggagaagcgatcggtaactactatatcaactggtacaggaagacccaagatatccagaaccctgaccctgccgtgtaccagctgagagactctaaatccagtgacaagtctgtctgcctattcaccgattttgattctcaaacaaatgtgtcacaaagtaaggattctgatgtgtatatcacagacaaaactgtgctagacatgaggtctatggacttcaagagcaacagtgctgtggcctggagcaacaaatctgactttgcatgtgcaaacgccttcaacaacagcattattccagaagacaccttcttccccagcccagaaagttcctgtgatgtcaagctggtcgagaaaagctttgaaacagatacgaacctaaactttcaaaacctgtcagtgattgggttccgaatcctcctcctgaaagtggccgggtttaatctgctcatgacgctgcggctgtggtccagctgagatctgcaagattgtaagacagcctgtgctccctcgctccttcctctgcattgcccctcttctccctctccaaacagagggaactctcctacccccaaggaggtgaaagctgctaccacctctgtgcccccccggcaatgcaccaactggatcctacccgaatttatgattaagattgctgaagagctgccaaacactgctgccaccccctctgttcccttattgctgcttgtcactgcctgacattcacggcagaggcaaggctgctgcagctccgctggctgtgcacattccctcctgctccccagagactgcctccgccatcccacagatgatggatcttcagtgggttctcttgggctctaggtcccggagaatgttgtgaggggtttatttttttttaatagtgttcataaagaaagacatagtattcttcttctcaagacgtggggggaaattatctcattatcgaggccctgctatgctgtgtgtctgggcgtgttgtatgtcctgctgccgatgccttcattaaaatgatttggaagagcagaga

SEQ ID NO: 23916 - protein, 202 aa, Homo sapiens [sequence omitted]

SEQ ID NO: 23917 - DNA, 1776 bp, Homo sapiens
ggggatacgcacagtgctacaaaacctacagagacctgtacaaaaactgcaggggcaaaagtgccatttccctgggatatcctcaccctgggtcccatgcctcaggagacaaacacagcaagcagcttccctccctgctttggggcctggaagggatagcaggaagttgactggaccagggagatgaccacagctgctgacctctcactcactgctgttcttccttgggtgaaactggcatttctacattttcttacagcacatttggggaatacaaaaaggcctttcttaaaaactattcttgtcttgttttcatgttgattctattgcaaaagagagttatatgagccacctcatacggaatttctaaattcaaacctctagagagatttacccaagtgctttgctttgcagtttgggaggatggatttgaagagagattgatttttttgtaggcaatcaccggccacagttgctcattctaaagctgactgctctgtaaatcacccagtgcttcatgccaccctttctcctcttgctgtgccacacgttatctgcctttaaagcagcagcactggtgtctgtaaaggccttaaccctggagtagtcatggagccaagacccacccctttgacagtgccagctttccaacacagagagctgagtatgggtctaggaagtgagagcaatgtaaaacaatagaaagcaacagttcagagcactgcatcaagtgtactgtgctggaaaggtccgccataggaaatatggtcctccatactcctcagacaacagccttccgaaagcaaacctgtccctacctgcagatgattaaccatctatgaaccggctgggtaagcaacaagtgccatctttcatggagctgagccttaaagatcctccagtcctaaagctgacgggaagaaggtaggtgggagcagcgctgaggtttttggaacgtcctcaagtgctgtgacaccgataaactcatctttggaaaaggaacccgtgtgactgtggaaccaagaagtcagcctcataccaaaccatccgtttttgtcatgaaaaatggaacaaatgtcgcttgtctggtgaaggaattctaccccaaggatataagaataaatctcgtgtcatccaagaagataacagagtttgatcctgctattgtcatctctcccagtgggaagtacaatgctgtcaagcttggtaaatatgaagattcaaattcagtgacatgttcagttcaacacgacaataaaactgtgcactccactgactttgaagtgaagacagattctacagatcacgtaaaaccaaaggaaactgaaaacacaaagcaaccttcaaagagctgccataaacccaaagccatagttcataccgagaaggtgaacatgatgtccctcacagtgcttgggctacgaatgctgtttgcaaagactgttgccgtcaattttctcttgactgccaagttatttttcttgtaaggctgactggcatgaggaagctacactcctgaagaaaccaaaggcttacaaaaatgcatctccttggcttctgacttctttgtgattcaagttgacctgtcatagccttgttaaaatggctgctagccaaaccactttttcttcaaagacaacaaacccagctcatcctccagcttgatgggaagacaaaagtcctggggaaggggggtttatgtcctaactgctttgtatgctgttttataaagggatagaaggatataaaaagatataggactctttttttactcct

SEQ ID NO: 23918 - protein, 142 aa, Homo sapiens
MKNGTNVACLVKEFYPKDIRINLVSSKKITEFDPAIVISPSGKYNAVKLGKYEDSNSVTCSVQHDNKTVHSTDFEVKTDSTDHVKPKETENTKQPSKSCHKPKAIVHTEKVNMMSLTVLGLRMLFAKTVAVNFLLTAKLFFL

SEQ ID NO: 23919 - DNA, 2538 bp, Homo sapiens
ggggatacgcacagtgctacaaaacctacagagacctgtacaaaaactgcaggggcaaaagtgccatttccctgggatatcctcaccctgggtcccatgcctcaggagacaaacacagcaagcagcttccctccctgctttggggcctggaagggatagcaggaagttgactggaccagggagatgaccacagctgctgacctctcactcactgctgttcttccttgggtgaaactggcatttctacattttcttacagcacatttggggaatacaaaaaggcctttcttaaaaactattcttgtcttgttttcatgttgattctattgcaaaagagagttatatgagccacctcatacggaatttctaaattcaaacctctagagagatttacccaagtgctttgctttgcagtttgggaggatggatttgaagagagattgatttttttgtaggcaatcaccggccacagttgctcattctaaagctgactgctctgtaaatcacccagtgcttcatgccaccctttctcctcttgctgtgccacacgttatctgcctttaaagcagcagcactggtgtctgtaaaggccttaaccctggagtagtcatggagccaagacccacccctttgacagtgccagctttccaacacagagagctgagtatgggtctaggaagtgagagcaatgtaaaacaatagaaagcaacagttcagagcactgcatcaagtgtactgtgctggaaaggtccgccataggaaatatggtcctccatactcctcagacaacagccttccgaaagcaaacctgtccctacctgcagatgattaaccatctatgaaccggctgggtaagcaacaagtgccatctttcatggagctgagccttaaagatcctccagtcctaaagctgacgggaagaaggtaggtgggagcagcgctgaggtttttggaacgtcctcaagtgctgtgacaccgataaactcatctttggaaaaggaacccgtgtgactgtggaaccaagaagtcagcctcataccaaaccatccgtttttgtcatgaaaaatggaacaaatgtcgcttgtctggtgaaggaattctaccccaaggatataagaataaatctcgtgtcatccaagaagataacagagtttgatcctgctattgtcatctctcccagtgggaagtacaatgctgtcaagcttggtaaatatgaagattcaaattcagtgacatgttcagttcaacacgacaataaaactgtgcactccactgactttgaagtgaagacagattctacagatcacgtaaaaccaaaggaaactgaaaacacaaagcaaccttcaaagagctgccataaacccaaagccatagttcataccgagaaggtgaacatgatgtccctcacagtgcttgggctacgaatgctgtttgcaaagactgttgccgtcaattttctcttgactgccaagttatttttcttgtaaggctgactggcatgaggaagctacactcctgaagaaaccaaaggcttacaaaaatgcatctccttggcttctgacttctttgtgattcaagttgacctgtcatagccttgttaaaatggctgctagccaaaccactttttcttcaaagacaacaaacccagctcatcctccagcttgatgggaagacaaaagtcctggggaaggggggtttatgtcctaactgctttgtatgctgttttataaagggatagaaggatataaaaagatataggactctttttttactcctacaagtgatacactttgaaaatgatgttttgttccttttgactttctttaccttttgaagtagaaagtgggaaccaacaggttcacagcttcattcctcatgaggcaaataggccttgggagaagaagagcgggtgcccttttatctaaacatggaaggctctgctcaactgagcactagatttgctacaaaccagcatcatcttcttcctcctgtcctcacggcttgtcccaccctctatgttcacttcaggagccacactagagattctgcatggcgtggaggaggacaaagtttcagcactttctgcctctcctaatactttacaaatgagattacatttgaatttgctaatactttatgagcaggcaatgaggtttccaaaatctcatctaaatactctccaatctattagcaaaaatcagagtaaaatacagaggaaaggcactgctttctgttaattgatttaacatgcatgaattagctccctctgagttccaggcactatgctgagagtacaaagaagacacaagtctgctttcaagcaactcactgtgaaagtgtttttgaagggaggaacagaaatgagacccctatctttccctataaaaacaacatttttactgtcttttgcctgccaatctgtatttgaaaccattggacactgattctctggcctgggactttggcattgatggttttctgcctttcttctcagcctctgcctctattgcatttattaaactgcattgtgtgcacctc

SEQ ID NO: 23920 - protein, 142 aa, Homo sapiens; identical to SEQ ID NO: 23918

SEQ ID NO: 23921 - DNA, 806 bp, Homo sapiens
ctgtgccagacccctgatctttggcaaaggaacctatctggaggtacaacaacgaagtcagcctcataccaaaccatccgtttttgtcatgaaaaatggaacaaatgtcgcttgtctggtgaaggaattctaccccaaggatataagaataaatctcgtgtcatccaagaagataacagagtttgatcctgctattgtcatctctcccagtgggaagtacaatgctgtcaagcttggtaaatatgaagattcaaattcagtgacatgttcagttcaacacgacaataaaactgtgcactccactgactttgaagtgaagacagattctacagatcacgtaaaaccaaaggaaactgaaaacacaaagcaaccttcaaagagctgccataaacccaaagccatagttcataccgagaaggtgaacatgatgtccctcacagtgcttgggctacgaatgctgtttgcaaagactgttgccgtcaattttctcttgactgccaagttatttttcttgtaaggctgactggcatgaggaagctacactcctgaagaaaccaaaggcttacaaaaatgcatctccttggcttctgacttctttgtgattcaagttgacctgtcatagccttgttaaaatggctgctagccaaaccactttttcttcaaagacaacaaacccagctcatcctccagcttgatgggaagacaaaagtcctggggaaggggggtttatgtcctaactgctttgtatgctgttttataaagggatagaaggatataaaaagatataggactctttttttactcct

SEQ ID NO: 23922 - protein, 142 aa, Homo sapiens; identical to SEQ ID NO: 23918

SEQ ID NO: 23923 - DNA, 1568 bp, Homo sapiens
ctgtgccagacccctgatctttggcaaaggaacctatctggaggtacaacaacgaagtcagcctcataccaaaccatccgtttttgtcatgaaaaatggaacaaatgtcgcttgtctggtgaaggaattctaccccaaggatataagaataaatctcgtgtcatccaagaagataacagagtttgatcctgctattgtcatctctcccagtgggaagtacaatgctgtcaagcttggtaaatatgaagattcaaattcagtgacatgttcagttcaacacgacaataaaactgtgcactccactgactttgaagtgaagacagattctacagatcacgtaaaaccaaaggaaactgaaaacacaaagcaaccttcaaagagctgccataaacccaaagccatagttcataccgagaaggtgaacatgatgtccctcacagtgcttgggctacgaatgctgtttgcaaagactgttgccgtcaattttctcttgactgccaagttatttttcttgtaaggctgactggcatgaggaagctacactcctgaagaaaccaaaggcttacaaaaatgcatctccttggcttctgacttctttgtgattcaagttgacctgtcatagccttgttaaaatggctgctagccaaaccactttttcttcaaagacaacaaacccagctcatcctccagcttgatgggaagacaaaagtcctggggaaggggggtttatgtcctaactgctttgtatgctgttttataaagggatagaaggatataaaaagatataggactctttttttactcctacaagtgatacactttgaaaatgatgttttgttccttttgactttctttaccttttgaagtagaaagtgggaaccaacaggttcacagcttcattcctcatgaggcaaataggccttgggagaagaagagcgggtgcccttttatctaaacatggaaggctctgctcaactgagcactagatttgctacaaaccagcatcatcttcttcctcctgtcctcacggcttgtcccaccctctatgttcacttcaggagccacactagagattctgcatggcgtggaggaggacaaagtttcagcactttctgcctctcctaatactttacaaatgagattacatttgaatttgctaatactttatgagcaggcaatgaggtttccaaaatctcatctaaatactctccaatctattagcaaaaatcagagtaaaatacagaggaaaggcactgctttctgttaattgatttaacatgcatgaattagctccctctgagttccaggcactatgctgagagtacaaagaagacacaagtctgctttcaagcaactcactgtgaaagtgtttttgaagggaggaacagaaatgagacccctatctttccctataaaaacaacatttttactgtcttttgcctgccaatctgtatttgaaaccattggacactgattctctggcctgggactttggcattgatggttttctgcctttcttctcagcctctgcctctattgcatttattaaactgcattgtgtgcacctc

SEQ ID NO: 23924 - protein, 142 aa, Homo sapiens; identical to SEQ ID NO: 23918

SEQ ID NO: 23925 - DNA, 1197 bp, Homo sapiens
attgtgtccttccacctctcgctgaggcacagtcctgttgtgattgatttagttgaggcttgttgttacgtttctgcctacaacggccatttggcaattctcagcaaaatatgtgaaaatgttatcctgaagcaagatctgggagtaagagatggcaggttgaggagataatagcagaaaatctaaggacttgcctaagtgtcaaaactcagaagatagcagacatcaaaaaagctgccaaaatataatgctcagatctcagaaacccttgcaaagctctgtctccagctacacccattctgctccacccacccacttccaaacagatgaattagactgacagggagcaaataggtagcaaggtttttcgtaatgatgcctgtggtagtgctttgacagcacaactcttctttggaaagggaacacaactcatcgtggaaccaggaagtcagcctcataccaaaccatccgtttttgtcatgaaaaatggaacaaatgtcgcttgtctggtgaaggaattctaccccaaggatataagaataaatctcgtgtcatccaagaagataacagagtttgatcctgctattgtcatctctcccagtgggaagtacaatgctgtcaagcttggtaaatatgaagattcaaattcagtgacatgttcagttcaacacgacaataaaactgtgcactccactgactttgaagtgaagacagattctacagatcacgtaaaaccaaaggaaactgaaaacacaaagcaaccttcaaagagctgccataaacccaaagccatagttcataccgagaaggtgaacatgatgtccctcacagtgcttgggctacgaatgctgtttgcaaagactgttgccgtcaattttctcttgactgccaagttatttttcttgtaaggctgactggcatgaggaagctacactcctgaagaaaccaaaggcttacaaaaatgcatctccttggcttctgacttctttgtgattcaagttgacctgtcatagccttgttaaaatggctgctagccaaaccactttttcttcaaagacaacaaacccagctcatcctccagcttgatgggaagacaaaagtcctggggaaggggggtttatgtcctaactgctttgtatgctgttttataaagggatagaaggatataaaaagatataggactctttttttactcct

SEQ ID NO: 23926 - protein, 142 aa, Homo sapiens; identical to SEQ ID NO: 23918

SEQ ID NO: 23927 - DNA, 1959 bp, Homo sapiens
attgtgtccttccacctctcgctgaggcacagtcctgttgtgattgatttagttgaggcttgttgttacgtttctgcctacaacggccatttggcaattctcagcaaaatatgtgaaaatgttatcctgaagcaagatctgggagtaagagatggcaggttgaggagataatagcagaaaatctaaggacttgcctaagtgtcaaaactcagaagatagcagacatcaaaaaagctgccaaaatataatgctcagatctcagaaacccttgcaaagctctgtctccagctacacccattctgctccacccacccacttccaaacagatgaattagactgacagggagcaaataggtagcaaggtttttcgtaatgatgcctgtggtagtgctttgacagcacaactcttctttggaaagggaacacaactcatcgtggaaccaggaagtcagcctcataccaaaccatccgtttttgtcatgaaaaatggaacaaatgtcgcttgtctggtgaaggaattctaccccaaggatataagaataaatctcgtgtcatccaagaagataacagagtttgatcctgctattgtcatctctcccagtgggaagtacaatgctgtcaagcttggtaaatatgaagattcaaattcagtgacatgttcagttcaacacgacaataaaactgtgcactccactgactttgaagtgaagacagattctacagatcacgtaaaaccaaaggaaactgaaaacacaaagcaaccttcaaagagctgccataaacccaaagccatagttcataccgagaaggtgaacatgatgtccctcacagtgcttgggctacgaatgctgtttgcaaagactgttgccgtcaattttctcttgactgccaagttatttttcttgtaaggctgactggcatgaggaagctacactcctgaagaaaccaaaggcttacaaaaatgcatctccttggcttctgacttctttgtgattcaagttgacctgtcatagccttgttaaaatggctgctagccaaaccactttttcttcaaagacaacaaacccagctcatcctccagcttgatgggaagacaaaagtcctggggaaggggggtttatgtcctaactgctttgtatgctgttttataaagggatagaaggatataaaaagatataggactctttttttactcctacaagtgatacactttgaaaatgatgttttgttccttttgactttctttaccttttgaagtagaaagtgggaaccaacaggttcacagcttcattcctcatgaggcaaataggccttgggagaagaagagcgggtgcccttttatctaaacatggaaggctctgctcaactgagcactagatttgctacaaaccagcatcatcttcttcctcctgtcctcacggcttgtcccaccctctatgttcacttcaggagccacactagagattctgcatggcgtggaggaggacaaagtttcagcactttctgcctctcctaatactttacaaatgagattacatttgaatttgctaatactttatgagcaggcaatgaggtttccaaaatctcatctaaatactctccaatctattagcaaaaatcagagtaaaatacagaggaaaggcactgctttctgttaattgatttaacatgcatgaattagctccctctgagttccaggcactatgctgagagtacaaagaagacacaagtctgctttcaagcaactcactgtgaaagtgtttttgaagggaggaacagaaatgagacccctatctttccctataaaaacaacatttttactgtcttttgcctgccaatctgtatttgaaaccattggacactgattctctggcctgggactttggcattgatggttttctgcctttcttctcagcctctgcctctattgcatttattaaactgcattgtgtgcacctc

SEQ ID NO: 23928 - protein, 142 aa, Homo sapiens; identical to SEQ ID NO: 23918

SEQ ID NO: 23929 - DNA, 907 bp, Homo sapiens
gagaactgaggctggggaggcagggcacagatgttacagctcaggccccagggccagctccaggctagttacctgtgaggcactgtcataatgtgctcctgggacacccgacagatgtttttcggaactggcatcaaactcttcgtggagccccgaagtcagcctcataccaaaccatccgtttttgtcatgaaaaatggaacaaatgtcgcttgtctggtgaaggaattctaccccaaggatataagaataaatctcgtgtcatccaagaagataacagagtttgatcctgctattgtcatctctcccagtgggaagtacaatgctgtcaagcttggtaaatatgaagattcaaattcagtgacatgttcagttcaacacgacaataaaactgtgcactccactgactttgaagtgaagacagattctacagatcacgtaaaaccaaaggaaactgaaaacacaaagcaaccttcaaagagctgccataaacccaaagccatagttcataccgagaaggtgaacatgatgtccctcacagtgcttgggctacgaatgctgtttgcaaagactgttgccgtcaattttctcttgactgccaagttatttttcttgtaaggctgactggcatgaggaagctacactcctgaagaaaccaaaggcttacaaaaatgcatctccttggcttctgacttctttgtgattcaagttgacctgtcatagccttgttaaaatggctgctagccaaaccactttttcttcaaagacaacaaacccagctcatcctccagcttgatgggaagacaaaagtcctggggaaggggggtttatgtcctaactgctttgtatgctgttttataaagggatagaaggatataaaaagatataggactctttttttactcct

SEQ ID NO: 23930 - protein, 175 aa, Homo sapiens
MCSWDTRQMFFGTGIKLFVEPRSQPHTKPSVFVMKNGTNVACLVKEFYPKDIRINLVSSKKITEFDPAIVISPSGKYNAVKLGKYEDSNSVTCSVQHDNKTVHSTDFEVKTDSTDHVKPKETENTKQPSKSCHKPKAIVHTEKVNMMSLTVLGLRMLFAKTVAVNFLLTAKLFFL

SEQ ID NO: 23931 - DNA, 1669 bp, Homo sapiens
gagaactgaggctggggaggcagggcacagatgttacagctcaggccccagggccagctccaggctagttacctgtgaggcactgtcataatgtgctcctgggacacccgacagatgtttttcggaactggcatcaaactcttcgtggagccccgaagtcagcctcataccaaaccatccgtttttgtcatgaaaaatggaacaaatgtcgcttgtctggtgaaggaattctaccccaaggatataagaataaatctcgtgtcatccaagaagataacagagtttgatcctgctattgtcatctctcccagtgggaagtacaatgctgtcaagcttggtaaatatgaagattcaaattcagtgacatgttcagttcaacacgacaataaaactgtgcactccactgactttgaagtgaagacagattctacagatcacgtaaaaccaaaggaaactgaaaacacaaagcaaccttcaaagagctgccataaacccaaagccatagttcataccgagaaggtgaacatgatgtccctcacagtgcttgggctacgaatgctgtttgcaaagactgttgccgtcaattttctcttgactgccaagttatttttcttgtaaggctgactggcatgaggaagctacactcctgaagaaaccaaaggcttacaaaaatgcatctccttggcttctgacttctttgtgattcaagttgacctgtcatagccttgttaaaatggctgctagccaaaccactttttcttcaaagacaacaaacccagctcatcctccagcttgatgggaagacaaaagtcctggggaaggggggtttatgtcctaactgctttgtatgctgttttataaagggatagaaggatataaaaagatataggactctttttttactcctacaagtgatacactttgaaaatgatgttttgttccttttgactttctttaccttttgaagtagaaagtgggaaccaacaggttcacagcttcattcctcatgaggcaaataggccttgggagaagaagagcgggtgcccttttatctaaacatggaaggctctgctcaactgagcactagatttgctacaaaccagcatcatcttcttcctcctgtcctcacggcttgtcccaccctctatgttcacttcaggagccacactagagattctgcatggcgtggaggaggacaaagtttcagcactttctgcctctcctaatactttacaaatgagattacatttgaatttgctaatactttatgagcaggcaatgaggtttccaaaatctcatctaaatactctccaatctattagcaaaaatcagagtaaaatacagaggaaaggcactgctttctgttaattgatttaacatgcatgaattagctccctctgagttccaggcactatgctgagagtacaaagaagacacaagtctgctttcaagcaactcactgtgaaagtgtttttgaagggaggaacagaaatgagacccctatctttccctataaaaacaacatttttactgtcttttgcctgccaatctgtatttgaaaccattggacactgattctctggcctgggactttggcattgatggttttctgcctttcttctcagcctctgcctctattgcatttattaaactgcattgtgtgcacctc

SEQ ID NO: 23932 - protein, 175 aa, Homo sapiens; identical to SEQ ID NO: 23930

SEQ ID NO: 23933 - DNA, 329 bp, Homo sapiens
ctttatgagttggtaacttacagctgtgaacctgcctccttgttttcattaagtatatttgaagttaatggcaaaaggcagtgctgacaaccctgggaaatggcagtcctttgtcttcttcctggagcagatgcaaaaacccaggcccagagagatgaagaaacctggctaaggtaacatggtcttttccacccaggttggagtgaagtggcccaatatcaactcattgcaacctctgcctcctggctcagactctcctccagcctcagtcttccgagtagctgggaccacaggtgcacaccaccacacctggctaattttctgtataa

SEQ ID NO: 23934 - protein, 49 aa, Homo sapiens
MVFSTQVGVKWPNINSLQPLPPGSDSPPASVFRVAGTTGAHHHTWLIFC

SEQ ID NO: 23935 - DNA, 420 bp, Homo sapiens
caaatcacaagaagctttcaggtctggaggctgacatttctcaagacagatgcaaaaacccaggcccagagagatgaagaaacctggctaagctccttgaagctagaaatggcctacctgtagaatctgtcttcacttcaaagtcagtggagtgcacagttttattgtcgtgttgaactgaacatgtcactgaatttgaatcttcatatttaccaagcttgacagcattgtacttcccactgggagagatgacaatagcaggatcaaactctgttatcttcttggatgacacgagatttattcttatatccttggggtagaattccttcaccagacaagcgacatttgttccatttttcatgacaaaaacggatggtttggtatgaggctgacttcctgcaaatataatcaacttattag

SEQ ID NO: 23936 - protein, 32 aa, Homo sapiens
RNLAKLLEARNGLPVESVFTSKSVECTVLLSC

SEQ ID NO: 23937 - DNA, 391 bp, Homo sapiens
atcttaggaaccctgttttgttgtatatcctctgccctgatatgaagaaaagatgattcttactgtgggctttagctttttgtttttctacaggggcacgctgtgtgacaaagtaacccagagttccccggaccagacggtggcgagtggcagtgaggtggtactgctctgcacttacgacactgtatattcaaatccagatttattctggtaccggataaggccagattattcctttcagtttgtcttttatggggataacagcagatcagaaggtgcagattttactcaaggacggttttctgtgaaacacattctgacccagaaagcctttcacttggtgatctctccagtaaggactgaagacagtgccacttactactgtgccttt

SEQ ID NO: 23938 - protein, 112 aa, Homo sapiens
MILTVGFSFLFFYRGTLCDKVTQSSPDQTVASGSEVVLLCTYDTVYSNPDLFWYRIRPDYSFQFVFYGDNSRSEGADFTQGRFSVKHILTQKAFHLVISPVRTEDSATYYCA

SEQ ID NO: 23939 - DNA, 1692 bp, Homo sapiens
aaatagatcagggaaggaaaacattctttgttcacaattcaagtcaaagctgctgcttctgtctccattcccttttcaactctgagactggcagctgcttctctgttggcccaaagggactatcctccaccagtcacccaaagaggactgtctttaaggatatgagatagcaccctaagaggataaatggacattttcttgtctacaaaaagcctaatgcaacagtagaggacatagggaaatttctttggatggatagagacaagtgcatctctttcttacgaaagaatagaaatgtgattaaaaaggaaaagcctagaaacatctgaacgtgtggaaatgggggtgagtgggctagagaaaggatttctgcatcactttcttcctgtagcaattccatccgagatccctgggacagacctggcctgatgaatagcaggaagcacaccagggagggacaaggtcctgcagacaaccttcaccaccaggctgggacagcgccatggggacccagggcctctgctttggggaaagaccttgctgagggccccatgggcaagaacaagtgtgaagaaccctactatggttttttgcccaatgccctccacaaagccagcgtttgaaggaaaactgtgaggaagaagggacactccatggtgttgttgttgccaccgctggagcagcctgtagcaagaacagtcttggtccaaccagatatccagaaccctgaccctgccgtgtaccagctgagagactctaaatccagtgacaagtctgtctgcctattcaccgattttgattctcaaacaaatgtgtcacaaagtaaggattctgatgtgtatatcacagacaaaactgtgctagacatgaggtctatggacttcaagagcaacagtgctgtggcctggagcaacaaatctgactttgcatgtgcaaacgccttcaacaacagcattattccagaagacaccttcttccccagcccagaaagttcctgtgatgtcaagctggtcgagaaaagctttgaaacagatacgaacctaaactttcaaaacctgtcagtgattgggttccgaatcctcctcctgaaagtggccgggtttaatctgctcatgacgctgcggctgtggtccagctgagatctgcaagattgtaagacagcctgtgctccctcgctccttcctctgcattgcccctcttctccctctccaaacagagggaactctcctacccccaaggaggtgaaagctgctaccacctctgtgcccccccggcaatgcaccaactggatcctacccgaatttatgattaagattgctgaagagctgccaaacactgctgccaccccctctgttcccttattgctgcttgtcactgcctgacattcacggcagaggcaaggctgctgcagctccgctggctgtgcacattccctcctgctccccagagactgcctccgccatcccacagatgatggatcttcagtgggttctcttgggctctaggtcccggagaatgttgtgaggggtttatttttttttaatagtgttcataaagaaagacatagtattcttcttctcaagacgtggggggaaattatctcattatcgaggccctgctatgctgtgtgtctgggcgtgttgtatgtcctgctgccgatgccttcattaaaatgatttggaagagcagaga

SEQ ID NO: 23940 - protein, 161 aa, Homo sapiens [sequence omitted]

SEQ ID NO: 23941 - DNA, 328 bp, Homo sapiens
tagttcttgggaagctctgcaaagcagggttcgttaagctgatgccacaggtttttgcaaagcccctcagcacagtgtttaagaaaccagtggctctaggttgacctttggggaaggaacacagctcacagtgaatcctggtccaaaccacagcagtcccattaatggattccagtgcaaaacaactgctggtgtattcctactacacgcaggtctctgttgtttgccctcatgtgctattttatctaatagctgagaatgacagtaccaatggagcactgagttaaggagtcagactgttcgaaggcttcattcttcgttataattg

SEQ ID NO: 23942 - protein, 40 aa, Homo sapiens
MDSSAKQLLVYSYYTQVSVVCPHVLFYLIAENDSTNGALS

SEQ ID NO: 23943 - DNA, 1857 bp, Homo sapiens
ggcatcgtggttgaggacacaaaactgagagaatcgagatacattgactctgatcagaaaaaaaggtcacggaatagcaaacataggtttagtccttaaaaggtagcatagataacatgggacttgaacgtggcaatttgaaaaacaacctgtggtctatcagcacgttctcactgcacacgggggataaacaggggtgggggaataagcaatggacattgcatgataggggtgctagggaaatgaggcaggtcaggaagaaggaaggtgatcagagcctcatacggagttaatctagagaagatgaattgttccataagtttcacaaagaaataaagtccaaagatataataagaagtcctgattaaaatccacttcagaatcatatgatcatcaggagagaaattaagtcttaaaagaaaaagaagtttttaaatgtaggtccataaaacaaatggacctacacctttaattagacagcaagcagcacaagatgcacgttagccttccttttaatcccctctcaggaggaatcagtctctccagctgcacatggtcacagctgctctaagccctggagctccttcccagtaatacccttgctcctgtgcctgcacagggaaaggagatgcctgcctgcctgcctgcctgcctgcctaccggtctgccttttggtccgccgcttggtggggccccaggtgtaacctctggctgtctcttctgcctggtttttgttgagcttcctatcacagtggaacaccggtaaccagttctattttgggacagggacaagtttgacggtcattccaagtataactttatctggaccagagtaaagaggcccccgacccaccccgagaatgatttatgcttggacagatatccagaaccctgaccctgccgtgtaccagctgagagactctaaatccagtgacaagtctgtctgcctattcaccgattttgattctcaaacaaatgtgtcacaaagtaaggattctgatgtgtatatcacagacaaaactgtgctagacatgaggtctatggacttcaagagcaacagtgctgtggcctggagcaacaaatctgactttgcatgtgcaaacgccttcaacaacagcattattccagaagacaccttcttccccagcccagaaagttcctgtgatgtcaagctggtcgagaaaagctttgaaacagatacgaacctaaactttcaaaacctgtcagtgattgggttccgaatcctcctcctgaaagtggccgggtttaatctgctcatgacgctgcggctgtggtccagctgagatctgcaagattgtaagacagcctgtgctccctcgctccttcctctgcattgcccctcttctccctctccaaacagagggaactctcctacccccaaggaggtgaaagctgctaccacctctgtgcccccccggcaatgcaccaactggatcctacccgaatttatgattaagattgctgaagagctgccaaacactgctgccaccccctctgttcccttattgctgcttgtcactgcctgacattcacggcagaggcaaggctgctgcagctccgctggctgtgcacattccctcctgctccccagagactgcctccgccatcccacagatgatggatcttcagtgggttctcttgggctctaggtcccggagaatgttgtgaggggtttatttttttttaatagtgttcataaagaaagacatagtattcttcttctcaagacgtggggggaaattatctcattatcgaggccctgctatgctgtgtgtctgggcgtgttgtatgtcctgctgccgatgccttcattaaaatgatttggaagagcagaga

SEQ ID NO: 23944 - protein, 147 aa, Homo sapiens
MIYAWTDIQNPDPAVYQLRDSKSSDKSVCLFTDFDSQTNVSQSKDSDVYITDKTVLDMRSMDFKSNSAVAWSNKSDFACANAFNNSIIPEDTFFPSPESSCDVKLVEKSFETDTNLNFQNLSVIGFRILLLKVAGFNLLMTLRLWSS

SEQ ID NO: 23945 - DNA, 1788 bp, Homo sapiens
ggcatcgtggttgaggacacaaaactgagagaatcgagatacattgactctgatcagaaaaaaaggtcacggaatagcaaacataggtttagtccttaaaaggtagcatagataacatgggacttgaacgtggcaatttgaaaaacaacctgtggtctatcagcacgttctcactgcacacgggggataaacaggggtgggggaataagcaatggacattgcatgataggggtgctagggaaatgaggcaggtcaggaagaaggaaggtgatcagagcctcatacggagttaatctagagaagatgaattgttccataagtttcacaaagaaataaagtccaaagatataataagaagtcctgattaaaatccacttcagaatcatatgatcatcaggagagaaattaagtcttaaaagaaaaagaagtttttaaatgtaggtccataaaacaaatggacctacacctttaattagacagcaagcagcacaagatgcacgttagccttccttttaatcccctctcaggaggaatcagtctctccagctgcacatggtcacagctgctctaagccctggagctccttcccagtaatacccttgctcctgtgcctgcacagggaaaggagatgcctgcctgcctgcctgcctgcctgcctaccggtctgccttttggtccgccgcttggtggggccccaggtgtaacctctggctgtctcttctgcctggtttttgttgagcttcctatcacagtggaacaccggtaaccagttctattttgggacagggacaagtttgacggtcattccaaatatccagaaccctgaccctgccgtgtaccagctgagagactctaaatccagtgacaagtctgtctgcctattcaccgattttgattctcaaacaaatgtgtcacaaagtaaggattctgatgtgtatatcacagacaaaactgtgctagacatgaggtctatggacttcaagagcaacagtgctgtggcctggagcaacaaatctgactttgcatgtgcaaacgccttcaacaacagcattattccagaagacaccttcttccccagcccagaaagttcctgtgatgtcaagctggtcgagaaaagctttgaaacagatacgaacctaaactttcaaaacctgtcagtgattgggttccgaatcctcctcctgaaagtggccgggtttaatctgctcatgacgctgcggctgtggtccagctgagatctgcaagattgtaagacagcctgtgctccctcgctccttcctctgcattgcccctcttctccctctccaaacagagggaactctcctacccccaaggaggtgaaagctgctaccacctctgtgcccccccggcaatgcaccaactggatcctacccgaatttatgattaagattgctgaagagctgccaaacactgctgccaccccctctgttcccttattgctgcttgtcactgcctgacattcacggcagaggcaaggctgctgcagctccgctggctgtgcacattccctcctgctccccagagactgcctccgccatcccacagatgatggatcttcagtgggttctcttgggctctaggtcccggagaatgttgtgaggggtttatttttttttaatagtgttcataaagaaagacatagtattcttcttctcaagacgtggggggaaattatctcattatcgaggccctgctatgctgtgtgtctgggcgtgttgtatgtcctgctgccgatgccttcattaaaatgatttggaagagcagaga

SEQ ID NO: 23946 - protein, 90 aa, Homo sapiens
MRSMDFKSNSAVAWSNKSDFACANAFNNSIIPEDTFFPSPESSCDVKLVEKSFETDTNLNFQNLSVIGFRILLLKVAGFNLLMTLRLWSS

SEQ ID NO: 23947 - DNA, 1150 bp, Homo sapiens
ctgggactgaggtgttctaagcctggaaagacacaaagctgtcctcatcccaacctgccgtgcccctccttgagggttagtgtaaggctctgaaggactgtgtgaattatggcggtgctacaaacaagctcatctttggaactggcactctgcttgctgtccagccaagtacatatccagaaccctgaccctgccgtgtaccagctgagagactctaaatccagtgacaagtctgtctgcctattcaccgattttgattctcaaacaaatgtgtcacaaagtaaggattctgatgtgtatatcacagacaaaactgtgctagacatgaggtctatggacttcaagagcaacagtgctgtggcctggagcaacaaatctgactttgcatgtgcaaacgccttcaacaacagcattattccagaagacaccttcttccccagcccagaaagttcctgtgatgtcaagctggtcgagaaaagctttgaaacagatacgaacctaaactttcaaaacctgtcagtgattgggttccgaatcctcctcctgaaagtggccgggtttaatctgctcatgacgctgcggctgtggtccagctgagatctgcaagattgtaagacagcctgtgctccctcgctccttcctctgcattgcccctcttctccctctccaaacagagggaactctcctacccccaaggaggtgaaagctgctaccacctctgtgcccccccggcaatgcaccaactggatcctacccgaatttatgattaagattgctgaagagctgccaaacactgctgccaccccctctgttcccttattgctgcttgtcactgcctgacattcacggcagaggcaaggctgctgcagctccgctggctgtgcacattccctcctgctccccagagactgcctccgccatcccacagatgatggatcttcagtgggttctcttgggctctaggtcccggagaatgttgtgaggggtttatttttttttaatagtgttcataaagaaagacatagtattcttcttctcaagacgtggggggaaattatctcattatcgaggccctgctatgctgtgtgtctgggcgtgttgtatgtcctgctgccgatgccttcattaaaatgatttggaagagcagaga

SEQ ID NO: 23948 - protein, 162 aa, Homo sapiens
MAVLQTSSSLELALCLLSSQVHIQNPDPAVYQLRDSKSSDKSVCLFTDFDSQTNVSQSKDSDVYITDKTVLDMRSMDFKSNSAVAWSNKSDFACANAFNNSIIPEDTFFPSPESSCDVKLVEKSFETDTNLNFQNLSVIGFRILLLKVAGFNLLMTLRLWSS

SEQ ID NO: 23949 - DNA, 1113 bp, Homo sapiens
agggtgaagggaagactctgtaatgcagttccttctcaggtggaaatccagatatgtgccctaagtgacctattcctgccccatttttgtttgggctctgaaaagtggattcctagctcagtggctgtctgccagatatccagaaccctgaccctgccgtgtaccagctgagagactctaaatccagtgacaagtctgtctgcctattcaccgattttgattctcaaacaaatgtgtcacaaagtaaggattctgatgtgtatatcacagacaaaactgtgctagacatgaggtctatggacttcaagagcaacagtgctgtggcctggagcaacaaatctgactttgcatgtgcaaacgccttcaacaacagcattattccagaagacaccttcttccccagcccagaaagttcctgtgatgtcaagctggtcgagaaaagctttgaaacagatacgaacctaaactttcaaaacctgtcagtgattgggttccgaatcctcctcctgaaagtggccgggtttaatctgctcatgacgctgcggctgtggtccagctgagatctgcaagattgtaagacagcctgtgctccctcgctccttcctctgcattgcccctcttctccctctccaaacagagggaactctcctacccccaaggaggtgaaagctgctaccacctctgtgcccccccggcaatgcaccaactggatcctacccgaatttatgattaagattgctgaagagctgccaaacactgctgccaccccctctgttcccttattgctgcttgtcactgcctgacattcacggcagaggcaaggctgctgcagctccgctggctgtgcacattccctcctgctccccagagactgcctccgccatcccacagatgatggatcttcagtgggttctcttgggctctaggtcccggagaatgttgtgaggggtttatttttttttaatagtgttcataaagaaagacatagtattcttcttctcaagacgtggggggaaattatctcattatcgaggccctgctatgctgtgtgtctgggcgtgttgtatgtcctgctgccgatgccttcattaaaatgatttggaagagcagaga

SEQ ID NO: 23950 - protein, 90 aa, Homo sapiens; identical to SEQ ID NO: 23946

SEQ ID NO: 23951 - DNA, 1194 bp, Homo sapiens
gtctagcttagactgctgtctgcacaagaagaagacttacagatgcttaaggaggatggaggcaaattttcaaccctgtactccaaagctgaggggagaggggatgggaaacattagggctgggttcatgtaaaggggaccagcattgtgccgacagaggctcaaccctggggaggctatactttggaagaggaactcagttgactgtctggcctgatatccagaaccctgaccctgccgtgtaccagctgagagactctaaatccagtgacaagtctgtctgcctattcaccgattttgattctcaaacaaatgtgtcacaaagtaaggattctgatgtgtatatcacagacaaaactgtgctagacatgaggtctatggacttcaagagcaacagtgctgtggcctggagcaacaaatctgactttgcatgtgcaaacgccttcaacaacagcattattccagaagacaccttcttccccagcccagaaagttcctgtgatgtcaagctggtcgagaaaagctttgaaacagatacgaacctaaactttcaaaacctgtcagtgattgggttccgaatcctcctcctgaaagtggccgggtttaatctgctcatgacgctgcggctgtggtccagctgagatctgcaagattgtaagacagcctgtgctccctcgctccttcctctgcattgcccctcttctccctctccaaacagagggaactctcctacccccaaggaggtgaaagctgctaccacctctgtgcccccccggcaatgcaccaactggatcctacccgaatttatgattaagattgctgaagagctgccaaacactgctgccaccccctctgttcccttattgctgcttgtcactgcctgacattcacggcagaggcaaggctgctgcagctccgctggctgtgcacattccctcctgctccccagagactgcctccgccatcccacagatgatggatcttcagtgggttctcttgggctctaggtcccggagaatgttgtgaggggtttatttttttttaatagtgttcataaagaaagacatagtattcttcttctcaagacgtggggggaaattatctcattatcgaggccctgctatgctgtgtgtctgggcgtgttgtatgtcctgctgccgatgccttcattaaaatgatttggaagagcagaga

SEQ ID NO: 23952 - protein, 90 aa, Homo sapiens; identical to SEQ ID NO: 23946

SEQ ID NO: 23953 - DNA, 1033 bp, Homo sapiens
gggggttaccagaaagttacctttggaattggaacaaagctccaagtcatcccaaatatccagaaccctgaccctgccgtgtaccagctgagagactctaaatccagtgacaagtctgtctgcctattcaccgattttgattctcaaacaaatgtgtcacaaagtaaggattctgatgtgtatatcacagacaaaactgtgctagacatgaggtctatggacttcaagagcaacagtgctgtggcctggagcaacaaatctgactttgcatgtgcaaacgccttcaacaacagcattattccagaagacaccttcttccccagcccagaaagttcctgtgatgtcaagctggtcgagaaaagctttgaaacagatacgaacctaaactttcaaaacctgtcagtgattgggttccgaatcctcctcctgaaagtggccgggtttaatctgctcatgacgctgcggctgtggtccagctgagatctgcaagattgtaagacagcctgtgctccctcgctccttcctctgcattgcccctcttctccctctccaaacagagggaactctcctacccccaaggaggtgaaagctgctaccacctctgtgcccccccggcaatgcaccaactggatcctacccgaatttatgattaagattgctgaagagctgccaaacactgctgccaccccctctgttcccttattgctgcttgtcactgcctgacattcacggcagaggcaaggctgctgcagctccgctggctgtgcacattccctcctgctccccagagactgcctccgccatcccacagatgatggatcttcagtgggttctcttgggctctaggtcccggagaatgttgtgaggggtttatttttttttaatagtgttcataaagaaagacatagtattcttcttctcaagacgtggggggaaattatctcattatcgaggccctgctatgctgtgtgtctgggcgtgttgtatgtcctgctgccgatgccttcattaaaatgatttggaagagcagaga

SEQ ID NO: 23954 - protein, 90 aa, Homo sapiens; identical to SEQ ID NO: 23946

SEQ ID NO: 23955 - DNA, 1285 bp, Homo sapiens
tgttggataaatggagttgaaaatcatgaatttgatggcgacagacccagagagttgggcaggtagaaacttcatttcaagtgatatgcagtaaataccccaaatttgagtcaaatggcctgtgtaaaaaggaagtgaaaatgtaacccgtatctccttgtaggtgaaaaggccatatctctaggtcttaggtatgaaaaggatgtgtgggcttctgggtgtttttgactgactaagaaacactgtgggatggatagcagctataaattgatcttcgggagtgggaccagactgctggtcaggcctgatatccagaaccctgaccctgccgtgtaccagctgagagactctaaatccagtgacaagtctgtctgcctattcaccgattttgattctcaaacaaatgtgtcacaaagtaaggattctgatgtgtatatcacagacaaaactgtgctagacatgaggtctatggacttcaagagcaacagtgctgtggcctggagcaacaaatctgactttgcatgtgcaaacgccttcaacaacagcattattccagaagacaccttcttccccagcccagaaagttcctgtgatgtcaagctggtcgagaaaagctttgaaacagatacgaacctaaactttcaaaacctgtcagtgattgggttccgaatcctcctcctgaaagtggccgggtttaatctgctcatgacgctgcggctgtggtccagctgagatctgcaagattgtaagacagcctgtgctccctcgctccttcctctgcattgcccctcttctccctctccaaacagagggaactctcctacccccaaggaggtgaaagctgctaccacctctgtgcccccccggcaatgcaccaactggatcctacccgaatttatgattaagattgctgaagagctgccaaacactgctgccaccccctctgttcccttattgctgcttgtcactgcctgacattcacggcagaggcaaggctgctgcagctccgctggctgtgcacattccctcctgctccccagagactgcctccgccatcccacagatgatggatcttcagtgggttctcttgggctctaggtcccggagaatgttgtgaggggtttatttttttttaatagtgttcataaagaaagacatagtattcttcttctcaagacgtggggggaaattatctcattatcgaggccctgctatgctgtgtgtctgggcgtgttgtatgtcctgctgccgatgccttcattaaaatgatttggaagagcagaga

SEQ ID NO: 23956 - protein, 160 aa, Homo sapiens [sequence omitted]

SEQ ID NO: 23957 - DNA, 1033 bp, Homo sapiens
tcaggatacagcaccctcacctttgggaaggggactatgcttctagtctctccagatatccagaaccctgaccctgccgtgtaccagctgagagactctaaatccagtgacaagtctgtctgcctattcaccgattttgattctcaaacaaatgtgtcacaaagtaaggattctgatgtgtatatcacagacaaaactgtgctagacatgaggtctatggacttcaagagcaacagtgctgtggcctggagcaacaaatctgactttgcatgtgcaaacgccttcaacaacagcattattccagaagacaccttcttccccagcccagaaagttcctgtgatgtcaagctggtcgagaaaagctttgaaacagatacgaacctaaactttcaaaacctgtcagtgattgggttccgaatcctcctcctgaaagtggccgggtttaatctgctcatgacgctgcggctgtggtccagctgagatctgcaagattgtaagacagcctgtgctccctcgctccttcctctgcattgcccctcttctccctctccaaacagagggaactctcctacccccaaggaggtgaaagctgctaccacctctgtgcccccccggcaatgcaccaactggatcctacccgaatttatgattaagattgctgaagagctgccaaacactgctgccaccccctctgttcccttattgctgcttgtcactgcctgacattcacggcagaggcaaggctgctgcagctccgctggctgtgcacattccctcctgctccccagagactgcctccgccatcccacagatgatggatcttcagtgggttctcttgggctctaggtcccggagaatgttgtgaggggtttatttttttttaatagtgttcataaagaaagacatagtattcttcttctcaagacgtggggggaaattatctcattatcgaggccctgctatgctgtgtgtctgggcgtgttgtatgtcctgctgccgatgccttcattaaaatgatttggaagagcagaga

SEQ ID NO: 23958 - protein, 147 aa, Homo sapiens
MLLVSPDIQNPDPAVYQLRDSKSSDKSVCLFTDFDSQTNVSQSKDSDVYITDKTVLDMRSMDFKSNSAVAWSNKSDFACANAFNNSIIPEDTFFPSPESSCDVKLVEKSFETDTNLNFQNLSVIGFRILLLKVAGFNLLMTLRLWSS

SEQ ID NO: 23959 - DNA, 991 bp, Homo sapiens
tcttgtcccacagatatccagaaccctgaccctgccgtgtaccagctgagagactctaaatccagtgacaagtctgtctgcctattcaccgattttgattctcaaacaaatgtgtcacaaagtaaggattctgatgtgtatatcacagacaaaactgtgctagacatgaggtctatggacttcaagagcaacagtgctgtggcctggagcaacaaatctgactttgcatgtgcaaacgccttcaacaacagcattattccagaagacaccttcttccccagcccagaaagttcctgtgatgtcaagctggtcgagaaaagctttgaaacagatacgaacctaaactttcaaaacctgtcagtgattgggttccgaatcctcctcctgaaagtggccgggtttaatctgctcatgacgctgcggctgtggtccagctgagatctgcaagattgtaagacagcctgtgctccctcgctccttcctctgcattgcccctcttctccctctccaaacagagggaactctcctacccccaaggaggtgaaagctgctaccacctctgtgcccccccggcaatgcaccaactggatcctacccgaatttatgattaagattgctgaagagctgccaaacactgctgccaccccctctgttcccttattgctgcttgtcactgcctgacattcacggcagaggcaaggctgctgcagctccgctggctgtgcacattccctcctgctccccagagactgcctccgccatcccacagatgatggatcttcagtgggttctcttgggctctaggtcccggagaatgttgtgaggggtttatttttttttaatagtgttcataaagaaagacatagtattcttcttctcaagacgtggggggaaattatctcattatcgaggccctgctatgctgtgtgtctgggcgtgttgtatgtcctgctgccgatgccttcattaaaatgatttggaagagcagaga

SEQ ID NO: 23960 - protein, 90 aa, Homo sapiens; identical to SEQ ID NO: 23946

SEQ ID NO: 23961 - DNA, 893 bp, Homo sapiens
cagatatccagaaccctgaccctgccgtgtaccagctgagagactctaaatccagtgacaagtctgtctgcctattcaccgattttgattctcaaacaaatgtgtcacaaacaacaaatctgactttgcatgtgcaaacgccttcaacaacagcattattccagaagacaccttcttccccagcccagaaagttcctgtgatgtcaagctggtcgagaaaagctttgaaacagatacgaacctaaactttcaaaacctgtcagtgattgggttccgaatcctcctcctgaaagtggccgggtttaatctgctcatgacgctgcggctgtggtccagctgagatctgcaagattgtaagacagcctgtgctccctcgctccttcctctgcattgcccctcttctccctctccaaacagagggaactctcctacccccaaggaggtgaaagctgctaccacctctgtgcccccccggcaatgcaccaactggatcctacccgaatttatgattaagattgctgaagagctgccaaacactgctgccaccccctctgttcccttattgctgcttgtcactgcctgacattcacggcagaggcaaggctgctgcagctccgctggctgtgcacattccctcctgctccccagagactgcctccgccatcccacagatgatggatcttcagtgggttctcttgggctctaggtcccggagaatgttgtgaggggtttatttttttttaatagtgttcataaagaaagacatagtattcttcttctcaagacgtggggggaaattatctcattatcgaggccctgctatgctgtgtgtctgggcgtgttgtatgtcctgctgccgatgccttcattaaaatgatttggaagagcagaga

SEQ ID NO: 23962 - protein, 42 aa, Homo sapiens
RCGCGPAEICKIVRQPVLPRSFLCIAPLLPLQTEGTLLPPRR

SEQ ID NO: 23963 - DNA, 1320 bp, Homo sapiens
cccgcaataaccctgcctggatgagggagtgggaagaaattagtagatgtgggaatgaatgatgaggaatggaaacagcggttcaagacctgcccagagctgggtggggtctctcctgaatccctctcaccgtctctgactttccgttctaagcactttgaggatgagtttctagcttcaatagaccaaggactctctcctaggcctctgtattcctttcaacagctccactgtcaagagagccagagagagcttctgggtggcccagctgtgaaatttctgagtcccttagggatagccctaaacgaaccagatcatcctgaggacagccaagaggttttgccttctttcaagacaagcaacagtactcacataggctgtgggcaatggtcctgtctctcaagaatcccctgccactcctcacacccaccctgggcccatattcatttccatttgagttgttcttattgagtcatccttcctgtggcagcggaactcactaaggggcccatctggacccgaggtattgtgaagataaattctgagcacctaccccatccccagaagggctcagaaataaaataagagccaagtctagtcggtgtttcctgtcttgaaacacaatactgttggccctggaagaatgcacagaatctgtttatacgaacctaaactttcaaaacctgtcagtgattgggttccgaatcctcctcctgaaagtggccgggtttaatctgctcatgacgctgcggctgtggtccagctgagatctgcaagattgtaagacagcctgtgctccctcgctccttcctctgcattgcccctcttctccctctccaaacagagggaactctcctacccccaaggaggtgaaagctgctaccacctctgtgcccccccggcaatgcaccaactggatcctacccgaatttatgattaagattgctgaagagctgccaaacactgctgccaccccctctgttcccttattgctgcttgtcactgcctgacattcacggcagaggcaaggctgctgcagctccgctggctgtgcacattccctcctgctccccagagactgcctccgccatcccacagatgatggatcttcagtgggttctcttgggctctaggtcccggagaatgttgtgaggggtttatttttttttaatagtgttcataaagaaagacatagtattcttcttctcaagacgtggggggaaattatctcattatcgaggccctgctatgctgtgtgtctgggcgtgttgtatgtcctgctgccgatgccttcattaaaatgatttggaagagcagaga

SEQ ID NO: 23964 - protein, 138 aa, Homo sapiens [sequence omitted]

SEQ ID NO: 23965 - DNA, 447 bp, Homo sapiens
ggtctccgggtccctgggtcccggacgtgtccatcaaggcgtccattagggccatcacctaatggacaagcatcagggtaaggggggaggtgctattgggggggggtccctcagagaatcagccctagctctgtgtgggggcaaatacggcctccccacctccctccctcccaggagacactggcctgagcataagtctcgagggtctgccctgtactaagcaagcgcttaatcagaggatgtggcttctgcgggagagcttcaaagggtgccctacttgcccctcttggtaaccatgacgtcatggaaatgggaggggaccgccccagcccccaaacacctggagggaagtgggagactttttccacttcctgttctacttgtggctactgactcaatgtctgacctgtttattaattgcaaaatatagctctatgtgtgctaccc

SEQ ID NO: 23966 - protein, 52 aa, Homo sapiens
MDKHQGKGGGAIGGGSLRESALALCGGKYGLPTSLPPRRHWPEHKSRGSALY

SEQ ID NO: 23967 - DNA, 385 bp, Homo sapiens
caggttctgcggctccctgagacctgcagattcctggtctccgggtccctgggtcccggacgtgtccatcaaggcgtccattagggccatcacctaatggacaagcatcagggagacactggcctgagcataagtctcgagggtctgccctgtactaagcaagcgcttaatcagaggatgtggcttctgcgggagagcttcaaagggtgccctacttgcccctcttggtaaccatgacgtcatggaaatgggaggggaccgccccagcccccaaacacctggagggaagtgggagactttttccacttcctgttctacttgtggctactgactcaatgtctgacctgtttattaattgcaaaatatagctctatgtgtgctaccc

SEQ ID NO: 23968 - protein, 44 aa, Homo sapiens
MDKHQGDTGLSISLEGLPCTKQALNQRMWLLRESFKGCPTCPSW

SEQ ID NO: 23969 - DNA, 804 bp, Homo sapiens
ttcggggaaagggtagacttgcactcctccccactaatcagtgggattttaggaaggctttgaaaatgggaaggatcctcccctcagatcctatcacctttggaatgggaacatgcccacatttccagagcgaacagacactggagtcctctcttctcaaaggtggcgaaccgtcctggagtgacgtggcgtgttctggcctgcgaggagatggctgcccgcagaacctgcccgctggagggcgctgcagaggtctggctccgtgctttcagatgtgttcggccaggggctccaggggctccttctgtgatgcgttttgcctgttcttggacttcatctgtatggagtcatagtttgcacagagactgaatccccagagcacgacacagcctggcacatggcaggtatacaatgccaaagaaagcctggttcttaaactaccgaagagcaggcgatcaagcctggtatttttgggtttcaggttctgcggctccctgagacctgcagattcctggtctccgggtccctgggtcccggacgtgtccatcaaggcgtccattagggccatcacctaatggacaagcatcagggagacactggcctgagcataagtctcgagggtctgccctgtactaagcaagcgcttaatcaggtgagatcaaggtctgatcttggctggtttggaggggcagcagaggtgcggtgagggaggcggctcagcggtggggccagcagcacctccccagcctgactgcgggcccggtgcaagtcaccgaggggccggcagcccctcccagcctggca

SEQ ID NO: 23970 - protein, 95 aa, Homo sapiens [sequence omitted]

SEQ ID NO: 23971 - DNA, 733 bp, Homo sapiens
ggggagggcggagttaggtcacgagggtgcgcatgcgcaaacagcacatccggtgtggtcgacgggtcctccaagagtttggggcgcggactggagtaccttgcgtgcagttatgtcggcgtcggtagtgtctgtcatttcgcggttcttagaagagtacttgagctccactccgcagcgtctgaagttgctggacgcgtacctgctgtatatactgctgaccggggcgctgcagttcggttactgtctcctcgtggggaccttccccttcaactcttttctctcgggcttcatctcttgtgtggggagtttcatcctagcggtttgcctgagaatacagatcaacccacagaacaaagcggatttccaaggcatctccccagagcgagcctttgctgattttctctttgccagcaccatcctgcaccttgttgtcatgaactttgttggctgactcattctcatttacttaattgaggagtaggagactaaaagaatgttcactctttgaatttcctggataagagttctggagatggcagcttattggacacatggattttcttcagatttgcacttactgctagctctgctttttatgcaggagaaaagcccagagttcactgtgtgtcagaacaactttctaacaaacatttattaatccagcctctgcctttcattaaatgtaaccttttgccttccaaattaaagaactccatgccactcctccata

SEQ ID NO: 23972 - protein, 113 aa, Homo sapiens; identical to SEQ ID NO: 3161

SEQ ID NO: 23973 - DNA, 1152 bp, Homo sapiens
agcaattctcctgcctcagcctcctgagtagctgggattacaggcacgctcccccatgcccggctaatttttgtatttttagtagagacgaggtttcgccatgttggccaggctggtcacgaactcctgacctcaggtgattcacccacctcggcctcccaaagtgctgggattacaggcgtgagccgccatgcccggccggttgtgtttttaaatgaagaaatttaagtttccggggtcccttgatttctcttatctcctgcatctgtttcatcagcaagctctgtcttctccaaaatatagcctatggagttttgctcttgttgcccaggctggagtgcaatggcacgatctcggcttactgcaacttccgcctcccgggttcaagcggttcttctgcctcagcctcctgagtagctgggattgcaggcatgcaccaccaagcctggctaattgttttgtatttttagtagagacggggtttctccatgttggtcaggctggtctcgaactcccgacctcaggttatccacccgcctcgacctcccaaagtgctgggattacgggtgtgagccaccatgcctggcgtctgtccttgtgtttataacatgtcaagattgttcttactgtctagaatgctctgcccccagatttttacatgatgtgatatccttatcagtaacacaggctctggaaagttgataattctccatctggaggtggcttaccagattctgtaagtgtttgcctgagaatacagatcaacccacagaacaaagcggatttccaaggcatctccccagagcgagcctttgctgattttctctttgccagcaccatcctgcaccttgttgtcatgaactttgttggctgactcattctcatttacttaattgaggagtaggagactaaaagaatgttcactctttgaatttcctggataagagttctggagatggcagcttattggacacatggattttcttcagatttgcacttactgctagctctgctttttatgcaggagaaaagcccagagttcactgtgtgtcagaacaactttctaacaaacatttattaatccagcctctgcctttcattaaatgtaaccttttgccttccaaattaaagaactccatgccactcctccat

SEQ ID NO: 23974 - protein, 130 aa, Homo sapiens
MKKFKFPGSLDFSYLLHLFHQQALSSPKYSLWSFALVAQAGVQWHDLGLLQLPPPGFKRFFCLSLLSSWDCRHAPPSLANCFVFLVETGFLHVGQAGLELPTSGYPPASTSQSAGITGVSHHAWRLSLCL

SEQ ID NO: 23975 - DNA, 596 bp, Homo sapiens
atccggtgtggtcgacgggtcctccaagagtttggggcgcggactggagtaccttgcgtgcagttatgtcggcgtcggtagtgtctgtcatttcgcggttcttagaagagtacttgagctccactccgcagcgtctgaagttgctggacgcgtacctgctgtatatactgctgaccggggcgctgcatttgcctgagaatacagatcaacccacagaacaaagcggatttccaaggcatctccccagagcgagcctttgctgattttctctttgccagcaccatcctgcaccttgttgtcatgaactttgttggctgactcattctcatttacttaattgaggagtaggagactaaaagaatgttcactctttgaatttcctggataagagttctggagatggcagcttattggacacatggattttcttcagatttgcacttactgctagctctgctttttatgcaggagaaaagcccagagttcactgtgtgtcagaacaactttctaacaaacatttattaatccagcctctgcctttcattaaatgtaaccttttgccttccaaattaaagaactccatgccactcctccat

SEQ ID NO: 23976 - protein, 65 aa, Homo sapiens
MSASVVSVISRFLEEYLSSTPQRLKLLDAYLLYILLTGALHLPENTDQPTEQSGFPRHLPRASLC

SEQ ID NO: 23977 - DNA, 528 bp, Homo sapiens
cgcatgcgcaaacagcacatccggtgtggtcgacgggtcctccaagagtttggggcgcggactggagtaccttgcgtgcagttatgtcggcgtcggtagtgtctgtcatttcgcggttcttagaagagtacttgagctccactccgcagcgtctgaagttgctggacgcgtacctgctgtatatactgctgaccggggcgctgcagttcggttactgtctcctcgtggggaccttccccttcaactcttttctctcgggcttcatctcttgtgtggggagtttcatcctagcgggttcactctttgaatttcctggataagagttctggagatggcagcttattggacacatggattttcttcagatttgcacttactgctagctctgctttttatgcaggagaaaagcccagagttcactgtgtgtcagaacaactttctaacaaacatttattaatccagcctctgcctttcattaaatgtaaccttttgccttccaaattaaagaactccatgccactcctccat

SEQ ID NO: 23978 - protein, 78 aa, Homo sapiens
MSASVVSVISRFLEEYLSSTPQRLKLLDAYLLYILLTGALQFGYCLLVGTFPFNSFLSGFISCVGSFILAGSLFEFPG

SEQ ID NO: 23979 - DNA, 653 bp, Homo sapiens
tccaacatgtaccttccagctgtctacaacacaagtgcatgctcgtcggacaagaggtcacagctaaggcaacaatccacatgagttgggaagggctcatttcacctgtcaaacactgctgctctcatgtggaatgcactgtggctttttggtcaagataattaccgtggaagatcctaggtggcagcaaatcccaggtgaacagactgagccgtggaggtggcataaggcaaccctagccgagtttgcctgagaatacagatcaacccacagaacaaagcggatttccaaggcatctccccagagcgagcctttgctgattttctctttgccagcaccatcctgcaccttgttgtcatgaactttgttggctgactcattctcatttacttaattgaggagtaggagactaaaagaatgttcactctttgaatttcctggataagagttctggagatggcagcttattggacacatggattttcttcagatttgcacttactgctagctctgctttttatgcaggagaaaagcccagagttcactgtgtgtcagaacaactttctaacaaacatttattaatccagcctctgcctttcattaaatgtaaccttttgccttccaaattaaagaactccatgccactcctccat

SEQ ID NO: 23980 - protein, 39 aa, Homo sapiens [sequence omitted]

SEQ ID NO: 23981 - DNA, 2673 bp, Homo sapiens
atcccaatagctctaaatctgaaaccattgcattaaagatgttgttacgattattaaaagcattatcaactaggatcacatgcggctacgtgtctcggtgggcgacagctaaagaaacttgcaagcccgttgttccacaccaatttcagcgcgatggagacctctccagtctctccacatcttctctttgccgggcggagggaggaggctctctccatccccacgactgccgttctggggggcaagtcgagacgagcacgcctggctgctacctccgcacccgcgtcccacaagcttgctttcggggatctcacacatcaacatggaatctctccagaggccagaggagaatgaggggcactcgcgaggactaaggtagaaagccaggatccccgggctgcgggcgagcgcgtctcccatggctccccaggctcagccgctgcctcttctgggcaaatgcaaagcaagcaacgcacccaccccccgccctccccggaggccgacctggaaaaggaagagcgggaaggtgtctacaactgttcctcagccacagacagtcccaggatcatggcccagagagagagagagaaagagagaaagggacaggattaactcactgctgctccagatcatcggccatagtaaacaagccttgccaggtcctggcgagcccgcccagcgcctgacgccagcaccagctgacccgggaggccgcggggagcaagggggcgtggccgcgcagggggcagggctcgcggcgggccggcggtcggcggtgggaccctcaaaactctgcaacttggtttcagctagtggggcccttgctgtgttttcaatcactggcatgtgtcccggcagagatgtctctgacggtctcagaatgggacagtaatcctggtcacacatttgggggagtccttgcaggagctccgacagccctcccttctctcataactaaaaagtggtagaactacgcctgcacgctcgcacccactctttgggcttcccattgtaactgtgtcctcctgaaatcgacccttgttaatgttccttctagtaagaggcttaaatgtttgtggagacaacgccattggttgaatgctcctacaaagggcctggatgccagatttcgaaactaaaatacaggacacctagttaaatgtaaattccagatttaaataaagcaaatacttttttagaataagtatgggccatgcagtatttgggacataagtaggcatcctgtattttctctggcaaacctaaacctatatgacatctgccaaaatgggcatatctctgctctgatgttgactctgaccccaacctattttccagggaaaatatagctcaactccaggtcaccctcagtttggaggataacagttgaaggactcaccaataaggctaggtctcctttcggtatgtaaatgcggggacagggagataaggctggcttggcccagaggtcctgagtgcacttcagtttgctcagcagaggagctaaatcttgaggctggctgctgaatttgcttgtaccggtaaacagggcctgacctccctggaactgtcagatttcagatcatccccttagttaaaaccagactaggggtggggcgcggtggctcacgcctgtaatccctgcaccttgggaggccaaagtgggtggatcacttgcggtcagtagttcgagaccagtctggccaacatggtgaaaccccatctcttactaaaaatacaaaaaattagccaggtgtggtagcaggcacctgtaatcctagctactggggaggctgcggcagggagaattgcttgaacccaggaggcggaggttgcagtgagccaaaattgtgacactgcactccagcctgagagacagagtgagactccatctcaaaaaccaaaaacaaacaagcaaacaaacaaaaaaaaccagactggggagtggtggaggatgggtgagagaatgctggtgcacaggggtttatcaaagcatttttctttagccttcctgcaggacccagatgattctgagatttcttctttgtagcaacacagtgttaagctgatcattataaagacttaacgtttaggagaaccagcatttatagagtttaggggcttaggaatttgccagatgtggtacaaagtagttcaactagcagaggacttgtctctttcatgcaaccttttttttttttgagactgattctcactgtcacctaagctggaatgcagtgtcatgatcatggctcactgcagccttgaactctgaggcaggagaattgcttgaacacgggaggaggaggttgcagtgagttgagatcgtgccattgcactccagcctgggggacagagcaagactccatcttggaaaaaaaaaattcagatttctagcacctaccctctgagattcagattcagctggtttggcttgatgctagaaagccgcatttttaggaagcaccgcagatactggtgctccacgagactcactggttggttagaagtatagattctggagtcatgaagcctggttaagttcagtatttgctttgccacttatccactgtaaatccttggccaagttatttagcatctcttaatttcttcctctggcttgtatcttgtgagaactaaccaagataattcaaataaacatgtggtacactt

SEQ ID NO: 23982 - protein, 157 aa, Homo sapiens [sequence omitted]

SEQ ID NO: 23983 - DNA, 2509 bp, Homo sapiens
ctcccgggtcagctggtgctggcgtcaggcgctgggcgggctcgccaggacctggcaaggcttgtttactatggccgatgatctggagcagcagtctcaaggctggctgagtagctggctgcccacgtggcgccccacttccatgtctcagctgaagaatgtggaagccaggatcctccagtgtctccagaataagttcctggccagatatgtatccctcccaaaccagaataagatctggacggtgactgtgagccccgagcaaaacgaccgcacccccttggtgatggtgcatggttttgggggcggcgtgggtctctggatcctcaacatggactcactgagtgcccgccgcacactgcacaccttcgatctgcttggcttcgggcgaagctcaaggccagcattcccaagggacccggagggggctgaggatgagtttgtgacatcgatagagacatggcgggagaccatggggatccccagcatgatcctcctggggcacagtttgggaggattcctggccacttcttactcaatcaagtaccctgatagagttaaacacctcatcctggtggacccatggggctttcccctccgaccaactaaccccagtgagatccgtgcacccccagcctgggtcaaagccgtggcatctgtcctaggacgttccaatccattggctgttcttcgagtagctgggccctgggggcctggtctggtgcagcgattccggccggacttcaaacgcaagtttgcagacttctttgaagatgataccatatcagagtatatttaccactgcaacgcacagaatcccagtggtgagacagcattcaaagccatgatggagtcctttggctgggcccggcgccctatgctggagcgaattcacttgattcgaaaagatgtgcctatcactatgatctacgggtccgacacctggatagataccagtacgggaaaaaaggtgaagatgcagcggccggattcctatgtccgagacatggagattaagggtgcctcccaccatgtctatgctgaccagccacacatcttcaatgctgtggtggaggagatctgcgactcagttgattgagctgctctctgaagaggaagaggagaaagccagagagtcactcttacctccctgtctgcttactcacccactctgtcctttcctcaccaactaacatgtgccagccaggcagagtcttgtgctgttcccagaacaggacgacagtgaaaagaacactcttgaccctacactgaaggctgaaggcagaagccacaagaggccttgagtgccacccccagggaagaacataaagggttgcacaatgccacccatccactccttgccaagtgttacccagatggtggaggatgtgaagggattgcaccaagccacattcactctctctgtggcctttcttcctctgggcaaagaagggcttccagtggcctttcctcactctgtagtgtttgtggggataggttccatgcaagaacaccttcctcctccatcccccacttcaccccatcccataccagttccatccagggtctgcttaactgccaagagcaggtcctggagttcccttcacctgcagagtccttttcatgacctaggaggtcttattcaaagccctcattgacagaggaggaaacaggccaaggcaggacatggctggaccatggtgatacagctctgtgtgattcaagttctggcagagcttgtaaggctagagcccaggtctgccgacaccctgtgcttgttgcacacttgatttgctaaggctggagacaggcaccattgccatggggctggtcctagtcactggccgaggataagcccgtccctgtcccacattctagccccactatgcgggggtgctgttgtcctgcctgtgtctcatccccagctgcctaagctagggacactcaagtgcttccttccttgccccatcttcctcccaactggaggcctctgagcctcccctgtgccttgggccctgaagccccatatgtagtatagagcaaaggtggctcctggtgaagagagggtggaaaggcccttcagccccagggccatgtctgggttctccatgcccatcagtctctgcagtttctctacctgcccccagagctgaggccatctgcaagcccctgcccatggcccaatggggagcctccagccacaagttccctgtccttatcagccactgggtggttcccactgcatgaccctctatccctgccatctgtccccatggtttccagctcaatccacccctgacccatctgtcagctttttcccagggagccgtttcaggggttctgggcagtaggctgggcctggcctcagaacctggtggctcctgcctgctccttcacttttgtaaaaccatccccttcaccagaatggtattaactcctggtgctttgtactactggtccagctgccttgggctccttttctatattaataaagaaacgagtaaaaatt

SEQ ID NO: 23984 - protein, 342 aa, Homo sapiens; identical to SEQ ID NO: 3163

SEQ ID NO: 23985 - DNA, 3366 bp, Homo sapiens
ctcccgggtcagctggtgctggcgtcaggcgctgggcgggctcgccaggacctggcaaggcttgtttactatggccgatgatctggagcagcagtctcaaggctggctgagtagctggctgcccacgtggcgccccacttccatgtctcagctgaagaatgtggaagccaggatcctccagtgtctccagaataagttcctggccagatatgtatccctcccaaaccagaataagatctggacggtgactgtgagccccgagcaaaacgaccgcacccccttggtgatggtgcatggttttgggggcggcgtgggtctctggatcctcaacatggactcactgagtgcccgccgcacactgcacaccttcgatctgcttggcttcgggcgaagctcaaggccagcattcccaagggacccggagggggctgaggatgagtttgtgacatcgatagagacatggcgggagaccatggggatccccagcatgatcctcctggggcacagtttgggaggattcctggccacttcttactcaatcaagtaccctgatagagttaaacacctcatcctggtggacccatggggctttcccctccgaccaactaaccccagtgagatccgtgcacccccagcctgggtcaaagccgtggcatctgtcctaggacgttccaatccattggctgttcttcgagtagctgggccctgggggcctggtctggtgcagcgattccggccggacttcaaacgcaagtttgcagacttctttgaagatgataccatatcagagtatatttaccactgcaacgcacagaatcccagtggtgagacagcattcaaagccatgatggagtcctttggctgggcccggcgccctatgctggagcgaattcacttgattcgaaaagatgtgcctatcactatgatctacgggtccgacacctggatagataccagtacgggaaaaaaggtgaagatgcagcggccggattcctatgtccgagacatggagattaagggtgcctcccaccatgtctatgctgaccagccacacatcttcaatgctgtggtggaggagatctgcgactcagttgattgagctgctctctgaagaggaagaggagaaagccagagagtcactcttacctccctgtctgcttactcacccactctgtcctttcctcaccaactaacatgtgccagccaggcagagtcttgtgctgttcccagaacaggacgacagtgaaaagaacactcttgaccctacactgaaggctgaaggcagaagccacaagaggccttgagtgccacccccagggaagaacataaagggttgcacaatgccacccatccactccttgccaagtgttacccagatggtggaggatgtgaagggattgcaccaagccacattcactctctctgtggcctttcttcctctgggcaaagaagggcttccagtggcctttcctcactctgtagtgtttgtggggataggttccatgcaagaacaccttcctcctccatcccccacttcaccccatcccataccagttccatccagggtctgcttaactgccaagagcaggtcctggagttcccttcacctgcagagtccttttcatgacctaggaggtcttattcaaagccctcattgacagaggaggaaacaggccaaggcaggacatggctggaccatggtgatacagctctgtgtgattcaagttctggcagagcttgtaaggctagagcccaggtctgccgacaccctgtgcttgttgcacacttgatttgctaaggctggagacaggcaccattgccatggggctggtcctagtcactggccgaggataagcccgtccctgtcccacattctagccccactatgcgggggtgctgttgtcctgcctgtgtctcatccccagctgcctaagctagggacactcaagtgcttccttccttgccccatcttcctcccaactggaggcctctgagcctcccctgtgccttgggccctgaagccccatatgtagtatagagcaaaggtggctcctggtgaagagagggtggaaaggcccttcagccccagggccatgtctgggttctccatgcccatcagtctctgcagtttctctacctgcccccagagctgaggccatctgcaagcccctgcccatggcccaatggggagcctccagccacaagttccctgtccttatcagccactgggtggttcccactgcatgaccctctatccctgccatctgtccccatggtttccagctcaatccacccctgacccatctgtcagctttttcccagggagccgtttcaggggttctgggcagtaggctgggcctggcctcagaacctggtggctcctgcctgctccttcacttttgtaaaaccatccccttcaccagaatggtattaactcctggtgctttgtactactggtccagctgccttgggctccttttctatattaataaagaaacgagtaaaaattaccggtggggatgatgtttaaaattgctctgatcactggtggtgctgaattcgcaacagcctgtgtgatgcctgagagaagggagtcctgagggttgcctgcctacccacgactccttctccttttagtgtggcgtttgcccgctagacccagcccagagtccaggtcagcacaggccctctcagccaaccactcatgacaaatgaggagtcgagatccacagtgtggatggggcaagccccagttcacagtagagaggtggagcttagtacttcctgctgcccattagacaccctttcttcctaagttcaagggaagcccacacatgtactgctccctgcatcctgctctaacttcctctcatcctctggatctcagctcaaatattccttatgcagagatgccttcccctgattccctaaactagactcggacccctctgttctgcatctctgtggcatatcatctgccccttttgtaaaacttataaacttgtggttacttgtttagcgtctctttcctccccagaccataagcaacataaagacaaagggtacatctagcacatagttcgtgttcaataaatgtttgttttcatcatgccacgggaagtgagatataccaagtattcaaaaaagtgttcaaatcattactaacagtgcttgctctgtgctggctgagtccagctgggcccagaattccacggttctaaatggcgcatattccatgtgcataggctgattgaaaatgtattaaacctaaatttttaaaaaaaagcacatgatactacacatgtcatgatgaatgaatagacagaactcctcctgaatataattacaaagttctgatccatctca

SEQ ID NO: 23986 - protein, 342 aa, Homo sapiens; identical to SEQ ID NO: 3163

SEQ ID NO: 23987 - DNA, 1975 bp, Homo sapiens
ctgcgactcagttgattgagctgctctctgaagaggaagaggagaaagccagagagtcactcttacctccctgtctgcttactcacccactctgtcctttcctcaccaactaacatgtgccagccaggcagagtcttgtgctgttcccagaacaggacgacagtgaaaagaacactcttgaccctacactgaaggctgaaggcagaagccacaagaggccttgagtgccacccccagggaagaacataaagggttgcacaatgccacccatccactccttgccaagtgttacccagatggtggaggatgtgaagggattgcaccaagccacattcactctctctgtggcctttcttcctctgggcaaagaagggcttccagtggcctttcctcactctgtagtgtttgtggggataggttccatgcaagaacaccttcctcctccatcccccacttcaccccatcccataccagttccatccagggtctgcttaactgccaagagcaggtcctggagttcccttcacctgcagagtccttttcatgacctaggaggtcttattcaaagccctcattgacagaggaggaaacaggccaaggcaggacatggctggaccatggtgatacagctctgtgtgattcaagttctggcagagcttgtaaggctagagcccaggtctgccgacaccctgtgcttgttgcacacttgatttgctaaggctggagacaggcaccattgccatggggctggtcctagtcactggccatctgcaagcccctgcccatggcccaatggggagcctccagccacaagttccctgtccttatcagccactgggtggttcccactgcatgaccctctatccctgccatctgtccccatggtttccagctcaatccacccctgacccatctgtcagctttttcccagggagccgtttcaggggttctgggcagtaggctgggcctggcctcagaacctggtggctcctgcctgctccttcacttttgtaaaaccatccccttcaccagaatggtattaactcctggtgctttgtactactggtccagctgccttgggctccttttctatattaataaagaaacgagtaaaaattaccggtggggatgatgtttaaaattgctctgatcactggtggtgctgaattcgcaacagcctgtgtgatgcctgagagaagggagtcctgagggttgcctgcctacccacgactccttctccttttagtgtggcgtttgcccgctagacccagcccagagtccaggtcagcacaggccctctcagccaaccactcatgacaaatgaggagtcgagatccacagtgtggatggggcaagccccagttcacagtagagaggtggagcttagtacttcctgctgcccattagacaccctttcttcctaagttcaagggaagcccacacatgtactgctccctgcatcctgctctaacttcctctcatcctctggatctcagctcaaatattccttatgcagagatgccttcccctgattccctaaactagactcggacccctctgttctgcatctctgtggcatatcatctgccccttttgtaaaacttataaacttgtggttacttgtttagcgtctctttcctccccagaccataagcaacataaagacaaagggtacatctagcacatagttcgtgttcaataaatgtttgttttcatcatgccacgggaagtgagatataccaagtattcaaaaaagtgttcaaatcattactaacagtgcttgctctgtgctggctgagtccagctgggcccagaattccacggttctaaatggcgcatattccatgtgcataggctgattgaaaatgtattaaacctaaatttttaaaaaaaagcacatgatactacacatgtcatgatgaatgaatagacagaactcctcctgaatataattacaaagttctgatccatctca

SEQ ID NO: 23988 - protein, 72 aa, Homo sapiens
MGLVLVTGHLQAPAHGPMGSLQPQVPCPYQPLGGSHCMTLYPCHLSPWFPAQSTPDPSVSFFPGSRFRGSGQ

SEQ ID NO: 23989 - DNA, 614 bp, Homo sapiens
tgcacacctgtatacccagtctttggcaatacacattacagatactggccaaaaaagaattagaaaatcagtgtcaaagttggattgtggtccctgaagacttagattaatggaattctgctggaaacataaaggttgtttccctgctgttcacatctgttgcatcctgggaaaaaaacaaaaaggaagatgttatgtgaagagctgatgtttgcatcgccgactctccctgatttgtgctgatgatagctgaagctgcagtcttggcatcttctactgcacattgtcatcagcaaggtaagaagtgccttttgcctcctgccatgattctgaggcctccctccccagccatgtggaaccgctggagtgcagtggaagatctcagctcactgcaacctcctcctctcaggttcaagcaattcttgtgcctcagccacccaaaatagctgaaattacagctttggtatcagaatgatgctggcctcataaaatgagttagggaggattccctctttttctattgattggaatgaactcagctctgcaccaagcggacctaatagacatctacagaactctccaccccaaatcaacagaatatacatttttttcag

SEQ ID NO: 23990 - protein, 67 aa, Homo sapiens
MIAEAAVLASSTAHCHQQGKKCLLPPAMILRPPSPAMWNRWSAVEDLSSLQPPPLRFKQFLCLSHPK

SEQ ID NO: 23991 - DNA, 8192 bp, Homo sapiens
cggacgcccggcgagtggcggaaagcgagaccccggcgccgagtgaggtcggccaggctgctgccgacttccccgctggcccctttgttcccctcccggggccctgccggcggcggggcccggttgcccgcgccagagcctcaggccggctccttttgcccttgagaagggttcgctgccaggccttcgagttccgggcgcagctcccgggagagccggcgccctgcctggcccggcggcctcctctcgggcacgaaggcttgctgctgcttctccagaacttcccttcctcgtagacacagcaaagagacttttaaaaaaccatggcagatgtggacccagatacattgctggaatggctacagatgggacagggagatgaaagggacatgcaactaatagcccttgaacagctatgcatgctgcttttgatgtctgacaacgtggatcgttgttttgaaacatgtcctcctcgcactttcttaccagccctttgcaaaatttttcttgatgaaagtgctccagacaatgtattagaggtgacagcccgtgccataacatactacctggatgtatctgcggaatgtacccgaaggattgttggggtagatggagctataaaagcactttgtaatcgtttggttgtagttgaacttaacaacaggactagcagagacttagccgaacagtgtgtaaaggtattagaactgatatgtactcgtgagtcaggagcagtctttgaggctggtggtttgaattgtgtgcttaccttcattcgtgacagtggacatctagttcataaagacaccttgcactctgctatggctgtggtatcaagactctgtggcaaaatggagcctcaagattcttctttagaaatttgtgtagaatctctgtctagtttattaaagcatgaagatcatcaggtttcagatggagctctgcgatgctttgcatcactggctgaccgatttacccgtcgtggtgttgacccagctccattagccaagcatggattaactgaggagctgttatctcgaatggctgctgctggtggtactgtttcaggaccatcatcagcatgcaaaccaggtcgcagcaccacaggagctccatccaccactgcagattccaaattgagtaatcaggtgtcaacaattgtaagtctgctctcaacactttgcagaggctctccggtagtaacacatgatcttctgaggtcggagcttccagattcaattgaaagtgcattgcagggtgatgaaagatgtgtgcttgatactatgcgtttggttgaccttctcttggtgctattatttgaaggacgaaaagctttgccaaagtctagtgctggatctacaggcagaatcccaggactccggagattagatagttctggggagcgctcacatcggcagcttatagattgtattcgaagtaaagataccgatgcacttatagatgcaattgacacaggagcctttgaagtaaattttatggatgatgtaggtcagactctattaaactgggcctctgcttttggaactcaggaaatggtagaatttctttgtgagagaggtgcagatgttaatagaggtcaaaggtcatcatcattacattatgctgcatgttttggaagacctcaagtagcaaagactctgttacggcatggtgcaaatccagatctgagagatgaagatgggaaaactccattagataaagctcgagaaaggggccatagtgaagtggtagctattcttcagtctccaggtgattggatgtgtccagttaataaaggagatgataagaaaaagaaagatacaaacaaagatgaagaagaatgtaatgagcccaaaggagatccggaaatggcacccatatacttgaaaaggttattgccagtgtttgcacaaacatttcagcaaactatgctgccttcaataaggaaagcaagtcttgctctaattcgaaaaatgattcatttttgctctgaagcactgttaaaagaagtttgtgattctgatgttggtcacaatttgcctacaatactagtggaaatcactgcaactgtcctggatcaagaggatgatgatgatggccacttgctggctttgcagatcataagggatttagtagataaaggtggtgatatatttttggatcagctagccagacttggtgtaattagcaaagtgtcaacgttggcaggtccttcctctgatgatgagaatgaagaggaatcaaaaccagaaaaagaagatgaaccacaggaagatgctaaagaattgcaacaaggtaaaccatatcattggagagactggtcaatcattaggggaagggactgcttatatatttggagtgatgcagcagccttggaattatctaatggcagtaatggatggttcagatttatcttggatggaaaacttgccaccatgtattcaagtggtagtccggaaggtggatctgacagttcagaaagccgaagtgaattcttagagaagttacaaagagctcgaggccaagtaaagccatctacttcaagtcaacctatactgtcagcaccaggacccactaaacttactgtaggaaattggtcactgacatgtttgaaagaaggagaaattgctattcataattcagatggtcagcaagctacaatattgaaagaagatttacctggttttgtatttgaatctaatagaggaaccaaacattcatttactgcagaaacttccctgggttcagaatttgtgactggctggactggcaaaagaggcagaaaactgaaatctaagttagaaaaaacaaagcaaaaggtacgaactatggctcgagatttatacgatgaccattttaaagctgttgaaagcatgcctcgtggagtagtggtaacactcagaaacatagcaactcagttagagtcatcttgggaacttcatacaaatagacaatgtattgagagtgagaacacttggagagatttaatgaagacagctttagaaaacctaattgtacttttgaaggatgaaaacacaatttcaccatatgaaatgtgtagcagtggcttggtacaagcacttcttactgtgttaaacaatgtaagttgaaaatgaagatgatgaaagtcgaccagcagttgcgttaattcgaaagttaatagctgtactagaatctattgaacgtctacctctccatttgtatgatacaccaggatccacatataacctccagatacttacaaggagattacgatttcggttggaacgtgcacctggtgaaactgcattgattgacaggactggcagaatgttgaagatggaacctttggctacagttgaatctctggaacagtaccttttgaaaatggtagcaaaacagtggtatgattttgaccgatcttcatttgtttttgttcgaaaattaagagaaggacaaaattttatatttcggcaccagcatgattttgatgaaaatggaatcatttactggattggaacaaatgcaaaaactgcttatgaatgggtaaatccagctgcctatggacttgtagtagtaacgtcatcagaaggaagaaatctaccttatggccgcttagaagacatactaagtcgtgataattcagctttaaattgtcatagcaatgatgataagaatgcctggtttgccatagatctgggtctctgggtgataccatcagcatatacacttcgtcatgctcgtggttatggaaggtctgcactgagaaattgggttttccaggtatccaaagatggacagaactggacttctttgtatacccatgttgatgactgcagtctcaatgaaccagggtcaactgcaacttggcctcttgatccaccaaaggatgagaaacaagggtggagacatgtgagaattaaacagatggggaaaaatgccagtggacaaacacactacctctcattatctggattcgaactttatggcactgtaaatggagtatgtgaagatcagctagggaaagcagctaaagaagcagaagctaatcttagacggcagagacgtctagtacgttcccaggttctgaaatacatggttccaggagctcgtgttatcagaggcctggattggaaatggcgagatcaggatggcagcccacagggagaaggcactgtcacaggagaactacacaatggctggattgatgtcacctgggatgctggtggctcaaactcttaccgtatgggcgcagaaggaaaatttgacctcaagcttgcaccagggtacgaccctgatacagtggcatcacccaaacctgtttcatccactgtttcaggcacaacgcaatcatggagcagcttggtgaaaaacaactgtccagacaagacatctgctgctgcaggctcctcaagtagaaaaggaagcagcagttctgtgtgtagcgtggccagtagcagcgacatcagcttgggttcgaccaaaacggaacggagatcagaaattgtaatggaacacagtatagtttcaggagctgatgtccatgaaccaattgttgttctttcatctgctgaaaacgtccctcaaacagaagtagggtcatcttccagtgcaagcaccagcaccttaacagcggaaacgggaagtgaaaatgctgaaaggaagttaggccctgatagttctgttcgtactcctggggagtctagtgcaatatccatgggaattgtcagtgttagttctcctgatgttagttcagtatctgaattaactaataaagaagcagcttcacaacgacctcttagctcttcagcaagtaacagactgtcagtgagttctttgttggctgctggggcccctatgagctctagtgcaagtgtacctaacctgtcctcaagagaaacatctagcttggagagttttgtaaggagagtggcaaacatagcacggactaatgccacgaacaacatgaatctaagccgaagcagcagtgataacaacactaatactttggggaggaatgtgatgagcacagcaacttctcctcttatgggtgctcagagtttccctaatttgaccacacctggtactacatcaacagtgactatgtcaacatccagtgttactagcagcagcaatgtagctacagcaacaacagttttatcagttggtcaatctttaagtaacactttaaccaccagcctcacatcaacttccagtgagagtgacacaggtcaggaagcagaatattccttatatgatttccttgatagctgccgtgccagtactctattggctgagctcgatgatgatgaggacttacctgagccagatgaagaagatgatgagaatgaagatgacaatcaggaggaccaagaatacgaggaggttatgattctgagacgcccatccctgcaacgtcgagctggctcccgctctgatgtaacgcatcatgctgttacctcgcagctaccacaggtacctgctggagcagggagccgacctattggggagcaggaagaagaagagtacgaaactaaaggaggacgccggagaacatgggatgatgattatgtgctaaagagacagttttctgcattggttcctgcttttgatcctagacctggtcgtactaatgtccagcagacaactgatctagaaataccacccccagggacccctcattcagagctcttggaagaagtcgaatgtactccgtcacctcgattagctctcactttgaaagtaacaggtcttggaacgactcgtgaagttgaattaccactcaccaatttcagatcaaccatcttttactatgtacaaaaattgcttcaattgtcctgtaatggcaatgtgaaatcagataaacttaggcgtatttgggagcccacatacacaatcatgtacagagaaatgaaggattctgataaagaaaaggaaaatggaaaaatgggttgctggtctatagagcatgtggagcagtaccttggcactgatgaattaccaaagaatgacttgataacctacctgcagaagaatgcagacgctgctttcctgcgccactggaaattaactggcactaataaaagtattaggaaaaacagaaattgttctcagctcatagctgcatataaggatttttgtgagcatggaacaaagtctgggttaaaccagggggccatttctactcttcaaagtagtgatattcttaatttaacaaaagaacaacctcaggccaaagcaggcaatggacagaactcttgtggagtagaagatgtccttcagcttctgcgtattctatatatagttgcaagtgacccttattcaagaatatcccaggaagatggtgatgaacagcttcagtttacttttccaccagatgaattcactagcaaaaaaattacaacaaaaatattacagcagattgaggaaccattggcactggcaagtggggctctgccagactggtgtgaacaattaaccagcaaatgtccttttctaataccatttgaaactagacagctttatttcacatgtacagcatttggcgcctcaagagcaatagtatggttacagaaccgacgtgaagccactgtggagcgaacgagaaccacaagcagtgttaggcgagatgaccctggagagtttcgagttggtcgtctcaagcatgaaagagtaaaagttccacgtggcgagtcactgatggaatgggctgagaatgtcatgcaaatacatgcagatcggaaatcagttcttgaggttgaatttttaggagaagaaggaactggcttgggacccacattagagttttatgctctggtggcagcagaattccagagaactgacttgggagcttggctttgtgatgataattttccagatgatgaatctcgtcacgttgatcttggaggtggattgaaacctcctggatattatgtgcagaggtcatgtggactgttcacagcaccatttccacaggatagtgatgagcttgaaaggatcacgaaactgtttcatttccttggaattttcttggccaaatgcattcaagacaatagacttgtggacttacctatttctaaacctttttttaaacttatgtgtatgggtgacattaaaagcaatatgagtaaactgatttatgagtcacgaggtgatagagacttacactgtactgaaagtcagtctgaagcttctacagaagaaggtcatgattcactctcggtaggaagctttgaagaggattcaaaatcagaatttattcttgatccccctaaaccaaaacccccagcttggtttaatggaattttgacttgggaagactttgaattagtaaacccacacagagccagatttttaaaagaaattaaagaccttgctatcaagaggcgccaaattttaagcaacaaaggtctttctgaagatgagaagaacacaaaattacaggaactagtgctgaagaatccatcaggttctgggcctccacttagcatagaggatttaggtttaaatttccagttttgcccttcctcaagaatatatggttttacagctgtggatctcaagccaagtggtgaagatgagatgataacaatggataatgcagaagaatatgtggatttgatgtttgacttttgtatgcatacgggtattcagaaacaaatggaagcctttagagatgggtttaataaagtttttccaatggagaaattaagttccttcagccatgaagaagtccaaatgattctttgtggaaaccagtcaccatcctgggcagcagaggatattatcaattacactgaacctaagctgggttatacacgtgacagccctggtttcctgaggtttgtgagggttttatgtggcatgtcttctgatgaaaggaaagcattcttgcagtttaccactggttgttcaactctacccccaggtggactggctaacctgcatcccaggctcacggttgtacgcaaggttgatgctactgatgcaagctatccatcagtcaatacatgtgtgcattaccttaagttgcctgaatattcttccgaggagatcatgagagagcgcctgctagctgctacaatggagaaaggctttcatctcaattgagctttgaagtgcaatgggagacatcagagactttaaaaatactagtgaagcctcttgtgtttgtgtgcagagaagtatatgatccaccatgctaatgacacttg

SEQ ID NO: 23992 - protein, 1592 aa, Homo sapiens
MLKMEPLATVESLEQYLLKMVAKQWYDFDRSSFVFVRKLREGQNFIFRHQHDFDENGIIYWIGTNAKTAYEWVNPAAYGLVVVTSSEGRNLPYGRLEDILSRDNSALNCHSNDDKNAWFAIDLGLWVIPSAYTLRHARGYGRSALRNWVFQVSKDGQNWTSLYTHVDDCSLNEPGSTATWPLDPPKDEKQGWRHVRIKQMGKNASGQTHYLSLSGFELYGTVNGVCEDQLGKAAKEAEANLRRQRRLVRSQVLKYMVPGARVIRGLDWKWRDQDGSPQGEGTVTGELHNGWIDVTWDAGGSNSYRMGAEGKFDLKLAPGYDPDTVASPKPVSSTVSGTTQSWSSLVKNNCPDKTSAAAGSSSRKGSSSSVCSVASSSDISLGSTKTERRSEIVMEHSIVSGADVHEPIVVLSSAENVPQTEVGSSSSASTSTLTAETGSENAERKLGPDSSVRTPGESSAISMGIVSVSSPDVSSVSELTNKEAASQRPLSSSASNRLSVSSLLAAGAPMSSSASVPNLSSRETSSLESFVRRVANIARTNATNNMNLSRSSSDNNTNTLGRNVMSTATSPLMGAQSFPNLTTPGTTSTVTMSTSSVTSSSNVATATTVLSVGQSLSNTLTTSLTSTSSESDTGQEAEYSLYDFLDSCRASTLLAELDDDEDLPEPDEEDDENEDDNQEDQEYEEVMILRRPSLQRRAGSRSDVTHHAVTSQLPQVPAGAGSRPIGEQEEEEYETKGGRRRTWDDDYVLKRQFSALVPAFDPRPGRTNVQQTTDLEIPPPGTPHSELLEEVECTPSPRLALTLKVTGLGTTREVELPLTNFRSTIFYYVQKLLQLSCNGNVKSDKLRRIWEPTYTIMYREMKDSDKEKENGKMGCWSIEHVEQYLGTDELPKNDLITYLQKNADAAFLRHWKLTGTNKSIRKNRNCSQLIAAYKDFCEHGTKSGLNQGAISTLQSSDILNLTKEQPQAKAGNGQNSCGVEDVLQLLRILYIVASDPYSRISQEDGDEQLQFTFPPDEFTSKKITTKILQQIEEPLALASGALPDWCEQLTSKCPFLIPFETRQLYFTCTAFGASRAIVWLQNRREATVERTRTTSSVRRDDPGEFRVGRLKHERVKVPRGESLMEWAENVMQIHADRKSVLEVEFLGEEGTGLGPTLEFYALVAAEFQRTDLGAWLCDDNFPDDESRHVDLGGGLKPPGYYVQRSCGLFTAPFPQDSDELERITKLFHFLGIFLAKCIQDNRLVDLPISKPFFKLMCMGDIKSNMSKLIYESRGDRDLHCTESQSEASTEEGHDSLSVGSFEEDSKSEFILDPPKPKPPAWFNGILTWEDFELVNPHRARFLKEIKDLAIKRRQILSNKGLSEDEKNTKLQELVLKNPSGSGPPLSIEDLGLNFQFCPSSRIYGFTAVDLKPSGEDEMITMDNAEEYVDLMFDFCMHTGIQKQMEAFRDGFNKVFPMEKLSSFSHEEVQMILCGNQSPSWAAEDIINYTEPKLGYTRDSPGFLRFVRVLCGMSSDERKAFLQFTTGCSTLPPGGLANLHPRLTVVRKVDATDASYPSVNTCVHYLKLPEYSSEEIMRERLLAATMEKGFHLN

SEQ ID NO: 23993 - DNA, 1046 bp, Homo sapiens
tggactgggcctccccgccgcgccgccgccgccgtcgcccgcagcaccgcgcgggcctctgagttgcagggcctgaggagccgcgtgctggggactggacgtccgctggctgctgccgcacgcgagaacctctcgcttccctgtcaccaggtcctcgcggaggaaggggagggacgaggcgcggcttttcctgtgccgcctgcccggttcgacctgcgcggcctgcggcttcttgggaactctagggccgcggccgggcctggctctgccggcggcctgttgggagctggatcggagcggtttggaacgacaagcccgacaaagagacttttaaaaaaccatggcagatgtggacccagatacattgctggaatggctacagatgggacagggagatgaaagggacatgcaactaatagcccttgaacagctatgcatgctgcttttgatgtctgacaacgtggatcgttgttttgaaacgctttattcatatatagtatgatgtaatttttaagagactggggcctcactatgttgcccagtctggcctcgagctcctgggttcaagcgattctcctgcctcggcctcttcagtagctgggactataggctgtgccaccacacctggctttataatgtaattttaaggaaatgaacctaaagttaagtcagatatgatttactatatgaagatacaagagtatttcaagttgaaggggttagccgtgtttggggtagtgtaccagtaacctccaaaaactagacatttggtttaattttgtgactgttttgtttttaaacattagtttgcttttcattctatagccagattttcttgttgttacaagggaaaattgtcctggttccttcttgaaactagtgagggaggcatagtgagatggaaagaatgggctgtggcatcagagacttgggttcagattcttggtctgttgtgttcattagcctctgagagccttactttcttcccctgtaaaatggcagtagtctttttttcttttctgttttttcatatgaagtcttgctct

SEQ ID NO: 23994 - protein, 53 aa, Homo sapiens
MADVDPDTLLEWLQMGQGDERDMQLIALEQLCMLLLMSDNVDRCFETLYSYIV

SEQ ID NO: 23995 - DNA, 927 bp, Homo sapiens
agcttgtgttcatccagctctttcgactccgtccatgaacactctatctcctctcaacaatgatttgggctgtgttttggatccagctgcttaagaaggaatgactgaggagaagtcaattgggccaaaattattctaggaggtaaccagagatgaccttgtactgtgagaggatttgaccctggcatgtgaaatggcagatgagagctagaaagagtcaaggaaacatttcttttgagctattgtcaacttttaacaaggaagtatactcctatgaacaaaatttggagcatatttgtttctttctacctgatttctccagaatttgggaactatttggatgcattctcaccatgctgcaaggctgctctcggactcctggcctcaagcaatctgcccaccgcgtcctcccaaagtgctggatggaattacagacaaactgaactgcttccaaatagcctcaattacctggatcccaacagtcaagaattgttgttaaggcacttcggagaaggtcagtccaagcagtacggctcttttctgcccgggccatgggagaagataatattccttttagagcctgtagggaagctgcaactgtcgaagataactggcccccaggtaacttcacagcagtctctctgaggaccccgattgtgaggtacaatatagtagggagaattgagatgcttcctgtaagatacattttttaaaaacacactggatttcaacctatatatatggtttctaaaaagaaatcatcaaggagtaagacaatgtcagattttcagtttttaaaagatgatttctaataaagaattataactgttaagataatgtaagtagctttattaaaatttttatggatggattaaatcttgatggttataactggagattacgtttaaataaattgtgtgagtatca

SEQ ID NO: 23996 - protein, 123 aa, Homo sapiens
MNKIWSIFVSFYLISPEFGNYLDAFSPCCKAALGLLASSNLPTASSQSAGWNYRQTELLPNSLNYLDPNSQELLLRHFGEGQSKQYGSFLPGPWEKIIFLLEPVGKLQLSKITGPQVTSQQSL

SEQ ID NO: 23997 - DNA, 3851 bp, Homo sapiens
tataacagtgctacatgttaactttaaatattaactgtgtacttattttaccttaaaatcactcagatgtcttttataaaataaatcctattcatccataaaattttgctttcactgctactgtgcctcttgagtatagtcagctcaggtattatctcctcaaggctttctctgatcacccaggataggctgtcctgagctactttgaatgttgtttgtttgtttgtttgtttgtttaaagagacagggacttgctgtgttacccaggctggagtgcagtgtctattcacaggcacgatcattgtgcactgcagccttgaactcctggactcaaccagtcctcccacctcagtgtctcaagtagctgggactatagacacacaccactgctcctggtgtgatgtttgttttgttttgttttgttttgtttttattgagacggagtctccctgtgcagcccaggctggagtgcagtggcgtaatcttggctcactgcaacctccgcctcctgatgtcaagtgattctcctgcctcagcttcccgagtagctgggattacagtcatgcaccaccacatctggacaatttttgtatttttagtagagaccgggcttcaccatgttggccaggctggtctcgaacccctgacctcaagtgatccgcctgcctcagcctcccaaagtactgggattacaggccaccgcacccagccagctttttaatatatttttatatgcttagaccttatcactagttgaaagtctttgcttctcagcttatagtgtatcttctctataagatgtattctctgtgcctaaaagagggctggcacacagtgtttcttaagtcttgttgaatgaatgtgaccaaaactactacatatgtcatttcttcataagtatcaacccattcttaaacaatttaaatatttgaatttgctacatctttcttttttgaataacagtgattttttttccacagcagtttcattaaaattatttaatgagagtatgactagaaaataaaggtagattacttctaatagaaaattccttcaaatgattgtggcctacacagctgttttcaggtttttctctactcttgagaaatcatatttgtaaagtgctaacgtattttcacttgatacatgtattataaaaatactttaacaaagagaaaacaattgtgcaagcatttctgtgttgcttcacagtaaaaataattaacatgataagtagcatatactgagcgtcatgtgtagcatactattctaaatgcttcacatggattaactcatttaatcttcacaaccctatcaatgtgagtactgctgttattcccattttacagatgagaatactgaagatggagttagatgtccaaagtcacacaactaataaatatgtattcctagtaaatgtatgtatttatttactgatgtcttaacctttaaagattataattactttggtagttcttagctctagaattacttataatgcacatcttaaaatgtacctttgccagggttcttagtcagcgttcattgtgtgtatctgttgtgtacaccaaactgttactaccaaactgaagacagcttcacacaggtatataaagcagtaaatatgaactgtttctaatagagcatttctctttagttgatgaaacacaccaagaacttgatgaagtcagtctacttactgctatcacagtgtttattttgtctaccagtccagaagtaactaccatcccatgccttcagaagcgctgtattgataaatttaaagctactcttgagataaaagatcctgtggtacaaatcaagacctaccagctcctacattccatctttcagtatccaaatccagctgtttcctacccatacatttactctttagcatcctgtatcatggaaaaactgcaggaaatagacaagagaaaacctgaaaacactgctgagcttgagatcttccaagaaggcataaaggtcttagaaacactggttactgttgctgaagaacaccatcgcgctcagctggtggcctgtcttttgcccatcctcatttccttccttttggatgaaaattctctgggatcagcaacttccataatgagaaatttacatgactttgctctacaaaatctcatgcaaattggacctcagtattcatctgtttttaaaagtttagtggcttcttctccagccctaaaagcccgccttgaggctgctataaagggcaatcaggaaagtgtcaaagtcaagataccaacatctaaatatactaagagtcctggaaaaaactcaagcatccaattaaagaccagtttcctctgattttttttttggaatagtaagcaccttaatataataaatacttgatcattgcctttggtgacaaaagggacattgtagacacaagtgcccttagaggtctagttgattgttttaccttaaatagctgtgactcttcaaagtaacagcatacttaacatttttgtgtgtgtgcgtggggtttgtgttttgttttgttttgtttttctatttaaaaagacaatggagctaacttgccaggaattttaagaaagtgctaaagaactaaacttactaaacaatccactgctttaaaaatgaaatgaatttcttctaacagtccatacatatgtggtatacttaatactgtgacagatataaatatgactctagtgtaaattatctgcactaatattgtatcccaattgctgatttaaaattctgctttggcccggcacagtggctcatccctgtaattccagcactttggaaggccaaggcgggcggatcacgaagtcgggagtttgagaccagcctgaccaacatggtgaaaccccgtctctactaaaaatacaaaaattagccgggtgtggtggcacacacctgtaatcccagctactcaggaggccgaggcaggaaaatcgcttgaacctggcaggcagaggttgcagtgagccaagattgtgccactgcactccagcctgggcgacagagtgagactccatctaaaaaaaaaaaaaaaaaattctgccttattcagtaattgtattaaactttctctgatttctccaagaagataaaatgattggagagctatttaggaaacctggtctaggattatccagtatacaatagtacaaattacttacagccttacagtgcaacataagatttggtgtctatatcatggttttccaccatcttttggtttagtttatattgggttcagaaattgagtcttactcattttaaatagaataagccatttccactatttttcaaatggatttttctgtttacctctgttcttaccaattttgttcattttcatttgtggcaaacatttgtatcaatgagttttaacctaggttcatatctacattgtatttagatcaactatgggtttatataaatgccaaatttagtacaacaaatttaggtcatcaggtgaatacaagtattttttttaacaggaaacattttattatagaaaaaagattaatgataaagtcatattggttgaaaaatattttttaactgtgttcatgattgttgattctccttctacttcagtgttatactgtgtgaatcaagcactgtgtcaaaacagagcatttccctcttaaaaattacaaaccgaagtgatagaagcatgtcagaattgagaagacattttgaagcaagaacaatgtgatgtacctattttattatgtttgtatataaatactattgtaaattgttcagagtgaaaacatttgacaaactctaacactacaatcattttttctaaattacataaataaagctaattttcattatca

SEQ ID NO: 23998 - protein, 141 aa, Homo sapiens [sequence omitted]

SEQ ID NO: 23999 - DNA, 7190 bp, Homo sapiens
atgctaagtctgcaaaatatattgaatggactaggagctgccgctgcaccttgtcacagggatgtttataaagctgctagatcctgcttgacagatagatccatggctgttcgttgtgctgctgcaaagtgtctccttgaacttcagaatgaagccatctttatgtggagtacggacctggacagtgtggccacactgtgttttaagtcctttgaaggttccaattatgatgtgcggatttctgtttcaaagttactaggcataatattagctaaagctgtaatttctaaacatccaggaacagcagcctcacgtcaaagcattcgcagagtatctttggaggaagttctggaattactaggaacagggtttctacgtgggagttcaggattccttcgagccagtggagatatgctgaaaggaaccagttcagtcagtagggatgttcgagttggagttactcaggcttatgtggtatttgtttcaacactaggaggagcttggctagagaaaaattttgctgcctttttttctcatatcctaagccttgcgtcaccgtcacaccctaaagccacccaaactcagatcgatgccgtctgctgtcgccgttgtgtttcatttattcttcgaactactataggtggtcttcttggagaaaaggctcagcttgctgctgtaaaggatatttgccaggccatctggaagctaaagaaagttatggatgccgtaatgagtgatggtaatttggaaacccggcttggttccacagatgtagccgctagccaacatatgctggtttgtgctttacaagaacttggaaatctcatacacaatcttggcaccacagcggcacctttgctacaggattcaagtacaggtctccttgacagtatcttgtcagttattcttcatcctagcatttctgttcgactagcagcagcttggtgtttacactgcattgccgtggcattaccctcctacctaacaccactcttggatcgttgccttgaacggcttactggacataagtcttcacctgaagcagtgactggcttcagttttgctgtagcagctttgttgggagcagtaaaacattgtcctttaggaattcctcatggaaaaggcaagattattatgacattagcagaggatttgctgtgttctgctgctcaaaacagtcgcctttcagctcagcgcacacaagctggatggttgctgatttctgctctgatgacattaggtcctgcagttgttagccatcaccttgctcgagttctgctgttgtggaagtgtgtctttccagcatctcctaaagatctagaaacagaaaagagccgaggagattcgtttacatggcaggtgaccctggaaggacgagctggtgcactgtgtgctatcaagagctttgtttcccactgtggtgatcttcttactgaggaagtaactcagcgtcttcttccaccacttccttgtgctgtggatttgctaactcagctttcttcaatactaaaaatgtatggaagtcctttgaaaacaccgtcagtggtttatagacaaagactttatgaactgttgattttattacctcctgagacctatgaaggaaacctctgtgctatcctcagagagctggctgctgacttgactgcccctgatattcaggtggcagcatctacatttttacttccacccctctgtcatcaggatgatcttttgatactaagtcctttcctacaagagactgaccatagatttattgaagaacagctcctgcttggtaatggtgttgcttgcggaagtcttgaatatgacccttattcgatttatgagaaagatgtagagggagattcagtgcctaagcccttacctccagcactatcagttattagttctgcatccaagctctttggggttgtatgcgctcatgtgggagaaactcaaaggcttcttatattggaacagcttttggacagtataaagcacacaaaaggagctcgtcagcaagtggttcagttacatgttgtttcttcagtttctagtttcttgaagtacgtggctggctccaagggatgtttaggtccagaagaaatgaaaagatttgccttaacattagttatgggagccctagaaagccccaaccccttgctgagatgtgcagctgcagagtcatgggctagattagcccaagtggtagatgatggagcttttactgctggattagctcaagttagctttgacaaattgaaatcagcaagggatgtggttaccagaacaggacactcattggccttggggtccctacataggtatttaggaggaataagttcttctcaacacctaaattcttgtattggaatcctttatactttggcgcaggacagcacttctcctgatgtgcagacctgggcattacattctctatcattgatcattgattctgctggcccactctattatgtgcatgtggaacctaccctttctcttattataatgttgttgttaaatgtgcctcctactcatgctgaagttcaccaaagccttggtcgctgtttgaatgcccttattaccacgttaggtccagagctacaaggtaacagtacttcaatttctaccttaaggacttcctgtctactgggttgtgcagtaatgcaagataacccagactgccttgttcaagctcaggccatctcttgccttcagcagcttcatatgtttgctccacgacatgtcaacttgtctagcctggttagctgcctctgtgtgaatctttgtagcccctacttgttactgagaagagcagtactggcttgcttacgtcagcttgtacaaagagaagcagctgaagtttcagaacatgctgttatgcttgctaaggatagcagagaagagttgactccagatgctaacatcagagaagttggccttgagggggcattgttgatcttactagacaaggagacagatgagagattatgccatgatatcaaagagactttaaattatatgcttacatctatggcagtggaaaaactctccctgtggttaaagctttgtaaagatgtacttgctgcatcagctgattttacagctgtaacttgtgtggatacaatgcaagaagaagaaggagataaaggggatgatgcctcagtcctgaccaccagacgtgatgaaaaatcccatccttttaccaatccccgatgggctactagagtctttgctgctgaatgtgtctgtaggataattaaccaatgtgagaatgctaacagtgcacattttgacattgctttagcacaagaaatgaaaaaaagagattcaagaaatgactttttggtactgcatcttgctgacttaattcgcatggcttttatggctgccacagatcacagtgaccagctccgtctttctggccttgaaatgctgttagttgttattcggcgatttgcaactgttccagaaccagagtttccaggtcatgtgattctggaacagtatcaagccaatgtaggagcagcgcttagaccagccttcacttcagagacaccacctgatgtcactgccaaagcatgtcaggtttgcagtgcctggatagcaagtggagttgtaagtgaccttaatgatctccgaagagttcatcagttgcttgtttcatcgttaactaaaatacaggctggaaaagaagctctaagtcacttatataatgaaagtgcttctaccatggagatcttagctgtgcttaaagcctgggcagaggtctacataattgctgtgcaaagacataaaaaccacagacaacctttgaagactaccacctgtttagaagacggtatcagaaatggatcatgttcatcagatggactgcttgacttagtctatgcagatcttggcacactaagcagactctggcttgctgcacttcaggattttgctcttttaactttgccttcagaatttgcctcccaacttcctgctgaaggtggtgctttctacacagcagagactagtgaaaatgcaaaattgcattattacaactcctgggcacttatcctccatgctacagcattgtggcttacaagcacgggttttgttgttgctgacccagatgaaggagcatctaatctctccaggcctgtaacaccaacttccatgtgtcagggttcatcatctggggctaccataaagtcccctgaggatgtctacactgatagattccatcttattttaggaatcagcgtggaatttctatgttccttacgttcagatgcaaccatggaaagcataactgcttgtttacatgcattgcaagcacttctagatgtaccttggcccagatcaaaaattggcagtgatcaggacttgggtatagaattgctgaatgttctacatcgagtaattttaaccagagaatcaccttccattcagttggcttcacttgaagtggtaaggcagattatctgtgctgctcaagaacatgtgaaggaaaaaagacgaagtgcagaagttgatgatggggctgctgaaaaggaaactctgccagagtttggagagggaaaggacaccggaggacttgtgcctggaaagtctttggtctttgcaacactggaattgtgtgtatgcattctagttagacagctcccagaattaaaccctaaattgacaggtagcccaggagtaaaagctacgaagccacagatactattagaagatggaagtagattggtttcagctgcattggttatcctttccgaacttcctgcagtgtgctctcctgaaggaagcatctcaattctccctactatattgtacctcacaatcggggtcctcagagagactgctgtgaagttacctgggggccagttatcttcgacagttgcagcttccctacaggctctaaaaggaatattatcttctcccatggcccgggcagaaaagagccgtactgcttggactgaccttctccgaagtgccttaacaacaattcttgactgttgggatccagttgatgaaacacaccaagaacttgatgaagtcagtctacttactgctatcacagtgtttattttgtctaccagtccagaagtaactaccatcccatgccttcagaagcgctgtattgataaatttaaagctactcttgagataaaagatcctgtggtacaaatcaagacctaccagctcctacattccatctttcagtatccaaatccagctgtttcctacccatacatttactctttagcatcctgtatcatggaaaaactgcaggaaatagacaagagaaaacctgaaaacactgctgagcttgagatcttccaagaaggcataaaggtcttagaaacactggttactgttgctgaagaacaccatcgcgctcagctggtggcctgtcttttgcccatcctcatttccttccttttggatgaaaattctctgggatcagcaacttccataatgagaaatttacatgactttgctctacaaaatctcatgcaaattggacctcagtattcatctgtttttaaaagtttagtggcttcttctccagccctaaaagcccgccttgaggctgctataaagggcaatcaggaaagtgtcaaagtcaagataccaacatctaaatatactaagagtcctggaaaaaactcaagcatccaattaaagaccagtttcctctgattttttttttggaatagtaagcaccttaatataataaatacttgatcattgcctttggtgacaaaagggacattgtagacacaagtgcccttagaggtctagttgattgttttaccttaaatagctgtgactcttcaaagtaacagcatacttaacatttttgtgtgtgtgcgtggggtttgtgttttgttttgttttgtttttctatttaaaaagacaatggagctaacttgccaggaattttaagaaagtgctaaagaactaaacttactaaacaatccactgctttaaaaatgaaatgaatttcttctaacagtccatacatatgtggtatacttaatactgtgacagatataaatatgactctagtgtaaattatctgcactaatattgtatcccaattgctgatttaaaattctgctttggcccggcacagtggctcatccctgtaattccagcactttggaaggccaaggcgggcggatcacgaagtcgggagtttgagaccagcctgaccaacatggtgaaaccccgtctctactaaaaatacaaaaattagccgggtgtggtggcacacacctgtaatcccagctactcaggaggccgaggcaggaaaatcgcttgaacctggcaggcagaggttgcagtgagccaagattgtgccactgcactccagcctgggcgacagagtgagactccatctaaaaaaaaaaaaaaaaaattctgccttattcagtaattgtattaaactttctctgatttctccaagaagataaaatgattggagagctatttaggaaacctggtctaggattatccagtatacaatagtacaaattacttacagccttacagtgcaacataagatttggtgtctatatcatggttttccaccatcttttggtttagtttatattgggttcagaaattgagtcttactcattttaaatagaataagccatttccactatttttcaaatggatttttctgtttacctctgttcttaccaattttgttcattttcatttgtggcaaacatttgtatcaatgagttttaacctaggttcatatctacattgtatttagatcaactatgggtttatataaatgccaaatttagtacaacaaatttaggtcatcaggtgaatacaagtattttttttaacaggaaacattttattatagaaaaaagattaatgataaagtcatattggttgaaaaatattttttaactgtgttcatgattgttgattctccttctacttcagtgttatactgtgtgaatcaagcactgtgtcaaaacagagcatttccctcttaaaaattacaaaccgaagtgatagaagcatgtcagaattgagaagacattttgaagcaagaacaatgtgatgtacctattttattatgtttgtatataaatactattgtaaattgttcagagtgaaaacatttgacaaactctaacactacaatcattttttctaaattacataaataaagctaattttcattatca

SEQ ID NO: 24000 - protein, 1890 aa, Homo sapiens
MLSLQNILNGLGAAAAPCHRDVYKAARSCLTDRSMAVRCAAAKCLLELQNEAIFMWSTDLDSVATLCFKSFEGSNYDVRISVSKLLGIILAKAVISKHPGTAASRQSIRRVSLEEVLELLGTGFLRGSSGFLRASGDMLKGTSSVSRDVRVGVTQAYVVFVSTLGGAWLEKNFAAFFSHILSLASPSHPKATQTQIDAVCCRRCVSFILRTTIGGLLGEKAQLAAVKDICQAIWKLKKVMDAVMSDGNLETRLGSTDVAASQHMLVCALQELGNLIHNLGTTAAPLLQDSSTGLLDSILSVILHPSISVRLAAAWCLHCIAVALPSYLTPLLDRCLERLTGHKSSPEAVTGFSFAVAALLGAVKHCPLGIPHGKGKIIMTLAEDLLCSAAQNSRLSAQRTQAGWLLISALMTLGPAVVSHHLARVLLLWKCVFPASPKDLETEKSRGDSFTWQVTLEGRAGALCAIKSFVSHCGDLLTEEVTQRLLPPLPCAVDLLTQLSSILKMYGSPLKTPSVVYRQRLYELLILLPPETYEGNLCAILRELAADLTAPDIQVAASTFLLPPLCHQDDLLILSPFLQETDHRFIEEQLLLGNGVACGSLEYDPYSIYEKDVEGDSVPKPLPPALSVISSASKLFGVVCAHVGETQRLLILEQLLDSIKHTKGARQQVVQLHVVSSVSSFLKYVAGSKGCLGPEEMKRFALTLVMGALESPNPLLRCAAAESWARLAQVVDDGAFTAGLAQVSFDKLKSARDVVTRTGHSLALGSLHRYLGGISSSQHLNSCIGILYTLAQDSTSPDVQTWALHSLSLIIDSAGPLYYVHVEPTLSLIIMLLLNVPPTHAEVHQSLGRCLNALITTLGPELQGNSTSISTLRTSCLLGCAVMQDNPDCLVQAQAISCLQQLHMFAPRHVNLSSLVSCLCVNLCSPYLLLRRAVLACLRQLVQREAAEVSEHAVMLAKDSREELTPDANIREVGLEGALLILLDKETDERLCHDIKETLNYMLTSMAVEKLSLWLKLCKDVLAASADFTAVTCVDTMQEEEGDKGDDASVLTTRRDEKSHPFTNPRWATRVFAAECVCRIINQCENANSAHFDIALAQEMKKRDSRNDFLVLHLADLIRMAFMAATDHSDQLRLSGLEMLLVVIRRFATVPEPEFPGHVILEQYQANVGAALRPAFTSETPPDVTAKACQVCSAWIASGVVSDLNDLRRVHQLLVSSLTKIQAGKEALSHLYNESASTMEILAVLKAWAEVYIIAVQRHKNHRQPLKTTTCLEDGIRNGSCSSDGLLDLVYADLGTLSRLWLAALQDFALLTLPSEFASQLPAEGGAFYTAETSENAKLHYYNSWALILHATALWLTSTGFVVADPDEGASNLSRPVTPTSMCQGSSSGATIKSPEDVYTDRFHLILGISVEFLCSLRSDATMESITACLHALQALLDVPWPRSKIGSDQDLGIELLNVLHRVILTRESPSIQLASLEVVRQIICAAQEHVKEKRRSAEVDDGAAEKETLPEFGEGKDTGGLVPGKSLVFATLELCVCILVRQLPELNPKLTGSPGVKATKPQILLEDGSRLVSAALVILSELPAVCSPEGSISILPTILYLTIGVLRETAVKLPGGQLSSTVAASLQALKGILSSPMARAEKSRTAWTDLLRSALTTILDCWDPVDETHQELDEVSLLTAITVFILSTSPEVTTIPCLQKRCIDKFKATLEIKDPVVQIKTYQLLHSIFQYPNPAVSYPYIYSLASCIMEKLQEIDKRKPENTAELEIFQEGIKVLETLVTVAEEHHRAQLVACLLPILISFLLDENSLGSATSIMRNLHDFALQNLMQIGPQYSSVFKSLVASSPALKARLEAAIKGNQESVKVKIPTSKYTKSPGKNSSIQLKTSFL

SEQ ID NO: 24001 - DNA, 5498 bp, Homo sapiens
ctttggaggaagttctggaattactaggaacagggtttctacgtgggagttcaggattccttcgagccagtggagatatgctgaaaggaaccagttcagtcagtagggatgttcgagttggagttactcaggcttatgtggtatttgtttcaacactaggaggagcttggctagagaaaaattttgctgcctttttttctcatatcctaagccttgcgtcaccgtcacaccctaaagccacccaaactcagatcgatgccgtctgctgtcgccgttgtgtttcatttattcttcgaactactataggtggtcttcttggagaaaaggctcagcttgctgctgtaaaggatatttgccaggccatctggaagctaaagaaagttatggatgccgtaatgagtgatggtaatttggaaacccggcttggttccacagatgtagccgctagccaacatatgctggtttgtgctttacaagaacttggaaatctcatacacaatcttggcaccacagcggcacctttgctacaggattcaagtacaggtctccttgacagtatcttgtcagttattcttcatcctagcatttctgttcgactagcagcagcttggtgtttacactgcattgccgtggcattaccctcctacctaacaccactcttggatcgttgccttgaacggcttactggacataagtcttcacctgaagcagtgactggcttcagttttgctgtagcagctttgttgggagcagtaaaacattgtcctttaggaattcctcatggaaaaggcaagattattatgacattagcagaggatttgctgtgttctgctgctcaaaacagtcgcctttcagctcagcgcacacaagctggatggttgctgatttctgctctgatgacattaggtcctgcagttgttagccatcaccttgctcgagttctgctgttgtggaagtgtgtctttccagcatctcctaaagatctagaaacagaaaagagccgaggagattcgtttacatggcaggtgaccctggaaggacgagctggtgcactgtgtgctatcaagagctttgtttcccactgtggtgatcttcttactgaggaagtaactcagcgtcttcttccaccacttccttgtgctgtggatttgctaactcagctttcttcaatactaaaaatgtatggaagtcctttgaaaacaccgtcagtggtttatagacaaagactttatgaactgttgattttattacctcctgagacctatgaaggaaacctctgtgctatcctcagagagctggctgctgacttgactgcccctgatattcaggtggcagcatctacatttttacttccacccctctgtcatcaggatgatcttttgatactaagtcctttcctacaagagactgaccatagatttattgaagaacagctcctgcttggtaatggtgttgcttgcggaagtcttgaatatgacccttattcgatttatgagaaagatgtagagggagattcagtgcctaagcccttacctccagcactatcagttattagttctgcatccaagctctttggggttgtatgcgctcatgtgggagaaactcaaaggcttcttatattggaacagcttttggacagtataaagcacacaaaaggagctcgtcagcaagtggttcagttacatgttgtttcttcagtttctagtttcttgaagtacgtggctggctccaagggatgtttaggtccagaagaaatgaaaagatttgccttaacattagttatgggagccctagaaagccccaaccccttgctgagatgtgcagctgcagagtcatgggctagattagcccaagtggtagatgatggagcttttactgctggattagctcaagttagctttgacaaattgaaatcagcaagggatgtggttaccagaacaggacactcattggccttggggtccctacataggtatttaggaggaataagttcttctcaacacctaaattcttgtattggaatcctttatactttggcgcaggacagcacttctcctgatgtgcagacctgggcattacattctctatcattgatcattgattctgctggcccactctattatgtgcatgtggaacctaccctttctcttattataatgttgttgttaaatgtgcctcctactcatgctgaagttcaccaaagccttggtcgctgtttgaatgcccttattaccacgttaggtccagagctacaaggtaacagtacttcaatttctaccttaaggacttcctgtctactgggttgtgcagtaatgcaagataacccagactgccttgttcaagctcaggccatctcttgccttcagcagcttcatatgtttgctccacgacatgtcaacttgtctagcctggttagctgcctctgtgtgaatctttgtagcccctacttgttactgagaagagcagtactggcttgcttacgtcagcttgtacaaagagaagcagctgaagtttcagaacatgctgttatgcttgctaaggatagcagagaagagttgactccagatgctaacatcagagaagttggccttgagggggcattgttgatcttactagacaaggagacagatgagagattatgccatgatatcaaagagactttaaattatatgcttacatctatggcagtggaaaaactctccctgtggttaaagctttgtaaagatgtacttgctgcatcagctgattttacagctgtaacttgtgtggatacaatgcaagaagaagaaggagataaaggggatgatgcctcagtcctgaccaccagacgtgatgaaaaatcccatccttttaccaatccccgatgggctactagagtctttgctgctgaatgtgtctgtaggataattaaccaatgtgagaatgctaacagtgcacattttgacattgctttagcacaagaaatgaaaaaaagagattcaagaaatgactttttggtactgcatcttgctgacttaattcgcatggcttttatggctgccacagatcacagtgaccagctccgtctttctggccttgaaatgctgttagttgttattcggcgatttgcaactgttccagaaccagagtttccaggtcatgtgattctggaacagtatcaagccaatgtaggagcagcgcttagaccagccttcacttcagagacaccacctgatgtcactgccaaagcatgtcaggtttgcagtgcctggatagcaagtggagttgtaagtgaccttaatgatctccgaagagttcatcagttgcttgtttcatcgttaactaaaatacaggctggaaaagaagctctaagtcacttatataatgaaagtgcttctaccatggagatcttagctgtgcttaaagcctgggcagaggtctacataattgctgtgcaaagacataaaaaccacagacaacctttgaagactaccacctgtttagaagacggtatcagaaatggatcatgttcatcagatggactgcttgacttagtctatgcagatcttggcacactaagcagactctggcttgctgcacttcaggattttgctcttttaactttgccttcagaatttgcctcccaacttcctgctgaaggtggtgctttctacacagcagagactagtgaaaatgcaaaattgcattattacaactcctgggcacttatcctccatgctacagcattgtggcttacaagcacgggttttgttgttgctgacccagatgaaggagcatctaatctctccaggcctgtaacaccaacttccatgtgtcagggttcatcatctggggctaccataaagtcccctgaggatgtctacactgatagattccatcttattttaggaatcagcgtggaatttctatgttccttacgttcagatgcaaccatggaaagcataactgcttgtttacatgcattgcaagcacttctagatgtaccttggcccagatcaaaaattggcagtgatcaggacttgggtatagaattgctgaatgttctacatcgagtaattttaaccagagaatcaccttccattcagttggcttcacttgaagtggtaaggcagattatctgtgctgctcaagaacatgtgaaggaaaaaagacgaagtgcagaagttgatgatggggctgctgaaaaggaaactctgccagagtttggagagggaaaggacaccggaggacttgtgcctggaaagtctttggtctttgcaacactggaattgtgtgtatgcattctagttagacagctcccagaattaaaccctaaattgacaggtagcccaggagtaaaagctacgaagccacagatactattagaagatggaagtagattggtttcagctgcattggttatcctttccgaacttcctgcagtgtgctctcctgaaggaagcatctcaattctccctactatattgtacctcacaatcggggtcctcagagagactgctgtgaagttacctgggggccagttatcttcgacagttgcagcttccctacaggctctaaaaggaatattatcttctcccatggcccgggcagaaaagagccgtactgcttggactgaccttctccgaagtgccttaacaacaattcttgactgttgggatccagttgatgaaacacaccaagaacttgatgaagtcagtctacttactgctatcacagtgtttattttgtctaccagtccagaagtaactaccatcccatgccttcagaagcgctgtattgataaatttaaagctactcttgagataaaagatcctgtggtacaaatcaagacctaccagctcctacattccatctttcagtatccaaatccagctgtttcctacccatacatttactctttagcatcctgtatcatggaaaaactgcaggaaatagacaagagaaaacctgaaaacactgctgagcttgagatcttccaagaaggcataaaggtcttagaaacactggttactgttgctgaagaacaccatcgcgctcagctggtggcctgtcttttgcccatcctcatttccttccttttggatgaaaattctctgggatcagcaacttccataatgagaaatttacatgactttgctctacaaaatctcatgcaaattggacctcagtattcatctgtttttaaaagtttagtggcttcttctccagccctaaaagcccgccttgaggctgctataaagggcaatcaggaaagtgtcaaagtcaagataccaacatctaaatatactaagagtcctggaaaaaactcaagcatccaattaaagaccagtttcctctgattttttttttggaatagtaagcaccttaatataataaatacttgatcattgcctttggtgacaaaagggacattgtagacacaagtgcccttagaggtctagttgattgttttaccttaaatagctgtgactcttcaaagtaacagcatacttaacatt

SEQ ID NO: 24002 - protein, 1753 aa, Homo sapiens
MLKGTSSVSRDVRVGVTQAYVVFVSTLGGAWLEKNFAAFFSHILSLASPSHPKATQTQIDAVCCRRCVSFILRTTIGGLLGEKAQLAAVKDICQAIWKLKKVMDAVMSDGNLETRLGSTDVAASQHMLVCALQELGNLIHNLGTTAAPLLQDSSTGLLDSILSVILHPSISVRLAAAWCLHCIAVALPSYLTPLLDRCLERLTGHKSSPEAVTGFSFAVAALLGAVKHCPLGIPHGKGKIIMTLAEDLLCSAAQNSRLSAQRTQAGWLLISALMTLGPAVVSHHLARVLLLWKCVFPASPKDLETEKSRGDSFTWQVTLEGRAGALCAIKSFVSHCGDLLTEEVTQRLLPPLPCAVDLLTQLSSILKMYGSPLKTPSVVYRQRLYELLILLPPETYEGNLCAILRELAADLTAPDIQVAASTFLLPPLCHQDDLLILSPFLQETDHRFIEEQLLLGNGVACGSLEYDPYSIYEKDVEGDSVPKPLPPALSVISSASKLFGVVCAHVGETQRLLILEQLLDSIKHTKGARQQVVQLHVVSSVSSFLKYVAGSKGCLGPEEMKRFALTLVMGALESPNPLLRCAAAESWARLAQVVDDGAFTAGLAQVSFDKLKSARDVVTRTGHSLALGSLHRYLGGISSSQHLNSCIGILYTLAQDSTSPDVQTWALHSLSLIIDSAGPLYYVHVEPTLSLIIMLLLNVPPTHAEVHQSLGRCLNALITTLGPELQGNSTSISTLRTSCLLGCAVMQDNPDCLVQAQAISCLQQLHMFAPRHVNLSSLVSCLCVNLCSPYLLLRRAVLACLRQLVQREAAEVSEHAVMLAKDSREELTPDANIREVGLEGALLILLDKETDERLCHDIKETLNYMLTSMAVEKLSLWLKLCKDVLAASADFTAVTCVDTMQEEEGDKGDDASVLTTRRDEKSHPFTNPRWATRVFAAECVCRIINQCENANSAHFDIALAQEMKKRDSRNDFLVLHLADLIRMAFMAATDHSDQLRLSGLEMLLVVIRRFATVPEPEFPGHVILEQYQANVGAALRPAFTSETPPDVTAKACQVCSAWIASGVVSDLNDLRRVHQLLVSSLTKIQAGKEALSHLYNESASTMEILAVLKAWAEVYIIAVQRHKNHRQPLKTTTCLEDGIRNGSCSSDGLLDLVYADLGTLSRLWLAALQDFALLTLPSEFASQLPAEGGAFYTAETSENAKLHYYNSWALILHATALWLTSTGFVVADPDEGASNLSRPVTPTSMCQGSSSGATIKSPEDVYTDRFHLILGISVEFLCSLRSDATMESITACLHALQALLDVPWPRSKIGSDQDLGIELLNVLHRVILTRESPSIQLASLEVVRQIICAAQEHVKEKRRSAEVDDGAAEKETLPEFGEGKDTGGLVPGKSLVFATLELCVCILVRQLPELNPKLTGSPGVKATKPQILLEDGSRLVSAALVILSELPAVCSPEGSISILPTILYLTIGVLRETAVKLPGGQLSSTVAASLQALKGILSSPMARAEKSRTAWTDLLRSALTTILDCWDPVDETHQELDEVSLLTAITVFILSTSPEVTTIPCLQKRCIDKFKATLEIKDPVVQIKTYQLLHSIFQYPNPAVSYPYIYSLASCIMEKLQEIDKRKPENTAELEIFQEGIKVLETLVTVAEEHHRAQLVACLLPILISFLLDENSLGSATSIMRNLHDFALQNLMQIGPQYSSVFKSLVASSPALKARLEAAIKGNQESVKVKIPTSKYTKSPGKNSSIQLKTSFL

SEQ ID NO: 24003 - DNA, 582 bp, Homo sapiens
cttgttactgagaagagcagtactggcttgcttacgtcagcttgtacaaagagaagcagctgaagtttcagaacatgctgttatgcttgctaaggatagcagagaagagttgactccagatgctaacatcagagaagttggccttgagggggcattgttgatcttactagacaaggagacagatgagagattatgccatgatatcaaagagactttaaattatatgcttacatctatggcagtggaaaaactctccctgtggttaaagctttgtaaagatgtacttgctgcatcagctggtaagtattggacattatcagttaaaataataaaattgaaatttgaaactttacataaaattgtttaccactgagaattcatcagtcttgtctaactagctggattctgactgtctgattgttgcttttcttcaaatgaagattgtatttctagtgttttagaattctctgtaatttgaacaatataaatccaatacttaagcctgctctttttccctttggctgtcttagatgactttcctatataaaacaaattaaaaagtaaagttattgtttatgccct

SEQ ID NO: 24004 - protein, 96 aa, Homo sapiens
MLAKDSREELTPDANIREVGLEGALLILLDKETDERLCHDIKETLNYMLTSMAVEKLSLWLKLCKDVLAASAGKYWTLSVKIIKLKFETLHKIVYH

SEQ ID NO: 24005 - DNA, 691 bp, Homo sapiens
catcaccttgctcgagttctgctgttgtggaagtgtgtctttccagcatctcctaaagatctagaaacagaaaagagccgaggagattcgtttacatggcaggtgaccctggaaggacgagctggtgcactgtgtgctatcaagagctttgtttcccactgtggtgatcttcttactgaggaagtaactcagcgtcttcttccaccacttccttgtgctgtggatttgctaactcagtaagcatcgactgtttagatttgatagttgccctctgattatgtaatattccttaagtacattaataaggcaaatttctgtagttggtgaatgattttatggaggaaggcaatcagttagttatatgatttttttttaggctaggatcttgaaagaaattacatattaaaagggaaggaaaattttaggggaataatctaccttacatacaggcagatttaacaagaaattaactattaagcctcttaaccttttcagctatgcattttattggtttgttagagtattctgtgttcgtgagaaccagatgcttctaacagtttcagttttttgtttgtttatatttttcataagtttgagttatacgtatatgattagaacatatagagaaaagccagtatataatgtgagcacttgtaatttccaaattaataaaacatgtgaaagttctttg

SEQ ID NO: 24006 - protein, 48 aa, Homo sapiens
MLLTVSVFCLFIFFISLSYTYMIRTYREKPVYNVSTCNFQINKTCESS

SEQ ID NO: 24007 - DNA, 525 bp, Homo sapiens
gactctgctagggttagcagagcagccggtaacgttgctggaccgggacgcacgctcagctgaggaggacccccaaagatttttattgttaggtatattgaccaaagtttaacgagaagaactgtgatcagctgggaggattgctgcaaggaatggaattagctcatagcttactgctgaatgaagaagcatacaatcaactaggtgaagttcagaaggcagagtttatttttgagtggttgagatacttggagaagctcttgttggcaaccagcaggaatgatgtaagggagaaacagaagactcttgttgaacagctcctgtctttgttgaacagctccccagggcctcctacccgcaaactgcttgctaagaatctagccatactttatagtattggagacacattctccgttcatgaagcaatcgataaatgtaatgatcttattcgtagcaaagatgattctccaagttatcttcccactaagctgtaagtgaaacattaaaacagaacagaaaacaaaa

SEQ ID NO: 24008 - protein, 113 aa, Homo sapiens
MELAHSLLLNEEAYNQLGEVQKAEFIFEWLRYLEKLLLATSRNDVREKQKTLVEQLLSLLNSSPGPPTRKLLAKNLAILYSIGDTFSVHEAIDKCNDLIRSKDDSPSYLPTKL

SEQ ID NO: 24009 - DNA, 566 bp, Homo sapiens
tgaccctaagggctggagtccgccgagaaggggctgactggggcacagggtcggctgataaacagcgtggtccgttcttcctcctggactacgggaaagtctggcttcacctgtgcacaacagatttttattgttaggtatattgaccaaagtttaacgagaagaactgtgatcagctgggaggattgctgcaaggaatggaattagctcatagcttactgctgaatgaagaagcatacaatcaactaggtgaagttcagaaggcagagtttatttttgagtggttgagatacttggagaagctcttgttggcaaccagcaggaatgatgtaagggagaaacagaagactcttgttgaacagctcctgtctttgttgaacagctccccagggcctcctacccgcaaactgcttgctaagaatctagccatactttatagtattggagacacattctccgttcatgaagcaatcgataaatgtaatgatcttattcgtagcaaagatgattctccaagttatcttcccactaagctgtaagtgaaacattaaaacagaacagaaaac

SEQ ID NO: 24010 - protein, 113 aa, Homo sapiens; identical to SEQ ID NO: 24008

SEQ ID NO: 24011 - DNA, 906 bp, Homo sapiens
ggcgggctccgacttgctgaccttccccacacgcccggcaaccccggctcccgctggcgggcagagtccacgcctacctgttgtgcacaggtgaagccagactttcccgtagtccaggaggaagaacggaccacgctgtttatcagccgaccctgtgccccagtcagccccttctcggcggactccagcccttagggtcaagacacctagcccctcgaccggttctcccaccggcttctttcgcgatcacattgctgccgcgaccaccctcgggatccccgagcgctcaactcatacagcggccctggtgcgttctccttcccagccaacaggcagcccagacacagccccctcgcgcccggaggtgtccccgctccctggatccccgactgcctgcctttgggggtcctcctcagctgagcgtgcgtcccggtccagcaacgttaccggctgctctgctaaccctagcagagtctggaattgccggcggcggcgacagcgaggcattgagggcctcctttgttgcccaggccggagtgcagtggctattcacaggtcgataatgcaatcatggtgcacactacagccttgaacttctgggctcatgtgatccttctgcctcagcctcccagaaataagaagaaaaaaaaggatattaccaacaatggaagaggaatgcagagtggcaacagctccaagtggacctggcagactatgaacactagaatcaccaaggaaacatggagctatgaaatggcaaaaggctgtgtgaaaaccctgacgctttttggttcagcctttaaaaaccaaatgaaaactcaagagatacaagaatgtggttattttgatgaacaactcacaaactagttgaattaaaagaaactggttcaaatgaacacaaaccta

SEQ ID NO: 24012 - protein, 98 aa, Homo sapiens
MVHTTALNFWAHVILLPQPPRNKKKKKDITNNGRGMQSGNSSKWTWQTMNTRITKETWSYEMAKGCVKTLTLFGSAFKNQMKTQEIQECGYFDEQLTN

SEQ ID NO: 24013 - DNA, 1212 bp, Homo sapiens
gcgatggagactgcggcccaagttaggattaggacagcggtttttcagtccggagattccggccacaactatttttgtctgtttttatcgtaagccagagtctttgggtgcagctctgggacacctaaagggcctggagaaattcaggcggggccagtgctgtgggggtagatgttagacgtggaagggaccctagagagccttgactgtgaggactgagacagggcctcctttgttgcccaggccggagtgcagtggctattcacaggtcgataatgcaatcatggtgcacactacagccttgaacttctgggctcatgtgatccttctgcctcagcctcccagcgctatcctcatcatacatatactgtgaagataaaatatctgttgaagattctttgagcaccttgggccagaagagctacagaaagccaaggtgtggctgtgatgacactgaattcagctcaagacccaggagaaccttacatctattcttatttccacaaggaagtgcacacatggctaatgcaaattcttccataataatgatataaacttgagttgtccaggtttgatgagacccacatcttgtatatacagtgtcatctactgcctctgttaggggctctaggggataaaggaaactatattaagaaatgcagcatctgtttctccctgtgtgaccaccctacttccaagaagtttctgtatccttggctgaagtgcactgtgtgtatgtgtatgtgtgtacactcttctacatcaatctgtaagtcactgaaatgctgcagatgttttaaaaaaattccaccatacttgcttactttaaactttgaaacaggcaaatagctaaggccaataacactagatagaattaagtaattaataatttaacagcacaatttaacattgtgcttcttaggatgggcagggattggttaatggatacaaaattatagctagataggaggaatgagttctggtgttctggagcactgtaggatgaatatggctaactataatttattgtatactgtcaaaagtctagaagaaaggattttaaatgttcacaacacaaataataaatttttgagataatgcatatctggtttgattgttatacattgtatacagtattaaaatatcactatgtatcccatgaatatgtaaaattattatttattattttaaaaataaaaggggaggaaagag

SEQ ID NO: 24014 - protein, 41 aa, Homo sapiens [sequence omitted]

SEQ ID NO: 24015 - DNA, 433 bp, Homo sapiens
gggaccctagagagccttgactgtgaggactgagacagggcctcctttgttgcccaggccggagtgcagtggctattcacaggtcgataatgcaatcatggtgcacactacagccttgaacttctgggctcatgtgatccttctgcctcagcctcccagaaataagaagaaaaaaaaggatattaccaacaatggaagaggaatgcagagtggcaacagctccaagtggacctggcagactatgaacactagaatcaccaaggaaacatggagctatgaaatggcaaaaggctgtgtgaaaaccctgacgctttttggttcagcctttaaaaaccaaatgaaaactcaagagatacaagaatgtggttattttgatgaacaactcacaaactagttgaattaaaagaaactggttcaaatgaacacaaaccta

SEQ ID NO: 24016 - protein, 98 aa, Homo sapiens; identical to SEQ ID NO: 24012

SEQ ID NO: 24017 - DNA, 377 bp, Homo sapiens
ggattcctcaggcccgggcgctcctacagcagtgcctgcacgcccggctgcaaattcgcccagccgatggggacgtcgcggcccagtgggtggaggtccaaagaggactggtgatctacgtgtgctttttcaagggagctgataaagaacttcttcccaaaatggatctacgactctggctccactgattaccttaaccatattacatggtctcgttctgtcacccaggctggagtgcagtggcgtgatctcggctcactgcaacctctgcctcccagcttcaagcaattctcctgcctcagcctcccgagtagctgggactataagtgcacaccaccatgccctgctaatttttgtatttttagtagagacggggt

SEQ ID NO: 24018 - protein, 86 aa, Homo sapiens
STCAFSRELIKNFFPKWIYDSGSTDYLNHITWSRSVTQAGVQWRDLGSLQPLPPSFKQFSCLSLPSSWDYKCTPPCPANFCIFSRD

SEQ ID NO: 24019 - DNA, 4721 bp, Homo sapiens
cgaggagaaggaggagcttcgcaggttgttttttcccaggaggccgactccgccgagtcggtggcggctgcaggctgggagggagaagtgctacgcctttgcaggttggcgaagtggttccaggctacccggctagtctggcacggccccgtcttctgcctcctcctccgtcgcgtggcggcgggaactgttggccgcgcggcctcgggaacggcccaggtccccgcccgcaggtcccgggcagataacatagatcatcagtagaaaacttcttgaagttgttcaagaaaaatttgaaagtagcaaaatagaaaataaagaattaacagcagatacagaggacagcatggaagtgttgtcttaggaaacagaacacagcagtgaaaaaacagacaaaatccgctcagatacaactgcagctgataatgttttccggcttcaatgtctttagagttgggatctcttttgtcataatgtgcattttttacatgccaacagtaaactctttaccagaactgagtcctcagaaatattttagtacattgcaaccaggaaaagcctctttagcttatttttgtcaagctgattccccaagaacatctgtatttcttgaagaactgaatgaggctgttagacctctgcaggactatggaatttcagttgccaaggttaattgtgtcaaagaagaaatatcaagatactgtggaaaagaaaaggatttgatgaaagcatatttattcaagggcaacatattgctcagagaattccctactgacaccttgtttgatgtgaatgccattgtcgcccatgttctctttgctcttctttttagtgaagtgaaatatattaccaacctggaagaccttcagaacatagaaaatgctctgaaaggaaaagcaaatattatattctcatatgtaagagccattggaataccagagcacagagcagtcatggaagccgcttttgtgtatgggactacataccaatttgtcttaaccacagaaattgcccttttggaaagtattggctctgaggatgtggaatatgcacatctctacttttttcattgtaaactagtcttggacttgacccagcaatgtagaagaacactaatggaacagccattgactacactgaacattcacctgtttattaagacaatgaaagcacctctgttgactgaagttgctgaagatcctcaacaagtttcaactgtccatctccaactgggcttaccactggtttttattgttagccaacaggctacttatgaagctgatagaagaactgcagaatgggttgcttggcgtcttctgggaaaagcaggagttctactcttgttaagggactctttggaagtgaacattcctcaagatgctaatgtggtcttcaaaagagcagaagagggagttccagtggaatttttggtattacatgatgttgatttaataatatctcatgtggaaaataatatgcacattgaggaaatacaagaagatgaagacaatgacatggaaggtccagatatagatgttcaggatgatgaagtggcagaaactgttttcagagataggaagagaaaattacctttggaacttacagtggaactaacagaagaaacatttaatgcaacagtgatggcttctgacagcatagtactcttctatgctggttggcaagcagtatccatggcatttttgcaatcctatattgatgtggcagttaaactgaaagttgtctggggccatcttgtctgctccttacagcacacatggctggcagagaagggaagacagagcggccatcttggaaacgtctagtccttagttcctgccggcacatctactatgcttcttactagaataaactgtgcagattggtctgatgtatgtactaagcaaaatgttactgaatttcctatcataaagatgtacaagaaaggcgagaacccagtatcttatgctggaatgttaggaaccgaagatctcctaaaatttatccagctcaacaggatttcatatccagtgaatataacatcgatccaagaagcagaagaatatttaagtggggaattatataaagacctcatcttgtattctagtgtgtcagtattgggactatttagtccaaccatgaaaacagcaaaagaagattttagtgaagcaggaaactacctaaaaggatatgttatcactggaatttattctgaagaagatgttttgctactgtcaaccaaatatgctgcaagtcttccagccctgctgcttgccagacacacagaaggcaaaatagagagcatcccactagctagcacacatgcacaagacatagttcaaataataacagatgcactactggaaatgtttccggaaatcactgtggaaaatcttcccagttatttcagacttcagaaaccattattgattttgttcagtgatggcactgtaaatcctcagtataaaaaagcaatattgacactggtaaagcagaaatacttggattcatttactccatgctggttaaatctaaagaatactccagtggggagaggaatcttgagggcatattttgatcctctgcctccccttcctcttcttgttttggtgaatctgcattcaggtggccaagtatttgcatttccttcagaccaggctataattgaagaaaaccttgtattgtggctgaagaaattagaagcaggactagaaaatcatatcacaattttacctgctcaagaatggaaacctcctcttccagcttatgattttctaagtatgatagatgccgcaacatctcaacgtggcactaggaaagttcccaagtgtatgaaagaaacagatgtgcaggagaatgataaggaacaacatgaagataaatcggcagtcagaaaagaaccgattgaaactctgagaataaagcattggaatagaagtaattggtttaaagaagcagaaaaatcatttagacgtgataaagagttaggatgctcaaaagtgaactaattttatagggctgtggtttccaaaatttttttggcatgatagacttaatttatttccttaaagaataatattaaatcatttcaagtttgcagactagtgccatccaatagaattataatataagtcacatattttatttaaaattttctagtaactacattaaacaaagtaaaagtgagcagggcaaaataattttgatattacttttcacccagtagtatacccaaaatagcgaaatatagaaattattaatgagatattttacatccttttttgtaccaagtcttctaaatgcagtacatattttatacttactgcatttcttacttccgagtagccatatttcaagtgttccttgccacatgtggcctgtgactactgtattggacagttcagtactagacaaaaactagcataattaacttagttctagccatgatttctatttggattaaaattaaactctaatcacagttaactccacagtgcattcatgcagctgacagttatatttgttttattggagtcatgatattaaaatcagcgtttgtcaacctcaggggatatttagcaattgtcgggagacatttttgatgtcatgactagggcagttattgacatttagtgagtagaggccagggatcctgctaaataacctgcattggacagcgccccacaacaaagaattatcctgcccgaaatggtagtcgtgccaaggctgagtaaccttgtgttaaaagtaacctgtggcagactaggtttccagaatttcctggttctgctcacgtatcatgtttgaaaaaattttggctattaaagatatgtattagatggtcttatcctgattattacctggatacaacttgatcttttctaatattttcagaaagtgatgggataaccctagaagaggactcagaatgatatttatattttaagtgagtcttaaaacctcctcttatttctacaagttatatggctaaatttcagattgaacagggattcagcattctgccatctcctcatggaaagagaggctccctcatctgaagcgtctctgaaatctacccttgcaagcttcagacaaatcagttgatctccctgagccacacggcctcattctgtgagggagggaaagattagccaaagagttaattttcattccaaatcacttagctgttagactgatctgtttgtagcagttgtttgtctcatttttgctctgtgcattttttgagacatttgttgagaatattctatttggtgctctactgtatttttctttttaatatctacttgatatcttgttctttaaattttcttcacatatggtttgcctgatacaactgatttttataactgaaatttaaggaatctaacagctaaaactcagtaagtgcatatatttccttataacatagacccgttgctactctcagcaccctctcctcaattttttttcctgtagcatgtgatgcctgattaaactcattttcatttgcttttatttctaatatgggaacaatgagagtgaactctaaatataggttgtagtaataaaacatcattagcctaattattagaaaatgctaattaagtaccagcacatagaaacatgaaattgcttagtcattgtacctttgtcagcaattttgacagtcattaatgtttgtcataattttaaataaagtgtctgggtttcagaataccttcaca

SEQ ID NO: 24020 - protein, 465 aa, Homo sapiens
MFSGFNVFRVGISFVIMCIFYMPTVNSLPELSPQKYFSTLQPGKASLAYFCQADSPRTSVFLEELNEAVRPLQDYGISVAKVNCVKEEISRYCGKEKDLMKAYLFKGNILLREFPTDTLFDVNAIVAHVLFALLFSEVKYITNLEDLQNIENALKGKANIIFSYVRAIGIPEHRAVMEAAFVYGTTYQFVLTTEIALLESIGSEDVEYAHLYFFHCKLVLDLTQQCRRTLMEQPLTTLNIHLFIKTMKAPLLTEVAEDPQQVSTVHLQLGLPLVFIVSQQATYEADRRTAEWVAWRLLGKAGVLLLLRDSLEVNIPQDANVVFKRAEEGVPVEFLVLHDVDLIISHVENNMHIEEIQEDEDNDMEGPDIDVQDDEVAETVFRDRKRKLPLELTVELTEETFNATVMASDSIVLFYAGWQAVSMAFLQSYIDVAVKLKVVWGHLVCSLQHTWLAEKGRQSGHLGNV

SEQ ID NO: 24021 - DNA, 4619 bp, Homo sapiens
cgaggagaaggaggagcttcgcaggttgttttttcccaggaggccgactccgccgagtcggtggcggctgcaggctgggagggagaagtgctacgcctttgcaggttggcgaagtggttccaggctacccggctagtctggcacggccccgtcttctgcctcctcctccgtcgcgtggcggcgggaactgttggccgcgcggcctcgggaacggcccaggtccccgcccgcaggtcccgggcagataacatagatcatcagtagaaaacttcttgaagttgttcaagaaaaatttgaaagtagcaaaatagaaaataaagaattaacagcagatacagaggacagcatggaagtgttgtcttaggaaacagaacacagcagtgaaaaaacagacaaaatccgctcagatacaactgcagctgataatgttttccggcttcaatgtctttagagttgggatctcttttgtcataatgtgcattttttacatgccaacagtaaactctttaccagaactgagtcctcagaaatattttagtacattgcaaccaggaaaagcctctttagcttatttttgtcaagctgattccccaagaacatctgtatttcttgaagaactgaatgaggctgttagacctctgcaggactatggaatttcagttgccaaggttaattgtgtcaaagaagaaatatcaagatactgtggaaaagaaaaggatttgatgaaagcatatttattcaagggcaacatattgctcagagaattccctactgacaccttgtttgatgtgaatgccattgtcgcccatgttctctttgctcttctttttagtgaagtgaaatatattaccaacctggaagaccttcagaacatagaaaatgctctgaaaggaaaagcaaatattatattctcatatgtaagagccattggaataccagagcacagagcagtcatggaagccgcttttgtgtatgggactacataccaatttgtcttaaccacagaaattgcccttttggaaagtattggctctgaggatgtggaatatgcacatctctacttttttcattgtaaactagtcttggacttgacccagcaatgtagaagaacactaatggaacagccattgactacactgaacattcacctgtttattaagacaatgaaagcacctctgttgactgaagttgctgaagatcctcaacaagtttcaactgtccatctccaactgggcttaccactggtttttattgttagccaacaggctacttatgaagctgatagaagaactgcagaatgggttgcttggcgtcttctgggaaaagcaggagttctactcttgttaagggactctttggaagtgaacattcctcaagatgctaatgtggtcttcaaaagagcagaagagggagttccagtggaatttttggtattacatgatgttgatttaataatatctcatgtggaaaataatatgcacattgaggaaatacaagaagatgaagacaatgacatggaaggtccagatatagatgttcaggatgatgaagtggcagaaactgttttcagagataggaagagaaaattacctttggaacttacagtggaactaacagaagaaacatttaatgcaacagtgatggcttctgacagcatagtactcttctatgctggttggcaagcagtatccatggcatttttgcaatcctatattgatgtggcagttaaactgaaaggcacatctactatgcttcttactagaataaactgtgcagattggtctgatgtatgtactaagcaaaatgttactgaatttcctatcataaagatgtacaagaaaggcgagaacccagtatcttatgctggaatgttaggaaccgaagatctcctaaaatttatccagctcaacaggatttcatatccagtgaatataacatcgatccaagaagcagaagaatatttaagtggggaattatataaagacctcatcttgtattctagtgtgtcagtattgggactatttagtccaaccatgaaaacagcaaaagaagattttagtgaagcaggaaactacctaaaaggatatgttatcactggaatttattctgaagaagatgttttgctactgtcaaccaaatatgctgcaagtcttccagccctgctgcttgccagacacacagaaggcaaaatagagagcatcccactagctagcacacatgcacaagacatagttcaaataataacagatgcactactggaaatgtttccggaaatcactgtggaaaatcttcccagttatttcagacttcagaaaccattattgattttgttcagtgatggcactgtaaatcctcagtataaaaaagcaatattgacactggtaaagcagaaatacttggattcatttactccatgctggttaaatctaaagaatactccagtggggagaggaatcttgagggcatattttgatcctctgcctccccttcctcttcttgttttggtgaatctgcattcaggtggccaagtatttgcatttccttcagaccaggctataattgaagaaaaccttgtattgtggctgaagaaattagaagcaggactagaaaatcatatcacaattttacctgctcaagaatggaaacctcctcttccagcttatgattttctaagtatgatagatgccgcaacatctcaacgtggcactaggaaagttcccaagtgtatgaaagaaacagatgtgcaggagaatgataaggaacaacatgaagataaatcggcagtcagaaaagaaccgattgaaactctgagaataaagcattggaatagaagtaattggtttaaagaagcagaaaaatcatttagacgtgataaagagttaggatgctcaaaagtgaactaattttatagggctgtggtttccaaaatttttttggcatgatagacttaatttatttccttaaagaataatattaaatcatttcaagtttgcagactagtgccatccaatagaattataatataagtcacatattttatttaaaattttctagtaactacattaaacaaagtaaaagtgagcagggcaaaataattttgatattacttttcacccagtagtatacccaaaatagcgaaatatagaaattattaatgagatattttacatccttttttgtaccaagtcttctaaatgcagtacatattttatacttactgcatttcttacttccgagtagccatatttcaagtgttccttgccacatgtggcctgtgactactgtattggacagttcagtactagacaaaaactagcataattaacttagttctagccatgatttctatttggattaaaattaaactctaatcacagttaactccacagtgcattcatgcagctgacagttatatttgttttattggagtcatgatattaaaatcagcgtttgtcaacctcaggggatatttagcaattgtcgggagacatttttgatgtcatgactagggcagttattgacatttagtgagtagaggccagggatcctgctaaataacctgcattggacagcgccccacaacaaagaattatcctgcccgaaatggtagtcgtgccaaggctgagtaaccttgtgttaaaagtaacctgtggcagactaggtttccagaatttcctggttctgctcacgtatcatgtttgaaaaaattttggctattaaagatatgtattagatggtcttatcctgattattacctggatacaacttgatcttttctaatattttcagaaagtgatgggataaccctagaagaggactcagaatgatatttatattttaagtgagtcttaaaacctcctcttatttctacaagttatatggctaaatttcagattgaacagggattcagcattctgccatctcctcatggaaagagaggctccctcatctgaagcgtctctgaaatctacccttgcaagcttcagacaaatcagttgatctccctgagccacacggcctcattctgtgagggagggaaagattagccaaagagttaattttcattccaaatcacttagctgttagactgatctgtttgtagcagttgtttgtctcatttttgctctgtgcattttttgagacatttgttgagaatattctatttggtgctctactgtatttttctttttaatatctacttgatatcttgttctttaaattttcttcacatatggtttgcctgatacaactgatttttataactgaaatttaaggaatctaacagctaaaactcagtaagtgcatatatttccttataacatagacccgttgctactctcagcaccctctcctcaattttttttcctgtagcatgtgatgcctgattaaactcattttcatttgcttttatttctaatatgggaacaatgagagtgaactctaaatataggttgtagtaataaaacatcattagcctaattattagaaaatgctaattaagtaccagcacatagaaacatgaaattgcttagtcattgtacctttgtcagcaattttgacagtcattaatgtttgtcataattttaaataaagtgtctgggtttcagaataccttcaca

SEQ ID NO: 24022 - protein, 825 aa, Homo sapiens
MFSGFNVFRVGISFVIMCIFYMPTVNSLPELSPQKYFSTLQPGKASLAYFCQADSPRTSVFLEELNEAVRPLQDYGISVAKVNCVKEEISRYCGKEKDLMKAYLFKGNILLREFPTDTLFDVNAIVAHVLFALLFSEVKYITNLEDLQNIENALKGKANIIFSYVRAIGIPEHRAVMEAAFVYGTTYQFVLTTEIALLESIGSEDVEYAHLYFFHCKLVLDLTQQCRRTLMEQPLTTLNIHLFIKTMKAPLLTEVAEDPQQVSTVHLQLGLPLVFIVSQQATYEADRRTAEWVAWRLLGKAGVLLLLRDSLEVNIPQDANVVFKRAEEGVPVEFLVLHDVDLIISHVENNMHIEEIQEDEDNDMEGPDIDVQDDEVAETVFRDRKRKLPLELTVELTEETFNATVMASDSIVLFYAGWQAVSMAFLQSYIDVAVKLKGTSTMLLTRINCADWSDVCTKQNVTEFPIIKMYKKGENPVSYAGMLGTEDLLKFIQLNRISYPVNITSIQEAEEYLSGELYKDLILYSSVSVLGLFSPTMKTAKEDFSEAGNYLKGYVITGIYSEEDVLLLSTKYAASLPALLLARHTEGKIESIPLASTHAQDIVQIITDALLEMFPEITVENLPSYFRLQKPLLILFSDGTVNPQYKKAILTLVKQKYLDSFTPCWLNLKNTPVGRGILRAYFDPLPPLPLLVLVNLHSGGQVFAFPSDQAIIEENLVLWLKKLEAGLENHITILPAQEWKPPLPAYDFLSMIDAATSQRGTRKVPKCMKETDVQENDKEQHEDKSAVRKEPIETLRIKHWNRSNWFKEAEKSFRRDKELGCSKVN

SEQ ID NO: 24023 - DNA, 655 bp, Homo sapiens
cgaggagaaggaggagcttcgcaggttgttttttcccaggaggccgactccgccgagtcggtggcggctgcaggctgggagggagaagtgctacgcctttgcaggttggcgaagtggttccaggctacccggctagtctggcacggccccgtcttctgcctcctcctccgtcgcgtggcggcgggaactgttggccgcgcggcctcgggaacggcccaggtccccgcccgcaggtcccgggcagataacatagatcatcagtagaaaacttcttgaagttgttcaagaaaaatttgaaagtagcaaaatagaaaataaagaattaacagcagatacagaggacagcatggaagtgttgtcttaggaaacagaacacagcagtgaaaaaacagacaaaatccgctcagatacaactgcagctgataatgttttccggcttcaatgtctttagagttgggatctcttttgtcataatgtgcattttttacatgccaacagtaaactctttaccagaactgagtcctcagaaatattttagtacattgcaaccagttcttgaagaactgaatgaggctgttagacctctgcaggactatggaatttcagttgccaaggttaattgtgtcaaagaagaaatatcaagatactgtggaaa

SEQ ID NO: 24024 - protein, 75 aa, Homo sapiens
MFSGFNVFRVGISFVIMCIFYMPTVNSLPELSPQKYFSTLQPVLEELNEAVRPLQDYGISVAKVNCVKEEISRYC

SEQ ID NO: 24025 - DNA, 3784 bp, Homo sapiens
agcctcaggcgccgcggtgccgggctccgtgcagttggcgctgagcgtcctgcacgccctgctctacgccgcgctgttcgcctttgcctacctgcagctgtggcggctgctcctgtaccgcgagcggcggctgagttaccagagcctctgcctcttcctctgtctcctgtgggcagcgctcaggaccaccctcttctccgccgccttctcgctcagcggctccctgcccttgctccggccgcccgctcacctgcacttcttcccccactggctgctctactgcttcccctcctgtctccagttctccacgctctgtctcctcaacctctacctggcggaggttatatgtaaagtcagatgtgccactgaacttgacagacacaaaattctactgcatttgggctttataatggcaagcctgctctttttagtggtgaacttgacttgcgcaatgctagttcatggagatgtcccagaaaatcagttgaagtggactgtgtttgttcgagcattaattaatgatagcctgtttattctttgtgccatctctttagtgtgttacatatgcaaaattacaaaaatgtcatcagctaatgtctacctcgaatcaaagggtatgtctctgtgccagactgtcgtcgtgggctctgtagtcattcttctgtactcttccagagcttgttataatttggtggtggtcaccatatctcaggatacattagaaagtccatttaattatggctgggataatctttcagataaggctcatgtagaagacataagtggagaagagtatatagtatttggaatggtcctctttctgtgggaacatgtgccagcatggtcggtggtactgtttttccgggcacagagattaaaccagaatttggcacctgctggcatgataaatagtcacagttatagttccagagcttactttttcgacaatccaagacgatatgatagtgatgatgacctgccaagactgggaagttcaagagaaggaagtttaccaaattcgcaaagtttgggctggtatggcaccatgactgggtgtggcagcagcagttacacagtcactccccacctgaatggacctatgacagatactgctcctttgctctttacttgtagtaatttagatttgaacaatcatcatagcttatatgtgacaccacaaaactgacagcatcaccaagtcatgattcttgagttgtttttcataaatgtgtatattcaatgtgtttaaattccatctacataaacattccattatctgttgcaactgaaaacaaaatctggaagtgtggctgtgtttggtaaataacacagctattatttttgacctcttcatagtaaaatgaagtaaaatggaaagtttggagtaggagaaaagagagattagatcttaaggcacttgatggcctccaaaaatcctgactttggaacatcaaatgcatatgtgcacttttatctttgttctgagtcactgcagtccccaaagtcatatgccaatgttcacactgaaatactgtattgtacaccaaactggaaggcaattttcctatgaaaatcaaagccggtatattcattggtatgctctatacagatatcttaataaaaattttatagtgtgaacagtgcacagagttaaggcataaaaatgtatcattctttataaaaatctactgaaaatgtgtaatcattgaagacagttcttttaagcatgattttaaaatagcaactgaaattcaatcattttaaacaaatgatggtagtaatccattagttatggccagcagtgttctttggagagccacaataatttcaagaggaaaatataccagtgaaaattgtgtggctattttgagtagaattggtcagttgattattttgtgtaattgagatatatgtagtagtttaagcatgattcttgaagaaagcaatagtgacttttgcatagggagattttggtagaaacttcttgggactaaacaagtttagagatgcatttaagaattattcacaaaatgtgtaattctaaattaaaacataaatatattttcaaaagcatttgatttctctgaagcatgatatagctggtcttacctagtgaatcaggattgtcctcaggtaaatgaaatcatgatacattattgcagtgaactcaagtgcaatactttgtaagacatataattcctatgattttcacatttttatatcttatatatgggaaaagccaaattaaattgaattcagattaattccagcattagactaaatgagcaaacttaagtaaatgtacaaactaggtaagtataaaaccacaggttaacaatattggagtacttttagaattacattaaaactgtcttaaatgtcctatcccaaatctaaaaaaaaagaaaatggcaggctgagataatacagaattttaaaatgcactttgtaccagtgtctatatggaaagaagtagatgctgaatacctcaagatgccaagggaacaagcaacattgggaagttgtcacaacatgctcaaagacaaactacaattgtctgctagctatttcttcagaactggaactaatacgactatccttttctgttttatactttgattagaatgttatttcctcgcttacttaaaatgtacttcaactttttaacaactgatacaataacttcataaaagtataacactaggttgaaaccttaaggaaaaattgaaattgttaatgctttcgatcttttgggaggccagtacacagacaaataaatttcttctttttatgatacaaaatgactttgtattcaatcagaagcatatacttatgttattttgggtttgtttataattctctcattgtaaccaaattattttaaaatgtatagtataaaaagttacccgtggtattaagtgacaaaagcgtacttttattacaactccagttgttagattgcttctcagaatgctaactgtttattttgctaataatgttaggcatctaatcatctagagctgtccaaaaagatatgttgtctttgttaatccttggggttcaaggtgataaagtttttctagtaaggctcccctcgataatgttcctatttgaccaaactaacaaagattactttttaaaaatttttcagataaaataacttggttctttctgctgcattagttgattgttccaaatttgaggtttgtaagtttattcttatcactgactagggtacccaaattcttgcatttgtctccttatacacatctaacatatcaccaaagacaaataaagatacactctggcccaatctttgcttaaaaattccaaagcactaggagcactttaagtttggtctcgaaaggagttgtttataaaatcaaagggctaccgattccctgttcatcctgcactgaagcacatgatgacagtatcaaaccttcatttttgttcattaaaaagtgaatttcattacttaagtgtgtaattctatagtgattagcagtatttgttttcatcatttcacttgggtggccattaattttgaaacctttaccactcattgtagttggttgtagttttatggaaaatgtaatttatagctaaagtggcttttttatgcatagctgccttttttattgtttaacagtgtttctcagctatataatcagtttcaaactggttgtaaaagtatagctgtggccaatgaatgtatttatttgttgtttcactaaattgtaacaaaacactactattaaaaataaaagtgtttgtgctttta

SEQ ID NO: 24026 - protein, 258 aa, Homo sapiens
MASLLFLVVNLTCAMLVHGDVPENQLKWTVFVRALINDSLFILCAISLVCYICKITKMSSANVYLESKGMSLCQTVVVGSVVILLYSSRACYNLVVVTISQDTLESPFNYGWDNLSDKAHVEDISGEEYIVFGMVLFLWEHVPAWSVVLFFRAQRLNQNLAPAGMINSHSYSSRAYFFDNPRRYDSDDDLPRLGSSREGSLPNSQSLGWYGTMTGCGSSSYTVTPHLNGPMTDTAPLLFTCSNLDLNNHHSLYVTPQN

SEQ ID NO: 24027 - DNA, 3799 bp, Homo sapiens
gttggcgctgagcgtcctgcacgccctgctctacgccgcgctgttcgcctttgcctacctgcagctgtggcggctgctcctgtaccgcgagcggcggctgagttaccagagcctctgcctcttcctctgtctcctgtgggcagcgctcaggaccaccctcttctccgccgccttctcgctcagcggctccctgcccttgctccggccgcccgctcacctgcacttcttcccccactggctgctctactgcttcccctcctgtctccagttctccacgctctgtctcctcaacctctacctggcggaggttatatgtaaagtcagatgtgccactgaacttgacagacacaaaattctactgcatttgggctttataatggcaagcctgctctttttagtggtgaacttgacttgcgcaatgctagttcatggagatgtcccagaaaatcagttgaagtggactgtgtttgttcgagcattaattaatgatagcctgtttattctttgtgccatctctttagtgtgttacatatgcaaaattacaaaaatgtcatcagctaatgtctacctcgaatcaaagattacaggatctcattctttcttatggctgaatagtactccattgtgtggtatgtctctgtgccagactgtcgtcgtgggctctgtagtcattcttctgtactcttccagagcttgttataatttggtggtggtcaccatatctcaggatacattagaaagtccatttaattatggctgggataatctttcagataaggctcatgtagaagacataagtggagaagagtatatagtatttggaatggtcctctttctgtgggaacatgtgccagcatggtcggtggtactgtttttccgggcacagagattaaaccagaatttggcacctgctggcatgataaatagtcacagttatagttccagagcttactttttcgacaatccaagacgatatgatagtgatgatgacctgccaagactgggaagttcaagagaaggaagtttaccaaattcgcaaagtttgggctggtatggcaccatgactgggtgtggcagcagcagttacacagtcactccccacctgaatggacctatgacagatactgctcctttgctctttacttgtagtaatttagatttgaacaatcatcatagcttatatgtgacaccacaaaactgacagcatcaccaagtcatgattcttgagttgtttttcataaatgtgtatattcaatgtgtttaaattccatctacataaacattccattatctgttgcaactgaaaacaaaatctggaagtgtggctgtgtttggtaaataacacagctattatttttgacctcttcatagtaaaatgaagtaaaatggaaagtttggagtaggagaaaagagagattagatcttaaggcacttgatggcctccaaaaatcctgactttggaacatcaaatgcatatgtgcacttttatctttgttctgagtcactgcagtccccaaagtcatatgccaatgttcacactgaaatactgtattgtacaccaaactggaaggcaattttcctatgaaaatcaaagccggtatattcattggtatgctctatacagatatcttaataaaaattttatagtgtgaacagtgcacagagttaaggcataaaaatgtatcattctttataaaaatctactgaaaatgtgtaatcattgaagacagttcttttaagcatgattttaaaatagcaactgaaattcaatcattttaaacaaatgatggtagtaatccattagttatggccagcagtgttctttggagagccacaataatttcaagaggaaaatataccagtgaaaattgtgtggctattttgagtagaattggtcagttgattattttgtgtaattgagatatatgtagtagtttaagcatgattcttgaagaaagcaatagtgacttttgcatagggagattttggtagaaacttcttgggactaaacaagtttagagatgcatttaagaattattcacaaaatgtgtaattctaaattaaaacataaatatattttcaaaagcatttgatttctctgaagcatgatatagctggtcttacctagtgaatcaggattgtcctcaggtaaatgaaatcatgatacattattgcagtgaactcaagtgcaatactttgtaagacatataattcctatgattttcacatttttatatcttatatatgggaaaagccaaattaaattgaattcagattaattccagcattagactaaatgagcaaacttaagtaaatgtacaaactaggtaagtataaaaccacaggttaacaatattggagtacttttagaattacattaaaactgtcttaaatgtcctatcccaaatctaaaaaaaaagaaaatggcaggctgagataatacagaattttaaaatgcactttgtaccagtgtctatatggaaagaagtagatgctgaatacctcaagatgccaagggaacaagcaacattgggaagttgtcacaacatgctcaaagacaaactacaattgtctgctagctatttcttcagaactggaactaatacgactatccttttctgttttatactttgattagaatgttatttcctcgcttacttaaaatgtacttcaactttttaacaactgatacaataacttcataaaagtataacactaggttgaaaccttaaggaaaaattgaaattgttaatgctttcgatcttttgggaggccagtacacagacaaataaatttcttctttttatgatacaaaatgactttgtattcaatcagaagcatatacttatgttattttgggtttgtttataattctctcattgtaaccaaattattttaaaatgtatagtataaaaagttacccgtggtattaagtgacaaaagcgtacttttattacaactccagttgttagattgcttctcagaatgctaactgtttattttgctaataatgttaggcatctaatcatctagagctgtccaaaaagatatgttgtctttgttaatccttggggttcaaggtgataaagtttttctagtaaggctcccctcgataatgttcctatttgaccaaactaacaaagattactttttaaaaatttttcagataaaataacttggttctttctgctgcattagttgattgttccaaatttgaggtttgtaagtttattcttatcactgactagggtacccaaattcttgcatttgtctccttatacacatctaacatatcaccaaagacaaataaagatacactctggcccaatctttgcttaaaaattccaaagcactaggagcactttaagtttggtctcgaaaggagttgtttataaaatcaaagggctaccgattccctgttcatcctgcactgaagcacatgatgacagtatcaaaccttcatttttgttcattaaaaagtgaatttcattacttaagtgtgtaattctatagtgattagcagtatttgttttcatcatttcacttgggtggccattaattttgaaacctttaccactcattgtagttggttgtagttttatggaaaatgtaatttatagctaaagtggcttttttatgcatagctgccttttttattgtttaacagtgtttctcagctatataatcagtttcaaactggttgtaaaagtatagctgtggccaatgaatgtatttatttgttgtttcactaaattgtaacaaaacactactattaaaaataaaagtgtttgtgctttta

SEQ ID NO: 24028 - protein, 274 aa, Homo sapiens [sequence omitted]

SEQ ID NO: 24029 - DNA, 236 bp, Homo sapiens
aatatcatttttaagcagcttagaagaaatcagactaagcagagagaagagactaaaagaaaaaaaaataaaaaaaaaagttgttaaccatatgatagacatagaaggtgaacatctggccgggtgcagtggctcatgcttgtaatcccagcacactgggaggccgaggcaggcagatcacctgaggtcaggagttcaacacaggccagccaacatggtgagatgccttctctact

SEQ ID NO: 24030 - protein, 32 aa, Homo sapiens
MLVIPAHWEAEAGRSPEVRSSTQASQHGEMPS

SEQ ID NO: 24031 - DNA, 5410 bp, Homo sapiens
atttttgtcatattccttgaattttaaggatacaacctccttttgttattttttgttatttttttaattttggtattttcattgttatattatttaaaatgttattaaacctacacttgaagtaaaattaaccaactttttttgactttttagtatcttttcaggtttcaggatataaatgtatttatttcaaataaattgtacactacatagtacaaagtagtaataactcaaggtctagagttatattgctggatttaaatcagagatctgccatttatcagctctatgactttaacctctctgtccacctttaaactgaagataaagtatagtaatcatgtccatagtggtgttgcaaggatgaaataataatgtatggaaagtcatagtatattacgtggcactaaaaatataaatgttgactcgctatcatcttcatcatcatattttgacatagtttatagaataggcttgttcttacaaaacttggaaaaatcctttcattacccatttggcagaatgttgttctttggtaaacttttttggttttcttttgtttttcactgttatttgtctgttaactggttttatttctaccagacttgctgttttatagttttatgggcagttagccatattatccttactaaaaatgtattttttctgattattaaaacttggcaatatgaaagaatatgatttctttaatgttctaaacagccgtagtgtcaccactgacacttaactgtatttggaactcagtgtaaatgtaaatataattttataccctgcttttccccttatactagtaaaggattttctcatgctattaaaaattatttttaaggctgcataacatttcatcatataccaaaattaattcttatcctactgataggcctttaagtggttttcaaaaaagaatgtcagcctccataatgttaattttcttcaaaatcagttttgttttgctttttatttttagtaagagttagaggttttagtaattacatctagaactgtgtatcccagcctcagtttacagagcactcacgtatcttttatgttatgatttgcattacttttttttcttgatagagacacattctcactgtgtcacccaggctggaatgtagtggcgcaattatagcttactgtaacctcaaactcctgggcttatgtaattctcctacctcagcctcccaagtagctagaactgcgagcattcaccaccacactcagctttttttttttttttttctttggagagaacaagtcttgctatgttgcccaggctgctctcaaactcctggcctcagatgatcctgtcatcttggccttccaaagtactgggattacaagcatgagccatggtactcagcccattattattttttttaattcttagaaaattttttatttttaatttttgtgggtgattataaggtatatatgtatggggtatataaaatatttttgggccaggcgcagtggctcacgcctgttgtaatcccagcaccttgggaggccaaggcgggtggatcacgaggtcaggagatcaagaccatcctggctaacacggtgaaaccctgtctctactaaaaatacaaaaaatttgcccggcatggtggcgggtgcctgtagtcccagctaatcgggaggctgaggcaggagaacggtgtgaacccaggaggcggagcttgcagtgagctgagatcatgccactgcacctccagcctgggggacagagtgagactccacctcaaaaaaaaaaaaaaaaagatatttctgatacaggcatgagaagcataataattacattatggaaaatgcaatatccatcccctcaagcatttatcctttgtgttacaaacaattcaattatacccttttagttattttagaatacacaattaaattattatccatagtcaccctgttgtgctatcaactaggtcttattaattctttctaactactttttgtacccattaaccatccccacttctccccaacccctccactacccttcccaacctctggtaaccatccttctactctctatctccatgagttcaattgttctgatttttagctccaacaaataagtgagaacatgcgatgtttgtctttctgtgcctggcatattttatttaacatgatgatctccagttccatgttgttgcagattacaggatctcattctttcttatggctgaatagtactccattgtgtggtatgtctctgtgccagactgtcgtcgtgggctctgtagtcattcttctgtactcttccagagcttgttataatttggtggtggtcaccatatctcaggatacattagaaagtccatttaattatggctgggataatctttcagataaggctcatgtagaagacataagtggagaagagtatatagtatttggaatggtcctctttctgtgggaacatgtgccagcatggtcggtggtactgtttttccgggcacagagattaaaccagaatttggcacctgctggcatgataaatagtcacagttatagttccagagcttactttttcgacaatccaagacgatatgatagtgatgatgacctgccaagactgggaagttcaagagaaggaagtttaccaaattcgcaaagtttgggctggtatggcaccatgactgggtgtggcagcagcagttacacagtcactccccacctgaatggacctatgacagatactgctcctttgctctttacttgtagtaatttagatttgaacaatcatcatagcttatatgtgacaccacaaaactgacagcatcaccaagtcatgattcttgagttgtttttcataaatgtgtatattcaatgtgtttaaattccatctacataaacattccattatctgttgcaactgaaaacaaaatctggaagtgtggctgtgtttggtaaataacacagctattatttttgacctcttcatagtaaaatgaagtaaaatggaaagtttggagtaggagaaaagagagattagatcttaaggcacttgatggcctccaaaaatcctgactttggaacatcaaatgcatatgtgcacttttatctttgttctgagtcactgcagtccccaaagtcatatgccaatgttcacactgaaatactgtattgtacaccaaactggaaggcaattttcctatgaaaatcaaagccggtatattcattggtatgctctatacagatatcttaataaaaattttatagtgtgaacagtgcacagagttaaggcataaaaatgtatcattctttataaaaatctactgaaaatgtgtaatcattgaagacagttcttttaagcatgattttaaaatagcaactgaaattcaatcattttaaacaaatgatggtagtaatccattagttatggccagcagtgttctttggagagccacaataatttcaagaggaaaatataccagtgaaaattgtgtggctattttgagtagaattggtcagttgattattttgtgtaattgagatatatgtagtagtttaagcatgattcttgaagaaagcaatagtgacttttgcatagggagattttggtagaaacttcttgggactaaacaagtttagagatgcatttaagaattattcacaaaatgtgtaattctaaattaaaacataaatatattttcaaaagcatttgatttctctgaagcatgatatagctggtcttacctagtgaatcaggattgtcctcaggtaaatgaaatcatgatacattattgcagtgaactcaagtgcaatactttgtaagacatataattcctatgattttcacatttttatatcttatatatgggaaaagccaaattaaattgaattcagattaattccagcattagactaaatgagcaaacttaagtaaatgtacaaactaggtaagtataaaaccacaggttaacaatattggagtacttttagaattacattaaaactgtcttaaatgtcctatcccaaatctaaaaaaaaagaaaatggcaggctgagataatacagaattttaaaatgcactttgtaccagtgtctatatggaaagaagtagatgctgaatacctcaagatgccaagggaacaagcaacattgggaagttgtcacaacatgctcaaagacaaactacaattgtctgctagctatttcttcagaactggaactaatacgactatccttttctgttttatactttgattagaatgttatttcctcgcttacttaaaatgtacttcaactttttaacaactgatacaataacttcataaaagtataacactaggttgaaaccttaaggaaaaattgaaattgttaatgctttcgatcttttgggaggccagtacacagacaaataaatttcttctttttatgatacaaaatgactttgtattcaatcagaagcatatacttatgttattttgggtttgtttataattctctcattgtaaccaaattattttaaaatgtatagtataaaaagttacccgtggtattaagtgacaaaagcgtacttttattacaactccagttgttagattgcttctcagaatgctaactgtttattttgctaataatgttaggcatctaatcatctagagctgtccaaaaagatatgttgtctttgttaatccttggggttcaaggtgataaagtttttctagtaaggctcccctcgataatgttcctatttgaccaaactaacaaagattactttttaaaaatttttcagataaaataacttggttctttctgctgcattagttgattgttccaaatttgaggtttgtaagtttattcttatcactgactagggtacccaaattcttgcatttgtctccttatacacatctaacatatcaccaaagacaaataaagatacactctggcccaatctttgcttaaaaattccaaagcactaggagcactttaagtttggtctcgaaaggagttgtttataaaatcaaagggctaccgattccctgttcatcctgcactgaagcacatgatgacagtatcaaaccttcatttttgttcattaaaaagtgaatttcattacttaagtgtgtaattctatagtgattagcagtatttgttttcatcatttcacttgggtggccattaattttgaaacctttaccactcattgtagttggttgtagttttatggaaaatgtaatttatagctaaagtggcttttttatgcatagctgccttttttattgtttaacagtgtttctcagctatataatcagtttcaaactggttgtaaaagtatagctgtggccaatgaatgtatttatttgttgtttcactaaattgtaacaaaacactactattaaaaataaaagtgtttgtgctttta

SEQ ID NO: 24032 - protein, 230 aa, Homo sapiens
MRCLSFCAWHILFNMMISSSMLLQITGSHSFLWLNSTPLCGMSLCQTVVVGSVVILLYSSRACYNLVVVTISQDTLESPFNYGWDNLSDKAHVEDISGEEYIVFGMVLFLWEHVPAWSVVLFFRAQRLNQNLAPAGMINSHSYSSRAYFFDNPRRYDSDDDLPRLGSSREGSLPNSQSLGWYGTMTGCGSSSYTVTPHLNGPMTDTAPLLFTCSNLDLNNHHSLYVTPQN

SEQ ID NO: 24033 - DNA, 1505 bp, Homo sapiens
tcttagctcactgcaagctctgccttccaggttcacgccattcttccacctcgacctcccaaagtgctgggattacaggcgtgagccaccacgcccggcctcttttttttttagctgccaatctttttgaaggaatattcttacctctactttgtcaccttctactggctccttaactaaaatctgccatttggctctctggttaacagtcccttcctgtaaagtctaaaatcttaattctaaatccacagtttaattcacaagctagtacttgactttttttctgtatttgacatttttgacaacccctactttaaagatttattcccttgacttcttacattttgctcactcctgaaccaccccccaccttttggcctcttcatttattccttaaatgttattcctcagacctccattttttttttctctcttaatcacaacaccacttctcacgcttgggtaattttaattcagcagttcctaaatccttatctttagccagactcctcaatccatctgcctgttgcacttttcttggttgtcccagagacacctgtgtgtgtcttaaaacattcattctctgcaaaacctactctaatgcctgtgtcccttactttggttaattttagaaccattatattctaagttttctaggctcattcctctcctccaccttcccctatcatttagtgtctaagttttactgattttatctccacctctctgatacatcactctttcatcttcattgctattattaataaatacctacagtactaacctgcctcctatacctagctggtctcctctctgttgctcaatgttaccacagcaggctttctagaagcactctgacagtgttactccctaatatccttcagtgacttcaggaactttcaggagaaagccaaactcctctgtttggtgtacaaggtcttctgatgtgtttcctccaccgaatgttctggtgaaacagacttacacttcttcagaagccacatttggccaggcctcccgccttggtaaatgctgtactctttgcatcaagtatgctagtcatccttccccacttggaaaattcctatgcatcttgcaggcctgacataagcatttcctctgtgaaacctcctttgctccactcaaggagagtcatctaacttccactttcgtgtcaccactgtaattacaacctacctctattgtatgtcacttaaatcgtactgtattgttttatttttcaaaagtctttactagaatgtgagctccttaagggcaggaaaaggaacctttttattttttgcatctccatagcatagtttttggcatatgaatgtttaataaatgtttgttgaataaattgattttaaagtgacatctttattatattagaggtcctacctatattccaaatactttcactcccttcactttacagcaagggtcagtagagtcccaaggatttgtagactttagggggtcaataaagctgaaattgtattcaa

SEQ ID NO: 24034 - protein, 35 aa, Homo sapiens
MLVILPHLENSYASCRPDISISSVKPPLLHSRRVI

SEQ ID NO: 24035 - DNA, 3973 bp, Homo sapiens
ggttgttttaaatgtcgtctgtggggaaagcttcaggtaagcaaatttagtcattcctatttctcatttaccctttgcatgaataattttctaatttttcttttttccttatttctattacagactcagggtttgggcactgctctgaagatcttattttctgagaaattgatagcaaatatgccagaaagtggacctagttatgaattccatctaaccagacaagaaatagtatcattattcaacgcatttggaagaatttctacaagtgtgaaagaattagaaaacttcaggaacttgttacagaatattcattaaagaaaacaagctgatatgtgcctgtttctggacaatggaggcgaaagagtggaatttcattcaaaggcataatagcaatgacagtcttaagccaaacattttatataaagttgcttttgtaaaggagaattatattgttttaagtaaacacatttttaaaaattgtgttaagtctatgtataatactactgtgagtaaaagtaatactttaataatgtggtacaaattttaaagtttaatattgaataaaaggaggattatcaaattcatatatgataaaagtgaatgttctaagtctctcaaactagcgttttatgtaataatatgtaatataaataaaactatggtaaatgtgacaagcatttaataggaaaatgctaaggaggcctcataaatgacccataattaccaacgtagaatttttcagtacatttagggttgctggatttagcaaataaaaataaagattgcccagttagatttgaatttcagataaacaattagttttttaatattttacatggaatatttggaaaatacttatactaaaaaattatttgtttgaaattcaaatttaactgggagtcttgtattttatctggcaatcctaaaatacattggtatgaaacaaatcacttttagaagtatattgctattttgattgggttgtttttgtgtgtagaaacgtacaataacaactcaaaggcacaggagatttctaaacattgtgaaaagttgaatagattatatatttattctcataatactttcactaatactaaataaaatttggggaacactttttatttttatataatttccaatttacagaaaagtttcaaaaatagtacaaagagctctcttacccagattcactaattgttcatacgtgctttatctttcatgctttctctgtacacacacacacacacacaaatttttcctcaatcatttgaaagtcagttataggcatcatgccccttaaaccctaaatacttcagtgtgtaatactgaataattactaaaaatgattttctcagaaaaaaaaactcccacaattctggaactataatactgtaagccttagaataaataatactttcaagttccaatctaaagttctttttgagttttgttgcccgttttatgcttgatgtgtatagtaatagggtaggctatttattttattaaaattttttttagagacaaggttttgctgtgttgcccaagctggaacttgaacgactgggctgaagtgatcttcccacctcagcctcccaagtagctgggaatacaggtgtctgccaccatacccagtttcatttttgttttttatacccgaagttcatttcctttgtctccctaaaactgaactgtaattttgggaggttttcattagtggaagctcttcatttataaagctatttgaaggggtttaggaatttatatcacatggtaattgtagagaaaaagaagctatatacctcaaaatcgtgccctctttacatatgtcttatcaggtataacatgttgaaatgtcacattagtagtaaagtggggtttatttatatagtggttaagaaatgtcagtttacactgctgtatacttcttcttctgtgtccctaaggcctggtacagtgccaagcacatacttggtatccaataaatatttgttggatgaatgtatgcatatgtattcagtatattttaaatgaataatcacagaagtaagtttaataatttgtcctatttttctctgtcacttcctttttctctaaggcaggaaaggaaagacattaaaccattaattaagtcaatcctcttggagactcaaaagactatgaagtgatcactctatataaaatataaatacagtgtgggttcaaatggccattttttgtgtgtccctctctctcatcttatgcttcccttcctttttttatttttattttttggagacggagtcttgctgtgtcgcccaggttggagtgcagtggcgtgatcttagctcactgcaagctctgccttccaggttcacgccattcttctgcctcagccccctgagtagctgggactacaggcgcccgccaccacgcccggctaatttttttttttttttttttgtatttttagtagaggcagtgtttcaccgtgttagccaggatggtcttgatctcctgacctcgtgatccacccacctcgacctcccaaagtgctgggattacaggcgtgagccaccacgcccggcctcttttttttttagctgccaatctttttgaaggaatattcttacctctactttgtcaccttctactggctccttaactaaaatctgccatttggctctctggttaacagtcccttcctgtaaagtctaaaatcttaattctaaatccacagtttaattcacaagctagtacttgactttttttctgtatttgacatttttgacaacccctactttaaagatttattcccttgacttcttacattttgctcactcctgaaccaccccccaccttttggcctcttcatttattccttaaatgttattcctcagacctccattttttttttctctcttaatcacaacaccacttctcacgcttgggtaattttaattcagcagttcctaaatccttatctttagccagactcctcaatccatctgcctgttgcacttttcttggttgtcccagagacacctgtgtgtgtcttaaaacattcattctctgcaaaacctactctaatgcctgtgtcccttactttggttaattttagaaccattatattctaagttttctaggctcattcctctcctccaccttcccctatcatttagtgtctaagttttactgattttatctccacctctctgatacatcactctttcatcttcattgctattattaataaatacctacagtactaacctgcctcctatacctagctggtctcctctctgttgctcaatgttaccacagcaggctttctagaagcactctgacagtgttactccctaatatccttcagtgacttcaggaactttcaggagaaagccaaactcctctgtttggtgtacaaggtcttctgatgtgtttcctccaccgaatgttctggtgaaacagacttacacttcttcagaagccacatttggccaggcctcccgccttggtaaatgctgtactctttgcatcaagtatgctagtcatccttccccacttggaaaattcctatgcatcttgcaggcctgacataagcatttcctctgtgaaacctcctttgctccactcaaggagagtcatctaacttccactttcgtgtcaccactgtaattacaacctacctctattgtatgtcacttaaatcgtactgtattgttttatttttcaaaagtctttactagaatgtgagctccttaagggcaggaaaaggaacctttttattttttgcatctccatagcatagtttttggcatatgaatgtttaataaatgtttgttgaataaattgattttaaagtgacatctttattatattagaggtcctacctatattccaaatactttcactcccttcactttacagcaagggtcagtagagtcccaaggatttgtagactttagggggtcaataaagctgaaattgtattcaa

SEQ ID NO: 24036 - protein, 79 aa, Homo sapiens [sequence omitted]

SEQ ID NO: 24037 - DNA, 5513 bp, Homo sapiens
accccgcaggaaaacacaggcccctccggctttcgctctcgctctgggaactggaaggacccccgactcccgcgcagggtctggggttgtgcgcgtcgggttgcgtctccaggccgggggcgtcagggagccgggggcggggacgggcgcgggcgcagcggaccgggcggggccgagccgggaagctggtcggtgcgtcagcctcacgcggcgggaaggaaccggtccgaggccccgggctgccggcgcgggcgccgcggcacgtccacaggctgggtcgcgaggtggcgatcgctgagaggcaggagggccgaggcgggcctgggaggcggcccggaggtggggcgccgctggggccggcccgcacgggcttcatctgagggcgcacggcccgcgaccgagcgtgcggactggcctcccaagcgtggggcgacaagctgccggagctgcaatgggccgcggctggggattcttgtttggcctcctgggcgccgtgtggctgctcagctcgggccacggagaggagcagcccccggagacagcggcacagaggtgcttctgccaggttagtggttacttggatgattgtacctgtgatgttgaaaccattgatagatttaataactacaggcttttcccaagactacaaaaacttcttgaaagtgactactttaggtattacaaggtaaacctgaagaggccgtgtcctttctggaatgacatcagccagtgtggaagaagggactgtgctgtcaaaccatgtcaatctgatgaagttcctgatggaattaaatctgcgagctacaagtattctgaagaagccaataatctcattgaagaatgtgaacaagctgaacgacttggagcagtggatgaatctctgagtgaggaaacacagaaggctgttcttcagtggaccaagcatgatgattcttcagataacttctgtgaagctgatgacattcagtcccctgaagctgaatatgtagatttgcttcttaatcctgagcgctacactggttacaagggaccagatgcttggaaaatatggaatgtcatctacgaagaaaactgttttaagccacagacaattaaaagacctttaaatcctttggcttctggtcaagggacaagtgaagagaacactttttacagttggctagaaggtctctgtgtagaaaaaagagcattctacagacttatatctggcctacatgcaagcattaatgtgcatttgagtgcaagatatcttttacaagagacctggttagaaaagaaatggggacacaacattacagaatttcaacagcgatttgatggaattttgactgaaggagaaggtccaagaaggcttaagaacttgtattttctctacttaatagaactaagggctttatccaaagtgttaccattcttcgagcgcccagattttcaactctttactggaaataaaattcaggatgaggaaaacaaaatgttacttctggaaatacttcatgaaatcaagtcatttcctttgcattttgatgagaattcattttttgctggggataaaaaagaagcacacaaactaaaggaggactttcgactgcattttagaaatatttcaagaattatggattgtgttggttgttttaaatgtcgtctgtggggaaagcttcagactcagggtttgggcactgctctgaagatcttattttctgagaaattgatagcaaatatgccagaaagtggacctagttatgaattccatctaaccagacaagaaatagtatcattattcaacgcatttggaagaatttctacaagtgtgaaagaattagaaaacttcaggaacttgttacagaatattcattaaagaaaacaagctgatatgtgcctgtttctggacaatggaggcgaaagagtggaatttcattcaaaggcataatagcaatgacagtcttaagccaaacattttatataaagttgcttttgtaaaggagaattatattgttttaagtaaacacatttttaaaaattgtgttaagtctatgtataatactactgtgagtaaaagtaatactttaataatgtggtacaaattttaaagtttaatattgaataaaaggaggattatcaaattcatatatgataaaagtgaatgttctaagtctctcaaactagcgttttatgtaataatatgtaatataaataaaactatggtaaatgtgacaagcatttaataggaaaatgctaaggaggcctcataaatgacccataattaccaacgtagaatttttcagtacatttagggttgctggatttagcaaataaaaataaagattgcccagttagatttgaatttcagataaacaattagttttttaatattttacatggaatatttggaaaatacttatactaaaaaattatttgtttgaaattcaaatttaactgggagtcttgtattttatctggcaatcctaaaatacattggtatgaaacaaatcacttttagaagtatattgctattttgattgggttgtttttgtgtgtagaaacgtacaataacaactcaaaggcacaggagatttctaaacattgtgaaaagttgaatagattatatatttattctcataatactttcactaatactaaataaaatttggggaacactttttatttttatataatttccaatttacagaaaagtttcaaaaatagtacaaagagctctcttacccagattcactaattgttcatacgtgctttatctttcatgctttctctgtacacacacacacacacacaaatttttcctcaatcatttgaaagtcagttataggcatcatgccccttaaaccctaaatacttcagtgtgtaatactgaataattactaaaaatgattttctcagaaaaaaaaactcccacaattctggaactataatactgtaagccttagaataaataatactttcaagttccaatctaaagttctttttgagttttgttgcccgttttatgcttgatgtgtatagtaatagggtaggctatttattttattaaaattttttttagagacaaggttttgctgtgttgcccaagctggaacttgaacgactgggctgaagtgatcttcccacctcagcctcccaagtagctgggaatacaggtgtctgccaccatacccagtttcatttttgttttttatacccgaagttcatttcctttgtctccctaaaactgaactgtaattttgggaggttttcattagtggaagctcttcatttataaagctatttgaaggggtttaggaatttatatcacatggtaattgtagagaaaaagaagctatatacctcaaaatcgtgccctctttacatatgtcttatcaggtataacatgttgaaatgtcacattagtagtaaagtggggtttatttatatagtggttaagaaatgtcagtttacactgctgtatacttcttcttctgtgtccctaaggcctggtacagtgccaagcacatacttggtatccaataaatatttgttggatgaatgtatgcatatgtattcagtatattttaaatgaataatcacagaagtaagtttaataatttgtcctatttttctctgtcacttcctttttctctaaggcaggaaaggaaagacattaaaccattaattaagtcaatcctcttggagactcaaaagactatgaagtgatcactctatataaaatataaatacagtgtgggttcaaatggccattttttgtgtgtccctctctctcatcttatgcttcccttcctttttttatttttattttttggagacggagtcttgctgtgtcgcccaggttggagtgcagtggcgtgatcttagctcactgcaagctctgccttccaggttcacgccattcttctgcctcagccccctgagtagctgggactacaggcgcccgccaccacgcccggctaatttttttttttttttttttgtatttttagtagaggcagtgtttcaccgtgttagccaggatggtcttgatctcctgacctcgtgatccacccacctcgacctcccaaagtgctgggattacaggcgtgagccaccacgcccggcctcttttttttttagctgccaatctttttgaaggaatattcttacctctactttgtcaccttctactggctccttaactaaaatctgccatttggctctctggttaacagtcccttcctgtaaagtctaaaatcttaattctaaatccacagtttaattcacaagctagtacttgactttttttctgtatttgacatttttgacaacccctactttaaagatttattcccttgacttcttacattttgctcactcctgaaccaccccccaccttttggcctcttcatttattccttaaatgttattcctcagacctccattttttttttctctcttaatcacaacaccacttctcacgcttgggtaattttaattcagcagttcctaaatccttatctttagccagactcctcaatccatctgcctgttgcacttttcttggttgtcccagagacacctgtgtgtgtcttaaaacattcattctctgcaaaacctactctaatgcctgtgtcccttactttggttaattttagaaccattatattctaagttttctaggctcattcctctcctccaccttcccctatcatttagtgtctaagttttactgattttatctccacctctctgatacatcactctttcatcttcattgctattattaataaatacctacagtactaacctgcctcctatacctagctggtctcctctctgttgctcaatgttaccacagcaggctttctagaagcactctgacagtgttactccctaatatccttcagtgacttcaggaactttcaggagaaagccaaactcctctgtttggtgtacaaggtcttctgatgtgtttcctccaccgaatgttctggtgaaacagacttacacttcttcagaagccacatttggccaggcctcccgccttggtaaatgctgtactctttgcatcaagtatgctagtcatccttccccacttggaaaattcctatgcatcttgcaggcctgacataagcatttcctctgtgaaacctcctttgctccactcaaggagagtcatctaacttccactttcgtgtcaccactgtaattacaacctacctctattgtatgtcacttaaatcgtactgtattgttttatttttcaaaagtctttactagaatgtgagctccttaagggcaggaaaaggaacctttttattttttgcatctccatagcatagtttttggcatatgaatgtttaataaatgtttgttgaataaattgattttaaagtgacatctttattatattagaggtcctacctatattccaaatactttcactcccttcactttacagcaagggtcagtagagtcccaaggatttgtagactttagggggtcaataaagctgaaattgtattcaa

SEQ ID NO: 24038 - protein, 468 aa, Homo sapiens; identical to SEQ ID NO: 3171

SEQ ID NO: 24039 - DNA, 1374 bp, Homo sapiens
tcttagctcactgcaagctctgccttccaggttcacgccattcttccacctcgacctcccaaagtgctgggattacaggcgtgagccaccacgcccggcctcttttttttttagctgccaatctttttgaaggaatattcttacctctactttgtcaccttctactggctccttaactaaaatctgccatttggctctctggttaacagtcccttcctgtaaagtctaaaatcttaattctaaatccacagtttaattcacaagctagtacttgactttttttctgtatttgacatttttgacaacccctactttaaagatttattcccttgacttcttacattttgctcactcctgaaccaccccccaccttttggcctcttcatttattccttaaatgttattcctcagacctccattttttttttctctcttaatcacaacaccacttctcacgcttgggtaattttaattcagcagttcctaaatccttatctttagccagactcctcaatccatctgcctgttgcacttttcttggttgtcccagagacacctgtgtgtgtcttaaaacattcattctctgcaaaacctactctaatgcctgtgtcccttactttggttaattttagaaccattatattctaagttttctaggctcattcctctcctccaccttcccctatcatttagtgtctaagttttactgattttatctccacctctctgatacatcactctttcatcttcattgctattattaataaatacctacagtactaacctgcctcctatacctagctggtctcctctctgttgctcaatgttaccacagcaggctttctagaagcactctgacagtgttactccctaatatccttcagtgacttcaggaactttcaggagaaagccaaactcctctgtttggtgtacaaggtcttctgatgtgtttcctccaccgaatgttctggtgaaacagacttacacttcttcagaagccacatttggccaggcctcccgccttggtaaatgctgtactctttgcatcaagtatgctagtcatccttccccacttggaaaattcctatgcatcttgcaggcctgacataagcatttcctctgtgaaacctcctttgctccactcaaggagagtcatctaacttccactttcgtgtcaccactgtaattacaacctacctctattgtatgtcacttaaatcgtactgtattgttttatttttcaaaagtctttactagaatgtgagctccttaagggcaggaaaaggaacctttttattttttgcatctccatagcatagtttttggcatatgaatgtttaataaatgtttgttgaataaattgattttaaagtg

SEQ ID NO: 24040 - protein, 35 aa, Homo sapiens; identical to SEQ ID NO: 24034

SEQ ID NO: 24041 - DNA, 3842 bp, Homo sapiens
ggttgttttaaatgtcgtctgtggggaaagcttcaggtaagcaaatttagtcattcctatttctcatttaccctttgcatgaataattttctaatttttcttttttccttatttctattacagactcagggtttgggcactgctctgaagatcttattttctgagaaattgatagcaaatatgccagaaagtggacctagttatgaattccatctaaccagacaagaaatagtatcattattcaacgcatttggaagaatttctacaagtgtgaaagaattagaaaacttcaggaacttgttacagaatattcattaaagaaaacaagctgatatgtgcctgtttctggacaatggaggcgaaagagtggaatttcattcaaaggcataatagcaatgacagtcttaagccaaacattttatataaagttgcttttgtaaaggagaattatattgttttaagtaaacacatttttaaaaattgtgttaagtctatgtataatactactgtgagtaaaagtaatactttaataatgtggtacaaattttaaagtttaatattgaataaaaggaggattatcaaattcatatatgataaaagtgaatgttctaagtctctcaaactagcgttttatgtaataatatgtaatataaataaaactatggtaaatgtgacaagcatttaataggaaaatgctaaggaggcctcataaatgacccataattaccaacgtagaatttttcagtacatttagggttgctggatttagcaaataaaaataaagattgcccagttagatttgaatttcagataaacaattagttttttaatattttacatggaatatttggaaaatacttatactaaaaaattatttgtttgaaattcaaatttaactgggagtcttgtattttatctggcaatcctaaaatacattggtatgaaacaaatcacttttagaagtatattgctattttgattgggttgtttttgtgtgtagaaacgtacaataacaactcaaaggcacaggagatttctaaacattgtgaaaagttgaatagattatatatttattctcataatactttcactaatactaaataaaatttggggaacactttttatttttatataatttccaatttacagaaaagtttcaaaaatagtacaaagagctctcttacccagattcactaattgttcatacgtgctttatctttcatgctttctctgtacacacacacacacacacaaatttttcctcaatcatttgaaagtcagttataggcatcatgccccttaaaccctaaatacttcagtgtgtaatactgaataattactaaaaatgattttctcagaaaaaaaaactcccacaattctggaactataatactgtaagccttagaataaataatactttcaagttccaatctaaagttctttttgagttttgttgcccgttttatgcttgatgtgtatagtaatagggtaggctatttattttattaaaattttttttagagacaaggttttgctgtgttgcccaagctggaacttgaacgactgggctgaagtgatcttcccacctcagcctcccaagtagctgggaatacaggtgtctgccaccatacccagtttcatttttgttttttatacccgaagttcatttcctttgtctccctaaaactgaactgtaattttgggaggttttcattagtggaagctcttcatttataaagctatttgaaggggtttaggaatttatatcacatggtaattgtagagaaaaagaagctatatacctcaaaatcgtgccctctttacatatgtcttatcaggtataacatgttgaaatgtcacattagtagtaaagtggggtttatttatatagtggttaagaaatgtcagtttacactgctgtatacttcttcttctgtgtccctaaggcctggtacagtgccaagcacatacttggtatccaataaatatttgttggatgaatgtatgcatatgtattcagtatattttaaatgaataatcacagaagtaagtttaataatttgtcctatttttctctgtcacttcctttttctctaaggcaggaaaggaaagacattaaaccattaattaagtcaatcctcttggagactcaaaagactatgaagtgatcactctatataaaatataaatacagtgtgggttcaaatggccattttttgtgtgtccctctctctcatcttatgcttcccttcctttttttatttttattttttggagacggagtcttgctgtgtcgcccaggttggagtgcagtggcgtgatcttagctcactgcaagctctgccttccaggttcacgccattcttctgcctcagccccctgagtagctgggactacaggcgcccgccaccacgcccggctaatttttttttttttttttttgtatttttagtagaggcagtgtttcaccgtgttagccaggatggtcttgatctcctgacctcgtgatccacccacctcgacctcccaaagtgctgggattacaggcgtgagccaccacgcccggcctcttttttttttagctgccaatctttttgaaggaatattcttacctctactttgtcaccttctactggctccttaactaaaatctgccatttggctctctggttaacagtcccttcctgtaaagtctaaaatcttaattctaaatccacagtttaattcacaagctagtacttgactttttttctgtatttgacatttttgacaacccctactttaaagatttattcccttgacttcttacattttgctcactcctgaaccaccccccaccttttggcctcttcatttattccttaaatgttattcctcagacctccattttttttttctctcttaatcacaacaccacttctcacgcttgggtaattttaattcagcagttcctaaatccttatctttagccagactcctcaatccatctgcctgttgcacttttcttggttgtcccagagacacctgtgtgtgtcttaaaacattcattctctgcaaaacctactctaatgcctgtgtcccttactttggttaattttagaaccattatattctaagttttctaggctcattcctctcctccaccttcccctatcatttagtgtctaagttttactgattttatctccacctctctgatacatcactctttcatcttcattgctattattaataaatacctacagtactaacctgcctcctatacctagctggtctcctctctgttgctcaatgttaccacagcaggctttctagaagcactctgacagtgttactccctaatatccttcagtgacttcaggaactttcaggagaaagccaaactcctctgtttggtgtacaaggtcttctgatgtgtttcctccaccgaatgttctggtgaaacagacttacacttcttcagaagccacatttggccaggcctcccgccttggtaaatgctgtactctttgcatcaagtatgctagtcatccttccccacttggaaaattcctatgcatcttgcaggcctgacataagcatttcctctgtgaaacctcctttgctccactcaaggagagtcatctaacttccactttcgtgtcaccactgtaattacaacctacctctattgtatgtcacttaaatcgtactgtattgttttatttttcaaaagtctttactagaatgtgagctccttaagggcaggaaaaggaacctttttattttttgcatctccatagcatagtttttggcatatgaatgtttaataaatgtttgttgaataaattgattttaaagtg

SEQ ID NO: 24042 - protein, 79 aa, Homo sapiens [sequence omitted]

SEQ ID NO: 24043 - DNA, 5382 bp, Homo sapiens
accccgcaggaaaacacaggcccctccggctttcgctctcgctctgggaactggaaggacccccgactcccgcgcagggtctggggttgtgcgcgtcgggttgcgtctccaggccgggggcgtcagggagccgggggcggggacgggcgcgggcgcagcggaccgggcggggccgagccgggaagctggtcggtgcgtcagcctcacgcggcgggaaggaaccggtccgaggccccgggctgccggcgcgggcgccgcggcacgtccacaggctgggtcgcgaggtggcgatcgctgagaggcaggagggccgaggcgggcctgggaggcggcccggaggtggggcgccgctggggccggcccgcacgggcttcatctgagggcgcacggcccgcgaccgagcgtgcggactggcctcccaagcgtggggcgacaagctgccggagctgcaatgggccgcggctggggattcttgtttggcctcctgggcgccgtgtggctgctcagctcgggccacggagaggagcagcccccggagacagcggcacagaggtgcttctgccaggttagtggttacttggatgattgtacctgtgatgttgaaaccattgatagatttaataactacaggcttttcccaagactacaaaaacttcttgaaagtgactactttaggtattacaaggtaaacctgaagaggccgtgtcctttctggaatgacatcagccagtgtggaagaagggactgtgctgtcaaaccatgtcaatctgatgaagttcctgatggaattaaatctgcgagctacaagtattctgaagaagccaataatctcattgaagaatgtgaacaagctgaacgacttggagcagtggatgaatctctgagtgaggaaacacagaaggctgttcttcagtggaccaagcatgatgattcttcagataacttctgtgaagctgatgacattcagtcccctgaagctgaatatgtagatttgcttcttaatcctgagcgctacactggttacaagggaccagatgcttggaaaatatggaatgtcatctacgaagaaaactgttttaagccacagacaattaaaagacctttaaatcctttggcttctggtcaagggacaagtgaagagaacactttttacagttggctagaaggtctctgtgtagaaaaaagagcattctacagacttatatctggcctacatgcaagcattaatgtgcatttgagtgcaagatatcttttacaagagacctggttagaaaagaaatggggacacaacattacagaatttcaacagcgatttgatggaattttgactgaaggagaaggtccaagaaggcttaagaacttgtattttctctacttaatagaactaagggctttatccaaagtgttaccattcttcgagcgcccagattttcaactctttactggaaataaaattcaggatgaggaaaacaaaatgttacttctggaaatacttcatgaaatcaagtcatttcctttgcattttgatgagaattcattttttgctggggataaaaaagaagcacacaaactaaaggaggactttcgactgcattttagaaatatttcaagaattatggattgtgttggttgttttaaatgtcgtctgtggggaaagcttcagactcagggtttgggcactgctctgaagatcttattttctgagaaattgatagcaaatatgccagaaagtggacctagttatgaattccatctaaccagacaagaaatagtatcattattcaacgcatttggaagaatttctacaagtgtgaaagaattagaaaacttcaggaacttgttacagaatattcattaaagaaaacaagctgatatgtgcctgtttctggacaatggaggcgaaagagtggaatttcattcaaaggcataatagcaatgacagtcttaagccaaacattttatataaagttgcttttgtaaaggagaattatattgttttaagtaaacacatttttaaaaattgtgttaagtctatgtataatactactgtgagtaaaagtaatactttaataatgtggtacaaattttaaagtttaatattgaataaaaggaggattatcaaattcatatatgataaaagtgaatgttctaagtctctcaaactagcgttttatgtaataatatgtaatataaataaaactatggtaaatgtgacaagcatttaataggaaaatgctaaggaggcctcataaatgacccataattaccaacgtagaatttttcagtacatttagggttgctggatttagcaaataaaaataaagattgcccagttagatttgaatttcagataaacaattagttttttaatattttacatggaatatttggaaaatacttatactaaaaaattatttgtttgaaattcaaatttaactgggagtcttgtattttatctggcaatcctaaaatacattggtatgaaacaaatcacttttagaagtatattgctattttgattgggttgtttttgtgtgtagaaacgtacaataacaactcaaaggcacaggagatttctaaacattgtgaaaagttgaatagattatatatttattctcataatactttcactaatactaaataaaatttggggaacactttttatttttatataatttccaatttacagaaaagtttcaaaaatagtacaaagagctctcttacccagattcactaattgttcatacgtgctttatctttcatgctttctctgtacacacacacacacacacaaatttttcctcaatcatttgaaagtcagttataggcatcatgccccttaaaccctaaatacttcagtgtgtaatactgaataattactaaaaatgattttctcagaaaaaaaaactcccacaattctggaactataatactgtaagccttagaataaataatactttcaagttccaatctaaagttctttttgagttttgttgcccgttttatgcttgatgtgtatagtaatagggtaggctatttattttattaaaattttttttagagacaaggttttgctgtgttgcccaagctggaacttgaacgactgggctgaagtgatcttcccacctcagcctcccaagtagctgggaatacaggtgtctgccaccatacccagtttcatttttgttttttatacccgaagttcatttcctttgtctccctaaaactgaactgtaattttgggaggttttcattagtggaagctcttcatttataaagctatttgaaggggtttaggaatttatatcacatggtaattgtagagaaaaagaagctatatacctcaaaatcgtgccctctttacatatgtcttatcaggtataacatgttgaaatgtcacattagtagtaaagtggggtttatttatatagtggttaagaaatgtcagtttacactgctgtatacttcttcttctgtgtccctaaggcctggtacagtgccaagcacatacttggtatccaataaatatttgttggatgaatgtatgcatatgtattcagtatattttaaatgaataatcacagaagtaagtttaataatttgtcctatttttctctgtcacttcctttttctctaaggcaggaaaggaaagacattaaaccattaattaagtcaatcctcttggagactcaaaagactatgaagtgatcactctatataaaatataaatacagtgtgggttcaaatggccattttttgtgtgtccctctctctcatcttatgcttcccttcctttttttatttttattttttggagacggagtcttgctgtgtcgcccaggttggagtgcagtggcgtgatcttagctcactgcaagctctgccttccaggttcacgccattcttctgcctcagccccctgagtagctgggactacaggcgcccgccaccacgcccggctaatttttttttttttttttttgtatttttagtagaggcagtgtttcaccgtgttagccaggatggtcttgatctcctgacctcgtgatccacccacctcgacctcccaaagtgctgggattacaggcgtgagccaccacgcccggcctcttttttttttagctgccaatctttttgaaggaatattcttacctctactttgtcaccttctactggctccttaactaaaatctgccatttggctctctggttaacagtcccttcctgtaaagtctaaaatcttaattctaaatccacagtttaattcacaagctagtacttgactttttttctgtatttgacatttttgacaacccctactttaaagatttattcccttgacttcttacattttgctcactcctgaaccaccccccaccttttggcctcttcatttattccttaaatgttattcctcagacctccattttttttttctctcttaatcacaacaccacttctcacgcttgggtaattttaattcagcagttcctaaatccttatctttagccagactcctcaatccatctgcctgttgcacttttcttggttgtcccagagacacctgtgtgtgtcttaaaacattcattctctgcaaaacctactctaatgcctgtgtcccttactttggttaattttagaaccattatattctaagttttctaggctcattcctctcctccaccttcccctatcatttagtgtctaagttttactgattttatctccacctctctgatacatcactctttcatcttcattgctattattaataaatacctacagtactaacctgcctcctatacctagctggtctcctctctgttgctcaatgttaccacagcaggctttctagaagcactctgacagtgttactccctaatatccttcagtgacttcaggaactttcaggagaaagccaaactcctctgtttggtgtacaaggtcttctgatgtgtttcctccaccgaatgttctggtgaaacagacttacacttcttcagaagccacatttggccaggcctcccgccttggtaaatgctgtactctttgcatcaagtatgctagtcatccttccccacttggaaaattcctatgcatcttgcaggcctgacataagcatttcctctgtgaaacctcctttgctccactcaaggagagtcatctaacttccactttcgtgtcaccactgtaattacaacctacctctattgtatgtcacttaaatcgtactgtattgttttatttttcaaaagtctttactagaatgtgagctccttaagggcaggaaaaggaacctttttattttttgcatctccatagcatagtttttggcatatgaatgtttaataaatgtttgttgaataaattgattttaaagtg

SEQ ID NO: 24044 - protein, 468 aa, Homo sapiens; identical to SEQ ID NO: 3171

SEQ ID NO: 24045 - DNA, 2004 bp, Homo sapiens
ggttgttttaaatgtcgtctgtggggaaagcttcaggtaagcaaatttagtcattcctatttctcatttaccctttgcatgaataattttctaatttttcttttttccttatttctattacagactcagggtttgggcactgctctgaagatcttattttctgagaaattgatagcaaatatgccagaaagtggacctagttatgaattccatctaaccagacaagaaatagtatcattattcaacgcatttggaagaatttctacaagtgtgaaagaattagaaaacttcaggaacttgttacagaatattcattaaagaaaacaagctgatatgtgcctgtttctggacaatggaggcgaaagagtggaatttcattcaaaggcataatagcaatgacagtcttaagccaaacattttatataaagttgcttttgtaaaggagaattatattgttttaagtaaacacatttttaaaaattgtgttaagtctatgtataatactactgtgagtaaaagtaatactttaataatgtggtacaaattttaaagtttaatattgaataaaaggaggattatcaaattcatatatgataaaagtgaatgttctaagtctctcaaactagcgttttatgtaataatatgtaatataaataaaactatggtaaatgtgacaagcatttaataggaaaatgctaaggaggcctcataaatgacccataattaccaacgtagaatttttcagtacatttagggttgctggatttagcaaataaaaataaagattgcccagttagatttgaatttcagataaacaattagttttttaatattttacatggaatatttggaaaatacttatactaaaaaattatttgtttgaaattcaaatttaactgggagtcttgtattttatctggcaatcctaaaatacattggtatgaaacaaatcacttttagaagtatattgctattttgattgggttgtttttgtgtgtagaaacgtacaataacaactcaaaggcacaggagatttctaaacattgtgaaaagttgaatagattatatatttattctcataatactttcactaatactaaataaaatttggggaacactttttatttttatataatttccaatttacagaaaagtttcaaaaatagtacaaagagctctcttacccagattcactaattgttcatacgtgctttatctttcatgctttctctgtacacacacacacacacacaaatttttcctcaatcatttgaaagtcagttataggcatcatgccccttaaaccctaaatacttcagtgtgtaatactgaataattactaaaaatgattttctcagaaaaaaaaactcccacaattctggaactataatactgtaagccttagaataaataatactttcaagttccaatctaaagttctttttgagttttgttgcccgttttatgcttgatgtgtatagtaatagggtaggctatttattttattaaaattttttttagagacaaggttttgctgtgttgcccaagctggaacttgaacgactgggctgaagtgatcttcccacctcagcctcccaagtagctgggaatacaggtgtctgccaccatacccagtttcatttttgttttttatacccgaagttcatttcctttgtctccctaaaactgaactgtaattttgggaggttttcattagtggaagctcttcatttataaagctatttgaaggggtttaggaatttatatcacatggtaattgtagagaaaaagaagctatatacctcaaaatcgtgccctctttacatatgtcttatcaggtataacatgttgaaatgtcacattagtagtaaagtggggtttatttatatagtggttaagaaatgtcagtttacactgctgtatacttcttcttctgtgtccctaaggcctggtacagtgccaagcacatacttggtatccaataaatatttgttggatgaatgt

SEQ ID NO: 24046 - protein, 79 aa, Homo sapiens [sequence omitted]

SEQ ID NO: 24047 - DNA, 3544 bp, Homo sapiens
accccgcaggaaaacacaggcccctccggctttcgctctcgctctgggaactggaaggacccccgactcccgcgcagggtctggggttgtgcgcgtcgggttgcgtctccaggccgggggcgtcagggagccgggggcggggacgggcgcgggcgcagcggaccgggcggggccgagccgggaagctggtcggtgcgtcagcctcacgcggcgggaaggaaccggtccgaggccccgggctgccggcgcgggcgccgcggcacgtccacaggctgggtcgcgaggtggcgatcgctgagaggcaggagggccgaggcgggcctgggaggcggcccggaggtggggcgccgctggggccggcccgcacgggcttcatctgagggcgcacggcccgcgaccgagcgtgcggactggcctcccaagcgtggggcgacaagctgccggagctgcaatgggccgcggctggggattcttgtttggcctcctgggcgccgtgtggctgctcagctcgggccacggagaggagcagcccccggagacagcggcacagaggtgcttctgccaggttagtggttacttggatgattgtacctgtgatgttgaaaccattgatagatttaataactacaggcttttcccaagactacaaaaacttcttgaaagtgactactttaggtattacaaggtaaacctgaagaggccgtgtcctttctggaatgacatcagccagtgtggaagaagggactgtgctgtcaaaccatgtcaatctgatgaagttcctgatggaattaaatctgcgagctacaagtattctgaagaagccaataatctcattgaagaatgtgaacaagctgaacgacttggagcagtggatgaatctctgagtgaggaaacacagaaggctgttcttcagtggaccaagcatgatgattcttcagataacttctgtgaagctgatgacattcagtcccctgaagctgaatatgtagatttgcttcttaatcctgagcgctacactggttacaagggaccagatgcttggaaaatatggaatgtcatctacgaagaaaactgttttaagccacagacaattaaaagacctttaaatcctttggcttctggtcaagggacaagtgaagagaacactttttacagttggctagaaggtctctgtgtagaaaaaagagcattctacagacttatatctggcctacatgcaagcattaatgtgcatttgagtgcaagatatcttttacaagagacctggttagaaaagaaatggggacacaacattacagaatttcaacagcgatttgatggaattttgactgaaggagaaggtccaagaaggcttaagaacttgtattttctctacttaatagaactaagggctttatccaaagtgttaccattcttcgagcgcccagattttcaactctttactggaaataaaattcaggatgaggaaaacaaaatgttacttctggaaatacttcatgaaatcaagtcatttcctttgcattttgatgagaattcattttttgctggggataaaaaagaagcacacaaactaaaggaggactttcgactgcattttagaaatatttcaagaattatggattgtgttggttgttttaaatgtcgtctgtggggaaagcttcagactcagggtttgggcactgctctgaagatcttattttctgagaaattgatagcaaatatgccagaaagtggacctagttatgaattccatctaaccagacaagaaatagtatcattattcaacgcatttggaagaatttctacaagtgtgaaagaattagaaaacttcaggaacttgttacagaatattcattaaagaaaacaagctgatatgtgcctgtttctggacaatggaggcgaaagagtggaatttcattcaaaggcataatagcaatgacagtcttaagccaaacattttatataaagttgcttttgtaaaggagaattatattgttttaagtaaacacatttttaaaaattgtgttaagtctatgtataatactactgtgagtaaaagtaatactttaataatgtggtacaaattttaaagtttaatattgaataaaaggaggattatcaaattcatatatgataaaagtgaatgttctaagtctctcaaactagcgttttatgtaataatatgtaatataaataaaactatggtaaatgtgacaagcatttaataggaaaatgctaaggaggcctcataaatgacccataattaccaacgtagaatttttcagtacatttagggttgctggatttagcaaataaaaataaagattgcccagttagatttgaatttcagataaacaattagttttttaatattttacatggaatatttggaaaatacttatactaaaaaattatttgtttgaaattcaaatttaactgggagtcttgtattttatctggcaatcctaaaatacattggtatgaaacaaatcacttttagaagtatattgctattttgattgggttgtttttgtgtgtagaaacgtacaataacaactcaaaggcacaggagatttctaaacattgtgaaaagttgaatagattatatatttattctcataatactttcactaatactaaataaaatttggggaacactttttatttttatataatttccaatttacagaaaagtttcaaaaatagtacaaagagctctcttacccagattcactaattgttcatacgtgctttatctttcatgctttctctgtacacacacacacacacacaaatttttcctcaatcatttgaaagtcagttataggcatcatgccccttaaaccctaaatacttcagtgtgtaatactgaataattactaaaaatgattttctcagaaaaaaaaactcccacaattctggaactataatactgtaagccttagaataaataatactttcaagttccaatctaaagttctttttgagttttgttgcccgttttatgcttgatgtgtatagtaatagggtaggctatttattttattaaaattttttttagagacaaggttttgctgtgttgcccaagctggaacttgaacgactgggctgaagtgatcttcccacctcagcctcccaagtagctgggaatacaggtgtctgccaccatacccagtttcatttttgttttttatacccgaagttcatttcctttgtctccctaaaactgaactgtaattttgggaggttttcattagtggaagctcttcatttataaagctatttgaaggggtttaggaatttatatcacatggtaattgtagagaaaaagaagctatatacctcaaaatcgtgccctctttacatatgtcttatcaggtataacatgttgaaatgtcacattagtagtaaagtggggtttatttatatagtggttaagaaatgtcagtttacactgctgtatacttcttcttctgtgtccctaaggcctggtacagtgccaagcacatacttggtatccaataaatatttgttggatgaatgt

SEQ ID NO: 24048 - protein, 468 aa, Homo sapiens; identical to SEQ ID NO: 3171

SEQ ID NO: 24049 - DNA, 2142 bp, Homo sapiens
accccgcaggaaaacacaggcccctccggctttcgctctcgctctgggaactggaaggacccccgactcccgcgcagggtctggggttgtgcgcgtcgggttgcgtctccaggccgggggcgtcagggagccgggggcggggacgggcgcgggcgcagcggaccgggcggggccgagccgggaagctggtcggtgcgtcagcctcacgcggcgggaaggaaccggtccgaggccccgggctgccggcgcgggcgccgcggcacgtccacaggctgggtcgcgaggtggcgatcgctgagaggcaggagggccgaggcgggcctgggaggcggcccggaggtggggcgccgctggggccggcccgcacgggcttcatctgagggcgcacggcccgcgaccgagcgtgcggactggcctcccaagcgtggggcgacaagctgccggagctgcaatgggccgcggctggggattcttgtttggcctcctgggcgccgtgtggctgctcagctcgggccacggagaggagcagcccccggagacagcggcacagaggtgcttctgccaggttagtggttacttggatgattgtacctgtgatgttgaaaccattgatagatttaataactacaggcttttcccaagactacaaaaacttcttgaaagtgactactttaggtattacaaggtaaacctgaagaggccgtgtcctttctggaatgacatcagccagtgtggaagaagggactgtgctgtcaaaccatgtcaatctgatgaagttcctgatggaattaaatctgcgagctacaagtattctgaagaagccaataatctcattgaagaatgtgaacaagctgaacgacttggagcagtggatgaatctctgagtgaggaaacacagaaggctgttcttcagtggaccaagcatgatgattcttcagataacttctgtgaagctgatgacattcagtcccctgaagctgaatatgtagatttgcttcttaatcctgagcgctacactggttacaagggaccagatgcttggaaaatatggaatgtcatctacgaagaaaactgttttaagccacagacaattaaaagacctttaaatcctttggcttctggtcaagggacaagtgaagagaacactttttacagttggctagaaggtctctgtgtagaaaaaagagcattctacagacttatatctggcctacatgcaagcattaatgtgcatttgagtgcaagatatcttttacaagagacctggttagaaaagaaatggggacacaacattacagaatttcaacagcgatttgatggaattttgactgaaggagaaggtccaagaaggcttaagaacttgtattttctctacttaatagaactaagggctttatccaaagtgttaccattcttcgagcgcccagattttcaactctttactggaaataaaattcaggatgaggaaaacaaaatgttacttctggaaatacttcatgaaatcaagtcatttcctttgcattttgatgagaattcattttttgctggggataaaaaagaagcacacaaactaaaggaggactttcgactgcattttagaaatatttcaagaattatggattgtgttggttgttttaaatgtcgtctgtggggaaagcttcagactcagggtttgggcactgctctgaagatcttattttctgagaaattgatagcaaatatgccagaaagtggacctagttatgaattccatctaaccagacaagaaatagtatcattattcaacgcatttggaagaatttctacaagtgtgaaagaattagaaaacttcaggaacttgttacagaatattcattaaagaaaacaagctgatatgtgcctgtttctggacaatggaggcgaaagagtggaatttcattcaaaggcataatagcaatgacagtcttaagccaaacattttatataaagttgcttttgtaaaggagaattatattgttttaagtaaacacatttttaaaaattgtgttaagtctatgtataatactactgtgagtaaaagtaatactttaataatgtggtacaaattttaaagtttaatattgaataaaaggaggattatcaaattcatatatgataaaagtg

SEQ ID NO: 24050 - protein, 468 aa, Homo sapiens; identical to SEQ ID NO: 3171

SEQ ID NO: 24051 - DNA, 491 bp, Homo sapiens
cctgctaattttttgtatttttagtagagacagggtttcaccatgttggccagcctggtctcaaactcctgacttcaggtgatccacctgcctcgggctcccacagtgccgggattataggcgtgagccaccgtacctggcctgattatgggcaattttatgaaaaattaaaagcaataagaacatattggaaaaataaaaaaaataaaaagagcttcagataacttctaaattttaaacaagttttaaaaatgcaataagttattatctatttattccctttttcattttagtattctgaagaagccaataatctcattgaagaatgtgaacaagctgaacgacttggagcagtggatgaatctctgagtgaggaaacacagaaggctgttcttcagtggaccaagcatgatgattcttcagataacttctgtgaagctgatggtataatatttttgatagtatgcattgtgtttaaaattatacctaag

SEQ ID NO: 24052 - protein, 65 aa, Homo sapiens
YSEEANNLIEECEQAERLGAVDESLSEETQKAVLQWTKHDDSSDNFCEADGIIFLIVCIVFKIIP

SEQ ID NO: 24053 - DNA, 831 bp, Homo sapiens
caggatgtctgccagctcctctccagccacccattctcatagcgggtgagccagaccacatctgctaatccaggagcacagctcaggactagtctatgcggatggaatctctctccagccttttctctatgtcagttttatctacctggcaagaaaaaacaaaaacaaccccaaaacaacccctccccacaaacacaacacaaaacaagggactcgaaaagttggagaaaaccttttaatgtgtttctgtaaaatcctttcttaggaggtttagtacaggtactacccatcagcaacttagccggccaggtgagttggtgcagaagggcttcggctgaatttataccagagccatcgggagtgacttggccacctctcccaattaccacaaggaagtcttaaaattgaatttcagtttcagcagatacttcagatttacctgagcaatatcatagacaatgtactcattatatagtagacaagtgtcattcacaccagatgaaatcccagtcccaagaggaacctctgcaccatccagagtaatactagctgaagggtcaggggtagttttgcccaaacctttgacactgtgcttgcccttgggtaacttgctgatatgtgaagcgtgcttcagttcatacattttccaagggcaacttctcccaacaggattaagcctgttgggcctccctgagatgtatggcagtagttggcactcttggaggccatgtcagcgaaatagatccctttaccaaacatgtagcccgtcatgggcacttcaggcggggctatccaaagaccctgggacaggatcccagcaaagctggtggt

SEQ ID NO: 24054 - protein, 123 aa, Homo sapiens
MYSLYSRQVSFTPDEIPVPRGTSAPSRVILAEGSGVVLPKPLTLCLPLGNLLICEACFSSYIFQGQLLPTGLSLLGLPEMYGSSWHSWRPCQRNRSLYQTCSPSWALQAGLSKDPGTGSQQSW

SEQ ID NO: 24055 - DNA, 1023 bp, Homo sapiens
ggaaacccatgatttcctgacactcggcaagctggaggaagcaaagggaaaaaaactccattaaaaagcccagctttcctccatgttagatgtgacttggaaaatgagaaagatttagcaaaattccaccgtatcttttgccaggctagagacagggagagcagagtaaaaccctcaggctgctgaaatttctaggctgttaggaagcccctcgaattctgtgaaaatgagggtttcttaactcacactgagagcggaaaggggcagacccttttcataactccctcaagtgtgtgttacctttctttaccagcatggtaagcaacaggacatatcccagcctcggacatgtctgtatgatccaaggtacccaaagtcagacagagtaaactcaagcctggcactggctttctgccgcttcatgtgctttggaaaaagcaggagaagcaatagcagcaggagtccccagcagctggagccgcaagaatgaactgcaaagagggaactgacagcagctgcggctgcaggggcaacgacgagaagaagatgttgaagtgtgtggtggtgggggacggtgccgtggggaaaacctgcctgctgatgagctacgccaacgacgccttcccagaggaatacgtgcccactgtgtttgaccactatgcagttactgtgactgtgggaggcaagcaacacttgctcggactgtatgacaccgcgggacaggaggactacaaccagctgaggccactctcctaccccaacacggatgtgtttttgatctgcttctctgtcgtaaaccctgcctcttaccacaatgtccaggaggaatgggtccccgagctcaaggactgcatgcctcacgtgccttatgtcctcatagggacccagattgatctccgtgatgacccaaaaaccttggcccgtttgctgtatatgaaagagaaacctctcacttacgagcatggtgtgaagctcgcaaaagcggtacagtcagatttgaatttcattttaaatgtatgctga

SEQ ID NO: 24056 - protein, 178 aa, Homo sapiens
MNCKEGTDSSCGCRGNDEKKMLKCVVVGDGAVGKTCLLMSYANDAFPEEYVPTVFDHYAVTVTVGGKQHLLGLYDTAGQEDYNQLRPLSYPNTDVFLICFSVVNPASYHNVQEEWVPELKDCMPHVPYVLIGTQIDLRDDPKTLARLLYMKEKPLTYEHGVKLAKAVQSDLNFILNVC

SEQ ID NO: 24057 - DNA, 1948 bp, Homo sapiens
ggaaacccatgatttcctgacactcggcaagctggaggaagcaaagggaaaaaaactccattaaaaagcccagctttcctccatgttagatgtgacttggaaaatgagaaagatttagcaaaattccaccgtatcttttgccaggctagagacagggagagcagagtaaaaccctcaggctgctgaaatttctaggctgttaggaagcccctcgaattctgtgaaaatgagggtttcttaactcacactgagagcggaaaggggcagacccttttcataactccctcaagtgtgtgttacctttctttaccagcatggtaagcaacaggacatatcccagcctcggacatgtctgtatgatccaaggtacccaaagtcagacagagtaaactcaagcctggcactggctttctgccgcttcatgtgctttggaaaaagcaggagaagcaatagcagcaggagtccccagcagctggagccgcaagaatgaactgcaaagagggaactgacagcagctgcggctgcaggggcaacgacgagaagaagatgttgaagtgtgtggtggtgggggacggtgccgtggggaaaacctgcctgctgatgagctacgccaacgacgccttcccagaggaatacgtgcccactgtgtttgaccactatgcagttactgtgactgtgggaggcaagcaacacttgctcggactgtatgacaccgcgggacaggaggactacaaccagctgaggccactctcctaccccaacacggatgtgtttttgatctgcttctctgtcgtaaaccctgcctcttaccacaatgtccaggaggaatgggtccccgagctcaaggactgcatgcctcacgtgccttatgtcctcatagggacccagattgatctccgtgatgacccaaaaaccttggcccgtttgctgtatatgaaagagaaacctctcacttacgagcatggtgtgaagctcgcaaaagcgatcggagcacagtgctacttggaatgttcagctctgactcagaaaggtctcaaagcggtttttgatgaagcaatcctcaccattttccaccccaagaaaaagaagaaacgctgttctgagggtcacagctgctgttcaattatctgaggttgtctgggacctgcctccaccccatccagggatgagaatggcagccaatctctgtggccaagctccagccaaaaaggagggcacgaccagaaaggaactccctttgcacggaggcttgccccatcaccctctgagccctcccaacacagcacactagtcagcccactgccacgacctccctgccagccagaagcatccgtactgcacgctgtctgagaatgctgggcctggattgcagacagtgccgctgctgatcgcatcaaaaacaaagtcaaaggccatctcacattttacaaatccccagctcatgaacgtgaagctgataggaaatcaccccagggaacccgaaaaagaaacttgattcctctattgctggccttacttgatgtcttttataaaacttgggactacaatactaacctttttttctgaatctgctgttctacccatgtgtctcacattcatttgtattatttcaagaaatgtactaatttccagttcactcaggccttactaatccataccaaattagcctaaagacaaggcattttatattcatttctattttcagcatgtttctaccaaagctattagaaccaacacgtacctctgaatgcccgattataagaagacatgagaagactttaaaagttttggaaatttacagagccatgatttttgaacctaattgaaagaaaaccatctgaattgttgcaggtccacatttttgccaaagatacactctatagatgcttagtagtggcctgatttttttccatgtattgccacgacaaactaaaaatgaactgtgttt

SEQ ID NO: 24058 - protein, 214 aa, Homo sapiens; identical to SEQ ID NO: 3173

SEQ ID NO: 24059 - DNA, 3325 bp, Homo sapiens
ggaaacccatgatttcctgacactcggcaagctggaggaagcaaagggaaaaaaactccattaaaaagcccagctttcctccatgttagatgtgacttggaaaatgagaaagatttagcaaaattccaccgtatcttttgccaggctagagacagggagagcagagtaaaaccctcaggctgctgaaatttctaggctgttaggaagcccctcgaattctgtgaaaatgagggtttcttaactcacactgagagcggaaaggggcagacccttttcataactccctcaagtgtgtgttacctttctttaccagcatggtaagcaacaggacatatcccagcctcggacatgtctgtatgatccaaggtacccaaagtcagacagagtaaactcaagcctggcactggctttctgccgcttcatgtgctttggaaaaagcaggagaagcaatagcagcaggagtccccagcagctggagccgcaagaatgaactgcaaagagggaactgacagcagctgcggctgcaggggcaacgacgagaagaagatgttgaagtgtgtggtggtgggggacggtgccgtggggaaaacctgcctgctgatgagctacgccaacgacgccttcccagaggaatacgtgcccactgtgtttgaccactatgcagttactgtgactgtgggaggcaagcaacacttgctcggactgtatgacaccgcgggacaggaggactacaaccagctgaggccactctcctaccccaacacggatgtgtttttgatctgcttctctgtcgtaaaccctgcctcttaccacaatgtccaggaggaatgggtccccgagctcaaggactgcatgcctcacgtgccttatgtcctcatagggacccagattgatctccgtgatgacccaaaaaccttggcccgtttgctgtatatgaaagagaaacctctcacttacgagcatggtgtgaagctcgcaaaagcgatcggagcacagtgctacttggaatgttcagctctgactcagaaaggtctcaaagcggtttttgatgaagcaatcctcaccattttccaccccaagaaaaagaagaaacgctgttctgagggtcacagctgctgttcaattatctgaggttgtctgggacctgcctccaccccatccagggatgagaatggcagccaatctctgtggccaagctccagccaaaaaggagggcacgaccagaaaggaactccctttgcacggaggcttgccccatcaccctctgagccctcccaacacagcacactagtcagcccactgccacgacctccctgccagccagaagcatccgtactgcacgctgtctgagaatgctgggcctggattgcagacagtgccgctgctgatcgcatcaaaaacaaagtcaaaggccatctcacattttacaaatccccagctcatgaacgtgaagctgataggaaatcaccccagggaacccgaaaaagaaacttgattcctctattgctggccttacttgatgtcttttataaaacttgggactacaatactaacctttttttctgaatctgctgttctacccatgtgtctcacattcatttgtattatttcaagaaatgtactaatttccagttcactcaggccttactaatccataccaaattagcctaaagacaaggcattttatattcatttctattttcagcatgtttctaccaaagctattagaaccaacacgtacctctgaatgcccgattataagaagacatgagaagactttaaaagttttggaaatttacagagccatgatttttgaacctaattgaaagaaaaccatctgaattgttgcaggtccacatttttgccaaagatacactctatagatgcttagtagtggcctgatttttttccatgtattgccacgacaaactaaaaatgaactgtgtttaagaatgtagtatttctgtttttcatccaagttgattgggggaagaatatggcaggatccatcttttacagtattttgtattcagtaaagtggacattcctgctcctcccttcccccattgcatgccctcttcctcccttgatttcactttctctcatgcccggatccttttattctccccagttataacccagttataaaagaaagatctgagcataaagatacgtgtttaaaaataactaaaagtaaaggaaagtgccttaatttttctatttgcttcaactgaaagtgcttctcagctcgccccatgtaagttctcattccatgtaaatgacattttccagttacaactggtactgagattttgcctctctctttccttactcatcctcccaaatgtctttgtgggagccatatcagtggataccaagctctgtatccatttgtcccctgccctccacaatgtgtgacatagaacagggactttggccctgggaaagcaaaagctcccagtaaggaatcctgtgcccaatgatgtaaaacaattccaaacatccaggaatttttgtatcatagagcgaattacttcctatcttttcattagaggctatgaggacttctaattagtcttagttgcttataagtgccctggaatcacccaggtaggcacttaatttttttttcagttgcatgagcaaagtgcttcttagtagtgtgaaattacaacaactttaagactttccagattcaagctcccactgttggaaaaagccagcctttctaatctcttctgctactggaataagcacttaagaattgcgtgatagccaggcaccgtggctcatgcctgtaatcccaacacttagggaggctgaggtgggtgggccgcttgagctcaggagttcaagaccagcctgggtaatatagtgagatcctgtgtctctataaaaaaattaaaaattagtcagttgtagtgacacatacctgtagtcccagctactcaggaggctgaggtggaaggatcacttgagcccagaaggtaaggctgcagtgagctgtgactgtgccactacactccagcctgagtgacagagaaagaacctgtcaaaaaaaaaaaaaaaacaacctacatttcaagtactatttcccttctctcccatctaattgctaaagattttctttcatacgcacacactccagtgactggaaaaacgggagttttcagtcaaagcttgacatttagagaaaacaaggactttctgcctttataaatggaaatcaactgtgtatgaactataactctgcagaggttatgaattcatcctttacaaacaataatgaacttttagtcctgtaataaatgaaatgttattaggc

SEQ ID NO: 24060 - protein, 214 aa, Homo sapiens; identical to SEQ ID NO: 3173

SEQ ID NO: 24061 - DNA, 3617 bp, Homo sapiens
ggaaacccatgatttcctgacactcggcaagctggaggaagcaaagggaaaaaaactccattaaaaagcccagctttcctccatgttagatgtgacttggaaaatgagaaagatttagcaaaattccaccgtatcttttgccaggctagagacagggagagcagagtaaaaccctcaggctgctgaaatttctaggctgttaggaagcccctcgaattctgtgaaaatgagggtttcttaactcacactgagagcggaaaggggcagacccttttcataactccctcaagtgtgtgttacctttctttaccagcatggtaagcaacaggacatatcccagcctcggacatgtctgtatgatccaaggtacccaaagtcagacagagtaaactcaagcctggcactggctttctgccgcttcatgtgctttggaaaaagcaggagaagcaatagcagcaggagtccccagcagctggagccgcaagaatgaactgcaaagagggaactgacagcagctgcggctgcaggggcaacgacgagaagaagatgttgaagtgtgtggtggtgggggacggtgccgtggggaaaacctgcctgctgatgagctacgccaacgacgccttcccagaggaatacgtgcccactgtgtttgaccactatgcagttactgtgactgtgggaggcaagcaacacttgctcggactgtatgacaccgcgggacaggaggactacaaccagctgaggccactctcctaccccaacacggatgtgtttttgatctgcttctctgtcgtaaaccctgcctcttaccacaatgtccaggaggaatgggtccccgagctcaaggactgcatgcctcacgtgccttatgtcctcatagggacccagattgatctccgtgatgacccaaaaaccttggcccgtttgctgtatatgaaagagaaacctctcacttacgagcatggtgtgaagctcgcaaaagcgatcggagcacagtgctacttggaatgttcagctctgactcagaaaggtctcaaagcggtttttgatgaagcaatcctcaccattttccaccccaagaaaaagaagaaacgctgttctgagggtcacagctgctgttcaattatctgaggttgtctgggacctgcctccaccccatccagggatgagaatggcagccaatctctgtggccaagctccagccaaaaaggagggcacgaccagaaaggaactccctttgcacggaggcttgccccatcaccctctgagccctcccaacacagcacactagtcagcccactgccacgacctccctgccagccagaagcatccgtactgcacgctgtctgagaatgctgggcctggattgcagacagtgccgctgctgatcgcatcaaaaacaaagtcaaaggccatctcacattttacaaatccccagctcatgaacgtgaagctgataggaaatcaccccagggaacccgaaaaagaaacttgattcctctattgctggccttacttgatgtcttttataaaacttgggactacaatactaacctttttttctgaatctgctgttctacccatgtgtctcacattcatttgtattatttcaagaaatgtactaatttccagttcactcaggccttactaatccataccaaattagcctaaagacaaggcattttatattcatttctattttcagcatgtttctaccaaagctattagaaccaacacgtacctctgaatgcccgattataagaagacatgagaagactttaaaagttttggaaatttacagagccatgatttttgaacctaattgaaagaaaaccatctgaattgttgcaggtccacatttttgccaaagatacactctatagatgcttagtagtggcctgatttttttccatgtattgccacgacaaactaaaaatgaactgtgtttaagaatgtagtatttctgtttttcatccaagttgattgggggaagaatatggcaggatccatcttttacagtattttgtattcagtaaagtggacattcctgctcctcccttcccccattgcatgccctcttcctcccttgatttcactttctctcatgcccggatccttttattctccccagttataacccagttataaaagaaagatctgagcataaagatacgtgtttaaaaataactaaaagtaaaggaaagtgccttaatttttctatttgcttcaactgaaagtgcttctcagctcgccccatgtaagttctcattccatgtaaatgacattttccagttacaactggtactgagattttgcctctctctttccttactcatcctcccaaatgtctttgtgggagccatatcagtggataccaagctctgtatccatttgtcccctgccctccacaatgtgtgacatagaacagggactttggccctgggaaagcaaaagctcccagtaaggaatcctgtgcccaatgatgtaaaacaattccaaacatccaggaatttttgtatcatagagcgaattacttcctatcttttcattagaggctatgaggacttctaattagtcttagttgcttataagtgccctggaatcacccaggtaggcacttaatttttttttcagttgcatgagcaaagtgcttcttagtagtgtgaaattacaacaactttaagactttccagattcaagctcccactgttggaaaaagccagcctttctaatctcttctgctactggaataagcacttaagaattgcgtgatagccaggcaccgtggctcatgcctgtaatcccaacacttagggaggctgaggtgggtgggccgcttgagctcaggagttcaagaccagcctgggtaatatagtgagatcctgtgtctctataaaaaaattaaaaattagtcagttgtagtgacacatacctgtagtcccagctactcaggaggctgaggtggaaggatcacttgagcccagaaggtaaggctgcagtgagctgtgactgtgccactacactccagcctgagtgacagagaaagaacctgtcaaaaaaaaaaaaaaaacaacctacatttcaagtactatttcccttctctcccatctaattgctaaagattttctttcatacgcacacactccagtgactggaaaaacgggagttttcagtcaaagcttgacatttagagaaaacaaggactttctgcctttataaatggaaatcaactgtgtatgaactataactctgcagaggttatgaattcatcctttacaaacaataatgaacttttagtcctgtaataaatgaaatgttattaggcagctttgttgcatgattgcatagttatatcttgctaacgggccactcatttctcactgatgtggatgaaaaaatgagagcagtatgtttccaggtgtgtgcactcaacaggcaaatagctcccgaggtcaccacttccctaatgggccacaggaagtaagttgatcttgatggggagatcacgtcacccagaaccagcaactggatagagactgttgttagtgtctgggtagagcacaggctcccaggggtcttaagagctaattactgaataaaacaatctagaacaaagc

SEQ ID NO: 24062 - protein, 214 aa, Homo sapiens; identical to SEQ ID NO: 3173

SEQ ID NO: 24063 - DNA, 1700 bp, Homo sapiens
gaggaagcaaagggaaaaaaactccattaaaaagcccagctttcctccatgttagatgtgacttggaaaatgagaaagatttagcaaaattccaccgtatcttttgccaggctagagacagggagagcagagtaaaaccctcaggctgctgaaatttctaggctgttaggaagcccctcgaattctgtgaaaatgagggtttcttaactcacactgagagcggaaaggggcagacccttttcataactccctcaagtgtgtgttacctttctttaccagcatggtaagcaacaggacatatcccagcctcggacatgtctgtatgatccaaggtacccaaagtcagacagagtaaactcaagcctggcactggctttctgccgcttcatgtgctttggaaaaagcaggagaagcaatagcagcaggagtccccagcagctggagccgcaagaatgaactgcaaagagggaactgacagcagctgcggctgcaggggcaacgacgagaagaagatgttgaagtgtgtggtggtgggggacggtgccgtggggaaaacctgcctgctgatgagctacgccaacgacgccttcccagaggaatacgtgcccactgtgtttgaccactatgcagttactgtgactgtgggaggcaagcaacacttgctcggactgtatgacaccgcgggacaggaggactacaaccagctgaggccactctcctaccccaacacggatgtgtttttgatctgcttctctgtcgtaaaccctgcctcttaccacaatgtccagattgatctccgtgatgacccaaaaaccttggcccgtttgctgtatatgaaagagaaacctctcacttacgagcatggtgtgaagctcgcaaaagcgatcggagcacagtgctacttggaatgttcagctctgactcagaaaggtctcaaagcggtttttgatgaagcaatcctcaccattttccaccccaagaaaaagaagaaacgctgttctgagggtcacagctgctgttcaattatctgaggttgtctgggacctgcctccaccccatccagggatgagaatggcagccaatctctgtggccaagctccagccaaaaaggagggcacgaccaagaaagaacctgtcaaaaaaaaaaaaaaaacaacctacatttcaagtactatttcccttctctcccatctaattgctaaagattttctttcatacgcacacactccagtgactggaaaaacgggagttttcagtcaaagcttgacatttagagaaaacaaggactttctgcctttataaatggaaatcaactgtgtatgaactataactctgcagaggttatgaattcatcctttacaaacaataatgaacttttagtcctgtaataaatgaaatgttattaggcagctttgttgcatgattgcatagttatatcttgctaacgggccactcatttctcactgatgtggatgaaaaaatgagagcagtatgtttccaggtgtgtgcactcaacaggcaaatagctcccgaggtcaccacttccctaatgggccacaggaagtaagttgatcttgatggggagatcacgtcacccagaaccagcaactggatagagactgttgttagtgtctgggtagagcacaggctcccaggggtcttaagagctaattactgaataaaacaatctagaacaaagc

SEQ ID NO: 24064 - protein, 192 aa, Homo sapiens
MNCKEGTDSSCGCRGNDEKKMLKCVVVGDGAVGKTCLLMSYANDAFPEEYVPTVFDHYAVTVTVGGKQHLLGLYDTAGQEDYNQLRPLSYPNTDVFLICFSVVNPASYHNVQIDLRDDPKTLARLLYMKEKPLTYEHGVKLAKAIGAQCYLECSALTQKGLKAVFDEAILTIFHPKKKKKRCSEGHSCCSII

SEQ ID NO: 24065 - DNA, 1252 bp, Homo sapiens
gaggaagcaaagggaaaaaaactccattaaaaagcccagctttcctccatgttagatgtgacttggaaaatgagaaagatttagcaaaattccaccgtatcttttgccaggctagagacagggagagcagagtaaaaccctcaggctgctgaaatttctaggctgttaggaagcccctcgaattctgtgaaaatgagggtttcttaactcacactgagagcggaaaggggcagacccttttcataactccctcaagtgtgtgttacctttctttaccagcatggtaagcaacaggacatatcccagcctcggacatgtctgtatgatccaaggtacccaaagtcagacagagtaaactcaagcctggcactggctttctgccgcttcatgtgctttggaaaaagcaggagaagcaatagcagcaggagtccccagcagctggagccgcaagaatgaactgcaaagagggaactgacagcagctgcggctgcaggggcaacgacgagaagaagatgttgaagtgtgtggtggtgggggacggtgccgtggggaaaacctgcctgctgatgagctacgccaacgacgccttcccagaggaatacgtgcccactgtgtttgaccactatgcaggcagtgagctgtgactgtgccactacactccagcctgagtgacagagaaagaacctgtcaaaaaaaaaaaaaaaacaacctacatttcaagtactatttcccttctctcccatctaattgctaaagattttctttcatacgcacacactccagtgactggaaaaacgggagttttcagtcaaagcttgacatttagagaaaacaaggactttctgcctttataaatggaaatcaactgtgtatgaactataactctgcagaggttatgaattcatcctttacaaacaataatgaacttttagtcctgtaataaatgaaatgttattaggcagctttgttgcatgattgcatagttatatcttgctaacgggccactcatttctcactgatgtggatgaaaaaatgagagcagtatgtttccaggtgtgtgcactcaacaggcaaatagctcccgaggtcaccacttccctaatgggccacaggaagtaagttgatcttgatggggagatcacgtcacccagaaccagcaactggatagagactgttgttagtgtctgggtagagcacaggctcccaggggtcttaagagctaattactgaataaaacaatctagaacaaagc

SEQ ID NO: 24066 - protein, 63 aa, Homo sapiens
MNCKEGTDSSCGCRGNDEKKMLKCVVVGDGAVGKTCLLMSYANDAFPEEYVPTVFDHYAGSEL

SEQ ID NO: 24067 - DNA, 654 bp, Homo sapiens
gtcacagctgctgttcaattatctgaggttgtctgggacctgcctccaccccatccagggatgagaatggcagccaatctctgtggccaagctccagccaaaaaggagggcacgaccagaaaggaactccctttgcacggaggcttgccccatcaccctctgagccctcccaacacagcacactaaccagcctgggtaatatagtgagatcctgtgtctctataaaaaaattaaaaattagtcagttgtagtgacacatacctgtagtcccagctactcaggaggctgaggtggaaggatcacttgagcccagaaggtaaggctgcagtgagctgtgactgtgccactacactccagcctgagtgacagagaaagaacctgtcaaaaaaaaaaaaaaaacaacctacatttcaagtactatttcccttctctcccatctaattgctaaagattttctttcatacgcacacactccagtgactggaaaaacgggagttttcagtcaaagcttgacatttagagaaaacaaggactttctgcctttataaatggaaatcaactgtgtatgaactataactctgcagaggttatgaattcatcctttacaaacaataatgaacttttagtcctgtaataaatgaaatgttattaggc

SEQ ID NO: 24068 - protein, 41 aa, Homo sapiens
MRMAANLCGQAPAKKEGTTRKELPLHGGLPHHPLSPPNTAH

SEQ ID NO: 24069 - DNA, 542 bp, Homo sapiens
tgaaatcttagtgcaagtttcagctctaaaagaagagtgggctcctgcaagattagcatgaagctggcattcctcttccttggccccatggccctcctccttctggctggctatggctgtgtcctcggtgcctccagtgggaacctgcgcacctttgtgggctgtgccgtgagggagtttactttcctggccaagaagccaggctgcaggggcttcggatcaccacggatgcctgctggggtcgctgtgagacctgggagaaacccattctggaacccccctatattgaagcccatcatcgagtctgtacctacaacgagaccaaacaggtgactgtcaagctgcccaactgtgccccgggagtcgaccccttctacacctatcccgtggccatccgctgtgactgcggagcctgctccactgccaccacggagtgtgagaccatctgaggccgctagctgctctctgcagacccacctgtgtgagcagcacatgcagttatacttcctggatgcaagactgtttaatttcgaccacaccca

SEQ ID NO: 24070 - protein, 91 aa, Homo sapiens; identical to SEQ ID NO: 3175

SEQ ID NO: 24071 - DNA, 6663 bp, Homo sapiens
gctggccagaaggttcggttgcgcgtgtgccatggactcagccgcccggtgatattgacaataggagagagaaaggggcattgactgggacccaccgcgggtagcgaaaggtggctctggcagcggcggctccagctcctgcggctcctcctccttattctgtccccttctcttgctgccgctgcagatccagtcttcctccctcccttccccccctccccacgtcgtcgccgccgccgccgggtccggggcaacgagctgaggcgccgcccgccaggaatgtgagcgaggagccaccggcggagccgcaacggggtcggtgccgatttgatgggacgggcccgcgggggaggatcgtgaggccgccgccgccaccggaacgctgaggttcgggtccggccgtgaggcctagaggctccgccgccgcggaaccggagggaccccgtaccggacagccgtcgccccaggctccccgcagctgcccggacctccccctgcacgtcccggtcccgccgcccgcccccgctgcggccacctcgcccgtctcccgcccctccaagccacagatcatctttggattcttccccagaagcttcaagtagggatatgtcctcagcaccaactactcctccatcagtggataaagtagacggattttctcggaagtccgtcagaaaagccagacagaagaggtcgcaaagttcctcacagtttaggtctcaaggcaagcctattgagttaacacctctgccgctgctaaaagacgttccatcctcagagcagcctgaactgttcctaaagaaacttcagcagtgctgtgtcatttttgacttcatggacacgctatctgatcttaaaatgaaagaatacaagcgctccactcttaatgaactggtggactacattacaataagcagaggctgtttgacagagcagacttaccctgaagtagttagaatggtatcttgcaatatattcagaactctccctcctagtgacagcaatgaatttgatccagaagaagatgaacctacccttgaggcatcgtggccacacttacagcttgtatatgaatttttcatacgatttttggaaagccaagaattccaacccagcattgccaaaaaatatatagatcagaaatttgtattacagcttctggagctatttgacagcgaagaccctcgggaacgggactacttaaaaacagtcttacacagaatttatggcaagtttcttggtcttagagcatttatccgaaaacagattaacaatatttttctaaggtttgtttatgaaacagaacacttcaatggtgtagctgaactgctggaaatattaggaagtattatcaatggctttgctttacctcttaaggcagaacacaaacagtttctggtgaaagtattgatccctttacacactgtcaggagcttatcactcttccatgcacagctggcatattgtatagtacagtttctggagaaagatccttcactcacagaaccagttattagggggttaatgaaattttggcctaaaacatgtagtcaaaaagaggtcatgttccttggggaactggaagaaatattggatgtgattgaaccttcacaatttgttaaaatccaagaacctttgtttaaacaaatcgccaagtgtgtatctagcccccattttcaggtggcagaaagagcactctattattggaataatgaatacatcatgagtttgatagaagaaaactctaacgtcatccttcccatcatgttttccagcctttataggatttcaaaagaacattggaatccggctattgtggcgttggtgtacaatgtgttgaaggcatttatggaaatgaacagcaccatgtttgacgagctgacagccacatacaagtcagatcgtcagcgtgagaaaaagaaagaaaaggagcgtgaagaattgtggaaaaaattggaggatctggagttaaagagaggtcttagacgtgatggaataattccaacttaacaaaaacaatgacaacaacattactaacctgtggagtcacacgtttatgtagtagaagatggagcaacagttttctgtattgtgcaactttacagtagatttcacctttgtttcattattacagcagcactgtatatacctgtctctaagtaaaggaaaaaacaaaataaggacttcaatccaaagtttggacagtagatggacttctcagaactttgcaaacataatcattgttctcaccctcttttaaaaaaaaaaatcggtcttcaaagatctgttgatgaaattgctatgttaaaattccattatcgggagttccttatttatcactagcagagagtatgatacaattttcaaatgtgaacaatcttaaatttagcttgtctttctgctaagctgttaaatgtatttatagtaaaggaagaaaaaaagactgtcatttccttataagtttgtgtaacatcctcctctggataacttgactgtaatttaacatctttttcttttgcacatcttcctgagttgaatgtccacgtggaatggggtcatgaattataaaagtccctgataaaagttttgtttactggggtgaacatctttccagtaaccaggtagtcctggtactcctttagttttaaaattaggagttaagagagaagaggtgataaacatagtagggaagggaatatcggattcatgcatcagtttatggtgaatccaaatcaatgtcttgaatcctttgaaaacaggcactgggacatcacaggcttcagtacctgaccagtattagttgcatatatcattgaacacacataccagagatgttttagaaatgtgagaaaaacatccttttggaccatttgaaataagaaagacaaacactaaacaatacaaccatgaaattgatcaccgggattgcaaatctaattgggaaaagagttgagcaaacagcttggactgtttggagttgttgccttactttttaatatgtatttataaagtattccagcaaaagaggatgtagcctctgggaaaaaacaaacatgttacagtgttttttgtagattctcgttctatatctcatcacagcgccagccctgtttttagccggaaaggattcaggataaacattattatgcattctgaattggatgcatattcctaactactgtatttgttaccaaaagtggttctacaaatgctactgaaaaaaatctggaaattcctaatgtcctgagtattaataataaagtttaaaaatgcttttatatcaaaggtgcatcgtgaccaaattgtttaagaaaaaaaaacaaaaaaaacaaaatctagggctgtattttatatatatatatatatatatatatatatatatatcttattggctctctgctttgtatttaaatgaagaatcttacatcttgggtaggtaaactgctgataaaatttgtgtacagtatgtacttacctaatgcagttgcattattacgtactgaaagatatgtgtttggaggtttatttccaggatgcatttgcttgttttggtcatggcagcagtgagttggtaatcctaaaccatcacttccagcagtattcatggtatagagctgatctgtgttcatatgttgaattgtgatagtagcaaacatgaacatatgaactattgttgctcttaatagaaatacaatataaatatgggcttgtatattttcttccttacatttaaatataaagtagaatacgcagttttattattttcaagaaaaagaaagagaagctgctgacctttctcccccataaagtttttcaggatgatcaggtcacagtgtgtacgtaagagtcagctaattatggatattgtcatctcggtaactttgtaaaaaaacaaacaaaactggcattgttaattccaaaaagaaaaaaaaaagcagtaaaaaaaaaaagtcatatgcaacaccagacgcaacatggtttaatggaattaatagtttttttttttttttttttaaagaacattgatggggattcactgtaaagttggcagaggctgccaaagacgaaacaactgactttaaaaatgctggaacaatgtgataaaaaataaatttgtaacaaatcttctcctttttagcccttgtcattttagccctttagtttcaactctgcattatatttagtttatatagtgtaaacttttgtttgccattaattcatctttttaggtagaagacattaaaatcacaggtttatgaagaatctctgctcattggaatgaaatgcagtcatttgaaatgagaaaggccaggatccttttttgtaccttaccctgtcttcaagagtaaaggtgaacacttacagctctcctccttgatgtcaattttgtatgttgatcattccaaactgagaagaataaagccacattttagacatatttatagaatcaattaaagctatatgtctaaaattcgtagggcaacttctgagaagaaacaccgtctttttcttttttaatggaaagtgacaatgtgacattagtcatgttgtgtgcggtgacgcagagtaactgaggtaatctgactgttgcactatgtgacatatttcaggacgtacttgctgcatttgcagcagccctctctctctgtcccttcccacaattctgctgttgctgcaacttgagttaattgtgacaaatgcatctttgtgttatattttgtttgcttcataatttccagaactatatataaatatattttttaaatagcaaatattgtagttagtgagtgatgatcactccaaccttatccttaccatattggtttcagggataggattaagagtgtctttggaagagaaaaatacacacaaccctgtggtttagaatgacgctgaggccttaggctgtgggcctagaacaactatgtgagtgaattcacccatctcatactttgaatcaagcatgcattcctgtttctcattgtgaagtatccccagttgttttccttcagtgttgagtttttgtccttttaaattttattatattttgctctccctaacatttgactgttttttataaaagaaaagaaaaaaaaagaaataaataataccctcgatgccactggatactcacaagcagggttatgctccttcatcttgggcttgtttgcctaaatgaaagggtttaatttattttgtacctcctatgcgtgggatagtccagggtgcagagccaggacttgcttgtaattgcacctgctatacttaaatgtatagccctaggctcaatcacactatggaaagaaacaaaaaaagtatatttagagctttaaaagcttttttatttttttgtggggatgagggtgggatgggaaagggatgtatggatgttattggcatttttaagtgtttagagttttttggggtttggggtggttttttttccttgttttccttttttccttttaattggatgcactgacctggcccaggaaatgaagagattctcttttgatgctattaccaatgttatcataaagtgacagtcacctgtaacaaaaaggtggcaccagacatgatcactgatgttttatttgcacatcaatatttttatttttgtattctggctcagctgcttctctgagtggagttaaggaatgagccacaaagatttttgtagtaggtatattggcattgcattttatattcctctatatttaattttgaaaacctaaaagaaggattgtgcatcttgagagaaagttgagcaaattgtgatctagcggaatgttaatttgtgctgcttcttgtgcacgatagcagcagtagtatctctcttggaaataaacatcccatattatgatgtctatgaatataggtttccttttcttccttccctccctccttcccccacctttctcttttttttttctctctcagcttctcttttcctccttccctcttcccttcctctttctttactttttttgaaatcacttattgtaaataagttgtaatccaaacctcatgtatcaatggggaattttcaaatataaatattaccaatgcattttctggttgttgtctgatttttgattgaagtataatgagaatgacatgtctgttgcttttggtttgaggacttcgctttagcttcataaatcttttggtattttagtatttcattgttttagcaggagagggcagcaaaagttcattttccctgttagtaatgctgtggttcatgatcggttttaaatttagctgtgtgtgtgtttttttaaacagcatctctttgtgagtagaggtaaaaatgaaacatttttgatatgaaaagttgcatatgaaaattatagactggttcaaccagacagtgaagacttctgatccacatcaaacttaaaatgccacaaaacaatcttccacctctggctaaaacatgctacttccttttcaaacaccacaaaatacaagctgagtcttaaacacttggaatttaaaatgtttttctttggaaatgatttgctttcttcaaagtggtaacagaaacaaaaatgaaggtgctccccaaaaagaaatgtaaccttcccctttcacagatgtgtgagaggttctgtactgtgggtgcatcataataaagaagcagtgaagagttttcaggtg

SEQ ID NO: 24072 - protein, 467 aa, Homo sapiens; identical to SEQ ID NO: 3177

SEQ ID NO: 24073 - DNA, 3282 bp, Homo sapiens
gctggccagaaggttcggttgcgcgtgtgccatggactcagccgcccggtgatattgacaataggagagagaaaggggcattgactgggacccaccgcgggtagcgaaaggtggctctggcagcggcggctccagctcctgcggctcctcctccttattctgtccccttctcttgctgccgctgcagatccagtcttcctccctcccttccccccctccccacgtcgtcgccgccgccgccgggtccggggcaacgagctgaggcgccgcccgccaggaatgtgagcgaggagccaccggcggagccgcaacggggtcggtgccgatttgatgggacgggcccgcgggggaggatcgtgaggccgccgccgccaccggaacgctgaggttcgggtccggccgtgaggcctagaggctccgccgccgcggaaccggagggaccccgtaccggacagccgtcgccccaggctccccgcagctgcccggacctccccctgcacgtcccggtcccgccgcccgcccccgctgcggccacctcgcccgtctcccgcccctccaagccacagatcatctttggattcttccccagaagcttcaagtagggatatgtcctcagcaccaactactcctccatcagtggataaagtagacggattttctcggaagtccgtcagaaaagccagacagaagaggtcgcaaagttcctcacagtttaggtctcaaggcaagcctattgagttaacacctctgccgctgctaaaagacgttccatcctcagagcagcctgaactgttcctaaagaaacttcagcagtgctgtgtcatttttgacttcatggacacgctatctgatcttaaaatgaaagaatacaagcgctccactcttaatgaactggtggactacattacaataagcagaggctgtttgacagagcagacttaccctgaagtagttagaatggtatcttgcaatatattcagaactctccctcctagtgacagcaatgaatttgatccagaagaagatgaacctacccttgaggcatcgtggccacacttacagcttgtatatgaatttttcatacgatttttggaaagccaagaattccaacccagcattgccaaaaaatatatagatcagaaatttgtattacagcttctggagctatttgacagcgaagaccctcgggaacgggactacttaaaaacagtcttacacagaatttatggcaagtttcttggtcttagagcatttatccgaaaacagattaacaatatttttctaaggtttgtttatgaaacagaacacttcaatggtgtagctgaactgctggaaatattaggaagtattatcaatggctttgctttacctcttaaggcagaacacaaacagtttctggtgaaagtattgatccctttacacactgtcaggagcttatcactcttccatgcacagctggcatattgtatagtacagtttctggagaaagatccttcactcacagaaccagttattagggggttaatgaaattttggcctaaaacatgtagtcaaaaagaggtcatgttccttggggaactggaagaaatattggatgtgattgaaccttcacaatttgttaaaatccaagaacctttgtttaaacaaatcgccaagtgtgtatctagcccccattttcaggtggcagaaagagcactctattattggaataatgaatacatcatgagtttgatagaagaaaactctaacgtcatccttcccatcatgttttccagcctttataggatttcaaaagaacattggaatccggctattgtggcgttggtgtacaatgtgttgaaggcatttatggaaatgaacagcaccatgtttgacgagctgacagccacatacaagtcagatcgtcagcgtgagaaaaagaaagaaaaggagcgtgaagaattgtggaaaaaattggaggatctggagttaaagagaggtcttagacgtgatggaataattccaacttaacaaaaacaatgacaacaacattactaacctgtggagtcacacgtttatgtagtagaagatggagcaacagttttctgtattgtgcaactttacagtagatttcacctttgtttcattattacagcagcactgtatatacctgtctctaagtaaaggaaaaaacaaaataaggacttcaatccaaagtttggacagtagatggacttctcagaactttgcaaacataatcattgttctcaccctcttttaaaaaaaaaaatcggtcttcaaagatctgttgatgaaattgctatgttaaaattccattatcgggagttccttatttatcactagcagagagtatgatacaattttcaaatgtgaacaatcttaaatttagcttgtctttctgctaagctgttaaatgtatttatagtaaaggaagaaaaaaagactgtcatttccttataagtttgtgtaacatcctcctctggataacttgactgtaatttaacatctttttcttttgcacatcttcctgagttgaatgtccacgtggaatggggtcatgaattataaaagtccctgataaaagttttgtttactggggtgaacatctttccagtaaccaggtagtcctggtactcctttagttttaaaattaggagttaagagagaagaggtgataaacatagtagggaagggaatatcggattcatgcatcagtttatggtgaatccaaatcaatgtcttgaatcctttgaaaacaggcactgggacatcacaggcttcagtacctgaccagtattagttgcatatatcattgaacacacataccagagatgttttagaaatgtgagaaaaacatccttttggaccatttgaaataagaaagacaaacactaaacaatacaaccatgaaattgatcaccgggattgcaaatctaattgggaaaagagttgagcaaacagcttggactgtttggagttgttgccttactttttaatatgtatttataaagtattccagcaaaagaggatgtagcctctgggaaaaaacaaacatgttacagtgttttttgtagattctcgttctatatctcatcacagcgccagccctgtttttagccggaaaggattcaggataaacattattatgcattctgaattggatgcatattcctaactactgtatttgttaccaaaagtggttctacaaatgctactgaaaaaaatctggaaattcctaatgtcctgagtattaataataaagtttaaaaatgcttttatatc

SEQ ID NO: 24074 - protein, 467 aa, Homo sapiens; identical to SEQ ID NO: 3177

SEQ ID NO: 24075 - DNA, 621 bp, Homo sapiens
gttacagtatttcagatagttcttatcatgcaactgagatctacatttgtgataaacaaggatattgaggagattgttttgactcaaggaatcatatgtaactcaaataaacatgtttggaataataatgtctgaaaattataattattgatgacattacatagcaaatacagttaaatatttaatgtgttaggcaataaagctagacctgcagtggatggcttattctaggaaattgtcaaactgacttaaatttaaatttctgatccttagaattaggtgttaaggacatgctttttttttttttttgatagagtctagctctgtcgccaggctggagtgcagtggcgtgatcttggctcactgcaaccgctgcctcctgggttcaagcaattctcctgcctcagtctcccgagtagctgggactacaggcatgcgcccctatgcccagctctactaaaaatacaaaaaattagctggacgtggtggcgggtacctctaatccagcttctaggaaagctgaggcaggagaatcacttgaatcggggaggtggaggttgcagtgagccaagatggtgccattgcactccagcctgggcaacaagcatgaaaatctgtctc

SEQ ID NO: 24076 - protein, 35 aa, Homo sapiens
MQLRSTFVINKDIEEIVLTQGIICNSNKHVWNNNV

SEQ ID NO: 24077 - DNA, 3377 bp, Homo sapiens
gctggccagaaggttcggttgcgcgtgtgccatggactcagccgcccggtgatattgacaataggagagagaaaggggcattgactgggacccaccgcgggtagcgaaaggtggctctggcagcggcggctccagctcctgcggctcctcctccttattctgtccccttctcttgctgccgctgcagatccagtcttcctccctcccttccccccctccccacgtcgtcgccgccgccgccgggtccggggcaacgagctgaggcgccgcccgccaggaatgtgagcgaggagccaccggcggagccgcaacggggtcggtgccgatttgatgggacgggcccgcgggggaggatcgtgaggccgccgccgccaccggaacgctgaggttcgggtccggccgtgaggcctagaggctccgccgccgcggaaccggagggaccccgtaccggacagccgtcgccccaggctccccgcagctgcccggacctccccctgcacgtcccggtcccgccgcccgcccccgctgcggccacctcgcccgtctcccgcccctccaagccacagatcatctttggattcttccccagaagcttcaagtagggatatgtcctcagcaccaactactcctccatcagtggataaagtagacggattttctcggaagtccgtcagaaaagccagacagaagaggtcgcaaagttcctcacagtttaggtctcaaggcaagcctattgagttaacacctctgccgctgctaaaagacgttccatcctcagagcagcctgaactgttcctaaagaaacttcagcagtgctgtgtcatttttgacttcatggacacgctatctgatcttaaaatgaaagaatacaagcgctccactcttaatgaactggtggactacattacaataagcagaggctgtttgacagagcagacttaccctgaagtagttagaatggtgagtttctttttttctccgcggacacttttaagcatcttccatagtgactcacaggtgtatatattgcaagagtgaggtcattggaggtcaactccacaaatgagagccaacctttggagagctaagcaaatgtagtcggcacagtgctagaatttgaagagcatgatttcatgagaacgaaatccagaactttaactacgacagtgctgaagcaataaatgacttcaaaatatgaagccaagattgccagggtattactggatttctagctttggcaaaagaaaagacacaggaaaataacaaaagtcttagatccgtgtttgaaaaatattcaagcctgttggatgtcttttttttttttaatcttattcattgtggtatattagaaatggcttaatgcttaataaaattgtgatttgtagaatgtagttaaggcctctcttgggctttataactaacgcttctctttataatctccttgaagtcagggttgataccttttatgatttttgaatagtgtcttagattttgtgtggtcattaggagttatgaggaaaaacattattaacataatgtgagtaattacattcttactgtgtgaacaattattttagtttttcaaaagctgagccaaaatgtggttttctgatagatttctgtgggagagttgcctttcttggcatcccagaagatcttggagctggagagtgcacgctatttggggatgggctttgcagggtggggaagctggtctactgactggtgaaatagcctcagagatccttaaggtcagtgcatcgttgaggagtccattgcaggatctggcacactctctgtgtactgcggaacatctgcctggcttttgtatttagttctttatcatttgtattcaaccaatgcagaaaagagacttttgtgatggagtagatatgtttaaaaatgatagttcagatttgcaaaggcacttgaatgatctcagcgtgagactgtgactgaaataatgaaggtcatctgaaaacgatgcccaatatattcctcagttctatatctgaatgtatattggatttgttgttaatttacaggaatgtagcactagaatgttttgtaggttaaagatgaccgtgtggctcttgagcagtgcttctcaaccaggtgtgattttaccttacaggggacatttgtcagtgtctagagacatttttggtagtcacaactagatgtgagaggagagtactaccagcatctagtgggagaggccagagatactgctaaacattttacaatgtaccgggtggcccccacaataaagaattatctggccccagatatcacaagtgccactgttgagaaaccttgctcttgagtttgcatgctatctaaacctcttaatgtgatgcagaggatcttctctagtctacctgccttctgcagagcacagtccctggttttagcctacctgtatcatcagccaacagaggtatcggttatgactttcttctgtatcttcccatggatagttcatgaatatataagtatatgcaaacatatgtataaatatttttttttgtaagcacacaaatggtggcacactatgtattttctgtaccttgcttttttcacttagcaatatatatttcagtacatataaagttgccatattctttttatagctgcataatatttattgtgtgaatgtaccatatttaagcagtactctatgaatatccttatacacacatcagtttgcctttgtatgaggacatctgtatacttatttatttttaaaaatttaattttttaagagcagttttaggttcacagcacaattgagaggaaagtacagagatttctcatatgcccctgtccctgcacaagcacagcctcccccattatcaacacctcccccctcactcccaccagagcagtacatttgttacaattgatgatcctacattgacgcatcattatcacccagaattcagagttcacgttagggctcattcttggtgttggacattctgagtttagacaaatgtgtaatgacatgtatccaccattatagtaccatacataccatacatcactgccctgaaaatcctctgtgctccacttcttcatcacccaccaccttcaactccctggcaaccactgatctttttactgtgtccataattttgctttttccagactgtcatatagttggaatcatacagcatgtactcttttcagatgggcttctttgacttagttatatgcacttaagtttccttcatgtcttttcaagacttgatagctcatttattttagtgttgaataacattttattggttggatgtaccatagtttatccattcacctactgaaggacattttagttgcttcctaattttggcaattatgaataaagctaatat

SEQ ID NO: 24078 - protein, 143 aa, Homo sapiens
MSSAPTTPPSVDKVDGFSRKSVRKARQKRSQSSSQFRSQGKPIELTPLPLLKDVPSSEQPELFLKKLQQCCVIFDFMDTLSDLKMKEYKRSTLNELVDYITISRGCLTEQTYPEVVRMVSFFFSPRTLLSIFHSDSQVYILQE

SEQ ID NO: 24079 - DNA, 378 bp, Homo sapiens
atgcagggctttccagtgcacaatgtacagatcgctcttgcaaagaaggatggcaagaagaagagcctttctgccatcagcattcacaagcgcatccatggtgtgggcttcaagaagtgtgcccctcgggcactcgaagagatccaaaaatgtgccatgaaggagatgggcactccagatgtgcacattgatactaggctcaacaaagctgtttgggccaaaggaataaggattgtcccataccgtatccctgtgtggttgtccagaaaacgtaacgaggatgaaaattcaacaaacaagctctatactttggttacccatgtacgtgttaccgttttcaaaaatctacagtcaatgtggatgagaactaaccactga

SEQ ID NO: 24080 - protein, 125 aa, Homo sapiens
MQGFPVHNVQIALAKKDGKKKSLSAISIHKRIHGVGFKKCAPRALEEIQKCAMKEMGTPDVHIDTRLNKAVWAKGIRIVPYRIPVWLSRKRNEDENSTNKLYTLVTHVRVTVFKNLQSMWMRTNH

SEQ ID NO: 24081 - DNA, 3042 bp, Homo sapiens
aggtatttggctattataaataaaatagtgatgaacacgtgtacaggtgtttgtacggacataagttgtcatttctcttgagtaaatacctaaaagtgggcttgctggagttttactacccttggatgctgctgttgacatggaaaagattgaggaacaatttgctaatctgcacattgttaaatgttccttaggaaccaaagagcccacttaccttcttggtatagacacatcaaagactgtccaagcaggaaaggaaaacttggttgctgttttatgttctaatggatcaatcagaatatatgataaagaaaggttaaatgtactacgagaatttagtggatatcctggacttcttaatggagtcagatttgcaaattcctgtgacagtgtatattcagcatgtactgatggcactgtgaaatgctgggatgctcgagtagccagagaaaaacctgttcagctcttcaagggttacccttccaatatttttatcagttttgatattaattgtaatgatcatattatttgtgctggtacagaaaaagttgatgatgatgcattgttggtgttttgggatgcaaggatgaattctcagaatttatctacaactaaagactcacttggtgcatattcagagacacatagtgatgatgtcactcaagtacgtttccatcccagcaatcccaacatggtagtctcaggttcatctgatggcctggtaaatgtatttgatattaatattgataatgaggaggatgcactggttacaacctgtaactcaatttcatcagtaagctgtattggttggtctgggaaaggttataaacagatttactgcatgacacatgatgaaggattttattggtgggatcttaatcatctggacactgatgaaccagttacacgtttgaacatccaggatgtcagagaagtagttaacatgaaagaagatgctttggactatttgattggtggcctatatcatgaaaagacagacacattgcatgttattggaggaacaaacaaaggaaggattcatttgatgaactgcagcatgtcaggactgacccatgtgactagccttcagggagggcatgctgctacagtccgttctttctgttggaatgtgcaagatgattctttgttgactggaggagaagatgcacagttgttactttggaaacctggagctatagagaagacctttacaaagaaagagagtatgaaaatagcatcctctgtgcaccaacgagtacgagttcatagtaatgattcttataaaagaaggaaaaagcagtgataatgcatttggcactttgtttggtaggttttatagtttcaaatagtccttcttgtttactacccatggtagacatgtttaaagctttatgtaaaaacaagccagttagcaaacagtcctggaaaaatatggtgagaatggtttaattccggtcttcacatattctaaaaaattttaaagcctctaagtataaaatcagtgagttgaaagtaaaatttcttatttaaagaacccatctgttaatgtagtaaatgttggctttaaagaaatagctccgataaggactttttagaaggaaatacttggtaaaacttaataaaacaggtggttggctgcattttttaagcccagttttttacattttaaattgtctttattgtgtataaaaccagattagactatattcttcatctgaggagcatctatatgtttaatacacctaatgtattatgctggagtatttaaatgtaagtattttaatgagtaaatagaattaaccttttttacaaatgaaatgataggcatctatgtaaagtgagaaaaatatgtttcgtaaatatttgcatctttaatattgttagtaagtagtaaacaggtgttttgctgattgaaaggaagttatcttggtaaattgagactcaaagtgaaatacaaaaatgaaaatatttataataggactcgacttggagaaattgctattcttcctgttgtccaaaccataaatctgaggataacctgggcttttctctttcctcttctcctaaccagtttttcaccaagtcctgtgccatttcacctcctaacgtctgtcagctatccttttgcctttacctcaccactattaccctagagaagactttcattatttctcatctggattaccagctcgatctctaatctgcttcagttcatccttcttgctacttctaggctaaacatcaaaaacagatctggtaggggcggggaaatgagggggaagaaacaaaaacgtgatggtgcctcatgctgcttaaaatcttcagtacattgatgttttgatggcggactacataagcgttaaaaattgtgtttttcagaatctttaaaatataagacagtgctatctagtgaataaaaaaattagtttgaaagatatctggagaaatcgcattcataaaacaattggaagtgaaactattaaaacaatagggctttttaaaattaaaaatatttaaaattcaaaagtaattaatagtgttggaagatgtaggtgagaaaatattcctgaaagtagaactgaaagagacaaagagaaaagatgaaagccacagaagataaatacaggggtcaaaaccagactaacagttttagaaagtgaaaaaagttaaaaaagaaatgggggcagtgggttattagaaataacataaatggctggtatggtttgtctgtgtcctcacccaaatttcatctcgaattgtaatccccataatccccatgtgtctagggagagacctggtgggaggtgattggatcatgggggtggtttcccctacgatgttctcctgatagtgggtgagttctcacaagatctgatggttttataaagggctctgcccctttaactcctcactctttctcctgaagccttgtgaagaaggtgctttgcttcccctttgcgttcccccatgattgtaagtttcttgaggcctccctggccatgctgaactcttcagtcaattaaacactttcctttataaatt

SEQ ID NO: 24082 - protein, 387 aa, Homo sapiens; identical to SEQ ID NO: 3179

SEQ ID NO: 24083 - DNA, 3436 bp, Homo sapiens
cgggagcgcggagggaagtgggaggtctggacggagtgtgcacgtgttggcagtctcgctccgccgtcggagccaccaggtcaaacctgtgctggccctggccaaagaaacttctgcgggtcaggctgctgttgccggtgcagttcccagtacttcctctggggcgtttttcaataaaagccaaacgcccttgctcattttcagggaaagacctgtttcctcctgctctttcctctccacggatactctccccaccactaaaagggtttagtataatccttttgtaggccagaaagcagattttcacttgggaagagacgacccgtagtatgggatgtggtatgataccagcaactggtctattatatcatttaaaccacatggctatctaaagaggtatttggctattataaataaaatagtgatgaacacgtgtacaggtgtttgtacggacataagttgtcatttctcttgagtaaatacctaaaagtgggcttgctggagttttactacccttggatgctgctgttgacatggaaaagattgaggaacaatttgctaatctgcacattgttaaatgttccttaggaaccaaagagcccacttaccttcttggtatagacacatcaaagactgtccaagcaggaaaggaaaacttggttgctgttttatgttctaatggatcaatcagaatatatgataaagaaaggttaaatgtactacgagaatttagtggatatcctggacttcttaatggagtcagatttgcaaattcctgtgacagtgtatattcagcatgtactgatggcactgtgaaatgctgggatgctcgagtagccagagaaaaacctgttcagctcttcaagggttacccttccaatatttttatcagttttgatattaattgtaatgatcatattatttgtgctggtacagaaaaagttgatgatgatgcattgttggtgttttgggatgcaaggatgaattctcagaatttatctacaactaaagactcacttggtgcatattcagagacacatagtgatgatgtcactcaagtacgtttccatcccagcaatcccaacatggtagtctcaggttcatctgatggcctggtaaatgtatttgatattaatattgataatgaggaggatgcactggttacaacctgtaactcaatttcatcagtaagctgtattggttggtctgggaaaggttataaacagatttactgcatgacacatgatgaaggattttattggtgggatcttaatcatctggacactgatgaaccagttacacgtttgaacatccaggatgtcagagaagtagttaacatgaaagaagatgctttggactatttgattggtggcctatatcatgaaaagacagacacattgcatgttattggaggaacaaacaaaggaaggattcatttgatgaactgcagcatgtcaggactgacccatgtgactagccttcagggagggcatgctgctacagtccgttctttctgttggaatgtgcaagatgattctttgttgactggaggagaagatgcacagttgttactttggaaacctggagctatagagaagacctttacaaagaaagagagtatgaaaatagcatcctctgtgcaccaacgagtacgagttcatagtaatgattcttataaaagaaggaaaaagcagtgataatgcatttggcactttgtttggtaggttttatagtttcaaatagtccttcttgtttactacccatggtagacatgtttaaagctttatgtaaaaacaagccagttagcaaacagtcctggaaaaatatggtgagaatggtttaattccggtcttcacatattctaaaaaattttaaagcctctaagtataaaatcagtgagttgaaagtaaaatttcttatttaaagaacccatctgttaatgtagtaaatgttggctttaaagaaatagctccgataaggactttttagaaggaaatacttggtaaaacttaataaaacaggtggttggctgcattttttaagcccagttttttacattttaaattgtctttattgtgtataaaaccagattagactatattcttcatctgaggagcatctatatgtttaatacacctaatgtattatgctggagtatttaaatgtaagtattttaatgagtaaatagaattaaccttttttacaaatgaaatgataggcatctatgtaaagtgagaaaaatatgtttcgtaaatatttgcatctttaatattgttagtaagtagtaaacaggtgttttgctgattgaaaggaagttatcttggtaaattgagactcaaagtgaaatacaaaaatgaaaatatttataataggactcgacttggagaaattgctattcttcctgttgtccaaaccataaatctgaggataacctgggcttttctctttcctcttctcctaaccagtttttcaccaagtcctgtgccatttcacctcctaacgtctgtcagctatccttttgcctttacctcaccactattaccctagagaagactttcattatttctcatctggattaccagctcgatctctaatctgcttcagttcatccttcttgctacttctaggctaaacatcaaaaacagatctggtaggggcggggaaatgagggggaagaaacaaaaacgtgatggtgcctcatgctgcttaaaatcttcagtacattgatgttttgatggcggactacataagcgttaaaaattgtgtttttcagaatctttaaaatataagacagtgctatctagtgaataaaaaaattagtttgaaagatatctggagaaatcgcattcataaaacaattggaagtgaaactattaaaacaatagggctttttaaaattaaaaatatttaaaattcaaaagtaattaatagtgttggaagatgtaggtgagaaaatattcctgaaagtagaactgaaagagacaaagagaaaagatgaaagccacagaagataaatacaggggtcaaaaccagactaacagttttagaaagtgaaaaaagttaaaaaagaaatgggggcagtgggttattagaaataacataaatggctggtatggtttgtctgtgtcctcacccaaatttcatctcgaattgtaatccccataatccccatgtgtctagggagagacctggtgggaggtgattggatcatgggggtggtttcccctacgatgttctcctgatagtgggtgagttctcacaagatctgatggttttataaagggctctgcccctttaactcctcactctttctcctgaagccttgtgaagaaggtgctttgcttcccctttgcgttcccccatgattgtaagtttcttgaggcctccctggccatgctgaactcttcagtcaattaaacactttcctttataaatt

SEQ ID NO: 24084 - protein, 46 aa, Homo sapiens
MWYDTSNWSIISFKPHGYLKRYLAIINKIVMNTCTGVCTDISCHFS

SEQ ID NO: 24085 - DNA, 3167 bp, Homo sapiens
caggttgaggctactaaggccagaaagcagattttcacttgggaagagacgacccgtagtatgggatgtggtatgataccagcaactggtctattatatcatttaaaccacatggctatctaaagaggtatttggctattataaataaaatagtgatgaacacgtgtacaggtgtttgtacggacataagttgtcatttctcttgagtaaatacctaaaagtgggcttgctggagttttactacccttggatgctgctgttgacatggaaaagattgaggaacaatttgctaatctgcacattgttaaatgttccttaggaaccaaagagcccacttaccttcttggtatagacacatcaaagactgtccaagcaggaaaggaaaacttggttgctgttttatgttctaatggatcaatcagaatatatgataaagaaaggttaaatgtactacgagaatttagtggatatcctggacttcttaatggagtcagatttgcaaattcctgtgacagtgtatattcagcatgtactgatggcactgtgaaatgctgggatgctcgagtagccagagaaaaacctgttcagctcttcaagggttacccttccaatatttttatcagttttgatattaattgtaatgatcatattatttgtgctggtacagaaaaagttgatgatgatgcattgttggtgttttgggatgcaaggatgaattctcagaatttatctacaactaaagactcacttggtgcatattcagagacacatagtgatgatgtcactcaagtacgtttccatcccagcaatcccaacatggtagtctcaggttcatctgatggcctggtaaatgtatttgatattaatattgataatgaggaggatgcactggttacaacctgtaactcaatttcatcagtaagctgtattggttggtctgggaaaggttataaacagatttactgcatgacacatgatgaaggattttattggtgggatcttaatcatctggacactgatgaaccagttacacgtttgaacatccaggatgtcagagaagtagttaacatgaaagaagatgctttggactatttgattggtggcctatatcatgaaaagacagacacattgcatgttattggaggaacaaacaaaggaaggattcatttgatgaactgcagcatgtcaggactgacccatgtgactagccttcagggagggcatgctgctacagtccgttctttctgttggaatgtgcaagatgattctttgttgactggaggagaagatgcacagttgttactttggaaacctggagctatagagaagacctttacaaagaaagagagtatgaaaatagcatcctctgtgcaccaacgagtacgagttcatagtaatgattcttataaaagaaggaaaaagcagtgataatgcatttggcactttgtttggtaggttttatagtttcaaatagtccttcttgtttactacccatggtagacatgtttaaagctttatgtaaaaacaagccagttagcaaacagtcctggaaaaatatggtgagaatggtttaattccggtcttcacatattctaaaaaattttaaagcctctaagtataaaatcagtgagttgaaagtaaaatttcttatttaaagaacccatctgttaatgtagtaaatgttggctttaaagaaatagctccgataaggactttttagaaggaaatacttggtaaaacttaataaaacaggtggttggctgcattttttaagcccagttttttacattttaaattgtctttattgtgtataaaaccagattagactatattcttcatctgaggagcatctatatgtttaatacacctaatgtattatgctggagtatttaaatgtaagtattttaatgagtaaatagaattaaccttttttacaaatgaaatgataggcatctatgtaaagtgagaaaaatatgtttcgtaaatatttgcatctttaatattgttagtaagtagtaaacaggtgttttgctgattgaaaggaagttatcttggtaaattgagactcaaagtgaaatacaaaaatgaaaatatttataataggactcgacttggagaaattgctattcttcctgttgtccaaaccataaatctgaggataacctgggcttttctctttcctcttctcctaaccagtttttcaccaagtcctgtgccatttcacctcctaacgtctgtcagctatccttttgcctttacctcaccactattaccctagagaagactttcattatttctcatctggattaccagctcgatctctaatctgcttcagttcatccttcttgctacttctaggctaaacatcaaaaacagatctggtaggggcggggaaatgagggggaagaaacaaaaacgtgatggtgcctcatgctgcttaaaatcttcagtacattgatgttttgatggcggactacataagcgttaaaaattgtgtttttcagaatctttaaaatataagacagtgctatctagtgaataaaaaaattagtttgaaagatatctggagaaatcgcattcataaaacaattggaagtgaaactattaaaacaatagggctttttaaaattaaaaatatttaaaattcaaaagtaattaatagtgttggaagatgtaggtgagaaaatattcctgaaagtagaactgaaagagacaaagagaaaagatgaaagccacagaagataaatacaggggtcaaaaccagactaacagttttagaaagtgaaaaaagttaaaaaagaaatgggggcagtgggttattagaaataacataaatggctggtatggtttgtctgtgtcctcacccaaatttcatctcgaattgtaatccccataatccccatgtgtctagggagagacctggtgggaggtgattggatcatgggggtggtttcccctacgatgttctcctgatagtgggtgagttctcacaagatctgatggttttataaagggctctgcccctttaactcctcactctttctcctgaagccttgtgaagaaggtgctttgcttcccctttgcgttcccccatgattgtaagtttcttgaggcctccctggccatgctgaactcttcagtcaattaaacactttcctttataaatt

SEQ ID NO: 24086 - protein, 46 aa, Homo sapiens; identical to SEQ ID NO: 24084

SEQ ID NO: 24087 - DNA, 3071 bp, Homo sapiens
gggttccacttgaccgctctaagccgccgcgcagcctgcgttttctccggtacaggttgaggctactaaggtatttggctattataaataaaatagtgatgaacacgtgtacaggtgtttgtacggacataagttgtcatttctcttgagtaaatacctaaaagtgggcttgctggagttttactacccttggatgctgctgttgacatggaaaagattgaggaacaatttgctaatctgcacattgttaaatgttccttaggaaccaaagagcccacttaccttcttggtatagacacatcaaagactgtccaagcaggaaaggaaaacttggttgctgttttatgttctaatggatcaatcagaatatatgataaagaaaggttaaatgtactacgagaatttagtggatatcctggacttcttaatggagtcagatttgcaaattcctgtgacagtgtatattcagcatgtactgatggcactgtgaaatgctgggatgctcgagtagccagagaaaaacctgttcagctcttcaagggttacccttccaatatttttatcagttttgatattaattgtaatgatcatattatttgtgctggtacagaaaaagttgatgatgatgcattgttggtgttttgggatgcaaggatgaattctcagaatttatctacaactaaagactcacttggtgcatattcagagacacatagtgatgatgtcactcaagtacgtttccatcccagcaatcccaacatggtagtctcaggttcatctgatggcctggtaaatgtatttgatattaatattgataatgaggaggatgcactggttacaacctgtaactcaatttcatcagtaagctgtattggttggtctgggaaaggttataaacagatttactgcatgacacatgatgaaggattttattggtgggatcttaatcatctggacactgatgaaccagttacacgtttgaacatccaggatgtcagagaagtagttaacatgaaagaagatgctttggactatttgattggtggcctatatcatgaaaagacagacacattgcatgttattggaggaacaaacaaaggaaggattcatttgatgaactgcagcatgtcaggactgacccatgtgactagccttcagggagggcatgctgctacagtccgttctttctgttggaatgtgcaagatgattctttgttgactggaggagaagatgcacagttgttactttggaaacctggagctatagagaagacctttacaaagaaagagagtatgaaaatagcatcctctgtgcaccaacgagtacgagttcatagtaatgattcttataaaagaaggaaaaagcagtgataatgcatttggcactttgtttggtaggttttatagtttcaaatagtccttcttgtttactacccatggtagacatgtttaaagctttatgtaaaaacaagccagttagcaaacagtcctggaaaaatatggtgagaatggtttaattccggtcttcacatattctaaaaaattttaaagcctctaagtataaaatcagtgagttgaaagtaaaatttcttatttaaagaacccatctgttaatgtagtaaatgttggctttaaagaaatagctccgataaggactttttagaaggaaatacttggtaaaacttaataaaacaggtggttggctgcattttttaagcccagttttttacattttaaattgtctttattgtgtataaaaccagattagactatattcttcatctgaggagcatctatatgtttaatacacctaatgtattatgctggagtatttaaatgtaagtattttaatgagtaaatagaattaaccttttttacaaatgaaatgataggcatctatgtaaagtgagaaaaatatgtttcgtaaatatttgcatctttaatattgttagtaagtagtaaacaggtgttttgctgattgaaaggaagttatcttggtaaattgagactcaaagtgaaatacaaaaatgaaaatatttataataggactcgacttggagaaattgctattcttcctgttgtccaaaccataaatctgaggataacctgggcttttctctttcctcttctcctaacgtctgtcagctatccttttgcctttacctcaccactattaccctagagaagactttcattatttctcatctggattaccagctcgatctctaatctgcttcagttcatccttcttgctacttctaggctaaacatcaaaaacagatctggtaggggcggggaaatgagggggaagaaacaaaaacgtgatggtgcctcatgctgcttaaaatcttcagtacattgatgttttgatggcggactacataagcgttaaaaattgtgtttttcagaatctttaaaatataagacagtgctatctagtgaataaaaaaattagtttgaaagatatctggagaaatcgcattcataaaacaattggaagtgaaactattaaaacaatagggctttttaaaattaaaaatatttaaaattcaaaagtaattaatagtgttggaagatgtaggtgagaaaatattcctgaaagtagaactgaaagagacaaagagaaaagatgaaagccacagaagataaatacaggggtcaaaaccagactaacagttttagaaagtgaaaaaagttaaaaaagaaatgggggcagtgggttattagaaataacataaatggctggtatggtttgtctgtgtcctcacccaaatttcatctcgaattgtaatccccataatccccatgtgtctagggagagacctggtgggaggtgattggatcatgggggtggtttcccctacgatgttctcctgatagtgggtgagttctcacaagatctgatggttttataaagggctctgcccctttaactcctcactctttctcctgaagccttgtgaagaaggtgctttgcttcccctttgcgttcccccatgattgtaagtttcttgaggcctccctggccatgctgaactcttcagtcaattaaacactttcctttataaatt

SEQ ID NO: 24088 - protein, 387 aa, Homo sapiens; identical to SEQ ID NO: 3179

SEQ ID NO: 24089 - DNA, 2033 bp, Homo sapiens
cgggagcgcggagggaagtgggaggtctggacggagtgtgcacgtgttggcagtctcgctccgccgtcggagccaccaggtcaaacctgtgctggccctggccaaagaaacttctgcgggtcaggctgctgttgccggtgcagttcccagtacttcctctggggcgtttttcaataaaagccaaacgcccttgctcattttcagggaaagacctgtttcctcctgctctttcctctccacggatactctccccaccactaaaagggtttagtataatccttttgtaggccagaaagcagattttcacttgggaagagacgacccgtagtatgggatgtggtatgataccagcaactggtctattatatcatttaaaccacatggctatctaaagaggtatttggctattataaataaaatagtgatgaacacgtgtacaggtgtttgtacggacataagttgtcatttctcttgagtaaatacctaaaagtgggcttgctggagttttactacccttggatgctgctgttgacatggaaaagattgaggaacaatttgctaatctgcacattgttaaatgttccttaggaaccaaagagcccacttaccttcttggtatagacacatcaaagactgtccaagcaggaaaggaaaacttggttgctgttttatgttctaatggatcaatcagaatatatgataaagaaaggttaaatgtactacgagaatttagtggatatcctggacttcttaatggagtcagatttgcaaattcctgtgacagtgtatattcagcatgtactgatggcactgtgaaatgctgggatgctcgagtagccagagaaaaacctgttcagctcttcaagggttacccttccaatatttttatcagttttgatattaattgtaatgatcatattatttgtgctggtacagaaaaagttgatgatgatgcattgttggtgttttgggatgcaaggatgaattctcagaatttatctacaactaaagactcacttggtgcatattcagagacacatagtgatgatgtcactcaagtacgtttccatcccagcaatcccaacatggtagtctcaggttcatctgatggcctggtaaatgtatttgatattaatattgataatgaggaggatgcactggttacaacctgtaactcaatttcatcagtaagctgtattggttggtctgggaaaggttataaacagatttactgcatgacacatgatgaaggattttattggtgggatcttaatcatctggacactgatgaaccagttacacgtttgaacatccaggatgtcagagaagtagttaacatgaaagaagatgctttggactatttgattggtggcctatatcatgaaaagacagacacattgcatgttattggaggaacaaacaaaggaaggattcatttgatgaactgcagcatgtcaggactgacccatgtgactagccttcagggagggcatgctgctacagtccgttctttctgttggaatgtgcaagatgattctttgttgactggaggagaagatgcacagttgttactttggaaacctggagctatagagaagacctttacaaagaaagagagtatgaaaatagcatcctctgtgcaccaacgagtacgagttcatagtaatgattcttataaaagaaggaaaaagcagtgataatgcatttggcactttgtttggtaggttttatagtttcaaatagtccttcttgtttactacccatggtagacatgtttaaagctttatgtaaaaacaagccagttagcaaacagtcctggaaaaatatggtgagaatggtttaattccggtcttcacatattctaaaaaattttaaagcctctaagtataaaatcagtgagttgaaagtaaaatttcttatttaaagaacccatctgttaatgtagtaaatgttggctttaaagaaatagctccgataaggactttttagaaggaaatacttggtaaaacttaataaaacaggtggttggctgc

SEQ ID NO: 24090 - protein, 46 aa, Homo sapiens; identical to SEQ ID NO: 24084

SEQ ID NO: 24091 - DNA, 1764 bp, Homo sapiens
caggttgaggctactaaggccagaaagcagattttcacttgggaagagacgacccgtagtatgggatgtggtatgataccagcaactggtctattatatcatttaaaccacatggctatctaaagaggtatttggctattataaataaaatagtgatgaacacgtgtacaggtgtttgtacggacataagttgtcatttctcttgagtaaatacctaaaagtgggcttgctggagttttactacccttggatgctgctgttgacatggaaaagattgaggaacaatttgctaatctgcacattgttaaatgttccttaggaaccaaagagcccacttaccttcttggtatagacacatcaaagactgtccaagcaggaaaggaaaacttggttgctgttttatgttctaatggatcaatcagaatatatgataaagaaaggttaaatgtactacgagaatttagtggatatcctggacttcttaatggagtcagatttgcaaattcctgtgacagtgtatattcagcatgtactgatggcactgtgaaatgctgggatgctcgagtagccagagaaaaacctgttcagctcttcaagggttacccttccaatatttttatcagttttgatattaattgtaatgatcatattatttgtgctggtacagaaaaagttgatgatgatgcattgttggtgttttgggatgcaaggatgaattctcagaatttatctacaactaaagactcacttggtgcatattcagagacacatagtgatgatgtcactcaagtacgtttccatcccagcaatcccaacatggtagtctcaggttcatctgatggcctggtaaatgtatttgatattaatattgataatgaggaggatgcactggttacaacctgtaactcaatttcatcagtaagctgtattggttggtctgggaaaggttataaacagatttactgcatgacacatgatgaaggattttattggtgggatcttaatcatctggacactgatgaaccagttacacgtttgaacatccaggatgtcagagaagtagttaacatgaaagaagatgctttggactatttgattggtggcctatatcatgaaaagacagacacattgcatgttattggaggaacaaacaaaggaaggattcatttgatgaactgcagcatgtcaggactgacccatgtgactagccttcagggagggcatgctgctacagtccgttctttctgttggaatgtgcaagatgattctttgttgactggaggagaagatgcacagttgttactttggaaacctggagctatagagaagacctttacaaagaaagagagtatgaaaatagcatcctctgtgcaccaacgagtacgagttcatagtaatgattcttataaaagaaggaaaaagcagtgataatgcatttggcactttgtttggtaggttttatagtttcaaatagtccttcttgtttactacccatggtagacatgtttaaagctttatgtaaaaacaagccagttagcaaacagtcctggaaaaatatggtgagaatggtttaattccggtcttcacatattctaaaaaattttaaagcctctaagtataaaatcagtgagttgaaagtaaaatttcttatttaaagaacccatctgttaatgtagtaaatgttggctttaaagaaatagctccgataaggactttttagaaggaaatacttggtaaaacttaataaaacaggtggttggctgc

SEQ ID NO: 24092 - protein, 46 aa, Homo sapiens; identical to SEQ ID NO: 24084

SEQ ID NO: 24093 - DNA, 1707 bp, Homo sapiens
gggttccacttgaccgctctaagccgccgcgcagcctgcgttttctccggtacaggttgaggctactaaggtatttggctattataaataaaatagtgatgaacacgtgtacaggtgtttgtacggacataagttgtcatttctcttgagtaaatacctaaaagtgggcttgctggagttttactacccttggatgctgctgttgacatggaaaagattgaggaacaatttgctaatctgcacattgttaaatgttccttaggaaccaaagagcccacttaccttcttggtatagacacatcaaagactgtccaagcaggaaaggaaaacttggttgctgttttatgttctaatggatcaatcagaatatatgataaagaaaggttaaatgtactacgagaatttagtggatatcctggacttcttaatggagtcagatttgcaaattcctgtgacagtgtatattcagcatgtactgatggcactgtgaaatgctgggatgctcgagtagccagagaaaaacctgttcagctcttcaagggttacccttccaatatttttatcagttttgatattaattgtaatgatcatattatttgtgctggtacagaaaaagttgatgatgatgcattgttggtgttttgggatgcaaggatgaattctcagaatttatctacaactaaagactcacttggtgcatattcagagacacatagtgatgatgtcactcaagtacgtttccatcccagcaatcccaacatggtagtctcaggttcatctgatggcctggtaaatgtatttgatattaatattgataatgaggaggatgcactggttacaacctgtaactcaatttcatcagtaagctgtattggttggtctgggaaaggttataaacagatttactgcatgacacatgatgaaggattttattggtgggatcttaatcatctggacactgatgaaccagttacacgtttgaacatccaggatgtcagagaagtagttaacatgaaagaagatgctttggactatttgattggtggcctatatcatgaaaagacagacacattgcatgttattggaggaacaaacaaaggaaggattcatttgatgaactgcagcatgtcaggactgacccatgtgactagccttcagggagggcatgctgctacagtccgttctttctgttggaatgtgcaagatgattctttgttgactggaggagaagatgcacagttgttactttggaaacctggagctatagagaagacctttacaaagaaagagagtatgaaaatagcatcctctgtgcaccaacgagtacgagttcatagtaatgattcttataaaagaaggaaaaagcagtgataatgcatttggcactttgtttggtaggttttatagtttcaaatagtccttcttgtttactacccatggtagacatgtttaaagctttatgtaaaaacaagccagttagcaaacagtcctggaaaaatatggtgagaatggtttaattccggtcttcacatattctaaaaaattttaaagcctctaagtataaaatcagtgagttgaaagtaaaatttcttatttaaagaacccatctgttaatgtagtaaatgttggctttaaagaaatagctccgataaggactttttagaaggaaatacttggtaaaacttaataaaacaggtggttggctgc

SEQ ID NO: 24094 - protein, 387 aa, Homo sapiens; identical to SEQ ID NO: 3179

SEQ ID NO: 24095 - DNA, 836 bp, Homo sapiens
ctatagctccaggtttccaaagtaacaactgtgcatcttctcctccagtcaacaaagaatcatcttgcacattccaacagaaagaacggactgtagcagcatgccctccctgaaggctagtcacatgggccaccaatcaaatagtccaaagcatcttctttcatgttaactacttctctgacatcctggatgttcaaacgtgtaactggttcatcagtgtccagatgattaagatcccaccaataaaatccttcatcatgtgtcatgcagtaaatctgtttataacctttcccagaccaaccaatacagcttactgatgaaattgagttacaggttgtaaccagtgcatcctcctcattatcaatattaatatcaaatacatttaccaggccatcagatgaacctgagactaccatgttgggattgctgggatggaaacgtacttgagtgacatcatcactatgtgtctctgaatatgcaccaagtgagtctttagttgtagataaattctgagaattcatccttgcatcccaaaacaccaacaatgcatcatcatcaactttttctgtaccagcacaaataatatgatcattacaattaatatcaaaactgataaaaatattggaagggtaacccttgaagagctgaacaggtttttctctggctactcgagcatcccagcatttcacagtgccatcagtacatgctgaatatacactgtcacaggaatttgcaaatctgactccattaagaagtccaggatatccactaaattctcgtagtacatttaacctttctttatcatatattctgattgatccattagaacataaaac

SEQ ID NO: 24096 - protein, 41 aa, Homo sapiens
MIITINIKTDKNIGRVTLEELNRFFSGYSSIPAFHSAISTC

SEQ ID NO: 24097 - DNA, 696 bp, Homo sapiens
gaagagaatgatcatgaagggcaaatggcagtgaagcaagaagagctggcttcaggctcagaagagaatgctgtgcctcttcctcatggtttgcggtgccctgcatgttcagagaaacttctctaatggagtctcgctctgttgcccaggctggaatgcagtggcgtgatctcagctctctgcaacctccgcctcccaggttcacgccattctcctgcctcggcctcccgagtagctgggactacaggctggactttggtggcacaatctcagctcactgcaacctccacctcaagttgtcctccccacttcagcctcctgagtaactgggactacaagcgtgcatcaccatgcccagctaggctaagttttgtattttttgtagacaaggttttgtcatgttgccaaggctggtttccaacttctgagctcaagcaatccacctgcctcagcctcccacagtgttgggattacagctgtgagccactgtgaccggctgggctatttcttttctatgcaataaaaattgtgtcatgaaatgacagggtccgcagttgcagtgcttgaagccattgttctaaaagagatataactccaaatcggaacactttggaatataagaatagctggagaagaagatacagataattatgaaaaagaatacagttgaacattcaactataaaatggtagggaa

SEQ ID NO: 24098 - protein, 73 aa, Homo sapiens
MFRETSLMESRSVAQAGMQWRDLSSLQPPPPRFTPFSCLGLPSSWDYRLDFGGTISAHCNLHLKLSSPLQPPE

SEQ ID NO: 24099 - DNA, 3339 bp, Homo sapiens
gccgtcacccggcagactccggagggtagagcgctgtgccggttccgctgccgctggccaggagcgcggggacagttcggggctgcgccggaggccggcccgccttcccgggggttccgttatcatgtcgctgaggcagcgcctggcccagctggttggccgtctgcaggacccgcagaaagtggcccgtttccagcggctgtgcggggtggaagcgccgccgcgccgctcagcagaccggagggaggatgagaaagcggaggcgcctctcgccggagaccctcgactgcgagggcggcagccaggggcgcctggaggcccccagcctcccgggagcgaccgcaatcagtgcccggccaagccggacggcggcggcgcccccaacggcgtgcggaacgggctggcggccgagctgggcccggcctcgccgcggcgcgcgggcgctctgcgccgcaactcgctgacgggcgaggagggccagctggcccgcgtgagcaactggccgctctactgcctgttctgcttcggcacggagctgggcaacgaactcttctacatcctgttcttccccttctggatctggaacctggaccctctggtgggccggaggctcgtggtcatctgggtgctggtcatgtacctgggccagtgcaccaaggacatcatccgctggccgaggcccgcctcgccgcccgtggtcaagttggaggtcttctacaactctgagtacagcatgccctccacccatgccatgtccggcaccgccatccccatttctatggtcctcctcacctatggccgctggcagtaccctcttatatatggactgattcttattccctgctggtgttctctagtttgcctaagtagaatttacatgggaatgcactctattctggatattattgctggattcctatataccattttaatcttagctgtcttctatccatttgtggacctgattgacaacttcaaccaaactcacaaatatgctccattcatcatcatcgggcttcatttagctttggggatcttttctttcactcttgacacctggagcacatcccgaggagacacagccgagatactaggaagtggtgctggaattgcatgtggatctcatgttacttataacatgggtctagtattagatccttctctagatacattacctttagctgggccccccattactgtgactctgtttggaaaagccatattgcggatcctcatagggatggtatttgtactaataatcagagatgtaatgaaaaagatcaccattcctttagcctgcaaaatcttcaatataccgtgtgatgatattcgaaaagcaagacagcacatggaagttgaacttccttatcggtatattacctatggaatggttggtttctccatcacattttttgttccttacatatttttctttattggtatctcttgatggagaagtattgtttatgataagaaaggagggtatcagttactgatacccaaaaatatattccaggtaaagccaggtcagaattaggcttttgcaggaatttaacttaaataattatttaagtaaattcataagagtcagtgcattttatcattgcacatccagatactgttttaggtgagctgagctatttcgttactgagaaaatgataagtatccatttagaatgttcatgtaatgtttggagagttttgtattatggattcaacttatatataatatatataaggtacataatatgcaattatatatctgatatatattatatataaaataatatacctaagtgtttttttaaactatgggagtgtattataaaatcaataataatatgcaaacagttgtgcctgtgtatttgaactacatacaggtatgttgttattaacagatatatttaacatttatttactatgggagccatttcctaattgaattgcgtaattactagaccagaatgcatatgctactatacattgatttactgcctgtttttacactgccattacctttcatgttatccatgatgttgaacatgggaggcatttttaatggaccaaatttttagaaaaattagtttttggatttttttttaagttctgtatactgttttgaatgaactttatttgcagctattctggatgtcagtttaataattcaggtactgaattttattgcttgctaattgtgcctttccgttgctaaattaagaaatgctatgtgtactgtgatgtaaaaataagacattaactttatcttaagttacatataatcaagcaaatattttaaaaaatgtatgtcagggtgacaggcataaaagtaaattacccttaactctttagcctttatttagaaagaaatgtggaatgggctaaactttctcaccaatttattagaaagctaaatggataaatacttccctttttgtagatatttttctgtgcattgtaagttataggagcaggacatattttttgtacattgtcttgattgtttatactgcaggtaggtatttccagtgaatggaaacgttgaaatttatagatgggacaatgcacatacttcatatgtaaacaaagcatttttctaaataatttggaaaggattggatttagcaccgttaacttttaatacccatttattggctatttaaggtaaattataaaacctaaaattagtatcagtattttagatcctattattttttcaactttctattattttcacagtggaaaatttgcgtatagtattaaactattcttttttctgtctacctttatattttgaagtgtggttgtacttacgttaatagtaagtgtatttgtagaaagtttttcataaagaagagattaactttccatataaataaataccaggtatgaaattactgattttagtgcaatatctgtatgattatccagaactatcacttcagatgtttctattttgggcaccataactatttgagctcatatttttataattctgattgagaatttaggggcatggtaatttttaccaaaactgaagctggtaattttaagtaaagcaactaaatttaccctttacttattagttaaaaggaaaccaaggcatgtaggaaaatattggtacgttggaaaatgtgaaaagagctttactttcaaaatgtatgtttaatgaattgaattttagggaccgtttcccataatttgggcctatgctatcctgttgatttttatgtctagcttaaaaggtatttgaaaatgttccatttgtgttttattattttctgtcctatgacagttctatgctaaatgtattttaaaataaaagccaaattgaagattaaa

SEQ ID NO: 24100 - protein, 441 aa, Homo sapiens; identical to SEQ ID NO: 3183

SEQ ID NO: 24101 - DNA, 428 bp, Homo sapiens
aggcacagtaaaaaaaaatatcactttatctgttatttcctttagccattaagatctgtagtcttttttgtctgcttactgatgaaattcttttttactttgacacttagaagttcagaattctgttattcaatggggagtaaatatgaaagtcatcatgtagtcagaactggatcaagtgttccccaaaataaaggaaaaggtaagactgtcagtaactactaaggacagaatccttctgtatactaatgtttaaagaacaaaaagaggaagatacgctcttgtgtgggaaatgcagcaaaaaataaatggtgaaaggtgaaccaggagagtatgaagctatgactatcgagggtatttagagtttcaaggagaaagtgagggaccatgttaaatgtagtagatatgtaaaaaaaacaacaacaacc

SEQ ID NO: 24102 - protein, 47 aa, Homo sapiens [sequence omitted]

SEQ ID NO: 24103 - DNA, 809 bp, Homo sapiens
aaatagcaaataatgaaagtgggtcagatttggggaaagtggcaacggcatggagatgacttcagttttaggtatttcgagtttgaagtgtctataagtcatctggagctgtccaggagatggttctatacatgaagatcaggaccagtttcttgtcatcagcatataggtgcaaaatgagtacacacagaagaagagagggtctgctgggcacagtggtgcaggtctgtaatcccagaactttgggaggctgagaatggtggattgcttgagcccaggagctcgaaaccagcttgggcaacatgagcaagaccctccctcaaaaaaacaaacaaaaaataagtaaaaaatacaaaaaaattaaaaatgttctgttttcatacgcacatgtctgcctcactcatagttttatttttataaattcaagcacacagtagagactctctttctgactttatttgcagctacttttagaaaaaagaatctgactggctcagcacagccaatggttttgcttccctagtgccaagtgttcattcctgatccaagtagctgtggtcaagggagcaggatcacaggggatgagcatgtctccagggccacactgctgggtccaagtgggggaagttttcagaagagaggggtgtagattggacagtatcataaaatgaatgtagtacagagggaagccagaagtgaaagtaagagagagggtgtttctagaaaagaaaagtagttaacattgttattctgctaagagaacaagcaagataagtactgaaatttatagaagacttagaaaataaatt

SEQ ID NO: 24104 - protein, 44 aa, Homo sapiens
MSKTLPQKNKQKISKKYKKIKNVLFSYAHVCLTHSFIFINSSTQ

SEQ ID NO: 24105 - DNA, 616 bp, Homo sapiens
gcaaattacagcctctttggcttctgaggatactagtctttctccccttaactcagggaaactgctggactcagttttgattcttcctcctgtgctacagcctgggcaacagagcaagaccctccctcaaaaaaacaaacaaaaaataagtaaaaaatacaaaaaaattaaaaatgttctgttttcatacgcacatgtctgcctcactcatagttttatttttataaattcaagcacacagtagagactctctttctgactttatttgcagctacttttagaaaaaagaatctgactggctcagcacagccaatggttttgcttccctagtgccaagtgttcattcctgatccaagtagctgtggtcaagggagcaggatcacaggggatgagcatgtctccagggccacactgctgggtccaagtgggggaagttttcagaagagaggggtgtagattggacagtatcataaaatgaatgtagtacagagggaagccagaagtgaaagtaagagagagggtgtttctagaaaagaaaagtagttaacattgttattctgctaagagaacaagcaagataagtactgaaatttatagaagacttagaaaataaatt

SEQ ID NO: 24106 - protein, 80 aa, Homo sapiens
QITASLASEDTSLSPLNSGKLLDSVLILPPVLQPGQQSKTLPQKNKQKISKKYKKIKNVLFSYAHVCLTHSFIFINSSTQ

SEQ ID NO: 24107 - DNA, 496 bp, Homo sapiens
aactatgcaagccagaaggcaatggtacaacatagtactaaaagtgccaaaagtagccgggcacagtggtttacaactgtaatcccaacactttaggaggctgagccaccacgcctggccacataaaaattatttttttttaatttaagaaaaattattttgaggaatatcaataaatttgataacatactgcaacactgaaagcataggaaaccagatactctcatacatttccaggatgaatgtaaattagtacaatctttatgacaggcaattttacgttatctgttaaaatttaaatgcctatattctttgacatagtaatgtgttccagtaaacagtcactgtgtcattacactagcaaacaattggaaaactaaaggtattggaatatttcttgaggggagcgctgggaaaataaataaataaatgtatagaaatagtcaacttattaaattatgtcatattaatatattggaacagcatgcaaatgtga

SEQ ID NO: 24108 - protein, 34 aa, Homo sapiens
CVPVNSHCVITLANNWKTKGIGIFLEGSAGKINK

SEQ ID NO: 24109 - DNA, 3173 bp, Homo sapiens
gccgggagcccatggagcactgtcctcagagatgcgcaggttaggctcactgtctaggccaggcccaccttagtcactgtggactggcaatggaagctcttcctggacacacctgccctagccctcaccctggggtggaagagaaatgagcttggcttgcaactcagaccattccacggaggcatcctccccttcctgggctggtgaataaaagtttcctgaggtcaaggacttccttttccctgccaaaatggtgtccagaactttgaggccagaggtgatccagtgatttgggagctgcaggtcacacaggctgctcagagggctgctgaacaggatgtcctcggacgacaggcacctgggctccagctgcggctccttcatcaagactgagccgtccagcccgtcctcgggcatcgatgccctcagccaccacagccccagtggctcgtccgacgccagcggcggctttggcctggccctgggcacccacgccaacggtctggactcgccacccatgtttgcaggcgccgggctgggaggcaccccatgccgcaagagctacgaggactgtgccagcggcatcatggaggactcggccatcaagtgcgagtacatgctcaacgccatccccaagcgcctgtgcctcgtgtgcggggacattgcctctggctaccactacggcgtggcctcctgcgaggcttgcaaggccttcttcaagaggactatccaagggaacattgagtacagctgcccggccaccaacgagtgcgagatcaccaaacggaggcgcaagtcctgccaggcctgccgcttcatgaaatgcctcaaagtggggatgctgaaggaaggtgtgcgccttgatcgagtgcgtggaggccgtcagaaatacaagcgacggctggactcagagagcagcccatacctgagcttacaaatttctccacctgctaaaaagccattgaccaagattgtctcatacctactggtggctgagccggacaagctctatgccatgcctccccctggtatgcctgagggggacatcaaggccctgaccactctctgtgacctggcagaccgagagcttgtggtcatcattggctgggccaagcacatcccaggcttctcaagcctctccctgggggaccagatgagcctgctgcagagtgcctggatggaaatcctcatcctgggcatcgtgtaccgctcgctgccctatgacgacaagctggtgtacgctgaggactacatcatggatgaggagcactcccgcctcgcggggctgctggagctctaccgggccatcctgcagctggtacgcaggtacaagaagctcaaggtggagaaggaggagtttgtgacgctcaaggccctggccctcgccaactccgattccatgtacatcgaggatctagaggctgtccagaagctgcaggacctgctgcacgaggcactgcaggactacgagctgagccagcgccatgaggagccctggaggacgggcaagctgctgctgacactgccgctgctgcggcagacggccgccaaggccgtgcagcacttctatagcgtcaaactgcagggcaaagtgcccatgcacaaactcttcctggagatgctggaggccaaggcctgggccagggctgactcccttcaggagtggaggccactggagcaagtgccctctcccctccaccgagccaccaagaggcagcatgtgcatttcctaactcccttgccccctcccccatctgtggcctgggtgggcactgctcaggctggataccacctggaggttttccttccgcagagggcaggttggccaagagcagcttagaggatctcccaaggatgaaagaatgtcaagccatgatggaaaatgccccttccaatcagctgccttcacaagcagggatcagagcaactccccggggatccccaatccacgcccttctagtccaacccccctcaatgagagaggcaggcagatctcacccagcactaggacaccaggaggccagggaaagcatctctggctcaccatgtaacatctggcttggagcaagtgggtgttctgcacaccaggcagctgcacctcactggatctagtgttgctgcgagtgacctcacttcagagcccctctagcagagtggggcggaagtcctgatggttggtgtccatgaggtggaagctgcttttatacttaaaactcagatcacaacaggaaatgtgtcagtaacaatggaactccatccaatgggaaagttcctggtactgaaggggtccattggacactcagaaaagaagttcaggggccaacttcttagctggaatcctggccagatgaggaccctctccggggaagggagaggactgacttagtggaaggtggtgaagtgaggagagtttaggggaaccttcccccagtggaacagatctcaagtttaccctaaacctgccatttctggaaaatctgtaaagaggaaacagcctgtctcagctgtactctcatgatacaggtcatttgaaatgaaccaagaaataaaacatgaaaatccaaccatggagaaggtggtatggctgggttttgtttggtccccttgtccttatacgttctaaagtttccagactggctttgtcactttgtgaactcgtcatgtgtgaaaaccaatctttgcatatagggaacttcctcgggccacactttaagaaccaagtaagaggctctcaagactccagcagagtcgggaggccatggcagcgccttagaggagctggaacctgcacccacctgtgtcggtggggggggcctcctttccccatagactctgccctccctctgtgcagatggaagtggcaggggagggtgaccagcttgtgacaagaagactgaagggtccagagtccatgctcacggaacagcaccaaagaaaagcactatgtggaaagattgttttattttctaataatgataatatggctggaatggcttcttaagatgtatatattttttaaaatggcagttccccattgcagcatcacctacttgtatgtctttctgcctctgtatatgttctcccagaaacccccatgtaaatcaaatgccctaggatgcttccatcctggtcccatgtatctggaatctaataaataaggaaaggaactattg

SEQ ID NO: 24110 - protein, 500 aa, Homo sapiens; identical to SEQ ID NO: 3185

SEQ ID NO: 24111 - DNA, 731 bp, Homo sapiens
ccccgccgtctttctctaccaactgggaatgctaaaacgggactgatggacgtgtccgaactctgcatcccggaccccctcggctaccacaaccagctgctgaacaggatgtcctcggacgacaggcacctgggctccagctgcggctccttcatcaagactgagccgtccagcccgtcctcgggcatcgatgccctcagccaccacagccccagtggctcgtccgacgccagcggcggctttggcctggccctgggcacccacgccaacggtctggactcgccacccatgtttgcaggcgccgggctgggaggcaccccatgccgcaagagctacgaggactgtgccagcggcatcatggaggactcggccatcaagtgcgagtacatgctcaacgccatccccaagcgcctgtgcctcgtgtgcggggacattgcctctggctaccactacggcgtggcctcctgcgaggcttgcaaggccttcttcaagaggactatccaagggaacattgagtacagctgcccggccaccaacgagtgcgagatcaccaaacggaggcgcaagtcctgccaggcctgccgcttcatgaaatgcctcaaagtggggatgctgaaggaaggtgtgcgccttgatcgagtgcgtggaggccgtcagaaatacaagcgacggctggactcagagagcagcccatacctgagcttacaaatttctccacctgctaaaaagcc

SEQ ID NO: 24112 - protein, 227 aa, Homo sapiens
MDVSELCIPDPLGYHNQLLNRMSSDDRHLGSSCGSFIKTEPSSPSSGIDALSHHSPSGSSDASGGFGLALGTHANGLDSPPMFAGAGLGGTPCRKSYEDCASGIMEDSAIKCEYMLNAIPKRLCLVCGDIASGYHYGVASCEACKAFFKRTIQGNIEYSCPATNECEITKRRRKSCQACRFMKCLKVGMLKEGVRLDRVRGGRQKYKRRLDSESSPYLSLQISPPAK

SEQ ID NO: 24113 - DNA, 439 bp, Homo sapiens
atccccaagcgcctgtgcctcgtgtgcggggacattgcctctggctaccactacggcgtggcctcctgcgaggcttgcaaggccttcttcaagaggactatccaagggaacattgagtacagctgcccggccaccaacgagtgcgagatcaccaaacggaggcgcaagtcctgccaggcctgccgcttcatgaaatgcctcaaagtggggatgctgaaggaagagctgtgctgtctaatatggcaaccaccagccacacgtggctcccgagtgctggtccaaacagaggtgtgctgagtgtacaacacatgcctgctttagaggacttaataggaccataaaaggcagtgtaaagtctggtggtgatccttttaaaaatgtgattgcatgcagaaaggctaatcttctggacatgttaaataaaacatattgtgaaatt

SEQ ID NO: 24114 - protein, 48 aa, Homo sapiens
MPQSGDAEGRAVLSNMATTSHTWLPSAGPNRGVLSVQHMPALEDLIGP

SEQ ID NO: 24115 - DNA, 632 bp, Homo sapiens
gaaacagcagcagctggaagtcaagaggagtgctctgtggaggaacacacccacaggcaccagcatgccggcaggccactgactggcaaaacaacgcggtgtttggctggggcagtcggaggagcgctcgggccgccaagcagaccgactccagggaaaaccatctcccttctggctcccccatctgctaagagccatgtaagatatgcctgcttcccctttgccttctgccgtgattgaaagcttcctgaggcctccccagaaggcaagcagatgccaacatcatgcttcctgtacagcctgtggaactgccctcccctctgcttctcactggtcctgagtgtgtcctggaataacatgtgggctgtgctatccggtgttgtgtgtgtcacagatgcaattcaaaatcctaaggctggaaaaccattacttaaaaaaaaaaaaaaaaaaagactagccagcctgctttctgagcatctacttgatagcaagagggcctcatgctcaacccctccgtgctgggaaggaagcattcccctcatcaaggactgcggctctctggaataagcaacgtgtgttccctcttgggggtcagccaaggccctgaacatcacaaactcctcctccacctc

SEQ ID NO: 24116 - protein, 97 aa, Homo sapiens
MPTSCFLYSLWNCPPLCFSLVLSVSWNNMWAVLSGVVCVTDAIQNPKAGKPLLKKKKKKRLASLLSEHLLDSKRASCSTPPCWEGSIPLIKDCGSLE

SEQ ID NO: 24117 - DNA, 1763 bp, Homo sapiens
gcagcacgcagccccggttcccgcccgtgcctctccctccacacctccctgcaggctgagggagccggctccggtctcggccatcccaggaaggggctcccacagtgcagcggcgggctgaagggctcctcaagcgtggccagagtgggcgccaaggccgaggaggcgccaagagggagcgagggctgtgaggactgacagcacgctgtcacctcgtctctacttaggtgaatgatgcctttggcctgcttatgtcttccatagccacaatgaatacagttgcagaaactctcactctttatggaaaatagaagggaatatgtacaagaaacaattactgtatgcagataaggcagatggtgtctttgacatttcatcaaggcagcagcatctgaaagtttttcaagaaactgccaaactgttctccagagtatttgtaccattttacgtttccaccagcaatatacaagtggatctcactctgtcacccaagctggagtgcactggcatgatattggctcactgcaacctctgccttctgggttcaggtgattctcctacctcagcctccccagtagctggaactacaggcatgcaccaatttttgtatttttagtagagacggggtttttccatgatgcccaggctgttggcttttactttgcctttccataatcatcttgtatgtgtgagatacatacatatatatgtgtatatatgtatacataattgtatatgtctatatatataaccttattatatataattttataatataatcttcatctaattttgatggaaattacattaaacttgtgtaacaattcaggaagaactgatatatttacacctcttgagaccaaatctggaacatggtgtatctttccatttatttaagccttctttgatttcctcaacatttcttcttcaataaaaacattgtagtttttgttatataaattctgtatctgttttgttacatttgaacctaaacatttaattttttgagtaattctgaaatgatattgcatttctaattgtttctcatatattctttgctaatatgtaaaaaaacaatttttttatgtttatcttgtatcctgtgaccttattgaagtcactttttagttctgagagtccctttgtagatttcttgagattttctacagagacaatcataccatttgcaaatagaaacagttctattcctacctttctaatacataagcattcatctccttcatctatcatacttgccaaaacttccagcagatgtctttactttgtttcttctgtttacccaagacagtctttctgtctttttctttctttctttctttcttttttagcttttcttgttattgtttctatatgctctttatcaagttaagaaagtcctcctctgtctctatgtttcttggaatatatataatgaatggatgttaaattttgtcaaatactttttcttgactgatattatcatgtgatttttctttaacttgttaatatgttagattacattgatctttgaatattgtaccagccttgcattcttgtaataaactttatttggttacagtgtataatcaaatatagtgagttatttgaattgaatttgaattgttatagttgaattgtttttgttaatatttcattaaggattttgtttctatgtataatagggatatttttctgtagattttgtttcgttttggtttttaagtatcagagtaatgccagcttcttaaataaattgtgaagtg

SEQ ID NO: 24118 - protein, 98 aa, Homo sapiens; identical to SEQ ID NO: 3187

SEQ ID NO: 24119 - DNA, 605 bp, Homo sapiens
aaagtgaaaaatgattattacaaatgaaataataatttcccctgtgtaagttccgccttctgtcccctccattctgatgaaattggctcataccccctttgttactctctgtaccctgaacctctatcccagctccagaaattatttattatacatatatttctatatgtagctctctatatttagtgaggtttttcaagggttggatcaaattttatttgcctctattttccaatacctagcagaacagaagcatatcccaacttgtccggtcaagggaatcatcctctggagtgcttttggtgaattacacaatatccaccagcctttatgagaagttattttgttggcagagggctgctctgacatcctgtgcacctgagaggcaaggaagaccacctgaaagagaagaaatatagatgccccagagagactgtcttttctacaggatttggaaaatgaaccacaaatccaaatacccccacagaggcagaatgctaaaaaccttcatctcagattgacacagtttagagatttgaaagcccacttctccttttaccatgtcaaattataacaggaaaaataaaatgctgatttgagtctct

SEQ ID NO: 24120 - protein, 33 aa, Homo sapiens
MPQRDCLFYRIWKMNHKSKYPHRGRMLKTFISD

SEQ ID NO: 24121 - DNA, 4417 bp, Homo sapiens
gggcccgcagatctctctggttcccctctctgccccgtctccagcttttttgcagggcacaaaacagcttctgctagcaaacgtgtcctgccagacacgtggagaaatagaaagttgatggccccagtgaatgggacacagacagccaagaactgcacagatcctgcgattcacgagttccccacagatctgttctccaataaggagcgacagcacggagccgtcctgctgcacatccttggtgctctgtatatgttctatgccttggccatagtgtgcgatgacttctttgttccgtctctagagaagatctgtgagagactccatctgagcgaagatgtggctggagccaccttcatggctgcaggaagctcaacgccagagctgtttgcgtctgttattggggtgttcatcacccatggggacgtcggggtgggcaccatcgtgggctctgctgtgttcaacatcctgtgcataattggagtgtgcggactgtttgctggccaggtggtccgtctgacgtggtgggccgtgtgccgagactccgtgtactacaccatctctgtcatcgtgctcatcgtgttcatatatgatgaacaaattgtgtggtgggaaggcctggtgctcatcatcttgtatgtgttttatattctgatcatgaagtacaatgtgaagatgcaagcctttttcacagtcaaacaaaagagcattgcaaacggtaacccggtcaacagtgagctggaggctggtaatgatttctatgacggtagctatgatgacccttccgtgccattgctggggcaagtgaaggagaagccacagtatggcaagaaccccgtggtgatggtggacgagattatgagctccagccctcccaagttcaccttccctgaagcaggcttacgaatcatgatcaccaataagtttggacccaggacccgactacggatggccagcaggatcatcattaatgagcggcagagactgatcaactcggccaatggtgtgagcagtaagccgcttcaaaacgggaggcacgagaacattgagaacgggaatgttcctgtggaaaaccccgaagaccctcagcagaatcaggagcagcagccgccgccacagccaccaccgccagagccagagccggtggaggctgacttcctgtcccccttctccgtgccggaggccagaggggacaaggtcaagtgggtgttcacctggcccctcatcttcctcctgtgcgtcaccattcccaactgcagcaagccccgctgggagaagttcttcatggtcaccttcatcaccgccacgctgtggatcgctgtgttctcctacatcatggtgtggctggtgactattatcggatacacacttgggatcccggatgtcatcatgggcattactttcctggcagcagggacaagtgttccagactgcatggccagcctaattgtggcgagacaaggccttggggacatggcagtctccaacaccataggaagcaacgtgtttgacatcctggtaggacttggtgtaccgtggggcctgcagaccatggttgttaattatggatcaacagtgaagatcaacagccgggggctggtctattccgtggtcctgttgctgggctctgtcgctctcaccgtcctcggcatccacctaaacaagtggcgactggaccggaagctgggtgtctacgtgctggttctctacgccatcttcttgtgcttctccataatgatagagtttaacgtctttaccttcgtcaacttgccgatgtgccgggaagacgattagcgctgagtcgcggcccctgggagctgatctggacaccctgtgacactggcgttctcctctcccctccttcccccaccacaggtctctcctgcataggcagccactgtccgttctttcacacactggaaggaagagccatcgtggtctttgtctggccacaggccaggctgctgggcatcctcctcctccttggagttccgcccctgcaaggctggatttgggggccattatctgagcagcttcaaagacccctgagctgccaaccacggagatgtgccaagcatctcatctctcctgcacactttagtcagaaggacttctgcatgcagtttgtctttctgttctgcaggcagcttcagaattgaggtcatttgtgagcacaagatctcatagggcaggtgcaaaataggaatgttgttctcaagtgtcacctccagcccagaggtggttccttaggcagcatgtgctcctgggagcctctgacttttgctggaagcagccacagtttggaaggggcaagacctcaacctgttggggtttagggcccatgatggcagacattctaccccttttcctggaaaaactggaagaatgaaaataatttttttctgtggaagagagaaaatgagtgaatattcttctcacttttattgatgcattcagagaataagcaatgaaatattaaaaaatgaaacatcatataggtcatcatacttgaaaattatcattccatatgaaaggatcatgatacacaccaaaaaagtaatgatcgtaaagacacaaatcctctgtatgccatcttgcattggcactgaggtgtttggtttggaatagggaaaaaggtaagagactaacgtggaaaggtgctaactcagagactggagattatagtttacagctgtactttccagatcttctatgtgacacaatgcactgtccttgtgggtttgtcatttattggttaatgctctagtttcaaaaccaccctgttgaaagttccagttatttatatgcccaacaaatttcatagcctgctgaactgaactgagtgtgtcagaagtgctggttaatgacgagaagagattgcctgaaaaacaacaaactgctttctggttagctgaaggcaagtgtgaaaatcagaatttagaatatttagagctaagcttctggaaccacgtagtttctacacgtggcaggccaagaatgggaggctgactcaaaactagatagaaaaatataaaataatcttcgaccacttgatagctctcaaatatatatttaaaagatttatgaatacaaaccatttatggtttatgatttctaaaaagaaagcacaattaattttatagagaggttttttatttttttaatatttctattgcaaaagtctatccgatttgatgcactttgaatattgagatattttgcacggatgaatgtatgggaactacccatgatgatgtaagaggaaagaacatttttttgtgattcaccagacatcactttaaacttggtgatgagtttaaatccagtagctaatcccttcctgagactcaaagatcgtgacgctggttggaatttctgactgtgccctttagggcctcctgagtttcaaaaggaggaagtgttcgtgcttgtgtccctgaagttccctgttgcatgagcctgcgacaggacctcacccccaccaccaggcttctatttgggattcacatcagtattagtatcgtagctacaccaagttcaggcttctctttttgtttttttacctagaaattgggctcagtggtcttcaacttgaggacgagggtgattttcctaagaaatcagcaaagagggaaggcagggcccctgtagattcaccagtataaacttcagctgcagggattccagagccctcgggaccactctgtcaccttaatagccaagttctcctggttcctccgatcttacaggctcatccaggttccaaagtgcttctgtctctgttttgattctccaaactgctctgtgatgtatgtagggattattctccccacttaacagaaagtagtgtcttggagaggtcaagggtctctagttcaatggccagtcatagcagaagggaggccaagcaccagtccatcacccctcccaggccagcctctgtaagttggccacacttggggagtgagtgtgggtatgactttaccctcctggttggttcttactgtttgagtcaaaacctcatcaatatatcattgactcctgggttcctcaggtcatttcctaatatctgtccctatccaatgcctctattttatcttgaaaaaaggaccaaaaattatttttagctatggcaaggcacaggccacatggcccctgatggcgtccctgctggttttcaattctctgaagccttgtgtagctttcagagcacacgtatcctaattaccctcctcttcctcagcagaacccatttgagattctaaatgaatactcttagtctctaaagttgcagttagaaactaaaataatgttttttaatatgtaatatgctcctcttggctaattttcttttgactttaatgtgccaatgtaacttcctttaaaggatctatgcatttattaaatctggaaaact

SEQ ID NO: 24122 - protein, 558 aa, Homo sapiens; identical to SEQ ID NO: 3193

SEQ ID NO: 24123 - DNA, 4465 bp, Homo sapiens
ctcaaagttcgcaggaggcgagagatgctgccgcagcaagtcggcttcgtgtgcgcggtgctggccctggtgtgctgtgcgtccggcctcttcggcagcttggggcacaaaacagcttctgctagcaaacgtgtcctgccagacacgtggagaaatagaaagttgatggccccagtgaatgggacacagacagccaagaactgcacagatcctgcgattcacgagttccccacagatctgttctccaataaggagcgacagcacggagccgtcctgctgcacatccttggtgctctgtatatgttctatgccttggccatagtgtgcgatgacttctttgttccgtctctagagaagatctgtgagagactccatctgagcgaagatgtggctggagccaccttcatggctgcaggaagctcaacgccagagctgtttgcgtctgttattggggtgttcatcacccatggggacgtcggggtgggcaccatcgtgggctctgctgtgttcaacatcctgtgcataattggagtgtgcggactgtttgctggccaggtggtccgtctgacgtggtgggccgtgtgccgagactccgtgtactacaccatctctgtcatcgtgctcatcgtgttcatatatgatgaacaaattgtgtggtgggaaggcctggtgctcatcatcttgtatgtgttttatattctgatcatgaagtacaatgtgaagatgcaagcctttttcacagtcaaacaaaagagcattgcaaacggtaacccggtcaacagtgagctggaggctggtaatgatttctatgacggtagctatgatgacccttccgtgccattgctggggcaagtgaaggagaagccacagtatggcaagaaccccgtggtgatggtggacgagattatgagctccagccctcccaagttcaccttccctgaagcaggcttacgaatcatgatcaccaataagtttggacccaggacccgactacggatggccagcaggatcatcattaatgagcggcagagactgatcaactcggccaatggtgtgagcagtaagccgcttcaaaacgggaggcacgagaacattgagaacgggaatgttcctgtggaaaaccccgaagaccctcagcagaatcaggagcagcagccgccgccacagccaccaccgccagagccagagccggtggaggctgacttcctgtcccccttctccgtgccggaggccagaggggacaaggtcaagtgggtgttcacctggcccctcatcttcctcctgtgcgtcaccattcccaactgcagcaagccccgctgggagaagttcttcatggtcaccttcatcaccgccacgctgtggatcgctgtgttctcctacatcatggtgtggctggtgactattatcggatacacacttgggatcccggatgtcatcatgggcattactttcctggcagcagggacaagtgttccagactgcatggccagcctaattgtggcgagacaaggccttggggacatggcagtctccaacaccataggaagcaacgtgtttgacatcctggtaggacttggtgtaccgtggggcctgcagaccatggttgttaattatggatcaacagtgaagatcaacagccgggggctggtctattccgtggtcctgttgctgggctctgtcgctctcaccgtcctcggcatccacctaaacaagtggcgactggaccggaagctgggtgtctacgtgctggttctctacgccatcttcttgtgcttctccataatgatagagtttaacgtctttaccttcgtcaacttgccgatgtgccgggaagacgattagcgctgagtcgcggcccctgggagctgatctggacaccctgtgacactggcgttctcctctcccctccttcccccaccacaggtctctcctgcataggcagccactgtccgttctttcacacactggaaggaagagccatcgtggtctttgtctggccacaggccaggctgctgggcatcctcctcctccttggagttccgcccctgcaaggctggatttgggggccattatctgagcagcttcaaagacccctgagctgccaaccacggagatgtgccaagcatctcatctctcctgcacactttagtcagaaggacttctgcatgcagtttgtctttctgttctgcaggcagcttcagaattgaggtcatttgtgagcacaagatctcatagggcaggtgcaaaataggaatgttgttctcaagtgtcacctccagcccagaggtggttccttaggcagcatgtgctcctgggagcctctgacttttgctggaagcagccacagtttggaaggggcaagacctcaacctgttggggtttagggcccatgatggcagacattctaccccttttcctggaaaaactggaagaatgaaaataatttttttctgtggaagagagaaaatgagtgaatattcttctcacttttattgatgcattcagagaataagcaatgaaatattaaaaaatgaaacatcatataggtcatcatacttgaaaattatcattccatatgaaaggatcatgatacacaccaaaaaagtaatgatcgtaaagacacaaatcctctgtatgccatcttgcattggcactgaggtgtttggtttggaatagggaaaaaggtaagagactaacgtggaaaggtgctaactcagagactggagattatagtttacagctgtactttccagatcttctatgtgacacaatgcactgtccttgtgggtttgtcatttattggttaatgctctagtttcaaaaccaccctgttgaaagttccagttatttatatgcccaacaaatttcatagcctgctgaactgaactgagtgtgtcagaagtgctggttaatgacgagaagagattgcctgaaaaacaacaaactgctttctggttagctgaaggcaagtgtgaaaatcagaatttagaatatttagagctaagcttctggaaccacgtagtttctacacgtggcaggccaagaatgggaggctgactcaaaactagatagaaaaatataaaataatcttcgaccacttgatagctctcaaatatatatttaaaagatttatgaatacaaaccatttatggtttatgatttctaaaaagaaagcacaattaattttatagagaggttttttatttttttaatatttctattgcaaaagtctatccgatttgatgcactttgaatattgagatattttgcacggatgaatgtatgggaactacccatgatgatgtaagaggaaagaacatttttttgtgattcaccagacatcactttaaacttggtgatgagtttaaatccagtagctaatcccttcctgagactcaaagatcgtgacgctggttggaatttctgactgtgccctttagggcctcctgagtttcaaaaggaggaagtgttcgtgcttgtgtccctgaagttccctgttgcatgagcctgcgacaggacctcacccccaccaccaggcttctatttgggattcacatcagtattagtatcgtagctacaccaagttcaggcttctctttttgtttttttacctagaaattgggctcagtggtcttcaacttgaggacgagggtgattttcctaagaaatcagcaaagagggaaggcagggcccctgtagattcaccagtataaacttcagctgcagggattccagagccctcgggaccactctgtcaccttaatagccaagttctcctggttcctccgatcttacaggctcatccaggttccaaagtgcttctgtctctgttttgattctccaaactgctctgtgatgtatgtagggattattctccccacttaacagaaagtagtgtcttggagaggtcaagggtctctagttcaatggccagtcatagcagaagggaggccaagcaccagtccatcacccctcccaggccagcctctgtaagttggccacacttggggagtgagtgtgggtatgactttaccctcctggttggttcttactgtttgagtcaaaacctcatcaatatatcattgactcctgggttcctcaggtcatttcctaatatctgtccctatccaatgcctctattttatcttgaaaaaaggaccaaaaattatttttagctatggcaaggcacaggccacatggcccctgatggcgtccctgctggttttcaattctctgaagccttgtgtagctttcagagcacacgtatcctaattaccctcctcttcctcagcagaacccatttgagattctaaatgaatactcttagtctctaaagttgcagttagaaactaaaataatgttttttaatatgtaatatgctcctcttggctaattttcttttgactttaatgtgccaatgtaacttcctttaaaggatctatgcatttattaaatctggaaaact

SEQ ID NO: 24124 - protein, 605 aa, Homo sapiens; identical to SEQ ID NO: 3189

SEQ ID NO: 24125 - DNA, 4408 bp, Homo sapiens
ctcaaagttcgcaggaggcgagagatgctgccgcagcaagtcggcttcgtgtgcgcggtgctggccctggtgtgctgtgcgtccggcctcttcggcagcttggggcacaaaacagcttctgctagcaaacgtgtcctgccagacacgtggagaaatagaaagttgatggccccagtgaatgggacacagacagccaagaactgcacagatcctgcgattcacgagttccccacagatctgttctccaataaggagcgacagcacggagccgtcctgctgcacatccttggtgctctgtatatgttctatgccttggccatagtgtgcgatgacttctttgttccgtctctagagaagatctgtgagagactccatctgagcgaagatgtggctggagccaccttcatggctgcaggaagctcaacgccagagctgtttgcgtctgttattggggtgttcatcacccatggggacgtcggggtgggcaccatcgtgggctctgctgtgttcaacatcctgtgcataattggagtgtgcggactgtttgctggccaggtggtccgtctgacgtggtgggccgtgtgccgagactccgtgtactacaccatctctgtcatcgtgctcatcgtgttcatatatgatgaacaaattgtgtggtgggaaggcctggtgctcatcatcttgtatgtgttttatattctgatcatgaagtacaatgtgaagatgcaagcctttttcacagtcaaacaaaagagcattgcaaacggtaacccggtcaacagtgagctggaggctgtgaaggagaagccacagtatggcaagaaccccgtggtgatggtggacgagattatgagctccagccctcccaagttcaccttccctgaagcaggcttacgaatcatgatcaccaataagtttggacccaggacccgactacggatggccagcaggatcatcattaatgagcggcagagactgatcaactcggccaatggtgtgagcagtaagccgcttcaaaacgggaggcacgagaacattgagaacgggaatgttcctgtggaaaaccccgaagaccctcagcagaatcaggagcagcagccgccgccacagccaccaccgccagagccagagccggtggaggctgacttcctgtcccccttctccgtgccggaggccagaggggacaaggtcaagtgggtgttcacctggcccctcatcttcctcctgtgcgtcaccattcccaactgcagcaagccccgctgggagaagttcttcatggtcaccttcatcaccgccacgctgtggatcgctgtgttctcctacatcatggtgtggctggtgactattatcggatacacacttgggatcccggatgtcatcatgggcattactttcctggcagcagggacaagtgttccagactgcatggccagcctaattgtggcgagacaaggccttggggacatggcagtctccaacaccataggaagcaacgtgtttgacatcctggtaggacttggtgtaccgtggggcctgcagaccatggttgttaattatggatcaacagtgaagatcaacagccgggggctggtctattccgtggtcctgttgctgggctctgtcgctctcaccgtcctcggcatccacctaaacaagtggcgactggaccggaagctgggtgtctacgtgctggttctctacgccatcttcttgtgcttctccataatgatagagtttaacgtctttaccttcgtcaacttgccgatgtgccgggaagacgattagcgctgagtcgcggcccctgggagctgatctggacaccctgtgacactggcgttctcctctcccctccttcccccaccacaggtctctcctgcataggcagccactgtccgttctttcacacactggaaggaagagccatcgtggtctttgtctggccacaggccaggctgctgggcatcctcctcctccttggagttccgcccctgcaaggctggatttgggggccattatctgagcagcttcaaagacccctgagctgccaaccacggagatgtgccaagcatctcatctctcctgcacactttagtcagaaggacttctgcatgcagtttgtctttctgttctgcaggcagcttcagaattgaggtcatttgtgagcacaagatctcatagggcaggtgcaaaataggaatgttgttctcaagtgtcacctccagcccagaggtggttccttaggcagcatgtgctcctgggagcctctgacttttgctggaagcagccacagtttggaaggggcaagacctcaacctgttggggtttagggcccatgatggcagacattctaccccttttcctggaaaaactggaagaatgaaaataatttttttctgtggaagagagaaaatgagtgaatattcttctcacttttattgatgcattcagagaataagcaatgaaatattaaaaaatgaaacatcatataggtcatcatacttgaaaattatcattccatatgaaaggatcatgatacacaccaaaaaagtaatgatcgtaaagacacaaatcctctgtatgccatcttgcattggcactgaggtgtttggtttggaatagggaaaaaggtaagagactaacgtggaaaggtgctaactcagagactggagattatagtttacagctgtactttccagatcttctatgtgacacaatgcactgtccttgtgggtttgtcatttattggttaatgctctagtttcaaaaccaccctgttgaaagttccagttatttatatgcccaacaaatttcatagcctgctgaactgaactgagtgtgtcagaagtgctggttaatgacgagaagagattgcctgaaaaacaacaaactgctttctggttagctgaaggcaagtgtgaaaatcagaatttagaatatttagagctaagcttctggaaccacgtagtttctacacgtggcaggccaagaatgggaggctgactcaaaactagatagaaaaatataaaataatcttcgaccacttgatagctctcaaatatatatttaaaagatttatgaatacaaaccatttatggtttatgatttctaaaaagaaagcacaattaattttatagagaggttttttatttttttaatatttctattgcaaaagtctatccgatttgatgcactttgaatattgagatattttgcacggatgaatgtatgggaactacccatgatgatgtaagaggaaagaacatttttttgtgattcaccagacatcactttaaacttggtgatgagtttaaatccagtagctaatcccttcctgagactcaaagatcgtgacgctggttggaatttctgactgtgccctttagggcctcctgagtttcaaaaggaggaagtgttcgtgcttgtgtccctgaagttccctgttgcatgagcctgcgacaggacctcacccccaccaccaggcttctatttgggattcacatcagtattagtatcgtagctacaccaagttcaggcttctctttttgtttttttacctagaaattgggctcagtggtcttcaacttgaggacgagggtgattttcctaagaaatcagcaaagagggaaggcagggcccctgtagattcaccagtataaacttcagctgcagggattccagagccctcgggaccactctgtcaccttaatagccaagttctcctggttcctccgatcttacaggctcatccaggttccaaagtgcttctgtctctgttttgattctccaaactgctctgtgatgtatgtagggattattctccccacttaacagaaagtagtgtcttggagaggtcaagggtctctagttcaatggccagtcatagcagaagggaggccaagcaccagtccatcacccctcccaggccagcctctgtaagttggccacacttggggagtgagtgtgggtatgactttaccctcctggttggttcttactgtttgagtcaaaacctcatcaatatatcattgactcctgggttcctcaggtcatttcctaatatctgtccctatccaatgcctctattttatcttgaaaaaaggaccaaaaattatttttagctatggcaaggcacaggccacatggcccctgatggcgtccctgctggttttcaattctctgaagccttgtgtagctttcagagcacacgtatcctaattaccctcctcttcctcagcagaacccatttgagattctaaatgaatactcttagtctctaaagttgcagttagaaactaaaataatgttttttaatatgtaatatgctcctcttggctaattttcttttgactttaatgtgccaatgtaacttcctttaaaggatctatgcatttattaaatctggaaaact

SEQ ID NO: 24126 - protein, 586 aa, Homo sapiens; identical to SEQ ID NO: 3191

SEQ ID NO: 24127 - DNA, 2297 bp, Homo sapiens
aataagtgcctgtgtgttggcaactgcagctaaagctctcctatctctgcaaacatcgattcacgagttccccacagatctgttctccaataaggagcgacagcacggagccgtcctgctgcacatccttggtgctctgtatatgttctatgccttggccatagtgtgcgatgacttctttgttccgtctctagagaagatctgtgagagactccatctgagcgaagatgtggctggagccaccttcatggctgcaggaagctcaacgccagagctgtttgcgtctgttattggggtgttcatcacccatggggacgtcggggtgggcaccatcctctgtcatcgtgctcatcgtgttcatatatgatgaacaaattgtgtggtgggaaggcctggtgctcatcatcttgtatgtgttttatattctgatcatgaagtacaatgtgaagatgcaagcctttttcacagtcaaacaaaagagcattgcaaacggtaacccggtcaacagtgagctggaggctggtaatgatttctatgacggtagctatgatgacccttccgtgccattgctggggcaagtgaaggagaagccacagtatggcaagaaccccgtggtgatggtggacgagattatgagctccagccctcccaagttcaccttccctgaagcaggcttacgaatcatgatcaccaataagtttggacccaggacccgactacggatggccagcaggatcatcattaatgagcggcagagactgatcaactcggccaatggtgtgagcagtaagccgcttcaaaacgggaggcacgagaacattgagaacgggaatgttcctgtggaaaaccccgaagaccctcagcagaatcaggagcagcagccgccgccacagccaccaccgccagagccagagccggtggaggctgacttcctgtcccccttctccgtgccggaggccagaggggacaaggtcaagtgggtgttcacctggcccctcatcttcctcctgtgcgtcaccattcccaactgcagcaagccccgctgggagaagttcttcatggtcaccttcatcaccgccacgctgtggatcgctgtgttctcctacatcatggtgtggctggagcaaagagaggggaagcagttccagcatggctgcagttctgttgattgtgaaactcactctcagccccttacaccctagtggttaacatcgagtccctttattctcctcctaatgcctgacaccagcagcagagaaggcaagcgatcttgacatgagagacagcagggccagtaaacgttccatgctggcccaggggccacctttcccttaactccagagaaaccgtgtcgtttggtggggaacaaaggatcctggatcacatgagaacagcgctgaatcctagtcctacctcttgcaaaccacagaagctggtgactccctctatgaagtgggggtgatcatcactctcttacaaggccattgggagaatgaaaagagagcccagcacattctaggcacttggccaatcctgtctcttccctccccccaacccaatcacgccttcccccatctctcccagagcattactggaattctaaacagtgtatgggagccattttgcctatgctttcctgaaatcccaccctttggccggctccctcacctcagatgcttcctcaggctgatcagagacctgccgcaacctctgtgagtgtccttactcatgcagcagccctcctgtccctgtggcagagcctccccaagacaccagctggtggaaggtgctgcccccagcctgttccctttctccctttcttctggtacctgcttagagctctgtatcccaaaaggaagctcaggacggactctgtgactcctggtaccggcttagagctctgtatcccaaaaagaagctcaggatggactctgtgattgtgttttagtgaatgaaacaagtcatgtaactcaggagaggcagaaccactccaagcctccaggaccccagcatctgccccagccccaggcactcacacttggaacaccctggccttggttcagctaaatgggggacatggggacacttgaacattcaagtcccccagaacctcattcatgtccctcctgaccactccctttcacaccctactcccagcccaaaacagtttggttagactgtgtcagaagcatccagtcgttagccgcttattgaaaccaacagccaattaagggtgattacctggtaacagtcagatgatcatgagcgttgctgaataatacacagtttggccactg

SEQ ID NO: 24128 - protein, 324 aa, Homo sapiens
MWLEPPSWLQEAQRQSCLRLLLGCSSPMGTSGWAPSSVIVLIVFIYDEQIVWWEGLVLIILYVFYILIMKYNVKMQAFFTVKQKSIANGNPVNSELEAGNDFYDGSYDDPSVPLLGQVKEKPQYGKNPVVMVDEIMSSSPPKFTFPEAGLRIMITNKFGPRTRLRMASRIIINERQRLINSANGVSSKPLQNGRHENIENGNVPVENPEDPQQNQEQQPPPQPPPPEPEPVEADFLSPFSVPEARGDKVKWVFTWPLIFLLCVTIPNCSKPRWEKFFMVTFITATLWIAVFSYIMVWLEQREGKQFQHGCSSVDCETHSQPLTP

SEQ ID NO: 24129 - DNA, 4186 bp, Homo sapiens
agtgtgcgatgacttctttgttccgtctctagagaagatctgtgagagactccatctgagcgaagatgtggctggagccaccttcatggctgcaggaagctcaacgccagagctgtttgcgtctgttattggggtgttcatcacccatggggacgtcggggtgggcaccatcgtgggctctgctgtgttcaacatcctgtgcataattggagtgtgcggactgtttgctggccaggtggtccgtctgacgtggtgggccgtgtgccgagactccgtgtactacaccatctctgtcatcgtgctcatcgtgttcatatatgatgaacaaattgtgtggtgggaaggcctggtgctcatcatcttgtatgtgttttatattctgatcatgaagtacaatgtgaagatgcaagcctttttcacagtcaaacaaaagagcattgcaaacggtaacccggtcaacagtgagctggaggctgtgaaggagaagccacagtatggcaagaaccccgtggtgatggtggacgagattatgagctccagccctcccaagttcaccttccctgaagcaggcttacgaatcatgatcaccaataagtttggacccaggacccgactacggatggccagcaggatcatcattaatgagcggcagagactgatcaactcggccaatggtgtgagcagtaagccgcttcaaaacgggaggcacgagaacattgagaacgggaatgttcctgtggaaaaccccgaagaccctcagcagaatcaggagcagcagccgccgccacagccaccaccgccagagccagagccggtggaggctgacttcctgtcccccttctccgtgccggaggccagaggggacaaggtcaagtgggtgttcacctggcccctcatcttcctcctgtgcgtcaccattcccaactgcagcaagccccgctgggagaagttcttcatggtcaccttcatcaccgccacgctgtggatcgctgtgttctcctacatcatggtgtggctggtgactattatcggatacacacttgggatcccggatgtcatcatgggcattactttcctggcagcagggacaagtgttccagactgcatggccagcctaattgtggcgagacaaggccttggggacatggcagtctccaacaccataggaagcaacgtgtttgacatcctggtaggacttggtgtaccgtggggcctgcagaccatggttgttaattatggatcaacagtgaagatcaacagccgggggctggtctattccgtggtcctgttgctgggctctgtcgctctcacctgctccagtgaggttcctgggatccagccccaggaagccttgatcgagggacaaggaggaaggcagtggaaggaaagatagaaggatcagggaggaatgtcctcggcatccacctaaacaagtggcgactggaccggaagctgggtgtctacgtgctggttctctacgccatcttcttgtgcttctccataatgatagagtttaacgtctttaccttcgtcaacttgccgatgtgccgggaagacgattagcgctgagtcgcggcccctgggagctgatctggacaccctgtgacactggcgttctcctctcccctccttcccccaccacaggtctctcctgcataggcagccactgtccgttctttcacacactggaaggaagagccatcgtggtctttgtctggccacaggccaggctgctgggcatcctcctcctccttggagttccgcccctgcaaggctggatttgggggccattatctgagcagcttcaaagacccctgagctgccaaccacggagatgtgccaagcatctcatctctcctgcacactttagtcagaaggacttctgcatgcagtttgtctttctgttctgcaggcagcttcagaattgaggtcatttgtgagcacaagatctcatagggcaggtgcaaaataggaatgttgttctcaagtgtcacctccagcccagaggtggttccttaggcagcatgtgctcctgggagcctctgacttttgctggaagcagccacagtttggaaggggcaagacctcaacctgttggggtttagggcccatgatggcagacattctaccccttttcctggaaaaactggaagaatgaaaataatttttttctgtggaagagagaaaatgagtgaatattcttctcacttttattgatgcattcagagaataagcaatgaaatattaaaaaatgaaacatcatataggtcatcatacttgaaaattatcattccatatgaaaggatcatgatacacaccaaaaaagtaatgatcgtaaagacacaaatcctctgtatgccatcttgcattggcactgaggtgtttggtttggaatagggaaaaaggtaagagactaacgtggaaaggtgctaactcagagactggagattatagtttacagctgtactttccagatcttctatgtgacacaatgcactgtccttgtgggtttgtcatttattggttaatgctctagtttcaaaaccaccctgttgaaagttccagttatttatatgcccaacaaatttcatagcctgctgaactgaactgagtgtgtcagaagtgctggttaatgacgagaagagattgcctgaaaaacaacaaactgctttctggttagctgaaggcaagtgtgaaaatcagaatttagaatatttagagctaagcttctggaaccacgtagtttctacacgtggcaggccaagaatgggaggctgactcaaaactagatagaaaaatataaaataatcttcgaccacttgatagctctcaaatatatatttaaaagatttatgaatacaaaccatttatggtttatgatttctaaaaagaaagcacaattaattttatagagaggttttttatttttttaatatttctattgcaaaagtctatccgatttgatgcactttgaatattgagatattttgcacggatgaatgtatgggaactacccatgatgatgtaagaggaaagaacatttttttgtgattcaccagacatcactttaaacttggtgatgagtttaaatccagtagctaatcccttcctgagactcaaagatcgtgacgctggttggaatttctgactgtgccctttagggcctcctgagtttcaaaaggaggaagtgttcgtgcttgtgtccctgaagttccctgttgcatgagcctgcgacaggacctcacccccaccaccaggcttctatttgggattcacatcagtattagtatcgtagctacaccaagttcaggcttctctttttgtttttttacctagaaattgggctcagtggtcttcaacttgaggacgagggtgattttcctaagaaatcagcaaagagggaaggcagggcccctgtagattcaccagtataaacttcagctgcagggattccagagccctcgggaccactctgtcaccttaatagccaagttctcctggttcctccgatcttacaggctcatccaggttccaaagtgcttctgtctctgttttgattctccaaactgctctgtgatgtatgtagggattattctccccacttaacagaaagtagtgtcttggagaggtcaagggtctctagttcaatggccagtcatagcagaagggaggccaagcaccagtccatcacccctcccaggccagcctctgtaagttggccacacttggggagtgagtgtgggtatgactttaccctcctggttggttcttactgtttgagtcaaaacctcatcaatatatcattgactcctgggttcctcaggtcatttcctaatatctgtccctatccaatgcctctattttatcttgaaaaaaggaccaaaaattatttttagctatggcaaggcacaggccacatggcccctgatggcgtccctgctggttttcaattctctgaagccttgtgtagctttcagagcacacgtatcctaattaccctcctcttcctcagcagaacccatttgagattctaaatgaatactcttagtctctaaagttgcagttagaaactaaaataatgttttttaatatgtaatatgctcctcttggctaattttcttttgactttaatgtgccaatgtaacttcctttaaaggatctatgcatttattaaatctggaaaact

SEQ ID NO: 24130 - protein, 435 aa, Homo sapiens
MAAGSSTPELFASVIGVFITHGDVGVGTIVGSAVFNILCIIGVCGLFAGQVVRLTWWAVCRDSVYYTISVIVLIVFIYDEQIVWWEGLVLIILYVFYILIMKYNVKMQAFFTVKQKSIANGNPVNSELEAVKEKPQYGKNPVVMVDEIMSSSPPKFTFPEAGLRIMITNKFGPRTRLRMASRIIINERQRLINSANGVSSKPLQNGRHENIENGNVPVENPEDPQQNQEQQPPPQPPPPEPEPVEADFLSPFSVPEARGDKVKWVFTWPLIFLLCVTIPNCSKPRWEKFFMVTFITATLWIAVFSYIMVWLVTIIGYTLGIPDVIMGITFLAAGTSVPDCMASLIVARQGLGDMAVSNTIGSNVFDILVGLGVPWGLQTMVVNYGSTVKINSRGLVYSVVLLLGSVALTCSSEVPGIQPQEALIEGQGGRQWKER

SEQ ID NO: 24131 - DNA, 3385 bp, Homo sapiens
gggatggagtggtctcagatgtgtctgggacatctggggtgcagaatctgtatttctgggccccctctccagtcatcatcctggagccgatgaaggcaggggcttcctcccatgtgcattttgggagtctgttctgccctgtctcaggtaacccccaagagggaggagtctctccgtatagaaggaggaaacctgccagggtggcggggtgcggtccaggccacagcctggctgctgaggcccacccacaaaggacagagctgaggagctgatgggcatggagtttgattcgtgtgtcgtgtttcataaatgctgagcagactaccccaggggaagcccgtttccaggacaacctcagaaggggaaggagccatgagggcggctgtgtcggattttagctctatggacgcagtggccccgagacggtccccacacacagcctggtccccacacacaggctggcaggacagaggctggttgctgccctgtcgtatatatggtgcttctgggtcctctgggccttcatggtgaagaagagaagtattgtgtgctgagtcactcaggccagtggcagatgcccatccaagagccacccaccacctgtgccaacccaggagacctcccaggaccctgcaggaaacattcctcattcacagcatgggggcctcagctcctcaccttcccagagcaacccaggctcccagaggcccccgcctacacagtgccttttctggcactgctgtgactgtctccatcactctgtgcctgtgacagtagcacttccttgcaagtttattttctcccaaatctctttaagtccaggacattttctggaaaactggaagactggacacaggactgcccccaagcactggggaaggagggagaatcccatcttcctgcagcttttatcagagggaatgcatttagataagggccaagggagaaaacagtcctcagaaagtgtggagggaagtggggtacaggcctggacgcctggaattggagaaaggggagacctggagaggcagacgtggggatttcttcaccccacttttactgcccctatcataagaggctcccagagggccatgtgtgagtcactgttctgcactgtcccctgcgtagactcgactgaagcaggaggaaggagcccccggtaacaccctgggtgggactggggaggccagggctttggggcttttcctttcctaagggcggtgccatggaatcttttggctggagatgacattggggtttctttccctgtgcccagctccaagcaggtcgctgtgtggccaccccacccaaaggaatgcacgggttgctggctgggagattcttcaagagcacacactctcaggcccgatcgagctgttctcagtttttgggtttcccatagaaaacccaaagttttatcttccagcttcttgacaggaaaagtgggcagaaagccttttccccaccacactgataaaaggcgtttgagtactgaaacgttcttaaaggctgtgtggcttggctcaccaaagcagcctcctggtgcttctcaggtggccttgaacacagcctgggccacttgcctgccggcctcgcccaggaggcacactgtggacccttccaggctgccctggccctgggcacagccttggtttggagtggggagagttgggggtgatgcctggcctggggctggactgctgggagaatgtgctgtcattgagttcttttcccggcagccactccgggcatgggcacacacccttgttctgtcattggtcaggggacaccaggacaagctgtcccgggaggcaggcatcctggggaaggaaggagaattccatcttcctgtagcttttatcagagtgaatgcatttagataagggccaagagagaatactacctagagagtgtggaaggaagtgggggtgcaggcctgtactcctggaattagagaagggggaggcctggctcttgtctcacagactccaggctctctccttctgagcccagttgttcctccagcagtacctggcatggggttggttctgtaggatggagcctgaagctgcgttttctgtgggttccgtcttcctctgggatggaggcttctgagcagggagggatttgagctttcatgcagcagtgaggggctgagggcatgagctgtggagggggctcctgctcctcagagtggaagcagagccatcgaatcagccaggacaggagtcatcccaaaggccagaggccccaagtgttgatgctccccatagaaggagcccgctaataacactctccagcacataacccctggcatcttcgccaccaccaagagtgctgccccagactctcggcacccaccgcacgctaatcatctctggcagtttctgttggcctttgtctccttaactctcctcctcttctaaatttgaaggagaagccacagtatggcaagaaccccgtggtgatggtggacgagattatgagctccagccctcccaagttcaccttccctgaagcaggcttacgaatcatgatcaccaataagtttggacccaggacccgactacggatggccagcaggatcatcattaatgagcggcagagactgatcaactcggccaatggtgtgagcagtaagccgcttcaaaacgggaggcacgagaacattgagaacgggaatgttcctgtggaaaaccccgaagaccctcagcagaatcaggagcagcagccgccgccacagccaccaccgccagagccagagccggtggaggctgacttcctgtcccccttctccgtgccggccacagcggcctcctcactgtcattcctagaacacactgtcattcctagaactgcgcacctgccccaggacctttgcacctgccttttgctggaatgcagtttccccagctccacaaagcaggtacttttgtctactgcatttatctgcatccccagtacccaggactggccacatagtaggggcttgctgtgaataccctcaagatctggtccagccgggagcagagtcccaaagcaccagcccagagctgtcatgaagccagcacatggccttaggctggagtgtagtggcatgatctccgctgactgcaacctccgcttcccgggttcaagagattctcctgcctcagcctcccgagtagctgggagtacagacacataccatcacgcctggctaatttttgtatttgtagtagggacaaggtttcatcatgttgaccaggctggtctcgaactcctgacctcaagtgatccacccacctcggcctcccaaagtgctgggattataggcatgagccaccatgcccagccgagacagggtgctttatacacattaagtcattaaacccattaaaaccct

SEQ ID NO: 24132 - protein, 176 aa, Homo sapiens
MVDEIMSSSPPKFTFPEAGLRIMITNKFGPRTRLRMASRIIINERQRLINSANGVSSKPLQNGRHENIENGNVPVENPEDPQQNQEQQPPPQPPPPEPEPVEADFLSPFSVPATAASSLSFLEHTVIPRTAHLPQDLCTCLLLECSFPSSTKQVLLSTAFICIPSTQDWPHSRGLL

SEQ ID NO: 24133 - DNA, 4746 bp, Homo sapiens
aatgcatgttctcctggctttgttttctaacccacacgcctcctgtctgctgagccttgctgcctgtttggtgaggagtgtgtgtgtctggtgtgcttttgtgctattaactcttacacgggtttgctctccggacctattcgctggttaccctaaaacccgtaaaggacacaccaggagctggtaaccagtgcagagggacagtcctatccatttttatagccctttggaggggaacactctgcctgcttctgcatgctgtgttcatgagcagttttgtaactagaccctcctagggatctggagtcaaatgtgaaattcccaaggataccggcccagtgcaggtttatgaagatggcaagaaagaggtctggggacagggagttttgttcctccccattgtgaggggaaggaaagggtcagagagaccagcctccctccggagggtgtcagggtttatagtcactgggctcagccagcggctcaccgtgcaccctcaaacaagcaggctcctctcctgggtcttagttgcctgtctaggtcccatgatctaaatctttgacctcactacttgcccttataaagaacaaagttacaagcattctgtcctgcagacagagcaggtggcctcgtaggaagttcagagccagtgcccactgctctgcaacattttccaccccggggacccttgtcaatttgcaaaatttcatctgagcctctgtacgtgggggaaagaaaggtcccctcatagtcatgggtgaaaagtggtaggcccccgtgtgtattgtaggttggctgccctggtaaggcttagataacgaactgaaagacccttgtaattagccaagactgggccccagaagagaggcgaaaagagcatcaattgcccacgagtggtcctggagcaaggggacacactgggcttcacacactaggtcagcaggtgtttcaaagctagtgacccactttgcctgacatgaggagttgaagccaggcatccagacttcccggtggctgccagctgccaggaccacagcctagggcagctcacaaggtgaggggaagtcagtggccccagcacttgggtgttgtcctcagagagatcagcactaatcacggtgttgcgctcaacagtgaaggagaagccacagtatggcaagaaccccgtggtgatggtggacgagattatgagctccagccctcccaagttcaccttccctgaagcaggcttacgaatcatgatcaccaataagtttggacccaggacccgactacggatggccagcaggatcatcattaatgagcggcagagactgatcaactcggccaatggtgtgagcagtaagccgcttcaaaacgggaggcacgagaacattgagaacgggaatgttcctgtggaaaaccccgaagaccctcagcagaatcaggagcagcagccgccgccacagccaccaccgccagagccagagccggtggaggctgacttcctgtcccccttctccgtgccggaggccagaggggacaaggtcaagtgggtgttcacctggcccctcatcttcctcctgtgcgtcaccattcccaactgcagcaagccccgctgggagaagttcttcatggtcaccttcatcaccgccacgctgtggatcgctgtgttctcctacatcatggtgtggctggtgactattatcggatacacacttgggatcccggatgtcatcatgggcattactttcctggcagcagggacaagtgttccagactgcatggccagcctaattgtggcgagacaaggccttggggacatggcagtctccaacaccataggaagcaacgtgtttgacatcctggtaggacttggtgtaccgtggggcctgcagaccatggttgttaattatggatcaacagtgaagatcaacagccgggggctggtctattccgtggtcctgttgctgggctctgtcgctctcaccgtcctcggcatccacctaaacaagtggcgactggaccggaagctgggtgtctacgtgctggttctctacgccatcttcttgtgcttctccataatgatagagtttaacgtctttaccttcgtcaacttgccgatgtgccgggaagacgattagcgctgagtcgcggcccctgggagctgatctggacaccctgtgacactggcgttctcctctcccctccttcccccaccacaggtctctcctgcataggcagccactgtccgttctttcacacactggaaggaagagccatcgtggtctttgtctggccacaggccaggctgctgggcatcctcctcctccttggagttccgcccctgcaaggctggatttgggggccattatctgagcagcttcaaagacccctgagctgccaaccacggagatgtgccaagcatctcatctctcctgcacactttagtcagaaggacttctgcatgcagtttgtctttctgttctgcaggcagcttcagaattgaggtcatttgtgagcacaagatctcatagggcaggtgcaaaataggaatgttgttctcaagtgtcacctccagcccagaggtggttccttaggcagcatgtgctcctgggagcctctgacttttgctggaagcagccacagtttggaaggggcaagacctcaacctgttggggtttagggcccatgatggcagacattctaccccttttcctggaaaaactggaagaatgaaaataatttttttctgtggaagagagaaaatgagtgaatattcttctcacttttattgatgcattcagagaataagcaatgaaatattaaaaaatgaaacatcatataggtcatcatacttgaaaattatcattccatatgaaaggatcatgatacacaccaaaaaagtaatgatcgtaaagacacaaatcctctgtatgccatcttgcattggcactgaggtgtttggtttggaatagggaaaaaggtaagagactaacgtggaaaggtgctaactcagagactggagattatagtttacagctgtactttccagatcttctatgtgacacaatgcactgtccttgtgggtttgtcatttattggttaatgctctagtttcaaaaccaccctgttgaaagttccagttatttatatgcccaacaaatttcatagcctgctgaactgaactgagtgtgtcagaagtgctggttaatgacgagaagagattgcctgaaaaacaacaaactgctttctggttagctgaaggcaagtgtgaaaatcagaatttagaatatttagagctaagcttctggaaccacgtagtttctacacgtggcaggccaagaatgggaggctgactcaaaactagatagaaaaatataaaataatcttcgaccacttgatagctctcaaatatatatttaaaagatttatgaatacaaaccatttatggtttatgatttctaaaaagaaagcacaattaattttatagagaggttttttatttttttaatatttctattgcaaaagtctatccgatttgatgcactttgaatattgagatattttgcacggatgaatgtatgggaactacccatgatgatgtaagaggaaagaacatttttttgtgattcaccagacatcactttaaacttggtgatgagtttaaatccagtagctaatcccttcctgagactcaaagatcgtgacgctggttggaatttctgactgtgccctttagggcctcctgagtttcaaaaggaggaagtgttcgtgcttgtgtccctgaagttccctgttgcatgagcctgcgacaggacctcacccccaccaccaggcttctatttgggattcacatcagtattagtatcgtagctacaccaagttcaggcttctctttttgtttttttacctagaaattgggctcagtggtcttcaacttgaggacgagggtgattttcctaagaaatcagcaaagagggaaggcagggcccctgtagattcaccagtataaacttcagctgcagggattccagagccctcgggaccactctgtcaccttaatagccaagttctcctggttcctccgatcttacaggctcatccaggttccaaagtgcttctgtctctgttttgattctccaaactgctctgtgatgtatgtagggattattctccccacttaacagaaagtagtgtcttggagaggtcaagggtctctagttcaatggccagtcatagcagaagggaggccaagcaccagtccatcacccctcccaggccagcctctgtaagttggccacacttggggagtgagtgtgggtatgactttaccctcctggttggttcttactgtttgagtcaaaacctcatcaatatatcattgactcctgggttcctcaggtcatttcctaatatctgtccctatccaatgcctctattttatcttgaaaaaaggaccaaaaattatttttagctatggcaaggcacaggccacatggcccctgatggcgtccctgctggttttcaattctctgaagccttgtgtagctttcagagcacacgtatcctaattaccctcctcttcctcagcagaacccatttgagattctaaatgaatactcttagtctctaaagttgcagttagaaactaaaataatgttttttaatatgtaatatgctcctcttggctaattttcttttgactttaatgtgccaatgtaacttcctttaaaggatctatgcatttattaaatctggaaaact

SEQ ID NO: 24134 - protein, 316 aa, Homo sapiens
MVDEIMSSSPPKFTFPEAGLRIMITNKFGPRTRLRMASRIIINERQRLINSANGVSSKPLQNGRHENIENGNVPVENPEDPQQNQEQQPPPQPPPPEPEPVEADFLSPFSVPEARGDKVKWVFTWPLIFLLCVTIPNCSKPRWEKFFMVTFITATLWIAVFSYIMVWLVTIIGYTLGIPDVIMGITFLAAGTSVPDCMASLIVARQGLGDMAVSNTIGSNVFDILVGLGVPWGLQTMVVNYGSTVKINSRGLVYSVVLLLGSVALTVLGIHLNKWRLDRKLGVYVLVLYAIFLCFSIMIEFNVFTFVNLPMCREDD

SEQ ID NO: 24135 - DNA, 490 bp, Homo sapiens
aaagaacttacctgttagagtgaaaatcctcaggagattgtacccaaatgccatgctctaaatattcatggtctctctaatgccctcaagacgtgatttccatgggaaccatcctcccctgggggcagttagcaggagtacgtggggcacgtgaggtggtcctcctttcagcacaccgtgcccatagaaacttctagaaatttctgaaaatgctctgtgggcagctcttgggtggcagtaagtccatcaacccccatctaccccgggccaataaaattcttaatcctgcagagagtcagtaccctcatcaccccatcactggaaaacaaatgttttaagctatcaagagagggaatgtgcagcttttggtttctagatgcatggtttggtgtgatctacctttgtgcctaaagggaatgtcccaaacaacagagccttctttgctgtcactccagaattctctacacagaatttcccaagtccattcagg

SEQ ID NO: 24136 - protein, 42 aa, Homo sapiens
MLCGQLLGGSKSINPHLPRANKILNPAESQYPHHPITGKQMF

SEQ ID NO: 24137 - DNA, 1720 bp, Homo sapiens
agaagggagcgagagccccagagcgcggcggcagcggcggcctggcccttccagagggccagagccagggacatgcgggcgcccgggactccgcgttccgcgcggcccggcgcctgagcgcctccgttccccgtcccggagctgccggcggcatgatccgacacgccggggcgcccgcgcgcggggaccccacgggtccggttccagttgttggcaaaggagaggaagaggaagaggaagatggcatgcggctttgtctgccagccaacccgaaaaactgccttcctcaccgccggggcatcagcatcctggagaagctcatcaaaacatgcccggtgtggctgcagctgagtctgggccaggcagaggtggccaggatcctgcaccgggtggtggctgggatgttcctggttcgccgggacagcagctcgaagcagctggtgctctgtgtccactttccttctctgaacgaaagctcggccgaggtgctcgaatacaccattaaggaagaaaagtcgatattgtacctggaaggctcggctcttgtgtttgaggacatcttcagattgattgcgttctactgtgtcagtagagacttactgcccttcacactgcggctaccccaggccatccttgaggccagcagatcacgggccattcacacaggcagtgaaagtcagcctgaggatttagcccagaggtgatggagcccctgaagggtgtgtgtggagggcagaggagaggggacaagacagggggacggctcaggaggctgcggcggggcaaggccagtacccggtggccttcagcagagcaaaggaggtggagcacaagctggacctctgctggaaacagcaggaatgacttcagccttggggcagctggctggcaggatgcagacacaccatgggtcctgttaaggccaaatctgcttcgggcaccaagatgtcaagaggtgctagacttggagtttgtcctggcaggtgatatggcaaagtgtcaccagagcctgccgtgggcacgaatgtgtggggcagagaggtttccaggcagtgagaggtggcagctgagctgagccaccaaggatgggaagggctggagctacagagatggagagaagggcccttcagcctttgggaacagggtcagcatccacagcaatggtgccattccagacactgcatgtgtcagcctcatgactacaaaccagaccagatgggcttggctattgtcatgcccaagaagccacagctcagagaggtttggtgacctggccatgaggacagagctggtagtagagctgggcttcagacccaggcagcccagccctttccatgagctgagtctctgcctctgcctctcccttccaagctctgcccatgtgtgtggccagtcagatggtgaaggaacttaaaccacataaaaaggccagacagggcggggtgtggtggctcacacctgtaatcccagcactttgggaggccgaggagggcagatcacttgagatcaggagttcaagaccagcctggccaacatggtgaaacccccctctctacaaacaatgcaaaaattagccaggcatggtggtgggtacctgtaatcccagctactcaggaggctgaggcaggagaattgcttgaaacccgggaagtggaggttgcagtgagccaagatcacactactgcactccagcctgggcaacagaacaagattctgtctc

SEQ ID NO: 24138 - protein, 183 aa, Homo sapiens [sequence omitted]

SEQ ID NO: 24139 - DNA, 3851 bp, Homo sapiens
agaagggagcgagagccccagagcgcggcggcagcggcggcctggcccttccagagggccagagccagggacatgcgggcgcccgggactccgcgttccgcgcggcccggcgcctgagcgcctccgttccccgtcccggagctgccggcggcatgatccgacacgccggggcgcccgcgcgcggggaccccacgggtccggttccagttgttggcaaaggagaggaagaggaagaggaagatggcatgcggctttgtctgccagccaacccgaaaaactgccttcctcaccgccggggcatcagcatcctggagaagctcatcaaaacatgcccggtgtggctgcagctgagtctgggccaggcagaggtggccaggatcctgcaccgggtggtggctgggatgttcctggttcgccgggacagcagctcgaagcagctggtgctctgtgtccactttccttctctgaacgaaagctcggccgaggtgctcgaatacaccattaaggaagaaaagtcgatattgtacctggaaggctcggctcttgtgtttgaggacatcttcagattgattgcgttctactgtgtcagtagagacttactgcccttcacactgcggctaccccaggccatccttgaggccagcagcttcacggaccttgagaccatcgccaacctgggtctgggtttctgggactcctcgctgaatcctccacaagaaagagggaagccagcagagcccccaagagaccgggcccccggattccccctagtctccagcctcaggcccacagcccatgacgcaaactgtgcctgtgaaatcgagctgtcggtaggaaatgaccgcctgtggtttgtgaatcctattttcatcgaggactgcagcagcgccctgcccaccgaccagccacctcttggaaattgccctgcacgccctttgccgcccacctctgatgccacctcacccacctccaggtgggccccacgccgcccaccaccccctcccccagtgctgcccctgcagccctgcagcccagcccagccccctgtgctccctgctcttgcccccgcccctgcctgtcctttgcccacctctcccccagtgcctgccccccacgtcacaccccatgccccaggtcccccagaccatccgaaccagccgcccatgatgacctgcgagagactcccatgccccactgcaggcctgggccccctcagggaggaagcgatgaagccaggggcagcctccagtcccttgcagcaggtccccgccccgccactgcctgcgaagaagaaccttcccactgcccctcccagacgccgcgtttccgagagggtgtccttagaagaccaaagtccggggatggcggcagagggggaccagctcagcctgcctccccaagggacctcagacggccctgaggacacgccccgggagagcacggagcaaggccaggacacagaggtgaaagccagcgatcctcacagcatgccagagctgcccaggacagccaaacaacccccagtcccgccccccaggaaaaaacggatctctcgacaactggcctcgaccctcccagctcccttagagaacgctgagctctgcacacaggcgatggccttggagacacccacgccgggtccacccagagagggccaaagccctgcttctcaggctgggactcagcaccctcctgcccaggccactgcccattcccagagctctccagagttcaagggctccctggcctccctctcagacagcttgggggtgtctgtcatggccaccgaccaggactcctactccaccagcagcacggaggaggagctggagcagttcagcagccccagcgtgaagaagaagccctccatgatcctgggcaaggctcggcaccggctgagctttgccagtttcagcagcatgttccacgctttcctctccaacaaccgcaagctgtacaagaaggtggtggagctggcgcaggacaagggctcgtactttggcagcctggtgcaggactacaaggtgtacagcctggagatgatggcgcgccagacctccagcacggagatgctgcaggagattcgcaccatgatgacccagctcaagagctacctgctgcagagcaccgagctcaaggccctggtggaccccgccctgcactccgaggaggagctcgaagcaattgtagagtctgccttgtacaaatgtgtcctgaagcccctgaaggaagccatcaactcatgcctgcatcagatccacagcaaggatggttcgctgcagcagctcaaggagaaccagttagtgatcctggccaccaccaccactgacctaggtgtgaccaccagcgtgccggaggtgcccatgatggagaagatcctgcagaagttcaccagcatgcacaaggcctactcacctgagaagaagatctccatcctgctcaagacctgcaaactcatctacgactccatggccctcggcaacccagggaagccctatggggcggatgacttcctgcctgtgctcatgtatgtgctggcccgcagcaacctcacggagatgcttctcaatgtggagtacatgatggagctcatggaccccgccctgcagctgggggagggttcctactatctgaccaccacctacggggccctggagcacatcaagagctacgacaagatcacggtgacccggcagctgagtgtggaggtgcaggactccatccaccgctgggagcgccggcgtactctcaacaaggcccgggcctcccgctcctccgtacaggacttcatctgcgtgtcgtacctggagcccgagcagcaggcgcggacgctggcgtcgcgggcggacacccaggcccaggcgctgtgcgcgcagtgcgcggagaagttcgcggtggagcggccgcaggcgcaccggctgttcgtgctggtggacgggcgctgcttccagctggcggacgacgcgctgccgcactgcatcaagggctacctgctgcgcagcgagcccaagcgcgacttccactttgtctaccggcccctggacggtggtggcggcggcggcggcgggagcccgccctgcctggtggtgcgggagcccaacttcctgtgaggccctcccggggcgcctcccctcacccccaggcgcacgtctggccccgcctctggctgcgcactcccgaccgcgacgtccacgcagcagagggacatgggccattccatgacgtgcccaggccaacgtcgcaggacagttgtgaaaataacatgacgctcgtccaaggccacttcctgagggcaagtcctaatagccctgagacaccgagacggcatgttcttcattagacggaaagggaaactgaggctcaggagagaggcgctccaggccgctgcagccaacaaaccggcgccctcttcacacgtagctcctcaggccattccccatgagtcccccacacccaccccatcctcggtctttgcaaagaagggcccgagcttagtttccccaggactggcctaggaaggagcaccggccacagctgctccccgtgccactcagggtggacccagcatctcaggagcacctcagggtgtcggttaagagacaggcctccacccctgcaccagagcctgctcttagctcccggtgcccccagaccccgcagctctgtgcccggcaagaagcagctagacacacgccagggcgccaagcacggccagctccgcggacccatggacaagcccagccccgcctcagggaaaacagggcctttccctacaggacacgccccagagctgtggcagattgcaggagccatcgtgtggggagaatttaataaaagcccttttgaaaatg

SEQ ID NO: 24140 - protein, 985 aa, Homo sapiens; identical to SEQ ID NO: 3195

SEQ ID NO: 24141 - DNA, 3766 bp, Homo sapiens
gagccccagagcgcggcggcagcggcggcctggcccttccagagggccagagccagggacatgcgggcgcccgggactccgcgttccgcgcggcccggcgcctgagcgcctccgttccccgtcccggagctgccggcggcatgatccgacacgccggggcgcccgcgcgcggggaccccacgggtccggttccagttgttggcaaaggagaggaagaggaagaggaagatggcatgcggctttgtctgccagccaacccgaaaaactgccttcctcaccgccggggcatcagcatcctggagaagctcatcaaaacatgcccggtgtggctgcagctgagtctgggccaggcagaggtggccaggatcctgcaccgggtggtggctgggatgttcctggttcgccgggacagcagctcgaagcagctggtgctctgtgtccactttccttctctgaacgaaagctcggccgaggtgctcgaatacaccattaaggaagaaaagtcgaagacttactgcccttcacactgcggctaccccaggccatccttgaggccagcagcttcacggaccttgagaccatcgccaacctgggtctgggtttctgggactcctcgctgaatcctccacaagaaagagggaagccagcagagcccccaagagaccgggcccccggattccccctagtctccagcctcaggcccacagcccatgacgcaaactgtgcctgtgaaatcgagctgtcggtaggaaatgaccgcctgtggtttgtgaatcctattttcatcgaggactgcagcagcgccctgcccaccgaccagccacctcttggaaattgccctgcacgccctttgccgcccacctctgatgccacctcacccacctccaggtgggccccacgccgcccaccaccccctcccccagtgctgcccctgcagccctgcagcccagcccagccccctgtgctccctgctcttgcccccgcccctgcctgtcctttgcccacctctcccccagtgcctgccccccacgtcacaccccatgccccaggtcccccagaccatccgaaccagccgcccatgatgacctgcgagagactcccatgccccactgcaggcctgggccccctcagggaggaagcgatgaagccaggggcagcctccagtcccttgcagcaggtccccgccccgccactgcctgcgaagaagaaccttcccactgcccctcccagacgccgcgtttccgagagggtgtccttagaagaccaaagtccggggatggcggcagagggggaccagctcagcctgcctccccaagggacctcagacggccctgaggacacgccccgggagagcacggagcaaggccaggacacagaggtgaaagccagcgatcctcacagcatgccagagctgcccaggacagccaaacaacccccagtcccgccccccaggaaaaaacggatctctcgacaactggcctcgaccctcccagctcccttagagaacgctgagctctgcacacaggcgatggccttggagacacccacgccgggtccacccagagagggccaaagccctgcttctcaggctgggactcagcaccctcctgcccaggccactgcccattcccagagctctccagagttcaagggctccctggcctccctctcagacagcttgggggtgtctgtcatggccaccgaccaggactcctactccaccagcagcacggaggaggagctggagcagttcagcagccccagcgtgaagaagaagccctccatgatcctgggcaaggctcggcaccggctgagctttgccagtttcagcagcatgttccacgctttcctctccaacaaccgcaagctgtacaagaaggtggtggagctggcgcaggacaagggctcgtactttggcagcctggtgcaggactacaaggtgtacagcctggagatgatggcgcgccagacctccagcacggagatgctgcaggagattcgcaccatgatgacccagctcaagagctacctgctgcagagcaccgagctcaaggccctggtggaccccgccctgcactccgaggaggagctcgaagcaattgtagagtctgccttgtacaaatgtgtcctgaagcccctgaaggaagccatcaactcatgcctgcatcagatccacagcaaggatggttcgctgcagcagctcaaggagaaccagttagtgatcctggccaccaccaccactgacctaggtgtgaccaccagcgtgccggaggtgcccatgatggagaagatcctgcagaagttcaccagcatgcacaaggcctactcacctgagaagaagatctccatcctgctcaagacctgcaaactcatctacgactccatggccctcggcaacccagggaagccctatggggcggatgacttcctgcctgtgctcatgtatgtgctggcccgcagcaacctcacggagatgcttctcaatgtggagtacatgatggagctcatggaccccgccctgcagctgggggagggttcctactatctgaccaccacctacggggccctggagcacatcaagagctacgacaagatcacggtgacccggcagctgagtgtggaggtgcaggactccatccaccgctgggagcgccggcgtactctcaacaaggcccgggcctcccgctcctccgtacaggacttcatctgcgtgtcgtacctggagcccgagcagcaggcgcggacgctggcgtcgcgggcggacacccaggcccaggcgctgtgcgcgcagtgcgcggagaagttcgcggtggagcggccgcaggcgcaccggctgttcgtgctggtggacgggcgctgcttccagctggcggacgacgcgctgccgcactgcatcaagggctacctgctgcgcagcgagcccaagcgcgacttccactttgtctaccggcccctggacggtggtggcggcggcggcggcgggagcccgccctgcctggtggtgcgggagcccaacttcctgtgaggccctcccggggcgcctcccctcacccccaggcgcacgtctggccccgcctctggctgcgcactcccgaccgcgacgtccacgcagcagagggacatgggccattccatgacgtgcccaggccaacgtcgcaggacagttgtgaaaataacatgacgctcgtccaaggccacttcctgagggcaagtcctaatagccctgagacaccgagacggcatgttcttcattagacggaaagggaaactgaggctcaggagagaggcgctccaggccgctgcagccaacaaaccggcgccctcttcacacgtagctcctcaggccattccccatgagtcccccacacccaccccatcctcggtctttgcaaagaagggcccgagcttagtttccccaggactggcctaggaaggagcaccggccacagctgctccccgtgccactcagggtggacccagcatctcaggagcacctcagggtgtcggttaagagacaggcctccacccctgcaccagagcctgctcttagctcccggtgcccccagaccccgcagctctgtgcccggcaagaagcagctagacacacgccagggcgccaagcacggccagctccgcggacccatggacaagcccagccccgcctcagggaaaacagggcctttccctacaggacacgccccagagctgtggcagattgcaggagccatcgtgtggggagaatttaataaaagcccttttgaaaatg

SEQ ID NO: 24142 - protein, 648 aa, Homo sapiens
MMTCERLPCPTAGLGPLREEAMKPGAASSPLQQVPAPPLPAKKNLPTAPPRRRVSERVSLEDQSPGMAAEGDQLSLPPQGTSDGPEDTPRESTEQGQDTEVKASDPHSMPELPRTAKQPPVPPPRKKRISRQLASTLPAPLENAELCTQAMALETPTPGPPREGQSPASQAGTQHPPAQATAHSQSSPEFKGSLASLSDSLGVSVMATDQDSYSTSSTEEELEQFSSPSVKKKPSMILGKARHRLSFASFSSMFHAFLSNNRKLYKKVVELAQDKGSYFGSLVQDYKVYSLEMMARQTSSTEMLQEIRTMMTQLKSYLLQSTELKALVDPALHSEEELEAIVESALYKCVLKPLKEAINSCLHQIHSKDGSLQQLKENQLVILATTTTDLGVTTSVPEVPMMEKILQKFTSMHKAYSPEKKISILLKTCKLIYDSMALGNPGKPYGADDFLPVLMYVLARSNLTEMLLNVEYMMELMDPALQLGEGSYYLTTTYGALEHIKSYDKITVTRQLSVEVQDSIHRWERRRTLNKARASRSSVQDFICVSYLEPEQQARTLASRADTQAQALCAQCAEKFAVERPQAHRLFVLVDGRCFQLADDALPHCIKGYLLRSEPKRDFHFVYRPLDGGGGGGGGSPPCLVVREPNFL

SEQ ID NO: 24143 - DNA, 516 bp, Homo sapiens
cgcggcggcagcggcggcctggcccttccagagggccagagccagggacatgcgggcgcccgggactccgcgttccgcgcggcccggcgcctgagcgcctccgttccccgtcccggagctgccggcggcatgatccgacacgccggggcgcccgcgcgcggggaccccacgggcccggaaattctggatgctggtttctttctctcgaaagcgacctctgcaaagacaaataccatccggtgggaagaactgggaatccgttggggaagagccccccaaccctcacacccacttgcaagtatctgccacacccaagatggcagggtgaagccggagaggagtttctcagggaggaaggggaggtgaggggccagggcgctggcctcaccggcttctcattttccccagagatgacctagtgtgatccacttcctcttgtctttttttgttcattactgggtcggttatttaaactctctgtatctcagttcacttatcaataaaatgataaataat

SEQ ID NO: 24144 - protein, 78 aa, Homo sapiens
MIRHAGAPARGDPTGPEILDAGFFLSKATSAKTNTIRWEELGIRWGRAPQPSHPLASICHTQDGRVKPERSFSGRKGR

SEQ ID NO: 24145 - DNA, 826 bp, Homo sapiens
aaggtcctatacaagttacactccgccattttgcctcttagtgctcatgcttgagcccacgggcacagtttgtgagatgtaatcgagaagatgctgatcaccagttttcagcagagtttgtgaaaggcagcagaatcccgctccccatgcttgccttcgggaccctcactggagcagaaccattgcttagagcgtgagaaggagaagcgagtgtccgtcaacatgctggctctgggtgagacctcgatgttcctggttcgccgggacagcagctcgaagcagctggtgctctgtgtccactttccttctctgaacgaaagctcggccgaggtgctcgaatacaccattaaggaagaaaagtcgacattccccttttcagcctccaacactggagttgggccaggaaaaaaatacatcatgagataatttaactccaagaactttattgtaaaacttcagtggtgaatttcttttaaaaaaaatagatcttgaatcatagtggtgtattcttagcctcctttttttttcacttagacattttattatgagctttctctgtgttattgaacatttcaaagactttgcaaccaattaaatatgtgttggatggcttctgaaggaagacagtatgacaggcttgaagacagggttcttggcattgaaccagtgggagagacaggctcatgcatacataaccagaaatacaagtcgttcgaactgtcctaaatgttagaatgtaagcatgtactctgggtcatcaaaaccaatgacactcagggaaatccacccaggcctactttgggccttggacgatggaaaatatttg

SEQ ID NO: 24146 - protein, 67 aa, Homo sapiens
MLALGETSMFLVRRDSSSKQLVLCVHFPSLNESSAEVLEYTIKEEKSTFPFSASNTGVGPGKKYIMR

SEQ ID NO: 24147 - DNA, 3598 bp, Homo sapiens
cattttaaaacagcagagtttgtgaaaggcagcagaatcccgctccccatgcttgccttcgggaccctcactggagcagaaccattgcttagagcgtgagaaggagaagcgagtgtccgtcaacatgctggctctgggtgagacctcgatgttcctggttcgccgggacagcagctcgaagcagctggtgctctgtgtccactttccttctctgaacgaaagctcggccgaggtgctcgaatacaccattaaggaagaaaagtcgatattgtacctggaaggctcggctcttgtgtttgaggacatcttcagattgattgcgttctactgtgtcagtagagacttactgcccttcacactgcggctaccccaggccatccttgaggccagcagcttcacggaccttgagaccatcgccaacctgggtctgggtttctgggactcctcgctgaatcctccacaagaaagagggaagccagcagagcccccaagagaccgggcccccggattccccctagtctccagcctcaggcccacagcccatgacgcaaactgtgcctgtgaaatcgagctgtcggtaggaaatgaccgcctgtggtttgtgaatcctattttcatcgaggactgcagcagcgccctgcccaccgaccagccacctcttggaaattgccctgcacgccctttgccgcccacctctgatgccacctcacccacctccaggtgggccccacgccgcccaccaccccctcccccagtgctgcccctgcagccctgcagcccagcccagccccctgtgctccctgctcttgcccccgcccctgcctgtcctttgcccacctctcccccagtgcctgccccccacgtcacaccccatgccccaggtcccccagaccatccgaaccagccgcccatgatgacctgcgagagactcccatgccccactgcaggcctgggccccctcagggaggaagcgatgaagccaggggcagcctccagtcccttgcagcaggtccccgccccgccactgcctgcgaagaagaaccttcccactgcccctcccagacgccgcgtttccgagagggtgtccttagaagaccaaagtccggggatggcggcagagggggaccagctcagcctgcctccccaagggacctcagacggccctgaggacacgccccgggagagcacggagcaaggccaggacacagaggtgaaagccagcgatcctcacagcatgccagagctgcccaggacagccaaacaacccccagtcccgccccccaggaaaaaacggatctctcgacaactggcctcgaccctcccagctcccttagagaacgctgagctctgcacacaggcgatggccttggagacacccacgccgggtccacccagagagggccaaagccctgcttctcaggctgggactcagcaccctcctgcccaggccactgcccattcccagagctctccagagttcaagggctccctggcctccctctcagacagcttgggggtgtctgtcatggccaccgaccaggactcctactccaccagcagcacggaggaggagctggagcagttcagcagccccagcgtgaagaagaagccctccatgatcctgggcaaggctcggcaccggctgagctttgccagtttcagcagcatgttccacgctttcctctccaacaaccgcaagctgtacaagaaggtggtggagctggcgcaggacaagggctcgtactttggcagcctggtgcaggactacaaggtgtacagcctggagatgatggcgcgccagacctccagcacggagatgctgcaggagattcgcaccatgatgacccagctcaagagctacctgctgcagagcaccgagctcaaggccctggtggaccccgccctgcactccgaggaggagctcgaagcaattgtagagtctgccttgtacaaatgtgtcctgaagcccctgaaggaagccatcaactcatgcctgcatcagatccacagcaaggatggttcgctgcagcagctcaaggagaaccagttagtgatcctggccaccaccaccactgacctaggtgtgaccaccagcgtgccggaggtgcccatgatggagaagatcctgcagaagttcaccagcatgcacaaggcctactcacctgagaagaagatctccatcctgctcaagacctgcaaactcatctacgactccatggccctcggcaacccagggaagccctatggggcggatgacttcctgcctgtgctcatgtatgtgctggcccgcagcaacctcacggagatgcttctcaatgtggagtacatgatggagctcatggaccccgccctgcagctgggggagggttcctactatctgaccaccacctacggggccctggagcacatcaagagctacgacaagatcacggtgacccggcagctgagtgtggaggtgcaggactccatccaccgctgggagcgccggcgtactctcaacaaggcccgggcctcccgctcctccgtacaggacttcatctgcgtgtcgtacctggagcccgagcagcaggcgcggacgctggcgtcgcgggcggacacccaggcccaggcgctgtgcgcgcagtgcgcggagaagttcgcggtggagcggccgcaggcgcaccggctgttcgtgctggtggacgggcgctgcttccagctggcggacgacgcgctgccgcactgcatcaagggctacctgctgcgcagcgagcccaagcgcgacttccactttgtctaccggcccctggacggtggtggcggcggcggcggcgggagcccgccctgcctggtggtgcgggagcccaacttcctgtgaggccctcccggggcgcctcccctcacccccaggcgcacgtctggccccgcctctggctgcgcactcccgaccgcgacgtccacgcagcagagggacatgggccattccatgacgtgcccaggccaacgtcgcaggacagttgtgaaaataacatgacgctcgtccaaggccacttcctgagggcaagtcctaatagccctgagacaccgagacggcatgttcttcattagacggaaagggaaactgaggctcaggagagaggcgctccaggccgctgcagccaacaaaccggcgccctcttcacacgtagctcctcaggccattccccatgagtcccccacacccaccccatcctcggtctttgcaaagaagggcccgagcttagtttccccaggactggcctaggaaggagcaccggccacagctgctccccgtgccactcagggtggacccagcatctcaggagcacctcagggtgtcggttaagagacaggcctccacccctgcaccagagcctgctcttagctcccggtgcccccagaccccgcagctctgtgcccggcaagaagcagctagacacacgccagggcgccaagcacggccagctccgcggacccatggacaagcccagccccgcctcagggaaaacagggcctttccctacaggacacgccccagagctgtggcagattgcaggagccatcgtgtggggagaatttaataaaagcccttttgaaaatg

SEQ ID NO: 24148 - protein, 910 aa, Homo sapiens
MLALGETSMFLVRRDSSSKQLVLCVHFPSLNESSAEVLEYTIKEEKSILYLEGSALVFEDIFRLIAFYCVSRDLLPFTLRLPQAILEASSFTDLETIANLGLGFWDSSLNPPQERGKPAEPPRDRAPGFPLVSSLRPTAHDANCACEIELSVGNDRLWFVNPIFIEDCSSALPTDQPPLGNCPARPLPPTSDATSPTSRWAPRRPPPPPPVLPLQPCSPAQPPVLPALAPAPACPLPTSPPVPAPHVTPHAPGPPDHPNQPPMMTCERLPCPTAGLGPLREEAMKPGAASSPLQQVPAPPLPAKKNLPTAPPRRRVSERVSLEDQSPGMAAEGDQLSLPPQGTSDGPEDTPRESTEQGQDTEVKASDPHSMPELPRTAKQPPVPPPRKKRISRQLASTLPAPLENAELCTQAMALETPTPGPPREGQSPASQAGTQHPPAQATAHSQSSPEFKGSLASLSDSLGVSVMATDQDSYSTSSTEEELEQFSSPSVKKKPSMILGKARHRLSFASFSSMFHAFLSNNRKLYKKVVELAQDKGSYFGSLVQDYKVYSLEMMARQTSSTEMLQEIRTMMTQLKSYLLQSTELKALVDPALHSEEELEAIVESALYKCVLKPLKEAINSCLHQIHSKDGSLQQLKENQLVILATTTTDLGVTTSVPEVPMMEKILQKFTSMHKAYSPEKKISILLKTCKLIYDSMALGNPGKPYGADDFLPVLMYVLARSNLTEMLLNVEYMMELMDPALQLGEGSYYLTTTYGALEHIKSYDKITVTRQLSVEVQDSIHRWERRRTLNKARASRSSVQDFICVSYLEPEQQARTLASRADTQAQALCAQCAEKFAVERPQAHRLFVLVDGRCFQLADDALPHCIKGYLLRSEPKRDFHFVYRPLDGGGGGGGGSPPCLVVREPNFL

SEQ ID NO: 24149 - DNA, 645 bp, Homo sapiens
gttgtcctcctcaccttcacccaaatctttaattcacggagctgcatccccttctttggtttcagatgttcctggttcgccgggacagcagctcgaagcagctggtgctctgtgtccactttccttctctgaacgaaagctcggccgaggtgctcgaatacaccattaaggaagaaaagtcgacattccccttttcagcctccaacactggagttgggccaggaaaaaaatacatcatgagataatttaactccaagaactttattgtaaaacttcagtggtgaatttcttttaaaaaaaatagatcttgaatcatagtggtgtattcttagcctcctttttttttcacttagacattttattatgagctttctctgtgttattgaacatttcaaagactttgcaaccaattaaatatgtgttggatggcttctgaaggaagacagtatgacaggcttgaagacagggttcttggcattgaaccagtgggagagacaggctcatgcatacataaccagaaatacaagtcgttcgaactgtcctaaatgttagaatgtaagcatgtactctgggtcatcaaaaccaatgacactcagggaaatccacccaggcctactttgggccttggacgatggaaaatatttg

SEQ ID NO: 24150 - protein, 59 aa, Homo sapiens
MFLVRRDSSSKQLVLCVHFPSLNESSAEVLEYTIKEEKSTFPFSASNTGVGPGKKYIMR

SEQ ID NO: 24151 - DNA, 1356 bp, Homo sapiens
tgcccctctcttgcttccacaggtttctgggactcctcgctgaatcctccacaagaaagagggaagccagcagagcccccaagagaccgggcccccggattccccctagtctccagcctcaggcccacagcccatgacgcaaactgtgcctgtgaaatcgagctgtcggtaggaaatgaccgcctgtggtttgtgaatcctattttcatcgaggactgcagcagcgccctgcccaccgaccagccacctcttggaaattgccctgcacgccctttgccgcccacctctgatgccacctcacccacctccaggtcccccagaccatccgaaccagccgcccatgatgacctgcgagagactcccatgccccactgcaggcctgggccccctcagggaggaagcgatgaagccaggggcagcctccagtcccttgcagcaggtccccgccccgccactgcctgcgaagaagaaccttcccactgcccctcccagacgccgcgtttccgagagggtgtccttagaagaccaaagtccggggatggcggcagagggggaccagctcagcctgcctccccaagggacctcagacggccctgaggacacgccccgggagagcacggagcaaggccaggacacagaggtgaaagccagcgatcctcacagcatgccagagctgcccaggacagccaaacaacccccagtcccgccccccaggaaaaaacggatctctcgacaactggcctcgaccctcccagctcccttagagaacgctgagctctgcacacaggcgatggccttggagacacccacgccgggtccacccagagagggccaaagccctgcttctcaggctgggactcagcaccctcctgcccaggccactgcccattcccagagctctccagagttcaagggctccctggcctccctctcagacagcttgggggtgtctgtcatggccaccgaccaggactcctactccaccagcagcacggaggaggagctggagcagttcagcagccccagcgtgaagaagaagccctccatgatcctgggcaaggctcggcaccggctgagctttgccagtttcagcagcatgttccacgctttcctctccaacaaccgcaagctgtacaagaaggtggtggagctggcgcaggacaagggctcgtactttggcagcctggtgcaggactacaaggtgtacagcctggagatgatggcgcgccagacctccagcacggagatgctgcaggagattcgcaccatgatgacccagctcaagagctacctgctgcagagcaccgagctcaaggccctggtggaccccgccctgcactccgaggaggagctcgg

SEQ ID NO: 24152 - protein, 354 aa, Homo sapiens
MPPHPPPGPPDHPNQPPMMTCERLPCPTAGLGPLREEAMKPGAASSPLQQVPAPPLPAKKNLPTAPPRRRVSERVSLEDQSPGMAAEGDQLSLPPQGTSDGPEDTPRESTEQGQDTEVKASDPHSMPELPRTAKQPPVPPPRKKRISRQLASTLPAPLENAELCTQAMALETPTPGPPREGQSPASQAGTQHPPAQATAHSQSSPEFKGSLASLSDSLGVSVMATDQDSYSTSSTEEELEQFSSPSVKKKPSMILGKARHRLSFASFSSMFHAFLSNNRKLYKKVVELAQDKGSYFGSLVQDYKVYSLEMMARQTSSTEMLQEIRTMMTQLKSYLLQSTELKALVDPALHSEEE

SEQ ID NO: 24153 - DNA, 4905 bp, Homo sapiens
gcctcaggcccacagcccatgacgcaaactgtgcctgtgaaatcgagctgtcggtaggaaatgaccgcctgtggtttgtgaatcctattttcatcgaggactgcagcagcgccctgcccaccgaccagccacctcttggaaattgccctgcacgccctttgccgcccacctctgatgccacctcacccacctccaggtgggccccacgccgcccaccaccccctcccccagtgctgcccctgcagccctgcagcccagcccagccccctgtgctccctgctcttgcccccgcccctgcctgtcctttgcccacctctcccccagtgcctgccccccacgtcacaccccatgccccaggtcccccagaccatccgaaccagccgcccatgatgacctgcgagagactcccatgccccactgcaggcctgggccccctcagggaggaagcgatgaagccaggggcagcctccagtcccttgcagcaggtccccgccccgccactgcctgcgaagaagaaccttcccactgcccctcccagacgccgcgtttccgagagggtgtccttagaagaccaaagtccggggatggcggcagagggggaccagctcagcctgcctccccaagggacctcagacggccctgaggacacgccccgggagagcacggagcaaggccaggacacagaggtgaaagccagcgatcctcacagcatgccagagctgcccaggacagccaaacaacccccagtcccgccccccaggaaaaaacggatctctcgacaactggcctcgaccctcccagctcccttagagaacgctgagctctgcacacaggcgatggccttggagacacccacgccgggtccacccagagagggccaaagccctgcttctcaggctgggactcagcaccctcctgcccaggccactgcccattcccagagctctccagagttcaagggctccctggcctccctctcagacagcttgggggtgtctgtcatggccaccgaccaggactcctactccaccagcagcacggaggaggagctggagcagttcagcagccccagcgtgaagaagaagccctccatgatcctgggcaaggctcggcaccggctgagctttgccagtttcagcagcatgttccacgctttcctctccaacaaccgcaagctgtacaagaaggtggtggagctggcgcaggacaagggctcgtactttggcagcctggtgcaggactacaaggtgtacagcctggagatgatggcgcgccagacctccagcacggagatgctgcaggagattcgcaccatgatgacccagctcaagagctacctgctgcagagcaccgagctcaaggccctggtggaccccgccctgcactccgaggaggagctcgaagcaattgtagagtctgccttgtacaaatgtgtcctgaagcccctgaaggaagccatcaactcatgcctgcatcagatccacagcaaggatggttcgctgcagcagctcaaggagaaccagttagtgatcctggccaccaccaccactgacctaggtgtgaccaccagcgtgccggaggtgcccatgatggagaagatcctgcagaagttcaccagcatgcacaaggcctactcacctgagaagaagatctccatcctgctcaagacctgcaaactcatctacgactccatggccctcggcaacccagggaagccctatggggcggatgacttcctgcctgtgctcatgtatgtgctggcccgcagcaacctcacggagatgcttctcaatgtggagtacatgatggagctcatggaccccgccctgcagctgggggagggttcctactatctgaccaccacctacggggccctggagcacatcaagagctacgacaagatcacggtgacccggcagctgagtgtggaggtgcaggactccatccaccgctgggagcgccggcgtactctcaacaaggcccgggcctcccgctcctccgtacaggtgaggcctgagagcgggaggggcccggtggggccatgtcccagacaccatccctgctgcctgctggctaaggagccgtgacatcacctggctgctccagccgcccagccctgccttaggggagcagtgagactccccacaccagaggaagggcccccagcccctgctgccagtgtgtgtccaggacttgggtgcgtctagaaacatatcagcaggcattggtgttctccctgggcaagcaggaagggtgcaggaggaatgagacacacccatcattccttagcccctcctaggacccagcaccctgcaggggctggagatggggacttgtcatcccagtccctgctttaaggagcccacaggctcatctacagccttgctccttagtccctggacaaatgcagcagctgccaagggtctgcgtaacccccaccaacccagtggcccacccctccccatacctctctctatacagactcagtattcaaaccagtcccgcccctccccaactccatcaccccacccacccccaggctgcatcaaatccagctgcccccagttccccaaacatgcccagcccagttcactggctgctcaaccgctgccctcactggtcaatctccccttcttcactggctgtcactgcccatcctttaagacgactcagtttctccaacagcccctcctctgagaagccttccctgatacacacacacaccgtttcacacaggctgggtggggtgccctcctctgggcttcctgcggcctccccttttacagtgcatatcacatcctatcatcctctgcatatgaagctgtcacctctgggagggcacagcccatggttcacatgcctcaggggcgccaagcccagggcctgggacagagcaggactgggtgtgtaaaaaagggtgagagttggactagtgagccaggcacatccagagctgtgagcagctatgcagactcactcctctgacacccagagcagaccagtcctgagccacactcctggctttcaagatggtgcatctataataagcagagcccaggcctgggagacaggaggcttgagttctggccccagccctgtactagcttgctgtgtgaccctcagcaatccctgccccactctgggactcagttttcctgcccacacaggctgactatggctaatcaatttaataactgactctctggggagaaaacaaaagctctgattttagcttctgtccatttccatggtgtgagtcctccatggccaacttcaacttggcatcactgaatgtggagttggaaagaagtgtatgcagtcggctctccctggcgggtgtgagccagctccagcacacctctgttcccatcccctcccaacaccccggactcccacagactgtagggacatggacactcttggtccaagcctggcccaggcatcccgtacttcctgcttctaccttaggggttcctgatgctgagccaggcagagtatggatgaaacggaccacccactgtttgggagacggaagcttcggaggggggtcccctcagcaccacatctgggatctggggagggcaccaccctctgccccctcccagtgcctcctccgcacaccatgccttggggggtgggcacccttccctggggaggggaagcccagagctggacagtcactagcaggtggatagtgccctgggaggcctaatggaggacaaggagccctgaggcagccactaagacggagggagtgggccgggcttttcccctcctggaagaaatgggcggtccccgtgaagctcttgacaggagcccggcctcgcctaagccctagccaccagttgccatcacggtctccgccgagccgggatcctcagccgcttcccgcgcaggcctgctgttcccaatccggccacaagggggcagccccgcgcgcagcctctctgcctgcagccctgagccccggggaaggcgaggccgctccgggccggagcttccagcgcctgctcgcccatttatgggaggcgggcgctatccccactttacagccggggctcgacgaatcaaggccacacaggcagtgggagcaaaggcaaagcccggcaggtgtggggctgggtccctaggggtggaggacggcgggcgggcgccctgctcgtgctgcgagtgcccagccccagcccgcaggcgtcgcctcgccttgcccgccctgctcatgccgggccttccccacccgactgcgcccagcctccttcacccggtcccctcccgctttaccaatccctgccccacgcagctcctcagagccccagggctcttgcagccctaaggggctggactgtgttgcccgcccgcactatgggatgcccgggcgggctcgcacctcccttcttatctgtgctgccctccgtgcccagcattgcgcctggggtgcagggaactcacctggagggagggagggagggaatgaatgaatgaatgaatgatggggagcctgtggaccagcagccaggggacgcgccggctcctctttgcagggactccgagacgcgccttaattcatctcccagaactgtcggcccagctgggaagccaggcagggagggggacgggccccccgcaggctcgcggcagagacgggaaaggcgcaggtgccggactcgcagacagcttggcgcccgccacccgctatccatccagggaggggcctgggccgggagagggcgcctgaggagacagggccccgccgtgaccacaggcccctcgcgtctccgcaggacttcatctgcgtgtcgtacctggagcccgagcagcaggcgcggacgctggcgtcgcgggcggacacccaggcccaggcgctgtgcgcgcagtgcgcggagaagttcgcggtggagcggccgc

SEQ ID NO: 24154 - protein, 566 aa, Homo sapiens [sequence omitted]

SEQ ID NO: 24155 - DNA, 352 bp, Homo sapiens
agatgcttctcaatgtggagtacatgatggagctcatggaccccgccctgcagctgggggagggttcctactatctgaccaccacctacggggccctggagcacatcaagagctacgacaagatcacggtgacccggcagctgagtgtggaggtgcaggactccatccaccgctgggagcgccggcgtactctcaacaaggcccgggcctcccgctcctccgtacaggacttcatctgcgtgtcgtacctggagcccgagcagcaggcgcggacgctggcgtcgcgggcggacacccaggcccaggcgctgtgcgcgcagtgcgcggagaagttcgcggtggagcggccgca

SEQ ID NO: 24156 - protein, 115 aa, Homo sapiens
MLLNVEYMMELMDPALQLGEGSYYLTTTYGALEHIKSYDKITVTRQLSVEVQDSIHRWERRRTLNKARASRSSVQDFICVSYLEPEQQARTLASRADTQAQALCAQCAEKFAVER

SEQ ID NO: 24157 - DNA, 2835 bp, Homo sapiens
gcttgccagagtttttgtgcaggaacagcccctcccgtctttgtcctggcggtgagcacccagggctaagcttttgaacactttctttgtgtttggattcagcccaggcaatgcatatttgctttcatttcttcttgagcttgaggagctcctgggtgcaaatcttggaaaatgaggatctctgagcctttccaggccagctctttgttttgtagcagacaattgaggctttgaaaaggaaagtgggtgggggcaccccacaggtggccctcatcacccaattgccagtgcctgcaggctgcttcagcagaggcccagagtcaaagaggacttaaaaccagctgtcgtttctcccttagcttctgtgtatgagagaaacgacttctgtttttcaaagtaagaacaaggaggaatttgtttctaaaagaacattaaaacacaggctcgtggtctaaaagcaaatggttcagcaggatgttcagggccttaaagcacagtcagcaggactcagcatctcccagcacctgctctccggttgtcatggtaacatcatccccaacccaaccaccttgtccagccgagagacagcaatcataaggagggacctcggtttcccccgaggatcctgggcttcctttctgaaacgcttgcttctgagctcagcaaccaggaacaccaggccagcccatccccagcacctctgtggagatgagggacaaagtcctacagtccctcttcctgttctgatgagaaagggagggaagaaaacataccccgagcgcctgcaatatggtcatgacactttcaaaaagcctgtgctatggagtcatgatcagaaaccagagtgtggagagggtcagcagcctgcctcagagcagccagctaggcggggagtggtaaatttgggacttgtacccaggcatgactggctccgagcccagtgctccactctatggaatgttccctgggcctcagttgctttcctttcctttgcaggccgcgggctgctgccactctggcagctggtgagttagctggagggcaacattccaaagcaggggcagcatgctgctttcctcctgtgcccactcctgcggggaagtccgttgactcccaccgctgaagggagctggcaacaccaggatgaggtcccaggggacgggagcaggtacccactgtctgtctaccttcccactggaaaagcacggacaggccagcccttgcgggggcaggcagaggacagagttggctttgcgcggtctctgcctgctgagcagttccaattcctctcatgggagaaacaaggaggcagtcgcttgtgcatgttccagaagttttactggggaggaggaagcggacagaggaagctgtgtgtgcatgtgaaggggtgggcagggtgggagggatgcacgcgtatgtgagcatagcatgtgtgagtactacacacatctccatgcagaagcacaactgggcagccctggcttccagctctgggcttcagcacaacagacaccagcctgtggtctctcagaagccagggagaccacatcgggctcaggacgttttacccaaagtccagagtttttatgcctctccctggcattctccataaagaagggaaggtcagatgaccccttagatctgtgtcatctgggaatttccttgggctggtttagacacgatgccctctttttctcaggatagcagataacctgctttgaaagagggcttaattctgtgggtcctaaattttctcctttctctctctctttctgtgtgtgtgtgttgggaaaatggcaagtttccaataccagctttggaggaacgattacgttttccctccaatttcaagtccgaaagaccagagccctcattccaaagccccccacccagatggattttttcgtttcatttgtcatccgtcccatgggagggccccatgtctcctcagaacccatcctggaggcagcaggtcgggtagagtgagtttggcctgctcatgacctccacccctgagattgtgaacaaggatgtctggggcgatgctgagaatgtttttgaagctgctcccagatgacgctgatgatcacaccagattgagtgctgcgatcgccttgagtccaacctctgcataaacgaggttctcataaacaagttcactctaccctaagctaagtctatgtgagcaaacccacttcatcctttgtacctggagacctggttacactaacctgatactgacctgttcatgtagctggaatggtgtgtttcatgcagtgtggaccaagcaatggcatggggtgtgtgtgtgtgtgtgtgtgtgtctgtgtgtgtgtgtttgtgtatgcgttcacacttgtgtgtgtatatgtgcatgtagatgctgcataaatgatttttgatgtcaaagacaaacacattccattgttttaaatattctattatgtaaacaatacgcagagggaccatatctactcttgtcatattatttgtgatggtaaaacatgcatttgcaataaattaagctttctgggaaggcaagcagtattggagccaaacgactgtctcggaacatgtgtgtgttatctcggttcatatcaagtccaaagctaatggagccttccccgccatccagggaggaacaccaggaccccggagtttcttcttagtgctatattttaaagttgcattgacgttttcctccccttccttttgtgcaagttggaagtagcagtgttctaaaagatggtttgacgtttttgctgttgttttatgtttttaaaaatgtatctgctttgtgtttggaaataaaaatctctattttggtctatgaaa

SEQ ID NO: 24158 - protein, 190 aa, Homo sapiens
MVQQDVQGLKAQSAGLSISQHLLSGCHGNIIPNPTTLSSRETAIIRRDLGFPRGSWASFLKRLLLSSATRNTRPAHPQHLCGDEGQSPTVPLPVLMRKGGKKTYPERLQYGHDTFKKPVLWSHDQKPECGEGQQPASEQPARRGVVNLGLVPRHDWLRAQCSTLWNVPWASVAFLSFAGRGLLPLWQLVS

SEQ ID NO: 24159 - DNA, 3160 bp, Homo sapiens
gcccctgcaggtgccatgactcagcagccccaggacgactttgacaggagcgtggaggatgcccaggcatggatgaaggctgtgcaggaccagctgcaggtcaatgacaacacgcagggaccccgcgcggccctggaggccaggctgtgggagaccgagaaaatatgccagctggagcccgaggggcgtgtgagggtggacctcgtgctacggatggctgaagccctcttggcatgctgccctggggaccagaagcccgggatcctggcccggctgaaggacatcaaggcccaatgggaggagacagtcacctacatgactcactgtcacagccgcatcgagtgggtgtggctgcactggagcgagtacctgctggcccgagatgagttctaccgctggttccagaagatgatggtcacactggagccccacatcgagctccagctgggcctgaaggagaagcagtggcagctgagccacgcccaggtgctgctgcacaacgtggacaaccaggcggtgctcctggaccggctgctggaggaggcagcctccctgttcaacaggatcggggaccccagcgtggacgaagatgcccagaagagaatgaaggctgagtacgatgcagtgaaggccaaggcccagaagcgtgtagatctgctggagcaggtggcccgggagcatgaggagtaccaggcaggtgtggacgagttccaactgtggctgaaggcggtggtggagaaggtgaatggctgcctggggcggaactgcaagctgcccatcacgcagcgcctctccacactgcaggacattgccaaagattttcccaggggcgaggagtctctggagacgctggaggagcagtctgcgggtgtcattcggaacacctctcctttgggtgcagagaagatcaccggagaactggaagagatgaggaaagttctggagaagctgcgcgccctctgggaggaggaggaggagcggctgcggggcctgctccggtccaggggagcctgggagcagcagattaagcagctggaggctgagctcagtgagttcaggatggtcctgcagaggctggcccaggagggcctgcagcctgcggcgaaagcggggaccgaggacgagctggtggcacactggagacgctactcggcaacacgggcggcgctggcctcggaggagccccgggtggaccggctgcaagcccagctgaaggagctcatcgtcttccctcacaacctgaagccactctctgatagtgtcatcgctaccatccaggagtatcagagcctgaaggtgaagagcgcgaggctgcgcaatgccgcggcggtggagctgtggcagcatttccagcggcctctgcaggatctgcagctgtggaaggccctggcccagcggctcttggaggtcactgccagcctgccggacctgccttcccttcacaccttcctgccccagatcgaggcagccctgatggaaagctcccgcctgaaagagctgctgacgatgctgcagctgaagaaagacctcctgattggcatctttggccaggagagagccacggcactcctggagcaggtggcaggttccatgagggacagagacctgctgcataacagcctcctgcagaggaaaagcaaactgcagagcctgctcgctcagcacaaagactttggagcagcttttgagcccctgcagaggaagctcttggacctccaggtcagggtccaagccgagaaggggcttcagcgggaccttcctggaaaacaggcccagctctcaaggttgcaggggctgcaggaagaggggctggacttgggggcacagatggaggctgcaaggcctctggtccaggagaaccccaaccaccagcacaaaatggaccagctttcctccgacttccaggccctgcagaggtctctggaggaccttgtggacaggtgtcggcagagtgtgcaggagcactgcaccttcagccaccagctgctggagctgcggcagtggatcgttgtgaccacgcaaaagctggaggcacaccggggagaggcgggcccgggggatgccgagtcccaagaggccgagtttgagaggctggtggcagaattcccggagaaggaggcccagctgtccctggtggaagcgcagggctggctggtgatggagaagtcttctccggagggtgctgccgtggtgcaggaggagctcagggagctggcagagtcgtggcgggccttgaggctgctggaagaaagtctgctgagcctcatcagaaactggcatctgcagaggatggaagtggattcggggaagaaaatggttttcaccaacaacatcccaaagtcaggatttctcatcaatcccatggatcctattcccaggcatcgtcgacgcgcaaatcttctacaggaagaagaagggagccatgaagatttctcccagctcctgaggaactttgggcagtggttgcaggtggaaaactccaagctggttagaatcatcgcaatgagaacttctacagctgaggacttgaggaccagaaaatcgaagctgcaggagctggaggctcgggtgccagaaggtcagcatctctttgagaacctccttcgtctcgggccagcaagggggacctcggatgagctggaagatctgcgctaccagtggatgctgtacaagtccaagctgaaggactctggccacctgctgacacaaagttctccaggggagccgactggattccaaaagactcggcggtggcgaggactgggctccctcttccggagggcgtgctgtgtggcgctcccactgcagctgcttctgctgctgttcctcctcctgctgttcctgctcccaatcagggaagaggaccgcagctgcaccctggccaacaacttcgcccgctccttcacgctcatgctgcgctacaatggcccaccacccacctaacccactggggcacacaggtgactttctcctccaacctccatcagtcccagggcccctcctgaggatgctcgccagggaaactggaaacaggggcagggcaaagactgcagagctgcatccatatcagtgctgtgtcagcgttcccagaagacacttactttttatacagtgttgtcttagtctatttatactaaatgtgtactacatgtgactaggg

SEQ ID NO: 24160 - protein, 975 aa, Homo sapiens
MTQQPQDDFDRSVEDAQAWMKAVQDQLQVNDNTQGPRAALEARLWETEKICQLEPEGRVRVDLVLRMAEALLACCPGDQKPGILARLKDIKAQWEETVTYMTHCHSRIEWVWLHWSEYLLARDEFYRWFQKMMVTLEPHIELQLGLKEKQWQLSHAQVLLHNVDNQAVLLDRLLEEAASLFNRIGDPSVDEDAQKRMKAEYDAVKAKAQKRVDLLEQVAREHEEYQAGVDEFQLWLKAVVEKVNGCLGRNCKLPITQRLSTLQDIAKDFPRGEESLETLEEQSAGVIRNTSPLGAEKITGELEEMRKVLEKLRALWEEEEERLRGLLRSRGAWEQQIKQLEAELSEFRMVLQRLAQEGLQPAAKAGTEDELVAHWRRYSATRAALASEEPRVDRLQAQLKELIVFPHNLKPLSDSVIATIQEYQSLKVKSARLRNAAAVELWQHFQRPLQDLQLWKALAQRLLEVTASLPDLPSLHTFLPQIEAALMESSRLKELLTMLQLKKDLLIGIFGQERATALLEQVAGSMRDRDLLHNSLLQRKSKLQSLLAQHKDFGAAFEPLQRKLLDLQVRVQAEKGLQRDLPGKQAQLSRLQGLQEEGLDLGAQMEAARPLVQENPNHQHKMDQLSSDFQALQRSLEDLVDRCRQSVQEHCTFSHQLLELRQWIVVTTQKLEAHRGEAGPGDAESQEAEFERLVAEFPEKEAQLSLVEAQGWLVMEKSSPEGAAVVQEELRELAESWRALRLLEESLLSLIRNWHLQRMEVDSGKKMVFTNNIPKSGFLINPMDPIPRHRRRANLLQEEEGSHEDFSQLLRNFGQWLQVENSKLVRIIAMRTSTAEDLRTRKSKLQELEARVPEGQHLFENLLRLGPARGTSDELEDLRYQWMLYKSKLKDSGHLLTQSSPGEPTGFQKTRRWRGLGSLFRRACCVALPLQLLLLLFLLLLFLLPIREEDRSCTLANNFARSFTLMLRYNGPPPT

SEQ ID NO: 24161 - DNA, 2615 bp, Homo sapiens
gcccctgcaggtgccatgactcagcagccccaggacgactttgacaggagcgtggaggatgcccaggcatggatgaaggctgtgcaggaccagctgcaggtcaatgacaacacgcagggaccccgcgcggccctggaggccaggctgtgggagaccgagaaaatatgccagctggagcccgaggggcgtgtgagggtggacctcgtgctacggatggctgaagccctcttggcatgctgccctggggaccagaagcccgggatcctggcccggctgaaggacatcaaggcccaatgggaggagacagtcacctacatgactcactgtcacagccgcatcgagtgggtgtggctgcactggagcgagtacctgctggcccgagatgagttctaccgctggttccagaagatgatggtcacactggagccccacatcgagctccagctgggcctgaaggagaagcagtggcagctgagccacgcccaggtgctgctgcacaacgtggacaaccaggcggtgctcctggaccggctgctggaggaggcagcctccctgttcaacaggatcggggaccccagcgtggacgaagatgcccagaagagaatgaaggctgagtacgatgcagtgaaggccaaggcccagaagcgtgtagatctgctggagcaggtggcccgggagcatgaggagtaccaggcaggtgtggacgagttccaactgtggctgaaggcggtggtggagaaggtgaatggctgcctggggcggaactgcaagctgcccatcacgcagcgcctctccacactgcaggacattgccaaagattttcccaggggcgaggagtctctggagacgctggaggagcagtctgcgggtgtcattcggaacacctctcctttgggtgcagagaagatcaccggagaactggaagagatgaggaaagttctggagaagctgcgcgccctctgggaggaggaggaggagcggctgcggggcctgctccggtccaggggagcctgggagcagcagattaagcagctggaggctgagctcagtgagttcaggatggtcctgcagaggctggcccaggagggcctgcagcctgcggcgaaagcggggaccgaggacgagctggtggcacactggagacgctactcggcaacacgggcggcgctggcctcggaggagccccgggtggaccggctgcaagcccagctgaaggagctcatcgtcttccctcacaacctgaagccactctctgatagtgtcatcgctaccatccaggagtatcagagcctgaaggtgaagagcgcgaggctgcgcaatgccgcggcggtggagctgtggcagcatttccagcggcctctgcaggatctgcagctgtggaaggccctggcccagcggctcttggaggtcactgccagcctgccggacctgccttcccttcacaccttcctgccccagatcgaggcagccctgatggaaagctcccgcctgaaagagctgctgacgatgctgcagctgaagaaagacctcctgattggcatctttggccaggagagagccacggcactcctggagcaggtggcaggttccatgagggacagagacctgctgcataacagcctcctgcagaggaaaagcaaactgcagagcctgctcgctcagcacaaagactttggagcagcttttgagcccctgcagaggaagctcttggacctccaggtcagggtccaagccgagaaggggcttcagcgggaccttcctggaaaacaggcccagctctcaaggttgcaggtgaggggtctgtgaggcctgaatcactcctgcccaggtgctcagctgcacctggaagcagcgtctccctctagcagtaaccagcaaagcaacagctgccgtgagccagaaatttagacccttagttgagatctgacctttcacctcaacagaacctctgcttatttatctgatggttcctgacctcaaacaactgagtcttgagctcagcaaaatgacaaactgtctttctgtttactcctcagttccaaagtctaacattggtatttgtttttagaattgctttgctaagtattcttaatgagtccagaggtgttcagttaaaccaactttgggattaagaataaatgttctgaaacgtggactgtaagtaggctgaccgttgatcattgttggctggataaggaacttgatggttttttaaaatgcgcgtgatacaatagttctctctttaaaacccaagcacagctcatacataaattgagagtgttctctagaagacattaaaaatagtgcattttaggccgggagcggtggctcacgcctgtaatcccagcactttgggaggtgagcagattgcctgactttaggattttgagatcagcctgggcaacatggtgaaaccctgtctctacttaaaataaaaaattttttttaaaaaagcaaaaaatttagccaggcgtggtggcgggaatctgtaaccccagctacttgggaggccgaggcaccagaatcacttgaacccaggaggcagaggttgcagtgagcccacattgtgccactgtgctccagcctgggcgacagagtgagactctgtctccaaa

SEQ ID NO: 24162 - protein, 596 aa, Homo sapiens
MTQQPQDDFDRSVEDAQAWMKAVQDQLQVNDNTQGPRAALEARLWETEKICQLEPEGRVRVDLVLRMAEALLACCPGDQKPGILARLKDIKAQWEETVTYMTHCHSRIEWVWLHWSEYLLARDEFYRWFQKMMVTLEPHIELQLGLKEKQWQLSHAQVLLHNVDNQAVLLDRLLEEAASLFNRIGDPSVDEDAQKRMKAEYDAVKAKAQKRVDLLEQVAREHEEYQAGVDEFQLWLKAVVEKVNGCLGRNCKLPITQRLSTLQDIAKDFPRGEESLETLEEQSAGVIRNTSPLGAEKITGELEEMRKVLEKLRALWEEEEERLRGLLRSRGAWEQQIKQLEAELSEFRMVLQRLAQEGLQPAAKAGTEDELVAHWRRYSATRAALASEEPRVDRLQAQLKELIVFPHNLKPLSDSVIATIQEYQSLKVKSARLRNAAAVELWQHFQRPLQDLQLWKALAQRLLEVTASLPDLPSLHTFLPQIEAALMESSRLKELLTMLQLKKDLLIGIFGQERATALLEQVAGSMRDRDLLHNSLLQRKSKLQSLLAQHKDFGAAFEPLQRKLLDLQVRVQAEKGLQRDLPGKQAQLSRLQVRGL

SEQ ID NO: 24163 - DNA, 2073 bp, Homo sapiens
acatatcccctgcgcactgtccggagcactccttcccttccctggttcctcaaggcacggctcccccaggcagatgaaagcttaatagagttttgcgacatgaaagtcagtcggaggaaagagccttgaacagttgtgcgtgagagagaggcaagcgcccgaaattattttacgacaaaggcagctctctctgccacagaggcacagaggagaaaggagcccaggaaacgggtcatttctttcgtggaaaaatggaaatgctctgaagcattttgggagacgtgctgtgaagcaggtgacaccagaagacaaggacactgggggctccctgccgggaggcgcaaaaagcaactcccgttcgagggtcagaggagcctggatgctaatgtctctccaaagtgacttggagccaactgccggaaaggccatgcccttaggagcacaggcaggtcccagctcaggtgagcctgaaccttctgccccatcaggaggttccagtgggaggagctcaggtggggaggagtcggaagtcaggatttcatgcctccctcattggctctggggttccctttaaggtggacactcggtgtgggcagtgggaggcaagagtgaagcagaggagagcaagcgtggtggtttagcaaagtaaagcaaagtaaacctggagggagcaaatgactttgtcctgggtgtgaaagggtaaggccccattgtaggtcatttattcattcaacaaacacgggttgaactgtgtcttgggctggcctcagagaagctcaagaaaagaaagatgctgtcattgccccgaggagccactgtctggcatgcaggccaactgtgacaagctgtggtccagggatcaagaggtctgctgtgtgaccttcttcaagttcctgaccctctctgggctgcagtcaccttattcagaaaatggagaggctagacaagaaaatgatgctaatctcacccttttctgggctggcattttattgagcacctactaggcgctgggcattttgctaggcccttcgtgcacactgccatgagaaatccacagcaaccccagagatgggttcatcaataactcaccagcaaatacttcctgaggccccactgtgtgccgagcatgggcataggtactgggcacacctcgatgaacaagggaggtaaggatgtgactctcctagaactttctgtcgagaagaggagatggagaataaacatggaaacaagcaagatcattctggagaaaatgcaatcagatgatgtgctagatggtaacagagagaggtcgaatgagagagagggccgtgacagcctctctgagaagctgaaatccaagcagaacctgaaagacgaggagaaactcagatacataaagactgggaaaagcattcaagtagagggaacagtgcgtgcaaaggccctgaggtgggtgcagtagataccacaggccccctcactcgagaccactccaagcacctcctgccctcttgtgccacagagctcagaaagctaaagcaatgttccccagaggtcctgtggccaaggtcctgcatgggcctgggtgacccctgcagaagcttctgagcaagactgagcagggaaagaaaggccatgtcagaaaaccatcctccagcgagcatggaggcagagagtctcatcctggcatcccaggtgctgagcagagcagacagcagcagaggggctccctagagcagctgggggccctgcctgtgccgtcgctctttcccctccctgccctctggtctgacatcccattggcatcacacacgatgcctcccggaggtgctcttgtgcacacagcaggtcaaagtgccagagaattagatcctgtcctcttgggaacagccctcagccagcagtgagcccttaggaggatgctccaagctctatcctccccgggtccagaggccctgggatggagcgccattgtggaagcagtgacaacttgatgaagctccctgggctggccccttcctctctgccttgttccccgttccctgcagtcctgcaatcacctcccaaataaaccatgtgcccttgctggaa

SEQ ID NO: 24164 - protein, 59 aa, Homo sapiens
MQANCDKLWSRDQEVCCVTFFKFLTLSGLQSPYSENGEARQENDANLTLFWAGILLSTY

SEQ ID NO: 24165 - DNA, 1661 bp, Homo sapiens
tgtccggagcactccttcccttccctggttcctcaaggcacggctcccccaggcagatgaaagcttaatagagttttgcgacatgaaagtcagtcggaggaaagagccttgaacagttgtgcgtgagagagaggcaagcgcccgaaattattttacgacaaaggcagctctctctgccacagaggcacagaggagaaaggagcccaggaaacgggtcatttctttcgtggaaaaatggaaatgctctgaagcattttgggagacgtgctgtgaagcaggtgacaccagaagacaaggacactgggggctccctgccgggaggcgcaaaaagcaactcccgttcgagggtcagaggagcctggatgctaatgtctctccaaagtgacttggagccaactgccggaaaggccatgcccttaggagcacaggcaggtcccagctcagggatcaagaggtctgctgtgtgaccttcttcaagttcctgaccctctctgggctgcagtcaccttattcagaaaatggagaggctagacaagaaaatgatgctaatctcacccttttctgggctggcattttattgagcacctactaggcgctgggcattttgctaggcccttcgtgcacactgccatgagaaatccacagcaaccccagagatgggttcatcaataactcaccagcaaatacttcctgaggccccactgtgtgccgagcatgggcataggtactgggcacacctcgatgaacaagggaggtaaggatgtgactctcctagaactttctgtcgagaagaggagatggagaataaacatggaaacaagcaagatcattctggagaaaatgcaatcagatgatgtgctagatggtaacagagagaggtcgaatgagagagagggccgtgacagcctctctgagaagctgaaatccaagcagaacctgaaagacgaggagaaactcagatacataaagactgggaaaagcattcaagtagagggaacagtgcgtgcaaaggccctgaggtgggtgcagtagataccacaggccccctcactcgagaccactccaagcacctcctgccctcttgtgccacagagctcagaaagctaaagcaatgttccccagaggtcctgtggccaaggtcctgcatgggcctgggtgacccctgcagaagcttctgagcaagactgagcagggaaagaaaggccatgtcagaaaaccatcctccagcgagcatggaggcagagagtctcatcctggcatcccaggtgctgagcagagcagacagcagcagaggggctccctagagcagctgggggccctgcctgtgccgtcgctctttcccctccctgccctctggtctgacatcccattggcatcacacacgatgcctcccggaggtgctcttgtgcacacagcaggtcaaagtgccagagaattagatcctgtcctcttgggaacagccctcagccagcagtgagcccttaggaggatgctccaagctctatcctccccgggtccagaggccctgggatggagcgccattgtggaagcagtgacaacttgatgaagctccctgggctggccccttcctctctgccttgttccccgttccctgcagtcctgcaatcacctcccaaataaaccatgtgcccttgctggaa

SEQ ID NO: 24166 - protein, 34 aa, Homo sapiens
MLMSLQSDLEPTAGKAMPLGAQAGPSSGIKRSAV

SEQ ID NO: 24167 - DNA, 1029 bp, Homo sapiens
acgcggtcagctgtgtgagaccttggcccccaggcctctggatgcactggattccctggaacagttagcaggacacagggcaaaggcctttctccttctgtcgtgtgagatgcaggtgagtgctgcaggcctggagtaggggagtgtctccgtcagagaaaccatggaaggcttcccagaggaagcagcgctggagctttgaggaaaagtggggagtaaccagggagcctcttcagagtccaagtcactcttcagaatgacccgggcgcaaaagactacacccaaagaaaagctggctgcgttcccagccagctgaactgcgggccgcctgcctcctcatctgcgttcctgcctccccacctttgtttaggccattcccccacccagaatgcctttccaggacagagcttctccaaccttagttctgactttctaagtcacagagaaccacagagaggcctcctccagggacaccacctgagcctcagcactttgtagctgcctcttcatctcaggccagtgtgagccggggtgagggctccagcccccttggagcgcccggcatcaaccccgtgtgccgggcaagctccagaagtgtgttggaaggcagggtcgatattgccggctttggggggatgagtcgataacgattgaaagtgagcaaaatattctcctttctctccctgtaaggggaatttgaaaatcggatttactggttaaattaacagaatgtgcattctcagttcagccccacccctgggactagtcacttacttaaaaatacatattaaaaatacagtgaatcatctccactatgtaaaaacaacaaaacgtgcatgcacctagccatggggcaaaacccataacaaaaacccccaccctggtcattggcctgtggcagggccttatggggtctcaatttccttctttgtgttcatgtatttcccacctatttcacagtgaactgattccttttaaggtaaagagaaaagataacattttaaaataaaagaataaggtatcaatatc

SEQ ID NO: 24168 - protein, 38 aa, Homo sapiens
MCILSSAPPLGLVTYLKIHIKNTVNHLHYVKTTKRACT

SEQ ID NO: 24169 - DNA, 1297 bp, Homo sapiens
cgcgcgcggcggcggcggcagctccccggcagcggcggtggagagcgcagcgcgcagcccggtgcagccctggctttcccctcgctgcgcgcccgcgccccctttcgcgtccgcaaccagaagcccagtgcggcgccaggagccggacccgcgcccgcaccgctcccgggaccgcgaccccggccgcccagagatgaccgcgaccgaagccctcctgcgcgtcctcttgctcctgctggctttcggccacagcacctatggggctgaatgcttcccggcctgcaacccccaaaatggattctgcgaggatgacaatgtttgcaggtgccagcctggctggcagggtcccctttgtgaccagtgcgtgacctctcccggctgccttcacggactctgtggagaacccgggcagtgcatttgcaccgacggctgggacggggagctctgtgatagagatgttcgggcctgctcctcggccccctgtgccaacaacaggacctgcgtgagcctggacgatggcctctatgaatgctcctgtgcccccgggtactcgggaaaggactgccagaaaaaggacgggccctgtgtgatcaacggctccccctgccagcacggaggcacctgcgtggatgatgagggccgggcctcccatgcctcctgcctgtgcccccctggcttctcaggcaatttctgcgagatcgtggccaacagctgcacccccaacccatgcgagaacgacggcgtctgcactgacattgggggcgacttccgctgccggtgcccagccggcttcatcgacaagacctgcagccgcccggtgaccaactgcgccagcagcccgtgccagaacgggggcacctgcctgcagcacacccagggccaggccatctgcttcaccatcctgggcgtgctcaccagcctggtggtgctgggcactgtgggtatcgtcttcctcaacaagtgcgagacctgggtgtccaacctgcgctacaaccacatgctgcggaagaagaagaacctgctgcttcagtacaacagcggggaggacctggccgtcaacatcatcttccccgagaagatcgacatgaccaccttcagcaaggaggccggcgacgaggagatctaagcagcgttcccacagccccctctagattcttggagttccgcagagcttactatacgcggtctgtcctaatctttgtggtgttcgctatctcttgtgtcaaatctggtgaacgctacgcttacatatattgtctttgtgctgctgtgtgacaaacgcaatgcaaaaacaatc

SEQ ID NO: 24170 - protein, 310 aa, Homo sapiens
MTATEALLRVLLLLLAFGHSTYGAECFPACNPQNGFCEDDNVCRCQPGWQGPLCDQCVTSPGCLHGLCGEPGQCICTDGWDGELCDRDVRACSSAPCANNRTCVSLDDGLYECSCAPGYSGKDCQKKDGPCVINGSPCQHGGTCVDDEGRASHASCLCPPGFSGNFCEIVANSCTPNPCENDGVCTDIGGDFRCRCPAGFIDKTCSRPVTNCASSPCQNGGTCLQHTQGQAICFTILGVLTSLVVLGTVGIVFLNKCETWVSNLRYNHMLRKKKNLLLQYNSGEDLAVNIIFPEKIDMTTFSKEAGDEEI

SEQ ID NO: 24171 - DNA, 1357 bp, Homo sapiens
cgcgcgcggcggcggcggcagctccccggcagcggcggtggagagcgcagcgcgcagcccggtgcagccctggctttcccctcgctgcgcgcccgcgccccctttcgcgtccgcaaccagaagcccagtgcggcgccaggagccggacccgcgcccgcaccgctcccgggaccgcgaccccggccgcccagagatgaccgcgaccgaagccctcctgcgcgtcctcttgctcctgctggctttcggccacagcacctatggggctgaatgcttcccggcctgcaacccccaaaatggattctgcgaggatgacaatgtttgcaggtgccagcctggctggcagggtcccctttgtgaccagtgcgtgacctctcccggctgccttcacggactctgtggagaacccgggcagtgcatttgcaccgacggctgggacggggagctctgtgatagagatgttcgggcctgctcctcggccccctgtgccaacaacaggacctgcgtgagcctggacgatggcctctatgaatgctcctgtgcccccgggtactcgggaaaggactgccagaaaaaggacgggccctgtgtgatcaacggctccccctgccagcacggaggcacctgcgtggatgatgagggccgggcctcccatgcctcctgcctgtgcccccctggcttctcaggcaatttctgcgagatcgtggccaacagctgcacccccaacccatgcgagaacgacggcgtctgcactgacattgggggcgacttccgctgccggtgcccagccggcttcatcgacaagacctgcagccgcccggtgaccaactgcgccagcagcccgtgccagaacgggggcacctgcctgcagcacacccagggccaggccatctgcttcaccatcctgggcgtgctcaccagcctggtggtgctgggcactgtgggtatcgtcttcctcaacaagtgcgagacctgggtgtccaacctgcgctacaaccacatgctgcggaagaagaagaacctgctgcttcagtacaacagcggggaggacctggccgtcaacatcatcttccccgagaagatcgacatgaccaccttcagcaaggaggccggcgacgaggagatctaagcagcgttcccacagccccctctagattcttggagttccgcagagcttactatacgcggtctgtcctaatctttgtggtgttcgctatctcttgtgtcaaatctggtgaacgctacgcttacatatattgtctttgtgctgctgtgtgacaaacgcaatgcaaaaacaatcctctttctctctcttaatgcatgatacagaataataataagaatttcatctttaaatgag

SEQ ID NO: 24172 - protein, 310 aa, Homo sapiens; identical to SEQ ID NO: 24170

SEQ ID NO: 24173 - DNA, 2074 bp, Homo sapiens
cgcgcgcggcggcggcggcagctccccggcagcggcggtggagagcgcagcgcgcagcccggtgcagccctggctttcccctcgctgcgcgcccgcgccccctttcgcgtccgcaaccagaagcccagtgcggcgccaggagccggacccgcgcccgcaccgctcccgggaccgcgaccccggccgcccagagatgaccgcgaccgaagccctcctgcgcgtcctcttgctcctgctggctttcggccacagcacctatggggctgaatgcttcccggcctgcaacccccaaaatggattctgcgaggatgacaatgtttgcaggtgccagcctggctggcagggtcccctttgtgaccagtgcgtgacctctcccggctgccttcacggactctgtggagaacccgggcagtgcatttgcaccgacggctgggacggggagctctgtgatagagatgttcgggcctgctcctcggccccctgtgccaacaacaggacctgcgtgagcctggacgatggcctctatgaatgctcctgtgcccccgggtactcgggaaaggactgccagaaaaaggacgggccctgtgtgatcaacggctccccctgccagcacggaggcacctgcgtggatgatgagggccgggcctcccatgcctcctgcctgtgcccccctggcttctcaggcaatttctgcgagatcgtggccaacagctgcacccccaacccatgcgagaacgacggcgtctgcactgacattgggggcgacttccgctgccggtgcccagccggcttcatcgacaagacctgcagccgcccggtgaccaactgcgccagcagcccgtgccagaacgggggcacctgcctgcagcacacccagggccaggccatctgcttcaccatcctgggcgtgctcaccagcctggtggtgctgggcactgtgggtatcgtcttcctcaacaagtgcgagacctgggtgtccaacctgcgctacaaccacatgctgcggaagaagaagaacctgctgcttcagtacaacagcggggaggacctggccgtcaacatcatcttccccgagaagatcgacatgaccaccttcagcaaggaggccggcgacgaggagatctaagcagcgttcccacagccccctctagattcttggagttccgcagagcttactatacgcggtctgtcctaatctttgtggtgttcgctatctcttgtgtcaaatctggtgaacgctacgcttacatatattgtctttgtgctgctgtgtgacaaacgcaatgcaaaaacaatcctctttctctctcttaatgcatgatacagaataataataagaatttcatctttaaatgagtaagagaaataagtatgttattctaaaatctaaactcaaatgaaatttcaaaaaagaccaaaaaaaaacaaggcaacagaaccagggctcagtgccgacgcccctaccctgggggtctcggccacatggtcctcgtgaaaccgttacgagtgctgtacatgaccacccactgtgcaaagagctacgattgctttcgttcgttaattctcacacaccacatccgactcgcactcacatccagctcaacatcgctacctttagatctttccgattgatttgagatttagcggagtgcagcggctgtgtgtcagtcagagagagccccaggttggctgctggggggccgggcctctgtgccagccctgccactaactcgctgtgtgatccttggcgagtccctatcccaatcctgggcccactttctcgcccctctcgagggaggggtttgaacaccgaccaccatggtcctctctggctctaaaactctgaattaggaacgagggggtatgaaccaaaacacttcctgaccccaacaattgggatctgatgaagacgaattctcatcctgggatccgaaaggttttggcctatcctggatgaacgcttgatgttgaaatttatcctaactgtgtttctcaaagtggggagcctcctggcccacttcccttttgggaaaaaatagcccctttgagtcataatgtgccatctggagttgcc

SEQ ID NO: 24174 - protein, 310 aa, Homo sapiens; identical to SEQ ID NO: 24170

SEQ ID NO: 24175 - DNA, 1514 bp, Homo sapiens
ggcggcagctccccggcagcggcggtggagagcgcagcgcgcagcccggtgcagccctggctttcccctcgctgcgcgcccgcgccccctttcgcgtccgcaaccagaagcccagtgcggcgccaggagccggacccgcgcccgcaccgctcccgggaccgcgaccccggccgcccagagatgaccgcgaccgaagccctcctgcgcgtcctcttgctcctgctggctttcggccacagcacctatggggctgaatgcttcccggcctgcaacccccaaaatggattctgcgaggatgacaatgtttgcaggtgccagcctggctggcagggtcccctttgtgaccagtgcgtgacctctcccggctgccttcacggactctgtggagaacccgggcagtgcatttgcaccgacggctgggacggggagctctgtgatagagatgttcgggcctgctcctcggccccctgtgccaacaacaggacctgcgtgagcctggacgatggcctctatgaatgctcctgtgcccccgggtactcgggaaaggactgccagaaaaaggacgggccctgtgtgatcaacggctccccctgccagcacggaggcacctgcgtggatgatgagggccgggcctcccatgcctcctgcctgtgcccccctggcttctcaggcaatttctgcgagatcgtggccaacagctgcacccccaacccatgcgagaacgacggcgtctgcactgacattgggggcgacttccgctgccggtgcccagccggcttcatcgacaagacctgcagccgcccggtgaccaactgcgccagcagcccgtgccagaacgggggcacctgcctgcagcacacccaggtgagctacgagtgtctgtgcaagcccgagttcacaggtctcacctgtgtcaagaagcgcgcgctgagcccccagcaggtcacccgtctgcccagcggctatgggctggcctaccgcctgacccctggggtgcacgagctgccggtgcagcagccggagcaccgcatcctgaaggtgtccatgaaagagctcaacaagaaaacccctctcctcaccgagggccaggccatctgcttcaccatcctgggcgtgctcaccagcctggtggtgctgggcactgtgggtatcgtcttcctcaacaagtgcgagacctgggtgtccaacctgcgctacaaccacatgctgcggaagaagaagaacctgctgcttcagtacaacagcggggaggacctggccgtcaacatcatcttccccgagaagatcgacatgaccaccttcagcaaggaggccggcgacgaggagatctaagcagcgttcccacagccccctctagattcttggagttccgcagagcttactatacgcggtctgtcctaatctttgtggtgttcgctatctcttgtgtcaaatctggtgaacgctacgcttacatatattgtctttgtgctgctgtgtgacaaacgcaatgcaaaaacaatcctctttctctc

SEQ ID NO: 24176 - protein, 383 aa, Homo sapiens
MTATEALLRVLLLLLAFGHSTYGAECFPACNPQNGFCEDDNVCRCQPGWQGPLCDQCVTSPGCLHGLCGEPGQCICTDGWDGELCDRDVRACSSAPCANNRTCVSLDDGLYECSCAPGYSGKDCQKKDGPCVINGSPCQHGGTCVDDEGRASHASCLCPPGFSGNFCEIVANSCTPNPCENDGVCTDIGGDFRCRCPAGFIDKTCSRPVTNCASSPCQNGGTCLQHTQVSYECLCKPEFTGLTCVKKRALSPQQVTRLPSGYGLAYRLTPGVHELPVQQPEHRILKVSMKELNKKTPLLTEGQAICFTILGVLTSLVVLGTVGIVFLNKCETWVSNLRYNHMLRKKKNLLLQYNSGEDLAVNIIFPEKIDMTTFSKEAGDEEI

SEQ ID NO: 24177 - DNA, 1401 bp, Homo sapiens
ggcggcagctccccggcagcggcggtggagagcgcagcgcgcagcccggtgcagccctggctttcccctcgctgcgcgcccgcgccccctttcgcgtccgcaaccagaagcccagtgcggcgccaggagccggacccgcgcccgcaccgctcccgggaccgcgaccccggccgcccagagatgaccgcgaccgaagccctcctgcgcgtcctcttgctcctgctggctttcggccacagcacctatggggctgaatgcttcccggcctgcaacccccaaaatggattctgcgaggatgacaatgtttgcaggtgccagcctggctggcagggtcccctttgtgaccagtgcgtgacctctcccggctgccttcacggactctgtggagaacccgggcagtgcatttgcaccgacggctgggacggggagctctgtgatagagatgttcgggcctgctcctcggccccctgtgccaacaacaggacctgcgtgagcctggacgatggcctctatgaatgcctcccatgcctcctgcctgtgcccccctggcttctcaggcaatttctgcgagatcgtggccaacagctgcacccccaacccatgcgagaacgacggcgtctgcactgacattgggggcgacttccgctgccggtgcccagccggcttcatcgacaagacctgcagccgcccggtgaccaactgcgccagcagcccgtgccagaacgggggcacctgcctgcagcacacccaggtgagctacgagtgtctgtgcaagcccgagttcacaggtctcacctgtgtcaagaagcgcgcgctgagcccccagcaggtcacccgtctgcccagcggctatgggctggcctaccgcctgacccctggggtgcacgagctgccggtgcagcagccggagcaccgcatcctgaaggtgtccatgaaagagctcaacaagaaaacccctctcctcaccgagggccaggccatctgcttcaccatcctgggcgtgctcaccagcctggtggtgctgggcactgtgggtatcgtcttcctcaacaagtgcgagacctgggtgtccaacctgcgctacaaccacatgctgcggaagaagaagaacctgctgcttcagtacaacagcggggaggacctggccgtcaacatcatcttccccgagaagatcgacatgaccaccttcagcaaggaggccggcgacgaggagatctaagcagcgttcccacagccccctctagattcttggagttccgcagagcttactatacgcggtctgtcctaatctttgtggtgttcgctatctcttgtgtcaaatctggtgaacgctacgcttacatatattgtctttgtgctgctgtgtgacaaacgcaatgcaaaaacaatcctctttctctc

SEQ ID NO: 24178 - protein, 238 aa, Homo sapiens
MASMNASHASCLCPPGFSGNFCEIVANSCTPNPCENDGVCTDIGGDFRCRCPAGFIDKTCSRPVTNCASSPCQNGGTCLQHTQVSYECLCKPEFTGLTCVKKRALSPQQVTRLPSGYGLAYRLTPGVHELPVQQPEHRILKVSMKELNKKTPLLTEGQAICFTILGVLTSLVVLGTVGIVFLNKCETWVSNLRYNHMLRKKKNLLLQYNSGEDLAVNIIFPEKIDMTTFSKEAGDEEI

SEQ ID NO: 24179 - DNA, 1563 bp, Homo sapiens
ggcggcagctccccggcagcggcggtggagagcgcagcgcgcagcccggtgcagccctggctttcccctcgctgcgcgcccgcgccccctttcgcgtccgcaaccagaagcccagtgcggcgccaggagccggacccgcgcccgcaccgctcccgggaccgcgaccccggccgcccagagatgaccgcgaccgaagccctcctgcgcgtcctcttgctcctgctggctttcggccacagcacctatggggctgaatgcttcccggcctgcaacccccaaaatggattctgcgaggatgacaatgtttgcaggtgccagcctggctggcagggtcccctttgtgaccagtgcgtgacctctcccggctgccttcacggactctgtggagaacccgggcagtgcatttgcaccgacggctgggacggggagctctgtgatagagatgttcgggcctgctcctcggccccctgtgccaacaacaggacctgcgtgagcctggacgatggcctctatgaatgctcctgtgcccccgggtactcgggaaaggactgccagaaaaaggacgggccctgtgtgatcaacggctccccctgccagcacggaggcacctgcgtggatgatgagggccgggcctcccatgcctcctgcctgtgcccccctggcttctcaggcaatttctgcgagatcgtggccaacagctgcacccccaacccatgcgagaacgacggcgtctgcactgacattgggggcgacttccgctgccggtgcccagccggcttcatcgacaagacctgcagccgcccggtgaccaactgcgccagcagcccgtgccagaacgggggcacctgcctgcagcacacccaggtgagctacgagtgtctgtgcaagcccgagttcacaggtctcacctgtgtcaagaagcgcgcgctgagcccccagcaggtcacccgtctgcccagcggctatgggctggcctaccgcctgacccctggggtgcacgagctgccggtgcagcagccggagcaccgcatcctgaaggtgtccatgaaagagctcaacaagaaaacccctctcctcaccgagggccaggccatctgcttcaccatcctgggcgtgctcaccagcctggtggtgctgggcactgtgggtatcgtcttcctcaacaagtgcgagacctgggtgtccaacctgcgctacaaccacatgctgcggaagaagaagaacctgctgcttcagtacaacagcggggaggacctggccgtcaacatcatcttccccgagaagatcgacatgaccaccttcagcaaggaggccggcgacgaggagatctaagcagcgttcccacagccccctctagattcttggagttccgcagagcttactatacgcggtctgtcctaatctttgtggtgttcgctatctcttgtgtcaaatctggtgaacgctacgcttacatatattgtctttgtgctgctgtgtgacaaacgcaatgcaaaaacaatcctctttctctctcttaatgcatgatacagaataataataagaatttcatctttaaatgag

SEQ ID NO: 24180 - protein, 383 aa, Homo sapiens; identical to SEQ ID NO: 24176

SEQ ID NO: 24181 - DNA, 1450 bp, Homo sapiens
ggcggcagctccccggcagcggcggtggagagcgcagcgcgcagcccggtgcagccctggctttcccctcgctgcgcgcccgcgccccctttcgcgtccgcaaccagaagcccagtgcggcgccaggagccggacccgcgcccgcaccgctcccgggaccgcgaccccggccgcccagagatgaccgcgaccgaagccctcctgcgcgtcctcttgctcctgctggctttcggccacagcacctatggggctgaatgcttcccggcctgcaacccccaaaatggattctgcgaggatgacaatgtttgcaggtgccagcctggctggcagggtcccctttgtgaccagtgcgtgacctctcccggctgccttcacggactctgtggagaacccgggcagtgcatttgcaccgacggctgggacggggagctctgtgatagagatgttcgggcctgctcctcggccccctgtgccaacaacaggacctgcgtgagcctggacgatggcctctatgaatgcctcccatgcctcctgcctgtgcccccctggcttctcaggcaatttctgcgagatcgtggccaacagctgcacccccaacccatgcgagaacgacggcgtctgcactgacattgggggcgacttccgctgccggtgcccagccggcttcatcgacaagacctgcagccgcccggtgaccaactgcgccagcagcccgtgccagaacgggggcacctgcctgcagcacacccaggtgagctacgagtgtctgtgcaagcccgagttcacaggtctcacctgtgtcaagaagcgcgcgctgagcccccagcaggtcacccgtctgcccagcggctatgggctggcctaccgcctgacccctggggtgcacgagctgccggtgcagcagccggagcaccgcatcctgaaggtgtccatgaaagagctcaacaagaaaacccctctcctcaccgagggccaggccatctgcttcaccatcctgggcgtgctcaccagcctggtggtgctgggcactgtgggtatcgtcttcctcaacaagtgcgagacctgggtgtccaacctgcgctacaaccacatgctgcggaagaagaagaacctgctgcttcagtacaacagcggggaggacctggccgtcaacatcatcttccccgagaagatcgacatgaccaccttcagcaaggaggccggcgacgaggagatctaagcagcgttcccacagccccctctagattcttggagttccgcagagcttactatacgcggtctgtcctaatctttgtggtgttcgctatctcttgtgtcaaatctggtgaacgctacgcttacatatattgtctttgtgctgctgtgtgacaaacgcaatgcaaaaacaatcctctttctctctcttaatgcatgatacagaataataataagaatttcatctttaaatgag

SEQ ID NO: 24182 - protein, 238 aa, Homo sapiens; identical to SEQ ID NO: 24178

SEQ ID NO: 24183 - DNA, 2280 bp, Homo sapiens
ggcggcagctccccggcagcggcggtggagagcgcagcgcgcagcccggtgcagccctggctttcccctcgctgcgcgcccgcgccccctttcgcgtccgcaaccagaagcccagtgcggcgccaggagccggacccgcgcccgcaccgctcccgggaccgcgaccccggccgcccagagatgaccgcgaccgaagccctcctgcgcgtcctcttgctcctgctggctttcggccacagcacctatggggctgaatgcttcccggcctgcaacccccaaaatggattctgcgaggatgacaatgtttgcaggtgccagcctggctggcagggtcccctttgtgaccagtgcgtgacctctcccggctgccttcacggactctgtggagaacccgggcagtgcatttgcaccgacggctgggacggggagctctgtgatagagatgttcgggcctgctcctcggccccctgtgccaacaacaggacctgcgtgagcctggacgatggcctctatgaatgctcctgtgcccccgggtactcgggaaaggactgccagaaaaaggacgggccctgtgtgatcaacggctccccctgccagcacggaggcacctgcgtggatgatgagggccgggcctcccatgcctcctgcctgtgcccccctggcttctcaggcaatttctgcgagatcgtggccaacagctgcacccccaacccatgcgagaacgacggcgtctgcactgacattgggggcgacttccgctgccggtgcccagccggcttcatcgacaagacctgcagccgcccggtgaccaactgcgccagcagcccgtgccagaacgggggcacctgcctgcagcacacccaggtgagctacgagtgtctgtgcaagcccgagttcacaggtctcacctgtgtcaagaagcgcgcgctgagcccccagcaggtcacccgtctgcccagcggctatgggctggcctaccgcctgacccctggggtgcacgagctgccggtgcagcagccggagcaccgcatcctgaaggtgtccatgaaagagctcaacaagaaaacccctctcctcaccgagggccaggccatctgcttcaccatcctgggcgtgctcaccagcctggtggtgctgggcactgtgggtatcgtcttcctcaacaagtgcgagacctgggtgtccaacctgcgctacaaccacatgctgcggaagaagaagaacctgctgcttcagtacaacagcggggaggacctggccgtcaacatcatcttccccgagaagatcgacatgaccaccttcagcaaggaggccggcgacgaggagatctaagcagcgttcccacagccccctctagattcttggagttccgcagagcttactatacgcggtctgtcctaatctttgtggtgttcgctatctcttgtgtcaaatctggtgaacgctacgcttacatatattgtctttgtgctgctgtgtgacaaacgcaatgcaaaaacaatcctctttctctctcttaatgcatgatacagaataataataagaatttcatctttaaatgagtaagagaaataagtatgttattctaaaatctaaactcaaatgaaatttcaaaaaagaccaaaaaaaaacaaggcaacagaaccagggctcagtgccgacgcccctaccctgggggtctcggccacatggtcctcgtgaaaccgttacgagtgctgtacatgaccacccactgtgcaaagagctacgattgctttcgttcgttaattctcacacaccacatccgactcgcactcacatccagctcaacatcgctacctttagatctttccgattgatttgagatttagcggagtgcagcggctgtgtgtcagtcagagagagccccaggttggctgctggggggccgggcctctgtgccagccctgccactaactcgctgtgtgatccttggcgagtccctatcccaatcctgggcccactttctcgcccctctcgagggaggggtttgaacaccgaccaccatggtcctctctggctctaaaactctgaattaggaacgagggggtatgaaccaaaacacttcctgaccccaacaattgggatctgatgaagacgaattctcatcctgggatccgaaaggttttggcctatcctggatgaacgcttgatgttgaaatttatcctaactgtgtttctcaaagtggggagcctcctggcccacttcccttttgggaaaaaatagcccctttgagtcataatgtgccatctggagttgcc

SEQ ID NO: 24184 - protein, 383 aa, Homo sapiens; identical to SEQ ID NO: 24176

SEQ ID NO: 24185 - DNA, 2167 bp, Homo sapiens
ggcggcagctccccggcagcggcggtggagagcgcagcgcgcagcccggtgcagccctggctttcccctcgctgcgcgcccgcgccccctttcgcgtccgcaaccagaagcccagtgcggcgccaggagccggacccgcgcccgcaccgctcccgggaccgcgaccccggccgcccagagatgaccgcgaccgaagccctcctgcgcgtcctcttgctcctgctggctttcggccacagcacctatggggctgaatgcttcccggcctgcaacccccaaaatggattctgcgaggatgacaatgtttgcaggtgccagcctggctggcagggtcccctttgtgaccagtgcgtgacctctcccggctgccttcacggactctgtggagaacccgggcagtgcatttgcaccgacggctgggacggggagctctgtgatagagatgttcgggcctgctcctcggccccctgtgccaacaacaggacctgcgtgagcctggacgatggcctctatgaatgcctcccatgcctcctgcctgtgcccccctggcttctcaggcaatttctgcgagatcgtggccaacagctgcacccccaacccatgcgagaacgacggcgtctgcactgacattgggggcgacttccgctgccggtgcccagccggcttcatcgacaagacctgcagccgcccggtgaccaactgcgccagcagcccgtgccagaacgggggcacctgcctgcagcacacccaggtgagctacgagtgtctgtgcaagcccgagttcacaggtctcacctgtgtcaagaagcgcgcgctgagcccccagcaggtcacccgtctgcccagcggctatgggctggcctaccgcctgacccctggggtgcacgagctgccggtgcagcagccggagcaccgcatcctgaaggtgtccatgaaagagctcaacaagaaaacccctctcctcaccgagggccaggccatctgcttcaccatcctgggcgtgctcaccagcctggtggtgctgggcactgtgggtatcgtcttcctcaacaagtgcgagacctgggtgtccaacctgcgctacaaccacatgctgcggaagaagaagaacctgctgcttcagtacaacagcggggaggacctggccgtcaacatcatcttccccgagaagatcgacatgaccaccttcagcaaggaggccggcgacgaggagatctaagcagcgttcccacagccccctctagattcttggagttccgcagagcttactatacgcggtctgtcctaatctttgtggtgttcgctatctcttgtgtcaaatctggtgaacgctacgcttacatatattgtctttgtgctgctgtgtgacaaacgcaatgcaaaaacaatcctctttctctctcttaatgcatgatacagaataataataagaatttcatctttaaatgagtaagagaaataagtatgttattctaaaatctaaactcaaatgaaatttcaaaaaagaccaaaaaaaaacaaggcaacagaaccagggctcagtgccgacgcccctaccctgggggtctcggccacatggtcctcgtgaaaccgttacgagtgctgtacatgaccacccactgtgcaaagagctacgattgctttcgttcgttaattctcacacaccacatccgactcgcactcacatccagctcaacatcgctacctttagatctttccgattgatttgagatttagcggagtgcagcggctgtgtgtcagtcagagagagccccaggttggctgctggggggccgggcctctgtgccagccctgccactaactcgctgtgtgatccttggcgagtccctatcccaatcctgggcccactttctcgcccctctcgagggaggggtttgaacaccgaccaccatggtcctctctggctctaaaactctgaattaggaacgagggggtatgaaccaaaacacttcctgaccccaacaattgggatctgatgaagacgaattctcatcctgggatccgaaaggttttggcctatcctggatgaacgcttgatgttgaaatttatcctaactgtgtttctcaaagtggggagcctcctggcccacttcccttttgggaaaaaatagcccctttgagtcataatgtgccatctggagttgcc

SEQ ID NO: 24186 - protein, 238 aa, Homo sapiens; identical to SEQ ID NO: 24178

SEQ ID NO: 24187 - DNA, 467 bp, Homo sapiens
ccgcaccgctcccgggaccgcgaccccggccgcccagagatgaccgcgaccgaagccctcctgcgcgtcctcttgctcctgctggctttcggccacagcacctatggggctgaatgcttcccggcctgcaacccccaaaatggattctgcgaggatgacaatgtttgcaggtgccagcctggctggcagggtcccctttgtgaccagtgcgtgacctctcccggctgccttcacggactctgtggagaacccgggcagtgcatttgcaccgacggctgggacggggagctctgtgatagaggttggcactcgcctttgttcacctcagctctgcgtccttacctgcctgccctagcccctaccacctcctcccagtctcctgttgctggtgttcctcacttcctcattcctgcacactccgtgccctgtattctaaagatctgtttataaatttcctgtgggtaccg

SEQ ID NO: 24188 - protein, 136 aa, Homo sapiens
MTATEALLRVLLLLLAFGHSTYGAECFPACNPQNGFCEDDNVCRCQPGWQGPLCDQCVTSPGCLHGLCGEPGQCICTDGWDGELCDRGWHSPLFTSALRPYLPALAPTTSSQSPVAGVPHFLIPAHSVPCILKICL

SEQ ID NO: 24189 - DNA, 1543 bp, Homo sapiens
cgctggcttgtgccaccgtagacagacctcgtattgctttctctttgagagtccccaagcgcttcctgcacaatagcctgtggatccacaccgctaataataataataataataatgagggttggcggcaacagtggacataggcatgaaggacgacagcgggtcccgggatagagtgaggggcgccccttgcttggttcttctgccccagcagtccagggatggagctaagggaagggggcttgctccagtcctgggctgtcactgacttttcctctcctagcctcagtttccccagttggctagtgactaaccggttggagactaacctctggttggagaggtgcagtaagaggtgggagaggacgtgggcatcctggcatgggaggtcgggtgtgtcccaggttagcatcgagatgggggtgaggtgggcacccacccacccacccccagagctactggtgagcttctcgcagacaggggtcacggccccgggcacctctctgtgcctccctggctggcgttccctccctcgctccctcattcacctgatgtgttttaagcacctgccccttagtcaggccagggaccttctgccctgagccccgtgccctgcagcgctgttgtagcctagcccctgaggccgtttactatgtccctgttgtgttgcagctccccctgccagcacggaggcacctgcgtggatgatgagggccgggcctcccatgcctcctgcctgtgcccccctggcttctcaggcaatttctgcgagatcgtggccaacagctgcacccccaacccatgcgagaacgacggcgtctgcactgacattgggggcgacttccgctgccggtgcccagccggcttcatcgacaagacctgcagccgcccggtgaccaactgcgccagcagcccgtgccagaacgggggcacctgcctgcagcacacccaggtgagctacgagtgtctgtgcaagcccgagttcacaggtctcacctgtgtcaagaagcgcgcgctgagcccccagcaggtcacccgtctgcccagcggctatgggctggcctaccgcctgacccctggggtgcacgagctgccggtgcagcagccggagcaccgcatcctgaaggtgtccatgaaagagctcaaaagtgcgagacctgggtgtccaacctgcgctacaaccacatgctgcggaagaagaagaacctgctgcttcagtacaacagcggggaggacctggccgtcaacatcatcttccccgagaagatcgacatgaccaccttcagcaaggaggccggcgacgaggagatctaagcagcgttcccacagccccctctagattcttggagttccgcagagcttactatacgcggtctgtcctaatctttgtggtgttcgctatctcttgtgtcaaatctggtgaacgctacgcttacatatattgtctttgtgctgctgtgtgacaaacgcaatgcaaaaacaatcctctttctctctcttaatgcatgatacagaataataataagaatttcatctttaaatg

SEQ ID NO: 24190 - protein, 207 aa, Homo sapiens
MSLLCCSSPCQHGGTCVDDEGRASHASCLCPPGFSGNFCEIVANSCTPNPCENDGVCTDIGGDFRCRCPAGFIDKTCSRPVTNCASSPCQNGGTCLQHTQVSYECLCKPEFTGLTCVKKRALSPQQVTRLPSGYGLAYRLTPGVHELPVQQPEHRILKVSMKELKSARPGCPTCATTTCCGRRRTCCFSTTAGRTWPSTSSSPRRST

SEQ ID NO: 24191 - DNA, 2262 bp, Homo sapiens
cgctggcttgtgccaccgtagacagacctcgtattgctttctctttgagagtccccaagcgcttcctgcacaatagcctgtggatccacaccgctaataataataataataataatgagggttggcggcaacagtggacataggcatgaaggacgacagcgggtcccgggatagagtgaggggcgccccttgcttggttcttctgccccagcagtccagggatggagctaagggaagggggcttgctccagtcctgggctgtcactgacttttcctctcctagcctcagtttccccagttggctagtgactaaccggttggagactaacctctggttggagaggtgcagtaagaggtgggagaggacgtgggcatcctggcatgggaggtcgggtgtgtcccaggttagcatcgagatgggggtgaggtgggcacccacccacccacccccagagctactggtgagcttctcgcagacaggggtcacggccccgggcacctctctgtgcctccctggctggcgttccctccctcgctccctcattcacctgatgtgttttaagcacctgccccttagtcaggccagggaccttctgccctgagccccgtgccctgcagcgctgttgtagcctagcccctgaggccgtttactatgtccctgttgtgttgcagctccccctgccagcacggaggcacctgcgtggatgatgagggccgggcctcccatgcctcctgcctgtgcccccctggcttctcaggcaatttctgcgagatcgtggccaacagctgcacccccaacccatgcgagaacgacggcgtctgcactgacattgggggcgacttccgctgccggtgcccagccggcttcatcgacaagacctgcagccgcccggtgaccaactgcgccagcagcccgtgccagaacgggggcacctgcctgcagcacacccaggtgagctacgagtgtctgtgcaagcccgagttcacaggtctcacctgtgtcaagaagcgcgcgctgagcccccagcaggtcacccgtctgcccagcggctatgggctggcctaccgcctgacccctggggtgcacgagctgccggtgcagcagccggagcaccgcatcctgaaggtgtccatgaaagagctcaaaagtgcgagacctgggtgtccaacctgcgctacaaccacatgctgcggaagaagaagaacctgctgcttcagtacaacagcggggaggacctggccgtcaacatcatcttccccgagaagatcgacatgaccaccttcagcaaggaggccggcgacgaggagatctaagcagcgttcccacagccccctctagattcttggagttccgcagagcttactatacgcggtctgtcctaatctttgtggtgttcgctatctcttgtgtcaaatctggtgaacgctacgcttacatatattgtctttgtgctgctgtgtgacaaacgcaatgcaaaaacaatcctctttctctctcttaatgcatgatacagaataataataagaatttcatctttaaatgagtaagagaaataagtatgttattctaaaatctaaactcaaatgaaatttcaaaaaagaccaaaaaaaaacaaggcaacagaaccagggctcagtgccgacgcccctaccctgggggtctcggccacatggtcctcgtgaaaccgttacgagtgctgtacatgaccacccactgtgcaaagagctacgattgctttcgttcgttaattctcacacaccacatccgactcgcactcacatccagctcaacatcgctacctttagatctttccgattgatttgagatttagcggagtgcagcggctgtgtgtcagtcagagagagccccaggttggctgctggggggccgggcctctgtgccagccctgccactaactcgctgtgtgatccttggcgagtccctatcccaatcctgggcccactttctcgcccctctcgagggaggggtttgaacaccgaccaccatggtcctctctggctctaaaactctgaattaggaacgagggggtatgaaccaaaacacttcctgaccccaacaattgggatctgatgaagacgaattctcatcctgggatccgaaaggttttggcctatcctggatgaacgcttgatgttgaaatttatcctaactgtgtttctcaaagtggggagcctcctggcccacttcccttttgggaaaaaatagcccctttgagtcataatgtgccatctggagttgcc

SEQ ID NO: 24192 - protein, 207 aa, Homo sapiens; identical to SEQ ID NO: 24190

SEQ ID NO: 24193 - DNA, 1030 bp, Homo sapiens
tccctccctcgctccctcattcacctgatgtgttttaagcacctgccccttagtcaggccagggaccttctgccctgagccccgtgccctgcagcgctgttgtagcctagcccctgaggccgtttactatgtccctgttgtgttgcagctccccctgccagcacggaggcacctgcgtggatgatgagggccgggcctcccatgcctcctgcctgtgcccccctggcttctcaggcaatttctgcgagatcgtggccaacagctgcacccccaacccatgcgagaacgacggcgtctgcactgacattgggggcgacttccgctgccggtgcccagccggcttcatcgacaagacctgcagccgcccggtgaccaactgcgccagcagcccgtgccagaacgggggcacctgcctgcagcacacccaggtgagctacgagtgtctgtgcaagcccgagttcacaggtctcacctgtgtcaagaagcgcgcgctgagcccccagcaggtcacccgtctgcccagcggctatgggctggcctaccgcctgacccctggggtgcacgagctgccggtgcagcagccggagcaccgcatcctgaaggtgtccatgaaagagctcaacaagaaaacccctctcctcaccgagggccaggccatctgcttcaccatcctgggcgtgctcaccagcctggtggtgctgggcactgtgggtatcgtcttcctcaacaagtgcgagacctgggtgtccaacctgcgctacaaccacatgctgcggaagaagaagaacctgctgcttcagtacaacagcggggaggacctggccgtcaacatcatcttccccgagaagatcgacatgaccaccttcagcaaggaggccggcgacgaggagatctaagcagcgttcccacagccccctctagattcttggagttccgcagagcttactatacgcggtctgtcctaatctttgtggtgttcgctatcttcttaatgcatgatacagaataataataagaatttcatctttaa

SEQ ID NO: 24194 - protein, 255 aa, Homo sapiens [sequence omitted]

SEQ ID NO: 24195 - DNA, 700 bp, Homo sapiens
cctcctgcctgtgcccccctggcttctcaggcaatttctgcgagatcgtggccaacagctgcacccccaacccatgcgagaacgacggcgtctgcactgacattgggggcgacttccgctgccggtgcccagccggcttcatcgacaagacctgcaccggagcaccgcatcctgaaggtgtccatgaaagagctcaacaagaaaacccctctcctcaccgagggccaggccatctgcttcaccatcctgggcgtgctcaccagcctggtggtgctgggcactgtgggtatcgtcttcctcaacaagtgcgagacctgggtgtccaacctgcgctacaaccacatgctgcggaagaagaagaacctgctgcttcagtacaacagcggggaggacctggccgtcaacatcatcttccccgagaagatcgacatgaccaccttcagcaaggaggccggcgacgaggagatctaagcagcgttcccacagccccctctagattcttggagttccgcagagcttactatacgcggtctgtcctaatctttgtggtgttcgctatctcttgtgtcaaatctggtgaacgctacgcttacatatattgtctttgtgctgctgtgtgacaaacgcaatgcaaaaacaatcctctttctctctcttaatgcatgatacagaataataataagaatttcatctttaaatg

SEQ ID NO: 24196 - protein, 95 aa, Homo sapiens
MKELNKKTPLLTEGQAICFTILGVLTSLVVLGTVGIVFLNKCETWVSNLRYNHMLRKKKNLLLQYNSGEDLAVNIIFPEKIDMTTFSKEAGDEEI

SEQ ID NO: 24197 - DNA, 302 bp, Homo sapiens
gcacgagatcatcttccccgagaagatcgacatgaccaccttcagcaaggaggccggcgacgaggagatctaagcagcgttcccacagccccctctagattcttggagttccgcagagcttactatacgcggtctgtcctaatctttgtggtgttcgctatctcttgtgtcaaatctggtgaacgctacgcttacatatattgtctttgtgctgctgtgtgacaaacgcaatgcaaaaacaatcctctttctctctcttaatgcatgatacagaataataataagaatttcatctttaaatg

SEQ ID NO: 24198 - protein, 73 aa, Homo sapiens
ARDHLPREDRHDHLQQGGRRRGDLSSVPTAPSRFLEFRRAYYTRSVLIFVVFAISCVKSGERYAYIYCLCAAV

SEQ ID NO: 24199 - DNA, 1021 bp, Homo sapiens
gcacgagatcatcttccccgagaagatcgacatgaccaccttcagcaaggaggccggcgacgaggagatctaagcagcgttcccacagccccctctagattcttggagttccgcagagcttactatacgcggtctgtcctaatctttgtggtgttcgctatctcttgtgtcaaatctggtgaacgctacgcttacatatattgtctttgtgctgctgtgtgacaaacgcaatgcaaaaacaatcctctttctctctcttaatgcatgatacagaataataataagaatttcatctttaaatgagtaagagaaataagtatgttattctaaaatctaaactcaaatgaaatttcaaaaaagaccaaaaaaaaacaaggcaacagaaccagggctcagtgccgacgcccctaccctgggggtctcggccacatggtcctcgtgaaaccgttacgagtgctgtacatgaccacccactgtgcaaagagctacgattgctttcgttcgttaattctcacacaccacatccgactcgcactcacatccagctcaacatcgctacctttagatctttccgattgatttgagatttagcggagtgcagcggctgtgtgtcagtcagagagagccccaggttggctgctggggggccgggcctctgtgccagccctgccactaactcgctgtgtgatccttggcgagtccctatcccaatcctgggcccactttctcgcccctctcgagggaggggtttgaacaccgaccaccatggtcctctctggctctaaaactctgaattaggaacgagggggtatgaaccaaaacacttcctgaccccaacaattgggatctgatgaagacgaattctcatcctgggatccgaaaggttttggcctatcctggatgaacgcttgatgttgaaatttatcctaactgtgtttctcaaagtggggagcctcctggcccacttcccttttgggaaaaaatagcccctttgagtcataatgtgccatctggagttgcc

SEQ ID NO: 24200 - protein, 49 aa, Homo sapiens
MVLVKPLRVLYMTTHCAKSYDCFRSLILTHHIRLALTSSSTSLPLDLSD

SEQ ID NO: 24201 - DNA, 1371 bp, Homo sapiens
agcgtcagcctcgctggcgtcctcactggccatggccctgcagccttgctcttcagttcctggaagcctcctgcccttggtggacaaccattttgctctctagcaaatggatagaaaagtttatgtgagtctggctgggcggggtggctcacacctgtaatgcagctcgttgggtggctgaggcaggcagagcatttgaggtcaggagttcaagaccagcctggctgacaccgtgaaaccttgtctctactaaaaatacaaaaattagctgggtgtggtggcgtgcgcctgtaatcccagctacttgggaggctgaggtaggagaattacttgaatctgagagatggaggctgcagtgagccgagatcatgccactgcactccaacctgggcgacagagtgaaactccgtctcaaaaaaaaaaaaaaaaagaaaaaaaaagaaaagaaaaaaacgtgtatttgagtctgggccccggcctctgttggactttgagtaaatcttaatttagcaccctgagctgcaactcctttctcctgaccctgccacctgcatgcgccattcaagtggctgcgccccaggctgctcatcccttccgccctgggtccccatacacagcaaccccatggggtttttgtcctgctccttcatattaatctgcattggtgactcctttgtcccatcttccctcagcacacagtagggctgctggcagcaggtgaggcctggggcaagggctcagagaggcaagatgccatttggccatgccaccgagtgagcagtttctcttcttgccctcccaggtggcgtgaaggggagatggctgctttctcctgggaagggagcagatgcctggcccaggaccaaatcaaaaggtctgaaaaatgatattcattgtcctaatgtgtaaatttcgacaatttgcaaatttgtagattctttagaatagaactaactcaagcccttcattctgcagctgaggctcactgcccccagtgggcagtgggtccagggggtttctgaggacagggcatgacccagccctgctgcccccaagatggcacctggcttggaggggtgaggggccctgttagtctgactttgaagaagaccagccttccagactcgcttggtgccctgacaggagccctgggctcccccagtgttgcctgggtctgactttgcctcagtgaaaactgcctcgaattctttcttgcaccgatgggcagatgggcagtgtcggaggatcgtgtcatctgtcccgtggcgctggttggcttggtcaagtcagtgttcaaactatctcctgctctttcaaggggatctggggctctagaagattagaggacttggagaggttagtgacttgctc

SEQ ID NO: 24202 - protein, 48 aa, Homo sapiens
MTQPCCPQDGTWLGGVRGPVSLTLKKTSLPDSLGALTGALGSPSVAWV

SEQ ID NO: 24203 - DNA, 570 bp, Homo sapiens
ccaggttctaggctgttgaggctgagggtaggaagtgtatcaacaggtatacagaatagtcactggtcttgggctaaatggtgacttcaagtgtagtggctgcatagtcaaaaatgataaatgaatgaatgaacaaacacatgaataaaacaagagagggcaaacatgggacaaaggtgatcatatctcattgtcgtaaattctttttatgtagcttcagcatccgttttcaacctaagtttaactttctcattccagaagcaggcttagtcacccttgacacagtttgcagttatccacctcctccaagttcttaatatgttagatccagataactgccttgtacagccacctccaggatactgcctccctaaaaaacagctagatacactgaccccacagcctatgtggaccacacagatatagtggcttgctctaaatgcaccagtgagaactctctgcaggaaacctgcttgggaaatgccatagcctgcaatacaggctttccccttcccgctggccctgtgaggcatgcaggatctgtaagtaataaactgcttctgttgtttc

SEQ ID NO: 24204 - protein, 62 aa, Homo sapiens
MNKHMNKTREGKHGTKVIISHCRKFFLCSFSIRFQPKFNFLIPEAGLVTLDTVCSYPPPPSS

SEQ ID NO: 24205 - DNA, 451 bp, Homo sapiens
aaatctaggttttttcatcctttttaatatcagccttgtgttccacagaatggaggctccagagtgaaattaatgacactttgtcgatgaagatcttgattgtgacctctgtggaaaatgagccatgaaccaaccaataagcaggcttagtcacccttgacacagtttgcagttatccacctcctccaagttcttaatatgttagatccagataactgccttgtacagccacctccaggatactgcctccctaaaaaacagctagatacactgaccccacagcctatgtggaccacacagatatagtggcttgctctaaatgcaccagtgagaactctctgcaggaaacctgcttgggaaatgccatagcctgcaatacaggctttccccttcccgctggccctgtgaggcatgcaggatctgtaagtaataaactgcttctgttgtttca

SEQ ID NO: 24206 - protein, 35 aa, Homo sapiens
MLDPDNCLVQPPPGYCLPKKQLDTLTPQPMWTTQI

SEQ ID NO: 24207 - DNA, 634 bp, Homo sapiens
tcatctctcacagtgattttatcattaatcatttttaattttataaatattagataatcaacataatgtttcatggcaatgccataattacccctggaccatggttaaccttttggattatctgtaatgttcttaataaaacaatgactaccccttaaaaacccagaaccaagacaagaactttgactatactcacattggtctccaagcttctaacacacagaggcaaccagaaacctcatgaccatggaagggtgcttaagtcaacttgagggtgttcattgtgagagtacaaagcaaaaaagataaaaagatggaaatattctgtccatttatccacacatttctcctttcattctattagtcatgtaagtatgtgtgaaactattttttcttgagaaaacaaacaaccatgaaaacgtgctccacatcatatattattgggaaaatgcaaattaaaacaacgagataccaccgcacacctattagaatgaccaaaatgcagaacactaacaacaccaaatgatggcaaaaacgtggagtcacaagaactctcattcattgctggtaggaatacaaaatcaacacaatcacattggaagacagtttggcagtttcttctacaactaaacat

SEQ ID NO: 24208 - protein, 37 aa, Homo sapiens
MKTCSTSYIIGKMQIKTTRYHRTPIRMTKMQNTNNTK

SEQ ID NO: 24209 - DNA, 475 bp, Homo sapiens
agtggacataggccagctgatttaataatttaagaaagaactgttatcctgagtaaggagcatagagacaaatataaaatgaacgcactctacctgatttaattatagtcttctggtgaagatcttgctgttatctctgtgaatcaggagagaagagattgatgaatagacgagattggatttggtcatttccccaaggtgaagagcatggcgatttcttctgtggtaaggagcaataatgaagaccatggttgatttaatcagtctctgctgatgaagatcttggctgttacctttgtgtaatgaatgcgcaatgattcaattattctccagcgaggaagatcatggttgttgtctgtttgagtaatgagtgtagaaacctatgtaagtaacaaagtgattgcttttgctttagtggttgttaagagagttaagtctttctggaaaggaataaatgactatgtatacaaataaa

SEQ ID NO: 24210 - protein, 35 aa, Homo sapiens
MSVETYVSNKVIAFALVVVKRVKSFWKGINDYVYK

SEQ ID NO: 24211 - DNA, 538 bp, Homo sapiens
ctgagtaaggagcatagagacaaatataaaatgaacgcactctacctgatttaattatagtcttctggtgaagatcttgctgttatctctgtgaatcaggagagaagagattgatgaatagacgagattggatttggtcatttccccaaggtgaagagcatggcgatttcttctgtggtaaggagcaataatgaagaccatggttgatttaatcagtctctgctgatgaagatcttggctgttacctttgtgtgtaaggaagctaaagacttaagtaaataacagtccaaaaacttgtcaattagggtaaatttttcattaatgttcactgaattatttaaagttaaggcatatgtagatcaatgagatgaatgtgttatgaaacttagattgtggttagtccaattaagcacaattttggttaaaaataagatgaaagacattttattcatttttttatctgattaataattcatcttattttgtactgcatttaatttaagatttattcactaataaaatctatggctgcactgtt

SEQ ID NO: 24212 - DNA, 807 bp, Homo sapiens
aatggaggcgtgatggctgatgcaatcattttccactgatgaaggttttgatggccacctgtgtgagtagggaggacataggctgctaatgaacagccccatctgatttaatcactgtgcaatgaccgtgaactgtacagttacctccgtgtgtcacaggaagactcttttgacttaagcacccttccatggtcatgaggtttctggttgcctctgtgtgttagaagcttggagaccaatgccttctgctgtgatcgcgttctccacagttgcctctgggtaggagcctggacactaatagaaaatggatgcacttgagccgacctaagcattcatggtcatgagatttgtggttgccactgttggttaggagcatagagatcagtaatggacacacctgggctggcagaacatcttgccttgatctggagccccatgtctgcccctctgtagaggtgcacatgggccaatgatggatgcaatgagctgatcattttgctgtgatcaaggctatgttgcctctgtgttaggccaatggttgatgttcatgggtgattgatcatcctgtagcgacggtggtattgactgttccccagaggacaaggagtgtgttcttatgtaagtcatagttgacattcttgtttttgattgggtagtttgcctgttcattgatgttcatagtactatagaaggtagataaatggccacatacctaaagaaaatcaaaggggacaaaaagtgagagtctgttataaactaaggattataattaatgtaattcagtacaactgtggacaattttgaaaa

SEQ ID NO: 24213 - protein, 39 aa, Homo sapiens
GFWLPLCVRSLETNAFCCDRVLHSCLWVGAWTLIENGCT

SEQ ID NO: 24214 - DNA, 524 bp, Homo sapiens
ccccatctgatttaatcactgtgcaatgaccgtgaactgtacagttacctccgtgtgtcacaggaagactcttttgacttaagcacccttccatggtcatgaggtttctggttgcctctgtgtgttagaagcttggagaccaatgccttctgctgtgatcgcgttctccacagttgcctctgggtaggagcctggacactaatagaaaatggatgcactggagctgatttaaacattctttggtggtcacaagatgtatagctgcctctgtatgtttggcgcatggaaaaaaatatgagtttttgtggacatacactctttatttgaaaagtatgaaatataatccaagaaagccagccatggctcagtgataaatatggaattgatatgaaacattatattgattaatcacctttgaggatgattaataaaagagagaaagtgattctatatagagatgcaggactatttcaggctcattcatgatctaggtttttgtgcttcatggttattttattatcatc

SEQ ID NO: 24215 - protein, 52 aa, Homo sapiens
GFWLPLCVRSLETNAFCCDRVLHSCLWVGAWTLIENGCTGADLNILWWSQDV

SEQ ID NO: 24216 - DNA, 1179 bp, Homo sapiens
agtcattgacggtgaatacaggtctggaagtctgaggtccaatataataaaaaatctagtcttcaccttctatcctagggatagacattaggaatatttgaggatgttgttcttggtcttcacgttcatgcattttccctctatttttataattggatcaatgaatcaataagcaaatatattttaactgcataaagataaaaataggcgttgtccaattatggaaatatatggtgaaataagaaatactattcacatttattaaaaacactgaggtcttctttctattaacaaataaatgactcagaggtattactcgcttgctgcaggatggcatatacagtaaaaataataataacgtatgtgaggtcatttgggtcaggaccatgttcatggttgtttgttttctcaagaaaaaatagtttcacacatacttacatgactaatagaatgaaaggagaaatgtgtggataaatggacagaatatttccatctttttatcttttttgctttgtactctcacaatgaacaccctcaagttgacttaagcacccttccatggtcatgaggtttctggttgcctctgtgtgttagaagcttggagaccaatgccttctgctgtgatcgcgttctccacagttgcctctgggtaggagcctggacactaatagaaaatggatgcacttgagccgacctaagcattcatggtcatgagatttgtggttgccactgttggttaggagcatagagatcagtaatggacacacctgggctggcagaacatcttgccttgatctggagccccatgtctgcccctctgtagaggtgcacatgggccaatgatggatgcaatgagctgatcattttgctgtgatcaaggctatgttgcctctgtgttaggccaatgtgagtaatggttcttgtcttggtttaggttgtttaatggtattcctgatattattaaaaattatttaatataataaaaagttaattggcttaatgacaatgtgcaacattgaggttaattaatgaaagagatgtagtctctgtgggaaattattgtatagacaaatgtaaggattcttcaaatatcttgttcttgggttttcaaaatcatgtattcattttattatcaaagaagaaatgatttattcaataaatatttagaaatgaatgatg

SEQ ID NO: 24217 - protein, 47 aa, Homo sapiens
MAYTVKIIITYVRSFGSGPCSWLFVFSRKNSFTHTYMTNRMKGEMCG

SEQ ID NO: 24218 - DNA, 461 bp, Homo sapiens
cagggttgatgttcatgggtgattgatcatcctgtagcgacggtggtattgactgttccccagaggacaaggagtgtgttcttataatggacatcatgattgggattgtctttattaaactttgtcaggagagtaaagatcaatgtggccacatgttgtggctcatgcctgtaatcccaacactgtaatcccagcactgtaatcccagcctgtaatcccaggctgaggtgggcggatcacctgaggttgggagttcgagaccagcctgaccaacatggagaaaccccgtctctactaaaaatacaaaattagccgggcatggtggcgcatgtctttaattccagctactcaggaggctgaggcaggagaaacgcttgaacccgagaggcggaggttgcagtgagctgagattgcgccattgcactccagcctgggcaacaagagtgaaactccatctcaaa

SEQ ID NO: 24219 - protein, 33 aa, Homo sapiens
MDIMIGIVFIKLCQESKDQCGHMLWLMPVIPTL

SEQ ID NO: 24220 - DNA, 614 bp, Homo sapiens
caaatcatgctgatgctgcctcctgagaaatattttcagaatcactgagaaaaatgtatgaaatagttaatgtccttgctctgtgtcagtggtggaggctgtctgcagtaggagcatggagaccaacaatggatgctcttaaactgatttaagcacgcttccatggtcagaagccttatggttgccacagggtattaggagcatggagaccaataatggatgtccttgttctgatttgaggatgcctccaaggtcacatactctgtttgcaccacgcttaggaaggagcgtgaagaccaaggggagtaatagtcaaagtccttacctttgtttgggtggtttgtttaagagtaatcaacgtattatttaaaagtgtgaaatacagtcaaagatggccaatgttattccagtgatatgggagtgacatgaagtattatattgatgatgcatatataaaaaacaggatagttaatgaaacacccaatgtttgagtgattctgtatactgatagggaatatcaagagtgttactgggttttgtgaatcacgggccttgaaagtattattaatgaataaatgacataatcaatagacaaggtagaaatgaatagcaaa

SEQ ID NO: 24221 - protein, 55 aa, Homo sapiens
METNNGCPCSDLRMPPRSHTLFAPRLGRSVKTKGSNSQSPYLCLGGLFKSNQRII

SEQ ID NO: 24222 - DNA, 548 bp, Homo sapiens
cacagatcatggaggactgttttatctgtttgtgatctgccgtcctctgtgagcctcaggatggatgtttgccagccgattccatggttacaagctctatagctgcatctatgtgttaggagcatgaagaccaataatggatgcactgagctgattatgaatttagccctgatgaagacttgtgttgctgtcatgatatgaaagattccagtaatgaacgcacttgagttgattcaagcacgcttccatggtcatgagctctgtggttgcatctgtgtgttaggagcatgcagaccaatagtgataatctcgaggtgatttatgcattcttccatggccaccagccttatgattgcatctgtgcgtcacagcttagagatcaataatggatgcaacaagctctttgaatcattctgttgggatcaagattgttgtgttccctctgtttggaaagagaccaagaatggatacgctcaggtgatttaagcagtcttccatggccacgagctctgtggttgcctctgtatattaagagcacagagattaaa

SEQ ID NO: 24223 - protein, 54 aa, Homo sapiens
MHSSMATSLMIASVRHSLEINNGCNKLFESFCWDQDCCVPSVWKETKNGYAQVI

SEQ ID NO: 24224 - DNA, 1123 bp, Homo sapiens
aggaaagcgaacgtccagctgaagagaggagaagccctagaagtgatacaggctctggccgggggacccgatgtgctcgtgtcgcggcgtggggcttggtgaggaaccaccggagtgctcttgcatttttcatgacaaagaccacacagttggcctcattcctgcacagtgggagaatgtgtggaggtgtcccgccaccagagaggaggtctatgtcagcaccatcaccagcatccaggctacctacaagaggaggcagggggactcctctgacacacctggggaggtctcgtcaatggcaggttccctctacaatgctttctctgctgcaaatgcaactcagcatcacctctttcctggatataattccaaggaattattaaaggaggcattggtgtcagcacctcgtgaaatactcgtaaggatgacccatggcagagcctgtgtcttcattggactggaaggaaggcagactctggtgaagacgtgggccgtcaccgtcagccttcggtacttgaagagtggttatccctgctgtgttcgcttaatttatgacgaatcatacagggacatccagtttttcagtatcaaatactgctttggaaggcttcccggacagcgtcccgccttcaggcaaggggtcttggcttcacctcccacccaaggaggctccatggagataatgcggctttgggaagcggccatgattctcctgtcagggaccagtgagctacgcaaaagctccctgtcttgtctggaaggacgaactgcatccttgctgctggggagaaggcagtgccctcagcactcccttaaggactcccgagaagggcggccacctctgccagagaggcaatggatttctcaccagtgttcatgtgtggtacttggagagaggctggccgtgatgaattcgattcatcaaagcgagtcatacacggctctcctctcttttagtgtcaaattctgcctcggagggcttcctgagccagtgctgcttccaaggatgccttatggcaatgccacttctgagatggtcgtgggagtcagcaccactggccagggggacttcctggaggaggccaactttggagaacaggcattgacattgggtctgcgctag

SEQ ID NO: 24225 - protein, 350 aa, Homo sapiens
MCSCRGVGLGEEPPECSCIFHDKDHTVGLIPAQWENVWRCPATREEVYVSTITSIQATYKRRQGDSSDTPGEVSSMAGSLYNAFSAANATQHHLFPGYNSKELLKEALVSAPREILVRMTHGRACVFIGLEGRQTLVKTWAVTVSLRYLKSGYPCCVRLIYDESYRDIQFFSIKYCFGRLPGQRPAFRQGVLASPPTQGGSMEIMRLWEAAMILLSGTSELRKSSLSCLEGRTASLLLGRRQCPQHSLKDSREGRPPLPERQWISHQCSCVVLGERLAVMNSIHQSESYTALLSFSVKFCLGGLPEPVLLPRMPYGNATSEMVVGVSTTGQGDFLEEANFGEQALTLGLR

SEQ ID NO: 24226 - DNA, 2641 bp, Homo sapiens
ccactctgcacagacacgttggctggtgcagtcctggagacccacggagctcacggtcgtcaggggtcctcaaggattcagagaacccccaaatgtcagggctgctcccttcttgtcctgcctctctgctcacacccttggacaggaggaagcacacgggaggcactcagagaacgtttgtggaatgaataaataaaagcatattttgagggaataaagaagcagaaaaacaaagaagaatctggggaagatgggcataaatctccaccaagtgctgccaaggcttcccaggcgaggctgctgaaaagaccctgtggaggtagagggacaatttgtcatggatgggaatgggcttgagggccgggaagcagggcatgatggggcctcattcatcattttcccgttatcccagcagcgtgcaggggagcaggtacagcacctgcctgtgcagctgcactgcctgcccgaaggccctaggccctgggccaagtgagtgaccagagggggactgggaatggaaaggacctcaaggaaggacaagctgagctctgggaggccacctcctccaggaagccttccctgattcatccttcacaggcagtctcaatttgcagtcagatatccactgctctgattcttagatcagcaagtatctccctacccagactgcaggctctgctggggccgcggctgtttctgacttgtgcacaatggcatccctgtacctagcacaggactgagtccagagaaagtgctcagtgatgcttgttggccttgtctctcctctgtgggcagcacagggcacccggcgggtcctgagggtgtggacatcccacggcagagcctgcggttgatcccgaccatgaaccaaggcctggggcgggggtggccacatcaggccacttctgccaggagagatgtggctgtgagctgggggtctggcctgtccccggaggcattccttgggtttgcatccatcagaagatccactggttgcctctatttgggcctggagcagggatgggatttttccaaggtacatggggtctaggggagacccaggcccattattagggtcggtcttgagaaggcagagatcaggccaccactttatttggtgtagctcctcgctccattggtgtgtgctgagtgaatgaatgcatcagggactcctgcttcctgcccagagccccctccgcaccccacacagccttgctccaaggagaaggggtcagagccaactggacagtgctacagcatggggagcctcgaccaggctcggccctcgacgatgggataggcagacagccccctgtgcaaggcagctagcttgcagggtcccgagaggccaaaggccctggtctttcctggggcaagaggctgctgagaaggtgcacagagcctgggtgcaggaaaccatccagaatgctgcttcccgccatctgtgagatcttcgttttctctaacactcaaaaatagatgtttctgttatgctctctcgttggcaggggagcggcaggacctgccaaggcctgggggagcccgccagcctgctgagttctactgtacaaacagttggggagggggcgctgtctctgttaacttgaaattccccgatcagtaaacatgccaatttaaagtgtaattaactcaggccggaaaaaattcagatttggactgcttttcacagttgaggttgtttttcttttatttatttatctctttccgggtgtggtggtatctgtggctggttttagccaggaaaaatagaagggggaccgggtggggagggggctggttgggagaggaaaggctggaaggaaaggaagagaaacgggcgggtggcctgacacccagcagccaggtgtctataggttttctgtcctgggagggggctgtcagggtgatgcccgcctgcagagagggggtcattctgcgaggttgggctgcagacccctgtgccagcgggcctggtgattcggaaatgatggggcactgtggagagaccccaggaaaacacccagtgctgcttttgacattctctctccatctcccctttcagcggctgctctgcctgggataaacacatttcaagagtctcagtccccgctttgccaccatctcctcctctgatctcctttcctgcttcaaaagactccagaatcttctcggttctcagagaaggctgaatccacctatgacctagtgggagcaccctgtgccgaaactgtttaccttctggtccccggagccatgggtcacgacctgggcctcatgtaggcccgctcctcagcagaccccaatctgcggcttctcccacctcactggggaagaaggagagccctggggatgtggagaagccaccccccaccccgccacatcccccacatcttacagaatctcgattgaatccccgggggcacatccctcagcaggacagcaacagtctttgccgcagcctggggagggctgtgctggggatgagcgccgagtggccgtggactaagtgaaggaaatgaccatgctcttctcccagctggatggcgaggccgggcaggaaccgcggaattcctgctcttcgttttcaaacactttgctgtcaagctatttgaataataaatacacattataaaaatgtaaa

SEQ ID NO: 24227 - protein, 31 aa, Homo sapiens
MSGLLPSCPASLLTPLDRRKHTGGTQRTFVE

SEQ ID NO: 24228 - DNA, 742 bp, Homo sapiens
cgggaggcactcagagaacgtttgtggaatgaataaataaaagcatattttgagggaataaagaagcagaaaaacaaagaagaatctggggaagatgggcataaatctccaccaagtgctgccaaggcttcccaggcgaggctgctgaaaagaccctgtggagcggctgctctgcctgggataaacacatttcaagagtctcagtccccgctttgccaccatctcctcctctgatctcctttcctgcttcaaaagactccagaatcttctcggttctcagagaaggctgaatccacctatgacctagtgggagcaccctgtgccgaaactgtttaccttctggtccccggagccatgggtcacgacctgggcctcatgtaggcccgctcctcagcagaccccaatctgcggcttctcccacctcactggggaagaaggagagccctggggatgtggagaagccaccccccaccccgccacatcccccacatcttacagaatctcgattgaatccccgggggcacatccctcagcaggacagcaacagtctttgccgcagcctggggagggctgtgctggggatgagcgccgagtggccgtggactaagtgaaggaaatgaccatgctcttctcccagctggatggcgaggccgggcaggaaccgcggaattcctgctcttcgttttcaaacactttgctgtcaagctatttgaataataaatacacattataaaaatgtaaa

SEQ ID NO: 24229 - protein, 38 aa, Homo sapiens
MTMLFSQLDGEAGQEPRNSCSSFSNTLLSSYLNNKYTL

SEQ ID NO: 24230 - DNA, 764 bp, Homo sapiens
gagcggcaggacctgccaaggcctgggggagcccgccagcctgctgagttctactgtacaaacagttggggagggggcgctgtctctgttaacttgaaattccccgatcagtaaacatgccaatttaaagtgtaattaactcaggccggaaaaaattcagatttggactgcttttcacagttgagcggctgctctgcctgggataaacacatttcaagagtctcagtccccgctttgccaccatctcctcctctgatctcctttcctgcttcaaaagactccagaatcttctcggttctcagagaaggctgaatccacctatgacctagtgggagcaccctgtgccgaaactgtttaccttctggtccccggagccatgggtcacgacctgggcctcatgtaggcccgctcctcagcagaccccaatctgcggcttctcccacctcactggggaagaaggagagccctggggatgtggagaagccaccccccaccccgccacatcccccacatcttacagaatctcgattgaatccccgggggcacatccctcagcaggacagcaacagtctttgccgcagcctggggagggctgtgctggggatgagcgccgagtggccgtggactaagtgaaggaaatgaccatgctcttctcccagctggatggcgaggccgggcaggaaccgcggaattcctgctcttcgttttcaaacactttgctgtcaagctatttgaataataaatacacattataaaaatgtaaa

SEQ ID NO: 24231 - protein, 38 aa, Homo sapiens; identical to SEQ ID NO: 24229

SEQ ID NO: 24232 - DNA, 520 bp, Homo sapiens
cggcgctgcccacccaccacaccgctagcgcctctgaacctcgccaggcacgtccggttctgcggcccccactccgcccccgcctgccgggagccgcgcagttacaaagtgccgggagccgtgcagggccagtgaacccctcgctgagactcagtttgctgccatcacaagtgctctgagaatcctggagagggaggatattggagacaaacgggactgctgcccgccttttaggcgaccgttggaggctgctctgtgccggacacaggcaggctcccacagctcagaagtcagcggagcagagtccccaggaaaccagggtcagggatggaggctgctgaggagcgggtctgggaggtggaggccagatacaagaaaaccacagtaccagtaaatgacaaaggctggatcttaacccaagtcctccgactctgaaggccatacccaacaggtcccattttatttgttttacttttttttaattgaagaaaaaaaaactagcattcccctacagtgcccc

SEQ ID NO: 24233 - protein, 35 aa, Homo sapiens
MEAAEERVWEVEARYKKTTVPVNDKGWILTQVLRL

SEQ ID NO: 24234 - DNA, 945 bp, Homo sapiens
ctttttgagaagaagcttgtgcctgtgcctggaagcaaggagggctggaactggggccctgctgggaagccctgtatctgcagaactgtgtcccgtgggggccaggggacacagatttttgcagccctctgatgctgaagcctttctggggctgggatgacccaatgcccacctggaccgtgcacttcctggtgaccctctgagacaacttcctgggcagagttgatcatcatggagtcagtgcaagtctgggaacagtggcctgaaactgcgcagctccagtgtgtcggtggaggcccttcagtgaggagtcccccagtctgggtggagagccagcccgatcggcttgattcctccactcttgacaccgtgagcctcagattctgagagcttgggaggatggacagagactgcggtcagcaggagaatgggaagcagatgggagaggaagaagcttgcctttggtggggaccaggaggctgggagcccaggcccattcactgtaacatgtgcagtaaatcccattatattcatgcaaagaattctacacagcaaggaaaaggaaagagctgttggcatgccacaacacaggtggatctcacagacctactgctgagctaaagaaggcaaccacgcacatgtacatgctgcatggggccgtttctatctgcccagaaccaggcaagaaccatctatgccaacagcttcattgctgctgtttctggggttgttgactggaggggcgaggggaccctctcggatgtggaaatgttctgtgatgagatagaggtttcctgcatgtctgtgcctgtgagatgcatccagctgcacacttcagatgcgtgcattttattgcatatgttatgccttgatttttaaaagtctttaaatatttaatcctgaacatccctacgaaacaaataataaaacagccctaggctcctg

SEQ ID NO: 24235 - protein, 51 aa, Homo sapiens
MESVQVWEQWPETAQLQCVGGGPSVRSPPVWVESQPDRLDSSTLDTVSLRF

SEQ ID NO: 24236 - DNA, 2490 bp, Homo sapiens
gagcgcaagggccccctgtgacctctggaggggtatcctcctttgattaggtgactaatcgggtgacttggagttaataaaaaaaggagacaatccctggagcctgcatcaggtgagccctgggccctccctgaaagacatttgaggtgtgagagggctcagatgagaggaagcatccccatgtttggcttttgggttttgaagatgaaggggccacctggcaggaatgcaggcgacctccaggagctgagggtcagcaaggaatgagggcctcatccctacagccacaaggagctcaatccagccagcatatgaatgggctgggaaacgtgttcttccctggggccatcacatagggtacaataaatccctggggtcctgaaccacctaggatggaggtggccaacacctgccgtatgaggcatccctggccctgcctgaccgcagagagccagccgagctaggcactggctttgcaagacgtctccagatcatgcagggtcaaacgtttctactttttgcatgcctactaattttttattgtatgctgaacatcatgaatgatacatttcagaccttttgattctgtgtcttcctgtgaagaatgttgatataagtaacttgtggatcacctgactcctgcagagacgtggttttaagctttgtcagggcaggtccatttatattcatgccttagtcctggaatgtagccattgattctgggatgtggcccttgtgggtttctcatggaattccaaaatgcttataaagaaacaaagataaactctgaaaagcagaaaataaagaacaactgatcatgtacagggagaagtgattaatggctgacttcttatcagaattaatgataacaagaagacagtcaaatgccattcaatgtgcaaaagaaaaaaactcaaccaaaaattctatagctagtaaatccttcaaaattgaatgagcaataaaaacattctcagacaaacaaaaagaatgagtttctagaaggtctgctctataagaatgagtaaaggaagtgcctcaggctaacaggaaatgtatctacaggaagaaaggaagaacgctggaaatggtaaatatgtggatactatgaaagactgagtacacacatacacaaaagtaaacacatgcttaatgttttttaaacaccagcaagactgtctaaggcaaaaattataacactgtatcatttgatttattaaatacagtagacggcttctacttctggaagatggagtagatactttttctattcacgcttgctaagtacagctaaatgccttggacgttatatataaaacaaacataagaaatacaaaaaagtgaaaagaagaaagaaagctggctagggacctcaggatctcaagaacaccatggaattggcgtgtacagctaaatgccttggacgttatatataaaacaaacataagaaatacaaaaaagtgaaaagaagaaagaaagctggctagggacctcaggatctcaagaacatcatggaattgagttccctgggttttctttttgccttaaatatcccagacttggtgttaaataatctgggaacatggaaatgccaatgtgtgcagaccaaaacagccccaacaaaagcctgttctctcttggtaaaggatgagtaaatgggcaagctagtaatatagaaaatttttagacaagaacctctccacacctgtcaaataccacacaaacagctgcagccctaactccacccttgccctttaaaactgcagggggagcgtagctctctagccctgtggggttgtaagaaggcacatcagcccctccactggggtagcgtcaaagaaggctgaatgaggagtaaggactttcatccatgccaggggacactacaccccacagagtcaggggagaccacgtggagagcctggatttccattatcactcatcgctaatgagtgacccctccccatccctactgaagtggaatcaagacataaaggtcagcagtcgcaaggtcaccccagggtcaatggaagcaatgtggggatgagtgatgaggcatccctgggcctttcagccaaggtttaatcagtgcagccctagcagaggattttaactcctacccctgcccaacagtaaggaggagtctctcctttccttgcgtctcagtggaggctgagaggaaactttgatttccacctccacctggcagcaacaaaacagcattcctctttctccagtggggcagtgtcagtggaggcctgatgcaataggtttaaatatattctaggatccaaaaatataacacccaaaatgtcaggttttcaatttaaaaattactaattataccaagaaacaaaaaaataacagcttgaatgaagaaagacaatcaacagatgcttaaaccaagactccatagatgttgaaattctcagatgaaggctttaaaacagctatactaaaaatgcctcgaaaaacacgttcaacccaaat

SEQ ID NO: 24237 - protein, 58 aa, Homo sapiens
MPGDTTPHRVRGDHVESLDFHYHSSLMSDPSPSLLKWNQDIKVSSRKVTPGSMEAMWG

SEQ ID NO: 24238 - DNA, 490 bp, Homo sapiens
atgcttcagagaagggagaaagcagaacatcacagttcgccaatccaaggcagcctggcagataccacagtcgcaaacccactgtgtgcctggcgcccttgcggtcatcccagatttttgcccacatccctctgttccacccagaggccacctgcatgcaggcatggtggatggttgctgtgtgcagtgatggcctcctgggacctcttgctggccacggagttaaccaggagggaccatcaacctcggaaggcccagctccatgatgatgcctctctccagagacctcctgacctcctgacctgcacagcccgggagaccacagcccacagccgctgccccaggtgtccacaagcatctcagcccctccacagcccacgcatctcctctttcattggctcatggggagtgaaggacaatgtctgaattaaatgccgtgctttaaactgaaagggaaacttagcaaataaatgagagtaacaacactaga

SEQ ID NO: 24239 - protein, 141 aa, Homo sapiens [sequence omitted]

SEQ ID NO: 24240 - DNA, 386 bp, Homo sapiens
gacaggaccatgggagtctgctgtatgctgatttttactgtggctgactcagtactcagatccaagaccaattgccctggctgcaacttccagtacaatgttgaatataagtggcaatagtggacatttccagaatgtcagcgtcctggtgaccccgacctctggcggatgtccttggtgttcacagggcagcaatgtgtgcttgggtacattgttgtagaaggacaacatggaaatacaacttgccagtgaacatgtttaatcctctcctatgttgtggtagtttttcaaataatttgtccatctcccctggcttatgactttttctcttactgatgcatagaggtctcttatgtaatctagttataaaagttgctgatatctcc

SEQ ID NO: 24241 - protein, 40 aa, Homo sapiens [sequence omitted]

SEQ ID NO: 24242 - DNA, 5814 bp, Homo sapiens
gtcgcgacggcggcggggcgccccctcccccgtgccggggcgcggcggagggatgtggggccttgcgggaggaaggcttttcggcatcttctcggccccggtgctggtggctgtggtgtgctgcgcccagagtgtgaacgatcccgggaacatgtcctttgtgaaggagacggtggacaagctgttgaaaggctacgacattcgcctaagacccgacttcgggggtcccccggtctgcgtggggatgaacatcgacatcgccagcatcgacatggtttccgaagtcaacatggctatgcaggaactgcacagctaggattcagccactgtggaactaacgtggcttatagattcattttttcctttccaggagtttggaattgaaaatgattataccttaaccatgtattttcaacaatattggagagataaaaggctcgcctattctgggatccctctcaacctcacgcttgacaatcgagtggctgaccagctatgggtgcccgacacatatttcttaaatgacaaaaagtcatttgtgcatggagtgacagtgaaaaaccgcatgatccgtcttcaccctgatgggacagtgctgtatgggctcagaatcaccacgacagcagcatgcatgatggacctcaggagataccccctggacgagcagaactgcactctggaaattgaaagctatggctacaccacggatgacattgagttttactggcgaggcggggacaaggctgttaccggagtggaaaggattgagctcccgcagttctccatcgtggagcaccgtctggtctcgaggaatgttgtcttcgccacaggtgcctatcctcgactgtcactgagctttcggttgaagaggaacattggatacttcattcttcagacttatatgccctctatactgataacgattctgtcgtgggtgtccttctggatcaattatgatgcatctgctgctagagttgccctcgggatcacaactgtgctgacaatgacaaccatcaacacccaccttcgggagaccttgcccaaaatcccctatgtcaaagccattgacatgtaccttatgggctgcttcgtctttgtgttcctggcccttctggagtatgcctttgtcaactacattttctttggaagaggccctcaaaggcagaagaagcttgcagaaaagacagccaaggcaaagaatgaccgttcaaagagcgaaagcaaccgggtggatgctcatggaaatattctgttgacatcgctggaagttcacaatgaaatgaatgaggtctcaggcggcattggcgataccaggaattcagcaatatcctttgacaactcaggaatccagtacaggaaacagagcatgcctcgagaagggcatgggcgattcctgggggacagaagcctcccgcacaagaagacccatctacggaggaggtcttcacagctcaaaattaaaatacctgatctaaccgatgtgaatgccatagacagatggtccaggatcgtgtttccattcactttttctcttttcaacttagtttactggctgtactatgttaactgagtgactgtacttgatttttcaaagacttcatttaacactgagtgaaatattactctgcctgtcaagtttttatacctgtacacacacagacacacaagcagacacacacatatatacatacgcaattgtatatatatgtgaactttctcagcatatatataaaatacacgtgtatatgaggatgtatgtgtatatgtttatacacacaggagtcagtgcccatgtgtatggaagacaaatacacatacatatatacattttgcagctatggacaatttaccacaggatgcatattaaagaaagtcatagtttttttcttttttaattgaaagggacaagtatcatctaaatattatgccttgagaatgagggcgtgaaacacaatatcatccccaaatgtgtcttgtattatcataagttagatgttttagtttaaaaatcagaaagacattcttagttaatctttgaaaactcatacagtggtattgctagtttaaaatgagtcacttacttcatatcctctcgttcagtttagtaagcaaaggcttcttggcttctctggtgatggggtttgttttcatcgggcatacgttttctgcaatggtttagtggctggggtgagccactggcagtgtgcttacctgttgtctgaaacatagatagatcccacgttgatgtctgaacgaccgtcttttgaaaactcatcgggagtgaatggcatctcgttgtaagtactctaatatacagtgtgtagtttgtttctgttgttcacttggagtggatccagcttcactgtcatgtgcgaacacagtgacacgtttggccagtgacatttcaatcactgaaaatgtgctctacatctcgtatggatttctaggcctgatatccaacagaaagcatagacgtctcaggttattcgttactctaaggtaaaaccatctaggatgattttcccccttgcagttatgttatcattcttataacattgtatgttaatagaaaatatatttgcataatatgcatatatatgtatatttaccaagattttgtttcttacgcttgctatcatggcagcatgcgatgtcatattttcctttatgtgatgtaactactttctgttatctagaaattaagattgaagctaaaacacttctactgttcaatttcagaaactaagaatcatcctcatgcctttatttctgtatctgacatatttcataagcacatccaactactcctagactgactaggattctgcaggaacatgacccgtacacaccacgcgtcacccaacgacccatgaccgttctctgaggcaaaggagggcaacctgacagcaaacacagtcactgttggttccttctgatccacagcctcatcagtatttggactttttaaagctcgtagaaacaagacaaggtgcaccggtttcatagacgcaaccttaacttactatttagatgagatctttctaaagaaaaaaaaaagagatgatatattttttgtaaacaatatttctatcacaggcatccataaactgaaatgactacagttgtgcaaacaggtgtcacagtgaagttgagcatttggagaaaaaaataaaaagcaaaatttgcaggaagaactgctaaattaatactttatcccaaaatgccacgtatgcctcaccctctctgttctatccaaaaccaaggaccagagtgctccaatggtaggccccagttgtctcgatgtaggtagaggcaccaccctccccgaggatgcgtgtggtgtggactatccccatgagctgaccactacttgatttttctttggtggccgtaacaacctttaatttgtgggcatctgcaacagttcaaaacccaccatcagataaaacataatccacaaaatctcacgctagaggcaattacctacttttagacccttttccctctttcattcctatctttttcctcctaatcgctgctctctggttttattttcatctggagactagccagggatttctttggctttggcttttctctgaccattttttccatgggtaacaatgggggatcctaaaagttaaacagattgggaaaaaccttgttaagtggccttatcattattatcatgttaaagaaaaaaaatacatttgcaaagaccttatccctttcaatacttcaggtatctttttctgtatccagtaattaaaggtgtgaggtccacatgcagaagagggaccccaaaatgtaaatggatgtggacaaaaacagtcaatggtctatttaagtgtataatttatactattcagaactgtgacattaattctttctgggagaaaagtgatttaaaacttttttgatgcatagttgaggtacccaaatatcaaaggcagagaccccatggggctccaaagagctgcagtctccttcccaaggttttctggatataaatttgcatggtatagtcataatagcttttgagctttttatatgcatttggcaccaagactgggatccacaactttgtagacactgcgatgaagttaacatattagctatactataaatagtgtttgtaactacacacacacacacacacacacacacaaatacatacatatattctgtaaaaacaaaaaaaaactttttaagatccttgggtatgtgtttgctttactccatttcagaagaaaattacttttcttctaacaaaattattttatagcttctccatttttaaaacttgtgagagcattgagaagagaactctgactgtgttaacagaagagagttgaattggagtctctgttgtgttaaaatgacctctcgttactccacagtagttatttgagccagtgactgagtcgcgttgaggaattctgaacccggacctctgacgttgttgggaggtggctgttacccacacccagacctcttgagtaaggacagaaacgttatcattggggatataatgagatttctttcttaacaattgaaagtaataaagagttaattttctcagtagtcctgtctttccaaaatgcgccacaggggctcaagatctacagaagaatcttgttatgacagtttgttattacccatattcagatatccttgagataatggaagagccctgctacataactccctacagagaaagactgatagacttgagtagtccttaaaacaagtgttattcctgttcaccaaccccgggactgtggaggggtttcactgtctataccatgcgacatccatttcccctgaatctcaaacgaactagaaagtatgtcatgataatatttccattagatttggaagctacctgtacatctgcaatattgtgtttttaacgccagcacccagaactttgacatgttcagtcactccctgaaaggcacttctctcttgtccaaacacagcgttgacatttttactgaggagatcatctcaaaggtgatgccaaacgagtctggggctggttttaaggggacaggcacattgcagttgtaggtgttcattttcagcatctagtagataatccattggtgtttgtcccaccattggtgtattctaacaagaatgtgtccaactttgaatctcctggcttgaaagtataaaccatcacttaattcttattttaactctccacctgaaaaccagttcatatttctggccattttatgtaagcaaaactgaacaattggtgaaacattttgttactcttggaattgactctggctgtcagtgtgagccattagagtaacatcgaatcttggggcaaagaactgcccaggtgaattaaatttttccaggacactagctagtgtgccttggattgattacctcttctactgcattgaaaggcgccatgttttcctgaaatactaaattcccaacacctgggtaaacaatgaccttccagagagtggctcccgtatgcctctccctaggaccaaccccatgaacatgttttgtcacgtttgtctcatgtttctacttcacaagtcagtgagtgtgtttaaggtaagtacaggattattctagtaggaataggcgattgctgtcataatcaattctcatgttgatttcattttattgtaaagataaatttaaacccagttttgcttaagcacattgatgtaattttttggtattatttgacatgaaaaaacagcaaaattgagtgatagatacaatatgaaacttgttgatgaatgaattcaaatttattaaaaaaggagtaactgacct

SEQ ID NO: 24243 - protein, 388 aa, Homo sapiens
MYFQQYWRDKRLAYSGIPLNLTLDNRVADQLWVPDTYFLNDKKSFVHGVTVKNRMIRLHPDGTVLYGLRITTTAACMMDLRRYPLDEQNCTLEIESYGYTTDDIEFYWRGGDKAVTGVERIELPQFSIVEHRLVSRNVVFATGAYPRLSLSFRLKRNIGYFILQTYMPSILITILSWVSFWINYDASAARVALGITTVLTMTTINTHLRETLPKIPYVKAIDMYLMGCFVFVFLALLEYAFVNYIFFGRGPQRQKKLAEKTAKAKNDRSKSESNRVDAHGNILLTSLEVHNEMNEVSGGIGDTRNSAISFDNSGIQYRKQSMPREGHGRFLGDRSLPHKKTHLRRRSSQLKIKIPDLTDVNAIDRWSRIVFPFTFSLFNLVYWLYYVN

SEQ ID NO: 24244 - DNA, 5808 bp, Homo sapiens
ctcctcccctccccctccgccctcctccgctccgggccagcgcggcggcggcggcggcggcggcagcagcaggagcagccccggctgcgggtcgcgacggcggcggggcgccccctcccccgtgccggggcgcggcggagggatgtggggccttgcgggaggaaggcttttcggcatcttctcggccccggtgctggtggctgtggtgtgctgcgcccagagtgtgaacgatcccgggaacatgtcctttgtgaaggagacggtggacaagctgttgaaaggctacgacattcgcctaagacccgacttcgggggtcccccggtctgcgtggggatgaacatcgacatcgccagcatcgacatggtttccgaagtcaacatggattataccttaaccatgtattttcaacaatattggagagataaaaggctcgcctattctgggatccctctcaacctcacgcttgacaatcgagtggctgaccagctatgggtgcccgacacatatttcttaaatgacaaaaagtcatttgtgcatggagtgacagtgaaaaaccgcatgatccgtcttcaccctgatgggacagtgctgtatgggctcagaatcaccacgacagcagcatgcatgatggacctcaggagataccccctggacgagcagaactgcactctggaaattgaaagctatggctacaccacggatgacattgagttttactggcgaggcggggacaaggctgttaccggagtggaaaggattgagctcccgcagttctccatcgtggagcaccgtctggtctcgaggaatgttgtcttcgccacaggtgcctatcctcgactgtcactgagctttcggttgaagaggaacattggatacttcattcttcagacttatatgccctctatactgataacgattctgtcgtgggtgtccttctggatcaattatgatgcatctgctgctagagttgccctcgggatcacaactgtgctgacaatgacaaccatcaacacccaccttcgggagaccttgcccaaaatcccctatgtcaaagccattgacatgtaccttatgggctgcttcgtctttgtgttcctggcccttctggagtatgcctttgtcaactacattttctttggaagaggccctcaaaggcagaagaagcttgcagaaaagacagccaaggcaaagaatgaccgttcaaagagcgaaagcaaccgggtggatgctcatggaaatattctgttgacatcgctggaagttcacaatgaaatgaatgaggtctcaggcggcattggcgataccaggaattcagcaatatcctttgacaactcaggaatccagtacaggaaacagagcatgcctcgagaagggcatgggcgattcctgggggacagaagcctcccgcacaagaagacccatctacggaggaggtcttcacagctcaaaattaaaatacctgatctaaccgatgtgaatgccatagacagatggtccaggatcgtgtttccattcactttttctcttttcaacttagtttactggctgtactatgttaactgagtgactgtacttgatttttcaaagacttcatttaacactgagtgaaatattactctgcctgtcaagtttttatacctgtacacacacagacacacaagcagacacacacatatatacatacgcaattgtatatatatgtgaactttctcagcatatatataaaatacacgtgtatatgaggatgtatgtgtatatgtttatacacacaggagtcagtgcccatgtgtatggaagacaaatacacatacatatatacattttgcagctatggacaatttaccacaggatgcatattaaagaaagtcatagtttttttcttttttaattgaaagggacaagtatcatctaaatattatgccttgagaatgagggcgtgaaacacaatatcatccccaaatgtgtcttgtattatcataagttagatgttttagtttaaaaatcagaaagacattcttagttaatctttgaaaactcatacagtggtattgctagtttaaaatgagtcacttacttcatatcctctcgttcagtttagtaagcaaaggcttcttggcttctctggtgatggggtttgttttcatcgggcatacgttttctgcaatggtttagtggctggggtgagccactggcagtgtgcttacctgttgtctgaaacatagatagatcccacgttgatgtctgaacgaccgtcttttgaaaactcatcgggagtgaatggcatctcgttgtaagtactctaatatacagtgtgtagtttgtttctgttgttcacttggagtggatccagcttcactgtcatgtgcgaacacagtgacacgtttggccagtgacatttcaatcactgaaaatgtgctctacatctcgtatggatttctaggcctgatatccaacagaaagcatagacgtctcaggttattcgttactctaaggtaaaaccatctaggatgattttcccccttgcagttatgttatcattcttataacattgtatgttaatagaaaatatatttgcataatatgcatatatatgtatatttaccaagattttgtttcttacgcttgctatcatggcagcatgcgatgtcatattttcctttatgtgatgtaactactttctgttatctagaaattaagattgaagctaaaacacttctactgttcaatttcagaaactaagaatcatcctcatgcctttatttctgtatctgacatatttcataagcacatccaactactcctagactgactaggattctgcaggaacatgacccgtacacaccacgcgtcacccaacgacccatgaccgttctctgaggcaaaggagggcaacctgacagcaaacacagtcactgttggttccttctgatccacagcctcatcagtatttggactttttaaagctcgtagaaacaagacaaggtgcaccggtttcatagacgcaaccttaacttactatttagatgagatctttctaaagaaaaaaaaaagagatgatatattttttgtaaacaatatttctatcacaggcatccataaactgaaatgactacagttgtgcaaacaggtgtcacagtgaagttgagcatttggagaaaaaaataaaaagcaaaatttgcaggaagaactgctaaattaatactttatcccaaaatgccacgtatgcctcaccctctctgttctatccaaaaccaaggaccagagtgctccaatggtaggccccagttgtctcgatgtaggtagaggcaccaccctccccgaggatgcgtgtggtgtggactatccccatgagctgaccactacttgatttttctttggtggccgtaacaacctttaatttgtgggcatctgcaacagttcaaaacccaccatcagataaaacataatccacaaaatctcacgctagaggcaattacctacttttagacccttttccctctttcattcctatctttttcctcctaatcgctgctctctggttttattttcatctggagactagccagggatttctttggctttggcttttctctgaccattttttccatgggtaacaatgggggatcctaaaagttaaacagattgggaaaaaccttgttaagtggccttatcattattatcatgttaaagaaaaaaaatacatttgcaaagaccttatccctttcaatacttcaggtatctttttctgtatccagtaattaaaggtgtgaggtccacatgcagaagagggaccccaaaatgtaaatggatgtggacaaaaacagtcaatggtctatttaagtgtataatttatactattcagaactgtgacattaattctttctgggagaaaagtgatttaaaacttttttgatgcatagttgaggtacccaaatatcaaaggcagagaccccatggggctccaaagagctgcagtctccttcccaaggttttctggatataaatttgcatggtatagtcataatagcttttgagctttttatatgcatttggcaccaagactgggatccacaactttgtagacactgcgatgaagttaacatattagctatactataaatagtgtttgtaactacacacacacacacacacacacacacaaatacatacatatattctgtaaaaacaaaaaaaaactttttaagatccttgggtatgtgtttgctttactccatttcagaagaaaattacttttcttctaacaaaattattttatagcttctccatttttaaaacttgtgagagcattgagaagagaactctgactgtgttaacagaagagagttgaattggagtctctgttgtgttaaaatgacctctcgttactccacagtagttatttgagccagtgactgagtcgcgttgaggaattctgaacccggacctctgacgttgttgggaggtggctgttacccacacccagacctcttgagtaaggacagaaacgttatcattggggatataatgagatttctttcttaacaattgaaagtaataaagagttaattttctcagtagtcctgtctttccaaaatgcgccacaggggctcaagatctacagaagaatcttgttatgacagtttgttattacccatattcagatatccttgagataatggaagagccctgctacataactccctacagagaaagactgatagacttgagtagtccttaaaacaagtgttattcctgttcaccaaccccgggactgtggaggggtttcactgtctataccatgcgacatccatttcccctgaatctcaaacgaactagaaagtatgtcatgataatatttccattagatttggaagctacctgtacatctgcaatattgtgtttttaacgccagcacccagaactttgacatgttcagtcactccctgaaaggcacttctctcttgtccaaacacagcgttgacatttttactgaggagatcatctcaaaggtgatgccaaacgagtctggggctggttttaaggggacaggcacattgcagttgtaggtgttcattttcagcatctagtagataatccattggtgtttgtcccaccattggtgtattctaacaagaatgtgtccaactttgaatctcctggcttgaaagtataaaccatcacttaattcttattttaactctccacctgaaaaccagttcatatttctggccattttatgtaagcaaaactgaacaattggtgaaacattttgttactcttggaattgactctggctgtcagtgtgagccattagagtaacatcgaatcttggggcaaagaactgcccaggtgaattaaatttttccaggacactagctagtgtgccttggattgattacctcttctactgcattgaaaggcgccatgttttcctgaaatactaaattcccaacacctgggtaaacaatgaccttccagagagtggctcccgtatgcctctccctaggaccaaccccatgaacatgttttgtcacgtttgtctcatgtttctacttcacaagtcagtgagtgtgtttaaggtaagtacaggattattctagtaggaataggcgattgctgtcataatcaattctcatgttgatttcattttattgtaaagataaatttaaacccagttttgcttaagcacattgatgtaattttttggtattatttgacatgaaaaaacagcaaaattgagtgatagatacaatatgaaacttgttgatgaatgaattcaaatttattaaaaaaggagtaactgacct

SEQ ID NO: 24245 - protein, 473 aa, Homo sapiens [sequence omitted]

SEQ ID NO: 24246 - DNA, 5722 bp, Homo sapiens
ctcggagagtaggggggagagcggatcccagcaggttaggccggaggaacagcgccatgtgctccgggctcctggagctcctgctgcccatctggctctcctggaccctggggacccgaggctctgagccccgcagtgtgaacgatcccgggaacatgtcctttgtgaaggagacggtggacaagctgttgaaaggctacgacattcgcctaagacccgacttcgggggtcccccggtctgcgtggggatgaacatcgacatcgccagcatcgacatggtttccgaagtcaacatggattataccttaaccatgtattttcaacaatattggagagataaaaggctcgcctattctgggatccctctcaacctcacgcttgacaatcgagtggctgaccagctatgggtgcccgacacatatttcttaaatgacaaaaagtcatttgtgcatggagtgacagtgaaaaaccgcatgatccgtcttcaccctgatgggacagtgctgtatgggctcagaatcaccacgacagcagcatgcatgatggacctcaggagataccccctggacgagcagaactgcactctggaaattgaaagctatggctacaccacggatgacattgagttttactggcgaggcggggacaaggctgttaccggagtggaaaggattgagctcccgcagttctccatcgtggagcaccgtctggtctcgaggaatgttgtcttcgccacaggtgcctatcctcgactgtcactgagctttcggttgaagaggaacattggatacttcattcttcagacttatatgccctctatactgataacgattctgtcgtgggtgtccttctggatcaattatgatgcatctgctgctagagttgccctcgggatcacaactgtgctgacaatgacaaccatcaacacccaccttcgggagaccttgcccaaaatcccctatgtcaaagccattgacatgtaccttatgggctgcttcgtctttgtgttcctggcccttctggagtatgcctttgtcaactacattttctttggaagaggccctcaaaggcagaagaagcttgcagaaaagacagccaaggcaaagaatgaccgttcaaagagcgaaagcaaccgggtggatgctcatggaaatattctgttgacatcgctggaagttcacaatgaaatgaatgaggtctcaggcggcattggcgataccaggaattcagcaatatcctttgacaactcaggaatccagtacaggaaacagagcatgcctcgagaagggcatgggcgattcctgggggacagaagcctcccgcacaagaagacccatctacggaggaggtcttcacagctcaaaattaaaatacctgatctaaccgatgtgaatgccatagacagatggtccaggatcgtgtttccattcactttttctcttttcaacttagtttactggctgtactatgttaactgagtgactgtacttgatttttcaaagacttcatttaacactgagtgaaatattactctgcctgtcaagtttttatacctgtacacacacagacacacaagcagacacacacatatatacatacgcaattgtatatatatgtgaactttctcagcatatatataaaatacacgtgtatatgaggatgtatgtgtatatgtttatacacacaggagtcagtgcccatgtgtatggaagacaaatacacatacatatatacattttgcagctatggacaatttaccacaggatgcatattaaagaaagtcatagtttttttcttttttaattgaaagggacaagtatcatctaaatattatgccttgagaatgagggcgtgaaacacaatatcatccccaaatgtgtcttgtattatcataagttagatgttttagtttaaaaatcagaaagacattcttagttaatctttgaaaactcatacagtggtattgctagtttaaaatgagtcacttacttcatatcctctcgttcagtttagtaagcaaaggcttcttggcttctctggtgatggggtttgttttcatcgggcatacgttttctgcaatggtttagtggctggggtgagccactggcagtgtgcttacctgttgtctgaaacatagatagatcccacgttgatgtctgaacgaccgtcttttgaaaactcatcgggagtgaatggcatctcgttgtaagtactctaatatacagtgtgtagtttgtttctgttgttcacttggagtggatccagcttcactgtcatgtgcgaacacagtgacacgtttggccagtgacatttcaatcactgaaaatgtgctctacatctcgtatggatttctaggcctgatatccaacagaaagcatagacgtctcaggttattcgttactctaaggtaaaaccatctaggatgattttcccccttgcagttatgttatcattcttataacattgtatgttaatagaaaatatatttgcataatatgcatatatatgtatatttaccaagattttgtttcttacgcttgctatcatggcagcatgcgatgtcatattttcctttatgtgatgtaactactttctgttatctagaaattaagattgaagctaaaacacttctactgttcaatttcagaaactaagaatcatcctcatgcctttatttctgtatctgacatatttcataagcacatccaactactcctagactgactaggattctgcaggaacatgacccgtacacaccacgcgtcacccaacgacccatgaccgttctctgaggcaaaggagggcaacctgacagcaaacacagtcactgttggttccttctgatccacagcctcatcagtatttggactttttaaagctcgtagaaacaagacaaggtgcaccggtttcatagacgcaaccttaacttactatttagatgagatctttctaaagaaaaaaaaaagagatgatatattttttgtaaacaatatttctatcacaggcatccataaactgaaatgactacagttgtgcaaacaggtgtcacagtgaagttgagcatttggagaaaaaaataaaaagcaaaatttgcaggaagaactgctaaattaatactttatcccaaaatgccacgtatgcctcaccctctctgttctatccaaaaccaaggaccagagtgctccaatggtaggccccagttgtctcgatgtaggtagaggcaccaccctccccgaggatgcgtgtggtgtggactatccccatgagctgaccactacttgatttttctttggtggccgtaacaacctttaatttgtgggcatctgcaacagttcaaaacccaccatcagataaaacataatccacaaaatctcacgctagaggcaattacctacttttagacccttttccctctttcattcctatctttttcctcctaatcgctgctctctggttttattttcatctggagactagccagggatttctttggctttggcttttctctgaccattttttccatgggtaacaatgggggatcctaaaagttaaacagattgggaaaaaccttgttaagtggccttatcattattatcatgttaaagaaaaaaaatacatttgcaaagaccttatccctttcaatacttcaggtatctttttctgtatccagtaattaaaggtgtgaggtccacatgcagaagagggaccccaaaatgtaaatggatgtggacaaaaacagtcaatggtctatttaagtgtataatttatactattcagaactgtgacattaattctttctgggagaaaagtgatttaaaacttttttgatgcatagttgaggtacccaaatatcaaaggcagagaccccatggggctccaaagagctgcagtctccttcccaaggttttctggatataaatttgcatggtatagtcataatagcttttgagctttttatatgcatttggcaccaagactgggatccacaactttgtagacactgcgatgaagttaacatattagctatactataaatagtgtttgtaactacacacacacacacacacacacacacaaatacatacatatattctgtaaaaacaaaaaaaaactttttaagatccttgggtatgtgtttgctttactccatttcagaagaaaattacttttcttctaacaaaattattttatagcttctccatttttaaaacttgtgagagcattgagaagagaactctgactgtgttaacagaagagagttgaattggagtctctgttgtgttaaaatgacctctcgttactccacagtagttatttgagccagtgactgagtcgcgttgaggaattctgaacccggacctctgacgttgttgggaggtggctgttacccacacccagacctcttgagtaaggacagaaacgttatcattggggatataatgagatttctttcttaacaattgaaagtaataaagagttaattttctcagtagtcctgtctttccaaaatgcgccacaggggctcaagatctacagaagaatcttgttatgacagtttgttattacccatattcagatatccttgagataatggaagagccctgctacataactccctacagagaaagactgatagacttgagtagtccttaaaacaagtgttattcctgttcaccaaccccgggactgtggaggggtttcactgtctataccatgcgacatccatttcccctgaatctcaaacgaactagaaagtatgtcatgataatatttccattagatttggaagctacctgtacatctgcaatattgtgtttttaacgccagcacccagaactttgacatgttcagtcactccctgaaaggcacttctctcttgtccaaacacagcgttgacatttttactgaggagatcatctcaaaggtgatgccaaacgagtctggggctggttttaaggggacaggcacattgcagttgtaggtgttcattttcagcatctagtagataatccattggtgtttgtcccaccattggtgtattctaacaagaatgtgtccaactttgaatctcctggcttgaaagtataaaccatcacttaattcttattttaactctccacctgaaaaccagttcatatttctggccattttatgtaagcaaaactgaacaattggtgaaacattttgttactcttggaattgactctggctgtcagtgtgagccattagagtaacatcgaatcttggggcaaagaactgcccaggtgaattaaatttttccaggacactagctagtgtgccttggattgattacctcttctactgcattgaaaggcgccatgttttcctgaaatactaaattcccaacacctgggtaaacaatgaccttccagagagtggctcccgtatgcctctccctaggaccaaccccatgaacatgttttgtcacgtttgtctcatgtttctacttcacaagtcagtgagtgtgtttaaggtaagtacaggattattctagtaggaataggcgattgctgtcataatcaattctcatgttgatttcattttattgtaaagataaatttaaacccagttttgcttaagcacattgatgtaattttttggtattatttgacatgaaaaaacagcaaaattgagtgatagatacaatatgaaacttgttgatgaatgaattcaaatttattaaaaaaggagtaactgacct

SEQ ID NO: 24247 - protein, 473 aa, Homo sapiens; identical to SEQ ID NO: 3209

SEQ ID NO: 24248 - DNA, 4583 bp, Homo sapiens
gtcgcgacggcggcggggcgccccctcccccgtgccggggcgcggcggagggatgtggggccttgcgggaggaaggcttttcggcatcttctcggccccggtgctggtggctgtggtgtgctgcgcccagagtgtgaacgatcccgggaacatgtcctttgtgaaggagacggtggacaagctgttgaaaggctacgacattcgcctaagacccgacttcgggggtcccccggtctgcgtggggatgaacatcgacatcgccagcatcgacatggtttccgaagtcaacatggctatgcaggaactgcacagctaggattcagccactgtggaactaacgtggcttatagattcattttttcctttccaggagtttggaattgaaaatgattataccttaaccatgtattttcaacaatattggagagataaaaggctcgcctattctgggatccctctcaacctcacgcttgacaatcgagtggctgaccagctatgggtgcccgacacatatttcttaaatgacaaaaagtcatttgtgcatggagtgacagtgaaaaaccgcatgatccgtcttcaccctgatgggacagtgctgtatgggctcagaatcaccacgacagcagcatgcatgatggacctcaggagataccccctggacgagcagaactgcactctggaaattgaaagctatggctacaccacggatgacattgagttttactggcgaggcggggacaaggctgttaccggagtggaaaggattgagctcccgcagttctccatcgtggagcaccgtctggtctcgaggaatgttgtcttcgccacaggtgcctatcctcgactgtcactgagctttcggttgaagaggaacattggatacttcattcttcagacttatatgccctctatactgataacgattctgtcgtgggtgtccttctggatcaattatgatgcatctgctgctagagttgccctcgggatcacaactgtgctgacaatgacaaccatcaacacccaccttcgggagaccttgcccaaaatcccctatgtcaaagccattgacatgtaccttatgggctgcttcgtctttgtgttcctggcccttctggagtatgcctttgtcaactacattttctttggaagaggccctcaaaggcagaagaagcttgcagaaaagacagccaaggcaaagaatgaccgttcaaagagcgaaagcaaccgggtggatgctcatggaaatattctgttgacatcgctggaagttcacaatgaaatgaatgaggtctcaggcggcattggcgataccaggaattcagcaatatcctttgacaactcaggaatccagtacaggaaacagagcatgcctcgagaagggcatgggcgattcctgggggacagaagcctcccgcacaagaagacccatctacggaggaggtcttcacagctcaaaattaaaatacctgatctaaccgatgtgaatgccatagacagatggtccaggatcgtgtttccattcactttttctcttttcaacttagtttactggctgtactatgttaactgagtgactgtacttgatttttcaaagacttcatttaacactgagtgaaatattactctgcctgtcaagtttttatacctgtacacacacagacacacaagcagacacacacatatatacatacgcaattgtatatatatgtgaactttctcagcatatatataaaatacacgtgtatatgaggatgtatgtgtatatgtttatacacacaggagtcagtgcccatgtgtatggaagacaaatacacatacatatatacattttgcagctatggacaatttaccacaggatgcatattaaagaaagtcatagtttttttcttttttaattgaaagggacaagtatcatctaaatattatgccttgagaatgagggcgtgaaacacaatatcatccccaaatgtgtcttgtattatcataagttagatgttttagtttaaaaatcagaaagacattcttagttaatctttgaaaactcatacagtggtattgctagtttaaaatgagtcacttacttcatatcctctcgttcagtttagtaagcaaaggcttcttggcttctctggtgatggggtttgttttcatcgggcatacgttttctgcaatggtttagtggctggggtgagccactggcagtgtgcttacctgttgtctgaaacatagatagatcccacgttgatgtctgaacgaccgtcttttgaaaactcatcgggagtgaatggcatctcgttgtaagtactctaatatacagtgtgtagtttgtttctgttgttcacttggagtggatccagcttcactgtcatgtgcgaacacagtgacacgtttggccagtgacatttcaatcactgaaaatgtgctctacatctcgtatggatttctaggcctgatatccaacagaaagcatagacgtctcaggttattcgttactctaaggtaaaaccatctaggatgattttcccccttgcagttatgttatcattcttataacattgtatgttaatagaaaatatatttgcataatatgcatatatatgtatatttaccaagattttgtttcttacgcttgctatcatggcagcatgcgatgtcatattttcctttatgtgatgtaactactttctgttatctagaaattaagattgaagctaaaacacttctactgttcaatttcagaaactaagaatcatcctcatgcctttatttctgtatctgacatatttcataagcacatccaactactcctagactgactaggattctgcaggaacatgacccgtacacaccacgcgtcacccaacgacccatgaccgttctctgaggcaaaggagggcaacctgacagcaaacacagtcactgttggttccttctgatccacagcctcatcagtatttggactttttaaagctcgtagaaacaagacaaggtgcaccggtttcatagacgcaaccttaacttactatttagatgagatctttctaaagaaaaaaaaaagagatgatatattttttgtaaacaatatttctatcacaggcatccataaactgaaatgactacagttgtgcaaacaggtgtcacagtgaagttgagcatttggagaaaaaaataaaaagcaaaatttgcaggaagaactgctaaattaatactttatcccaaaatgccacgtatgcctcaccctctctgttctatccaaaaccaaggaccagagtgctccaatggtaggccccagttgtctcgatgtaggtagaggcaccaccctccccgaggatgcgtgtggtgtggactatccccatgagctgaccactacttgatttttctttggtggccgtaacaacctttaatttgtgggcatctgcaacagttcaaaacccaccatcagataaaacataatccacaaaatctcacgctagaggcaattacctacttttagacccttttccctctttcattcctatctttttcctcctaatcgctgctctctggttttattttcatctggagactagccagggatttctttggctttggcttttctctgaccattttttccatgggtaacaatgggggatcctaaaagttaaacagattgggaaaaaccttgttaagtggccttatcattattatcatgttaaagaaaaaaaatacatttgcaaagaccttatccctttcaatacttcaggtatctttttctgtatccagtaattaaaggtgtgaggtccacatgcagaagagggaccccaaaatgtaaatggatgtggacaaaaacagtcaatggtctatttaagtgtataatttatactattcagaactgtgacattaattctttctgggagaaaagtgatttaaaacttttttgatgcatagttgaggtacccaaatatcaaaggcagagaccccatggggctccaaagagctgcagtctccttcccaaggttttctggatataaatttgcatggtatagtcataatagcttttgagctttttatatgcatttggcaccaagactgggatccacaactttgtagacactgcgatgaagttaacatattagctatactataaatagtgtttgtaactacacacacacacacacacacacacacaaatacatacatatattctgtaaaaacaaaaaaaaactttttaagatccttgggtatgtgtttgctttactccatttcagaagaaaattacttttcttctaacaaaattattttatagcttctccatttttaaaacttgtgagagcattgagaagagaactctgactgtgttaacagaagagagttgaattggagtctctgttgtgttaaaatgacctctcgttactccacagtagttatttgagccagtgactgagtcgcgttgaggaattctgaacccggacctctgacgttgttgggaggtggctgttacccacacccagacctcttgagtaaggacagaaacgttatcattggggatataatgagatttctttcttaacaattgaaagtaataaagagttaattttctcagt

SEQ ID NO: 24249 - protein, 388 aa, Homo sapiens; identical to SEQ ID NO: 24243

SEQ ID NO: 24250 - DNA, 4577 bp, Homo sapiens
ctcctcccctccccctccgccctcctccgctccgggccagcgcggcggcggcggcggcggcggcagcagcaggagcagccccggctgcgggtcgcgacggcggcggggcgccccctcccccgtgccggggcgcggcggagggatgtggggccttgcgggaggaaggcttttcggcatcttctcggccccggtgctggtggctgtggtgtgctgcgcccagagtgtgaacgatcccgggaacatgtcctttgtgaaggagacggtggacaagctgttgaaaggctacgacattcgcctaagacccgacttcgggggtcccccggtctgcgtggggatgaacatcgacatcgccagcatcgacatggtttccgaagtcaacatggattataccttaaccatgtattttcaacaatattggagagataaaaggctcgcctattctgggatccctctcaacctcacgcttgacaatcgagtggctgaccagctatgggtgcccgacacatatttcttaaatgacaaaaagtcatttgtgcatggagtgacagtgaaaaaccgcatgatccgtcttcaccctgatgggacagtgctgtatgggctcagaatcaccacgacagcagcatgcatgatggacctcaggagataccccctggacgagcagaactgcactctggaaattgaaagctatggctacaccacggatgacattgagttttactggcgaggcggggacaaggctgttaccggagtggaaaggattgagctcccgcagttctccatcgtggagcaccgtctggtctcgaggaatgttgtcttcgccacaggtgcctatcctcgactgtcactgagctttcggttgaagaggaacattggatacttcattcttcagacttatatgccctctatactgataacgattctgtcgtgggtgtccttctggatcaattatgatgcatctgctgctagagttgccctcgggatcacaactgtgctgacaatgacaaccatcaacacccaccttcgggagaccttgcccaaaatcccctatgtcaaagccattgacatgtaccttatgggctgcttcgtctttgtgttcctggcccttctggagtatgcctttgtcaactacattttctttggaagaggccctcaaaggcagaagaagcttgcagaaaagacagccaaggcaaagaatgaccgttcaaagagcgaaagcaaccgggtggatgctcatggaaatattctgttgacatcgctggaagttcacaatgaaatgaatgaggtctcaggcggcattggcgataccaggaattcagcaatatcctttgacaactcaggaatccagtacaggaaacagagcatgcctcgagaagggcatgggcgattcctgggggacagaagcctcccgcacaagaagacccatctacggaggaggtcttcacagctcaaaattaaaatacctgatctaaccgatgtgaatgccatagacagatggtccaggatcgtgtttccattcactttttctcttttcaacttagtttactggctgtactatgttaactgagtgactgtacttgatttttcaaagacttcatttaacactgagtgaaatattactctgcctgtcaagtttttatacctgtacacacacagacacacaagcagacacacacatatatacatacgcaattgtatatatatgtgaactttctcagcatatatataaaatacacgtgtatatgaggatgtatgtgtatatgtttatacacacaggagtcagtgcccatgtgtatggaagacaaatacacatacatatatacattttgcagctatggacaatttaccacaggatgcatattaaagaaagtcatagtttttttcttttttaattgaaagggacaagtatcatctaaatattatgccttgagaatgagggcgtgaaacacaatatcatccccaaatgtgtcttgtattatcataagttagatgttttagtttaaaaatcagaaagacattcttagttaatctttgaaaactcatacagtggtattgctagtttaaaatgagtcacttacttcatatcctctcgttcagtttagtaagcaaaggcttcttggcttctctggtgatggggtttgttttcatcgggcatacgttttctgcaatggtttagtggctggggtgagccactggcagtgtgcttacctgttgtctgaaacatagatagatcccacgttgatgtctgaacgaccgtcttttgaaaactcatcgggagtgaatggcatctcgttgtaagtactctaatatacagtgtgtagtttgtttctgttgttcacttggagtggatccagcttcactgtcatgtgcgaacacagtgacacgtttggccagtgacatttcaatcactgaaaatgtgctctacatctcgtatggatttctaggcctgatatccaacagaaagcatagacgtctcaggttattcgttactctaaggtaaaaccatctaggatgattttcccccttgcagttatgttatcattcttataacattgtatgttaatagaaaatatatttgcataatatgcatatatatgtatatttaccaagattttgtttcttacgcttgctatcatggcagcatgcgatgtcatattttcctttatgtgatgtaactactttctgttatctagaaattaagattgaagctaaaacacttctactgttcaatttcagaaactaagaatcatcctcatgcctttatttctgtatctgacatatttcataagcacatccaactactcctagactgactaggattctgcaggaacatgacccgtacacaccacgcgtcacccaacgacccatgaccgttctctgaggcaaaggagggcaacctgacagcaaacacagtcactgttggttccttctgatccacagcctcatcagtatttggactttttaaagctcgtagaaacaagacaaggtgcaccggtttcatagacgcaaccttaacttactatttagatgagatctttctaaagaaaaaaaaaagagatgatatattttttgtaaacaatatttctatcacaggcatccataaactgaaatgactacagttgtgcaaacaggtgtcacagtgaagttgagcatttggagaaaaaaataaaaagcaaaatttgcaggaagaactgctaaattaatactttatcccaaaatgccacgtatgcctcaccctctctgttctatccaaaaccaaggaccagagtgctccaatggtaggccccagttgtctcgatgtaggtagaggcaccaccctccccgaggatgcgtgtggtgtggactatccccatgagctgaccactacttgatttttctttggtggccgtaacaacctttaatttgtgggcatctgcaacagttcaaaacccaccatcagataaaacataatccacaaaatctcacgctagaggcaattacctacttttagacccttttccctctttcattcctatctttttcctcctaatcgctgctctctggttttattttcatctggagactagccagggatttctttggctttggcttttctctgaccattttttccatgggtaacaatgggggatcctaaaagttaaacagattgggaaaaaccttgttaagtggccttatcattattatcatgttaaagaaaaaaaatacatttgcaaagaccttatccctttcaatacttcaggtatctttttctgtatccagtaattaaaggtgtgaggtccacatgcagaagagggaccccaaaatgtaaatggatgtggacaaaaacagtcaatggtctatttaagtgtataatttatactattcagaactgtgacattaattctttctgggagaaaagtgatttaaaacttttttgatgcatagttgaggtacccaaatatcaaaggcagagaccccatggggctccaaagagctgcagtctccttcccaaggttttctggatataaatttgcatggtatagtcataatagcttttgagctttttatatgcatttggcaccaagactgggatccacaactttgtagacactgcgatgaagttaacatattagctatactataaatagtgtttgtaactacacacacacacacacacacacacacaaatacatacatatattctgtaaaaacaaaaaaaaactttttaagatccttgggtatgtgtttgctttactccatttcagaagaaaattacttttcttctaacaaaattattttatagcttctccatttttaaaacttgtgagagcattgagaagagaactctgactgtgttaacagaagagagttgaattggagtctctgttgtgttaaaatgacctctcgttactccacagtagttatttgagccagtgactgagtcgcgttgaggaattctgaacccggacctctgacgttgttgggaggtggctgttacccacacccagacctcttgagtaaggacagaaacgttatcattggggatataatgagatttctttcttaacaattgaaagtaataaagagttaattttctcagt

SEQ ID NO: 24251 - protein, 473 aa, Homo sapiens [sequence omitted]

SEQ ID NO: 24252 - DNA, 4491 bp, Homo sapiens
ctcggagagtaggggggagagcggatcccagcaggttaggccggaggaacagcgccatgtgctccgggctcctggagctcctgctgcccatctggctctcctggaccctggggacccgaggctctgagccccgcagtgtgaacgatcccgggaacatgtcctttgtgaaggagacggtggacaagctgttgaaaggctacgacattcgcctaagacccgacttcgggggtcccccggtctgcgtggggatgaacatcgacatcgccagcatcgacatggtttccgaagtcaacatggattataccttaaccatgtattttcaacaatattggagagataaaaggctcgcctattctgggatccctctcaacctcacgcttgacaatcgagtggctgaccagctatgggtgcccgacacatatttcttaaatgacaaaaagtcatttgtgcatggagtgacagtgaaaaaccgcatgatccgtcttcaccctgatgggacagtgctgtatgggctcagaatcaccacgacagcagcatgcatgatggacctcaggagataccccctggacgagcagaactgcactctggaaattgaaagctatggctacaccacggatgacattgagttttactggcgaggcggggacaaggctgttaccggagtggaaaggattgagctcccgcagttctccatcgtggagcaccgtctggtctcgaggaatgttgtcttcgccacaggtgcctatcctcgactgtcactgagctttcggttgaagaggaacattggatacttcattcttcagacttatatgccctctatactgataacgattctgtcgtgggtgtccttctggatcaattatgatgcatctgctgctagagttgccctcgggatcacaactgtgctgacaatgacaaccatcaacacccaccttcgggagaccttgcccaaaatcccctatgtcaaagccattgacatgtaccttatgggctgcttcgtctttgtgttcctggcccttctggagtatgcctttgtcaactacattttctttggaagaggccctcaaaggcagaagaagcttgcagaaaagacagccaaggcaaagaatgaccgttcaaagagcgaaagcaaccgggtggatgctcatggaaatattctgttgacatcgctggaagttcacaatgaaatgaatgaggtctcaggcggcattggcgataccaggaattcagcaatatcctttgacaactcaggaatccagtacaggaaacagagcatgcctcgagaagggcatgggcgattcctgggggacagaagcctcccgcacaagaagacccatctacggaggaggtcttcacagctcaaaattaaaatacctgatctaaccgatgtgaatgccatagacagatggtccaggatcgtgtttccattcactttttctcttttcaacttagtttactggctgtactatgttaactgagtgactgtacttgatttttcaaagacttcatttaacactgagtgaaatattactctgcctgtcaagtttttatacctgtacacacacagacacacaagcagacacacacatatatacatacgcaattgtatatatatgtgaactttctcagcatatatataaaatacacgtgtatatgaggatgtatgtgtatatgtttatacacacaggagtcagtgcccatgtgtatggaagacaaatacacatacatatatacattttgcagctatggacaatttaccacaggatgcatattaaagaaagtcatagtttttttcttttttaattgaaagggacaagtatcatctaaatattatgccttgagaatgagggcgtgaaacacaatatcatccccaaatgtgtcttgtattatcataagttagatgttttagtttaaaaatcagaaagacattcttagttaatctttgaaaactcatacagtggtattgctagtttaaaatgagtcacttacttcatatcctctcgttcagtttagtaagcaaaggcttcttggcttctctggtgatggggtttgttttcatcgggcatacgttttctgcaatggtttagtggctggggtgagccactggcagtgtgcttacctgttgtctgaaacatagatagatcccacgttgatgtctgaacgaccgtcttttgaaaactcatcgggagtgaatggcatctcgttgtaagtactctaatatacagtgtgtagtttgtttctgttgttcacttggagtggatccagcttcactgtcatgtgcgaacacagtgacacgtttggccagtgacatttcaatcactgaaaatgtgctctacatctcgtatggatttctaggcctgatatccaacagaaagcatagacgtctcaggttattcgttactctaaggtaaaaccatctaggatgattttcccccttgcagttatgttatcattcttataacattgtatgttaatagaaaatatatttgcataatatgcatatatatgtatatttaccaagattttgtttcttacgcttgctatcatggcagcatgcgatgtcatattttcctttatgtgatgtaactactttctgttatctagaaattaagattgaagctaaaacacttctactgttcaatttcagaaactaagaatcatcctcatgcctttatttctgtatctgacatatttcataagcacatccaactactcctagactgactaggattctgcaggaacatgacccgtacacaccacgcgtcacccaacgacccatgaccgttctctgaggcaaaggagggcaacctgacagcaaacacagtcactgttggttccttctgatccacagcctcatcagtatttggactttttaaagctcgtagaaacaagacaaggtgcaccggtttcatagacgcaaccttaacttactatttagatgagatctttctaaagaaaaaaaaaagagatgatatattttttgtaaacaatatttctatcacaggcatccataaactgaaatgactacagttgtgcaaacaggtgtcacagtgaagttgagcatttggagaaaaaaataaaaagcaaaatttgcaggaagaactgctaaattaatactttatcccaaaatgccacgtatgcctcaccctctctgttctatccaaaaccaaggaccagagtgctccaatggtaggccccagttgtctcgatgtaggtagaggcaccaccctccccgaggatgcgtgtggtgtggactatccccatgagctgaccactacttgatttttctttggtggccgtaacaacctttaatttgtgggcatctgcaacagttcaaaacccaccatcagataaaacataatccacaaaatctcacgctagaggcaattacctacttttagacccttttccctctttcattcctatctttttcctcctaatcgctgctctctggttttattttcatctggagactagccagggatttctttggctttggcttttctctgaccattttttccatgggtaacaatgggggatcctaaaagttaaacagattgggaaaaaccttgttaagtggccttatcattattatcatgttaaagaaaaaaaatacatttgcaaagaccttatccctttcaatacttcaggtatctttttctgtatccagtaattaaaggtgtgaggtccacatgcagaagagggaccccaaaatgtaaatggatgtggacaaaaacagtcaatggtctatttaagtgtataatttatactattcagaactgtgacattaattctttctgggagaaaagtgatttaaaacttttttgatgcatagttgaggtacccaaatatcaaaggcagagaccccatggggctccaaagagctgcagtctccttcccaaggttttctggatataaatttgcatggtatagtcataatagcttttgagctttttatatgcatttggcaccaagactgggatccacaactttgtagacactgcgatgaagttaacatattagctatactataaatagtgtttgtaactacacacacacacacacacacacacacaaatacatacatatattctgtaaaaacaaaaaaaaactttttaagatccttgggtatgtgtttgctttactccatttcagaagaaaattacttttcttctaacaaaattattttatagcttctccatttttaaaacttgtgagagcattgagaagagaactctgactgtgttaacagaagagagttgaattggagtctctgttgtgttaaaatgacctctcgttactccacagtagttatttgagccagtgactgagtcgcgttgaggaattctgaacccggacctctgacgttgttgggaggtggctgttacccacacccagacctcttgagtaaggacagaaacgttatcattggggatataatgagatttctttcttaacaattgaaagtaataaagagttaattttctcagt

SEQ ID NO: 24253 - protein, 473 aa, Homo sapiens; identical to SEQ ID NO: 3209

SEQ ID NO: 24254 - DNA, 406 bp, Homo sapiens
agcaggttaggccggaggaacagcgccatgtgctccgggctcctggagctcctgctgcccatctggctctcctggaccctggggacccgaggctctgagccccgcagtgtgaacgatcccgggaacatgtcctttgtgaaggagacggtggacaagctgttgaaaggctacgacattcgcctaagacccgacttcgggggtcccccggtctgcgtggggatgaacatcgacatcgccagcatcgacatggtttccgaagtcaacatgagattctggctgcaggaaaggggaacgaagacagtggtctgtgcgttccaggggtgtctctgcggtttttccaaggctgcctcctggactgggagacccgggcccggcaccgccagtctctgtccgaggtgctgacagg

SEQ ID NO: 24255 - protein, 124 aa, Homo sapiens
MCSGLLELLLPIWLSWTLGTRGSEPRSVNDPGNMSFVKETVDKLLKGYDIRLRPDFGGPPVCVGMNIDIASIDMVSEVNMRFWLQERGTKTVVCAFQGCLCGFSKAASWTGRPGPGTASLCPRC

SEQ ID NO: 24256 - DNA, 2705 bp, Homo sapiens
gaagatgctgttgagggccctggagaaacttcagcagaacagggcctctccccttgcaggccgagccgggggccctgcgccctccccctccgcccagctcggccaagggcgcatttgctgagcgtctggcggcctctaccggagcacctctgcagagggccgatcctccagcccagagacgacatgtggcgctcgggcgagtgccttgcagagagaggagtagcttgctggctttgaacgcgtggcgtggcagatatttcagaaagcttcaagaacaagctggagaagggaagagttattcctccatattcacctgcttcaactactattcttattgggaatggacaatggaatgttctctggttttatcatgatcaaaaacctccttctcttttgtatttccatgaacttatccagtcactttggcttttcacagatgccaaccagttcagtgaaagatgagaccaatgacaacatcacgatatttaccaggatcttggatgggctcttggatggctacgacaacagacttcggcccgggctgggagagcgcatcactcaggtgaggaccgacatctacgtcaccagcttcggcccggtgtccgacacggaaatggagtacaccatagacgtgtttttccgacaaagctggaaagatgaaaggcttcggtttaaggggcccatgcagcgcctccctctcaacaacctccttgccagcaagatctggaccccagacacgttcttccacaacgggaagaagtccatcgctcacaacatgaccacgcccaacaagctgctgcggctggaggacgacggcaccctgctctacaccatgcgcttgaccatctctgcagagtgccccatgcagcttgaggacttcccgatggatgcgcacgcttgccctctgaaatttggcagctatgcgtaccctaattctgaagtcgtctacgtctggaccaacggctccaccaagtcggtggtggtggcggaagatggctccagactgaaccagtaccacctgatggggcagacggtgggcactgagaacatcagcaccagcacaggcgaatacacaatcatgacagctcacttccacctgaaaaggaagattggctactttgtcatccagacctaccttccctgcataatgaccgtgatcttatcacaggtgtccttttggctgaaccgggaatcagtcccagccaggacagtttttggggtcaccacggtgctgaccatgacgaccctcagcatcagcgccaggaactctctgcccaaagtggcctacgccaccgccatggactggttcatagccgtgtgctatgccttcgtcttctcggcgctgatagagtttgccacggtcaattactttaccaagagaggctgggcctgggatggcaaaaaagccttggaagcagccaagatcaagaaaaagcgtgaagtcatactaaataagtcaacaaacgcttttacaactgggaagatgtctcaccccccaaacattccgaaggaacagaccccagcagggacgtcgaatacaacctcagtctcagtaaaaccctctgaagagaagacttctgaaagcaaaaagacttacaacagtatcagcaaaattgacaaaatgtcccgaatcgtattcccagtcttgttcggcactttcaacttagtttactgggcaacgtatttgaatagggagccggtgataaaaggagccgcctctccaaaataaccggccacactcccaaactccaagacagccatacttccagcgaaatggtaccaaggagaggtcttgctcacagggactctccatatgtgagcactatctttcaggaaatttttgcatgtttaataatatgtacaaataatattgccttgatgtttctatatgtaacttcagatgtttccaagatgtcccattgataattcgagcaaacaactttctggaaaaacaggatacgatgactgacactcagatgcccagtatcatacgttgatagtttacaaacaagatacgtatatttttaactgcttcaagtgttacctaacaatgttttttatacttcaaatgtcatttcatacaaattttcccagtgaataaatattttaggaaactctccatgattattagttgaccaactatattgcgagaaacagagatcataaagagcacgttttccattatgaggaaacttggacatttatgtacaaaatgaattgcctttgataattcttactgttctgaaattaggaaagtactgcatgatcttacacgaagaaatagaataggcaaacttttatgcaggcagattaataacagaaatacatcatatgttagatacacaaaatatttccctgaggaaaaaaaatcaactgcttaaattttttgggaagaaaaagaaacatttcttaccccacaccacccactacctgaacaatagccaagaaaggaaaggagatgttaaaacaaacagtgttttgatgacattctcagcacttggcccatgtgatcgctgtctctgaaacactgaccacctctccctacagccagcgtgtagtgcttcagtggtgagaaattgtaattgagttattttccattttatttccttgtatgtatttcatgactggacttactgctctgtcagcttttgtatatgaatcttaaatgttcattaaaaaataaaaaatgaactgatcttgtggac

SEQ ID NO: 24257 - protein, 462 aa, Homo sapiens; identical to SEQ ID NO: 3211

SEQ ID NO: 24258 - DNA, 1426 bp, Homo sapiens
cccgcgggggcgcggccagcgccagagtagatacctgtcccgcccgccgcggccagcagcctcggaggaagccagggcaaagagggccggcggagaccaggtccgcgccggaggaagccgcgcccggccgaggccccggaccctgcgccccgagctccacggcaccatggccccgaagctgctgctcctcctctgcctgttctcgggcttgcacgcgcggtccagaaaggtggaagaggatgaatatgaagattcatcatcaaaccaaaagtgggtcttggctccaaaatcccaagacaccgacgtgactcttattctcaacaagttgctaagagaatatgataaaaagctgaggccagatattggaataaaaccgaccgtaattgacgttgacatttatgttaacagcattggtcctgtgtcatcaataaacatggaataccaaattgacatattttttgctcagacctggacagatagtcgccttcgattcaacagcacaatgaaaattcttactctgaacagcaacatggtggggttaatctggatcccagacaccatcttccgcaattctaaaaccgcagaggctcactggatcaccacacccaatcagctcctccggatttggaatgacgggaaaatcctttacactttgaggctcaccatcaatgctgagtgccagctgcagctgcacaacttccccatggacgaacactcctgcccgctgattttctccagctatggctatcccaaagaagaaatgatttatagatggagaaaaaattcagtggaggcagctgaccagaaatcatggcggctttatcagtttgacttcatgggcctcagaaacaccacagaaatcgtgacaacgtctgcaggtaggaatttactgaaagaggcacagctctcaaaagccagagaggcctaaggccatatgtagtcatatccttaatgtacaagccttttgggcaaccatgatacataagtgatatttgagacaaaacaagtgattcaaagtgaaactatgttttcatgttttaattggtatgggagagggatgttagaaataattcatatttttgaatccaggctgtgtttgcataatgtctataaacctagctataaacttaacctaactcattactgaccatatttacataaaccaattttgctgatggggagagttctgcaaatttccacgtacataagaagaatcaaatattattgagaatccacacataaaagaagctggtgtgatatgtcctttgagtttcaattgcttttatttactctaagttttatctttaactttgagtttctttttcaatgattgaaagtaattacctaccaatttgattttatgaagtgatcattatatgcatattcaaaatcctgtaattaaataaaaagagttgttctgcctatg

SEQ ID NO: 24259 - protein, 253 aa, Homo sapiens
MAPKLLLLLCLFSGLHARSRKVEEDEYEDSSSNQKWVLAPKSQDTDVTLILNKLLREYDKKLRPDIGIKPTVIDVDIYVNSIGPVSSINMEYQIDIFFAQTWTDSRLRFNSTMKILTLNSNMVGLIWIPDTIFRNSKTAEAHWITTPNQLLRIWNDGKILYTLRLTINAECQLQLHNFPMDEHSCPLIFSSYGYPKEEMIYRWRKNSVEAADQKSWRLYQFDFMGLRNTTEIVTTSAGRNLLKEAQLSKAREA

SEQ ID NO: 24260 - DNA, 1915 bp, Homo sapiens
cccgcgggggcgcggccagcgccagagtagatacctgtcccgcccgccgcggccagcagcctcggaggaagccagggcaaagagggccggcggagaccaggtccgcgccggaggaagccgcgcccggccgaggccccggaccctgcgccccgagctccacggcaccatggccccgaagctgctgctcctcctctgcctgttctcgggcttgcacgcgcggtccagaaaggtggaagaggatgaatatgaagattcatcatcaaaccaaaagtgggtcttggctccaaaatcccaagacaccgacgtgactcttattctcaacaagttgctaagagaatatgataaaaagctgaggccagatattggaataaaaccgaccgtaattgacgttgacatttatgttaacagcattggtcctgtgtcatcaataaacatggaataccaaattgacatattttttgctcagacctggacagatagtcgccttcgattcaacagcacaatgaaaattcttactctgaacagcaacatggtggggttaatctggatcccagacaccatcttccgcaattctaaaaccgcagaggctcactggatcaccacacccaatcagctcctccggatttggaatgacgggaaaatcctttacactttgaggctcaccatcaatgctgagtgccagctgcagctgcacaacttccccatggacgaacactcctgcccgctgattttctccagctatggctatcccaaagaagaaatgatttatagatggagaaaaaattcagtggaggcagctgaccagaaatcatggcggctttatcagtttgacttcatgggcctcagaaacaccacagaaatcgtgacaacgtctgcaggtgattatgttgtcatgactatatattttgaattgagtagaagaatgggatacttcaccattcagacatacattccctgtatactgactgtggttttatcctgggtgtcattttggatcaaaaaagatgctacgccagcaagaacagcattaggcatcaccacggtgctgaccatgaccaccctgagcaccatcgccaggaagtccttgccacgcgtgtcctacgtgaccgccatggacctttttgtgaccgtgtgcttcctgtttgtcttcgccgcgctgatggagtatgccaccctcaactactattccagctgtagaaaaccaaccaccacgaagaagacaacatcgttactacatccagattcctcaagatggattcctgagcgaataagcctacaagccccttccaactattccctcctggacatgaggccaccaccaactgcgatgatcactttaaacaattccgtttactggcaggaatttgaagatacctgtgtctatgagtgtctggatggcaaagactgtcagagcttcttctgctgctatgaagaatgtaaatcaggatcctggaggaaagggcgtattcacatagacatcttggagctggactcgtactcccgggtctttttccccacgtccttcctgctctttaacctggtctactgggttggatacctgtatctctaagtgttgctcagagtgaagagtgaagagcatttggtacacacttgaccttctgtcgtccccagaccagtagtgaccaatcgggagtagcaaggaaggacactgcccagtgtatcttgttataaatgacctttcagcaacacaggaagtacccagcaaaggtttctattatgtattttacacacacacatacatacacacacacagctaattgagttttaaagtaatattcttgctaatccctactgaattgtagcttggtgttgtttctgaatggtttttggatattggaagcagccgctgattacccttgcaaagaaatctgtaaaatgtgcacgtgaatgtctg

SEQ ID NO: 24261 - protein, 467 aa, Homo sapiens
MAPKLLLLLCLFSGLHARSRKVEEDEYEDSSSNQKWVLAPKSQDTDVTLILNKLLREYDKKLRPDIGIKPTVIDVDIYVNSIGPVSSINMEYQIDIFFAQTWTDSRLRFNSTMKILTLNSNMVGLIWIPDTIFRNSKTAEAHWITTPNQLLRIWNDGKILYTLRLTINAECQLQLHNFPMDEHSCPLIFSSYGYPKEEMIYRWRKNSVEAADQKSWRLYQFDFMGLRNTTEIVTTSAGDYVVMTIYFELSRRMGYFTIQTYIPCILTVVLSWVSFWIKKDATPARTALGITTVLTMTTLSTIARKSLPRVSYVTAMDLFVTVCFLFVFAALMEYATLNYYSSCRKPTTTKKTTSLLHPDSSRWIPERISLQAPSNYSLLDMRPPPTAMITLNNSVYWQEFEDTCVYECLDGKDCQSFFCCYEECKSGSWRKGRIHIDILELDSYSRVFFPTSFLLFNLVYWVGYLYL

SEQ ID NO: 24262 - DNA, 926 bp, Homo sapiens
tcttccagaaaccatgacactatggcaggccaacttactagctttcaagtaaggtaacatctcagaccatcataggttttgacaggggaaactctgaaggaccacaggagttggaggttccacgtatctctaagtagtaacatacgatgggtccaaaacagaagaaagagaactcaagattcccgagccacagagctgttgattggaggctgactcagagaaaccctggattcagtgacatacagagacaacaggtacaggatcagtatgggttttaattgaggggctcggcaccaaatgacagacttgacacatccacccccaccatggatgctgtccgtccactgttgcacaatgtccttcagtgtctaatttacagatccagctgtatttccccttccacctgcatccctgaagttcctcccacctgaaaacttcacctgacccaagaaagcaaaggaaaaaacccggagagccagctcatagtctggttcactgtttaacagccagaagccagagcctgcgtactagaagtggatgcccaggaagtacttgtgagctgactaagaatgtaagaacgccacccacttcattcaggaaagtgaggcaggattccatggagtatgaatgactgcacatggaacaagcaggttatcatttatattcagcaagggacctccatgaacaggacatttggggagctgctatcaaacatcagaacttctgacactgtgcacacagtcttatattgtgccttgtctgttgtgatgtctcactacagtaatgattaagatgatgagcacttatgcgttgatattgcaatatgtctgcgtaagaactatcgctaaggcaggttatattattaccctcagtgtataggtaaggaggttagactgataacttacccagtgtcacataggtagtaa

SEQ ID NO: 24263 - protein, 43 aa, Homo sapiens
MGPKQKKENSRFPSHRAVDWRLTQRNPGFSDIQRQQVQDQYGF

SEQ ID NO: 24264 - DNA, 380 bp, Homo sapiens
aatcaccaacttcttaccattgactcacttataaccgtttccagatttatggaggatgaagacctatcgtaccaatgtggcagttgaaaagtgaattgcaacacaatgagatatattcacattaggagaggagcagtacctgtgcattcagaactggaactgcaggtgtaccattactgttgatagaggcatctcctgccgcggtccacccagcctgagctgccagcctgcctagcttctgcaaagccccgagttgtcatggcaaccacttcctgagacttgatactcatgcctgcagactctgggtcctgacttaaatagttttattttttttaaaaaggcataaattgatagtgcaataaaatctggtttaaagattg

SEQ ID NO: 24265 - protein, 41 aa, Homo sapiens
DIFTLGEEQYLCIQNWNCRCTITVDRGISCRGPPSLSCQPA

SEQ ID NO: 24266 - DNA, 438 bp, Homo sapiens
atgcagcccactcccctggatatcttagaacacccagtattggtggatatgcagcccactcccatggatatcttaggacactcagtattggtggatatgcagcccactcccatggatatcttagaacacccagtattggtggatactcagcccattcccatggatatcttagaacacccagtattggtggatatgcagcccactcccatggatatcttagaacactcagtattggtggatatgcagcccactcccatggatatcttagaacactcagtattggtggatatgcagcccactcccatggatatcttagaacactcagtattggtggatactcagcccactcccatggatatcttagaacactcagtattggtagataagcagcccactcccatggatatcttagaacactcagtattggtggatttatag

SEQ ID NO: 24267 - protein, 145 aa, Homo sapiens
MQPTPLDILEHPVLVDMQPTPMDILGHSVLVDMQPTPMDILEHPVLVDTQPIPMDILEHPVLVDMQPTPMDILEHSVLVDMQPTPMDILEHSVLVDMQPTPMDILEHSVLVDTQPTPMDILEHSVLVDKQPTPMDILEHSVLVDL

SEQ ID NO: 24268 - DNA, 317 bp, Homo sapiens
ctgaggcatccatgcgagtggactgcgtatccaccaatactgggtgttctaagagatggagtcttgctatgttgcccaggctggtttcaaactcctggcgtcaagcagtcctcccgcattggcctccaaaagcgctgggattacaggcatgagacactgctcctggactgtgcaattttaaagacttgagcaaataaccccttaaaatgtgagttttaggatggtgggtagggcttcaatttgaaaactgttaccagggaatgtgattataacatgcacagttcccactaagtgtgaaaatatagctgagaagcatg

SEQ ID NO: 24269 - protein, 46 aa, Homo sapiens
MRVDCVSTNTGCSKRWSLAMLPRLVSNSWRQAVLPHWPPKALGLQA

SEQ ID NO: 24270 - DNA, 351 bp, Homo sapiens
gtgtgcaccccggtcacaacagtgatgctcaagggctctccaaaggaggcaggcttgtgtggaccccagagggactcctgatcaggttagaaggacgtggaaagaatactacctgcaagccgacgagagaggcctggagcagatccttccttcacggcactcggaagatgccaagcctgccatcttgattttagacttccagcctccagaactgagagacaacacgttgtttctgttgtttgagccacacagttggtagaactgttaaagtagctccaggaaactaattcagtgactaatgtttttgaacagtctttgtgcattttaaataaacatatttaatatattaca

SEQ ID NO: 24271 - protein, 77 aa, Homo sapiens
CSRALQRRQACVDPRGTPDQVRRTWKEYYLQADERGLEQILPSRHSEDAKPAILILDFQPPELRDNTLFLLFEPHSW

SEQ ID NO: 24272 - DNA, 2232 bp, Homo sapiens
gaaaatggaagtcgggtagcggcgactgcggcgctgcgggctggcggagcggagcggcgcggcgcggcaggtggcagtgacgaaagaagagactctcccggccgaggccccagtgcatggagagaaggaagaaatcaatttcctaattggtaccatatacatcagatggatggtttctagtgtgcttccaaaccccacctcggctgagtgttgggcagcacttctacatgatcctatgactcttgatatggacgcagtcctgtcagactttgttcggtccacgggggcagaacctggtctggccagagacctgctggaaggcaaaaactgggacctgacagccgctctgagcgactatgagcagctccgccaggtgcacacagccaatctgccacatgtgttcaatgaagggcggggtcccaagcagccagagcgagagccacagcccgggcacaaggtggagcgaccctgcctgcagaggcaggacgacattgcccaagaaaagcggctttcccgggggatttcccacgccagctcagccatcgtctccctggcccggtcccacgtggcaagtgaatgcaacaacgagcagttccccctggagatgccaatctacacattccagttgccagacctgagcgtgtacagcgaggatttcaggagcttcatcgagcgggacttgatcgagcaggcaacaatggtggctttggagcaggcaggtcgcctgaactggtggtccactgtgtgcacgagctgtaaacggcttcttcctctggccacaacaggggatgggaactgccttttacatgctgcttcactgggaatgtgggggtttcacgaccgggacctggtgttacggaaagctctctataccatgatgaggacgggagctgagagggaagccctgaagcggaggtggaggtggcagcagacgcagcagaataaggagtcagggctggtgtacacagaggaggagtgggagcgggagtggacggagctgctgaagctggcctccagcgagccgcgcacacacttcagcaagaatggcggcacgggcgggggtgtggacaactctgaggaccccgtgtacgagagcctggaagagttccacgtttttgtcctagcccatatattaagaaggcccatcgttgttgtggcagatacaatgttaagagactcaggtggagaagcgttcgcacccatcccattcggagggatctacctgcccttggaggtccctcccaacagatgccactgctcgcctctggttctggcctatgatcaagcccatttctctgcccttgtgtccatggaacagagagaccagcaaagagaacaagccgtgatccccctgacggattctgagcacaagctgctgcctctgcactttgcagtggaccctggcaaggactgggagtgggggaaagacgacaacgataacgcccggctggcccaccttatcctgtcgctagaagccaagctgaaccttctgcacagctacatgaacgtgacgtggatccggatcccctccgagacacgggcgcccctggcacagccggagtctcccacggcctcggcaggggaggacgtgcagtccctggccgactcgctggactcggaccgcgattcggtgtgcagcaattctaacagcaataacggcaagaacggcaaggacaaggagaaggagaagcagcgcaaggagaaggacaagacgcgcgccgactccgtggccaacaagctgggcagcttcagcaagacgctgggcatcaagctgaagaaaaacatgggcggcctcggcggcctggtgcacggcaagatgggccgcgccaactccgccaatggcaagaacggggactcggccgagcggggcaaggagaagaaggccaagtcgcgcaagggcagcaaggaggagtctggtgcgtcggccagcacgtcgccgtcggaaaagaccacgccgtcgcccacagacaaggcagcgggcgcgtcgccggcggagaagggcggtgggccgcggggcgacgcctggaagtacagcacggatgtgaagctgagcctcaacatcctgcgcgccgccatgcagggggagcgcaagttcatcttcgccggcctgctgctcaccagccaccggcaccagttccacgaggagatgatcggctactacctgacgagcgcgcaggagcgcttcagcgccgagcaggagcagcggcgccgcgacgccgctactgcggccgc

SEQ ID NO: 24273 - protein, 686 aa, Homo sapiens
MVSSVLPNPTSAECWAALLHDPMTLDMDAVLSDFVRSTGAEPGLARDLLEGKNWDLTAALSDYEQLRQVHTANLPHVFNEGRGPKQPEREPQPGHKVERPCLQRQDDIAQEKRLSRGISHASSAIVSLARSHVASECNNEQFPLEMPIYTFQLPDLSVYSEDFRSFIERDLIEQATMVALEQAGRLNWWSTVCTSCKRLLPLATTGDGNCLLHAASLGMWGFHDRDLVLRKALYTMMRTGAEREALKRRWRWQQTQQNKESGLVYTEEEWEREWTELLKLASSEPRTHFSKNGGTGGGVDNSEDPVYESLEEFHVFVLAHILRRPIVVVADTMLRDSGGEAFAPIPFGGIYLPLEVPPNRCHCSPLVLAYDQAHFSALVSMEQRDQQREQAVIPLTDSEHKLLPLHFAVDPGKDWEWGKDDNDNARLAHLILSLEAKLNLLHSYMNVTWIRIPSETRAPLAQPESPTASAGEDVQSLADSLDSDRDSVCSNSNSNNGKNGKDKEKEKQRKEKDKTRADSVANKLGSFSKTLGIKLKKNMGGLGGLVHGKMGRANSANGKNGDSAERGKEKKAKSRKGSKEESGASASTSPSEKTTPSPTDKAAGASPAEKGGGPRGDAWKYSTDVKLSLNILRAAMQGERKFIFAGLLLTSHRHQFHEEMIGYYLTSAQERFSAEQEQRRRDAATA

SEQ ID NO: 24274 - DNA, 900 bp, Homo sapiens
tagcggcgactgcggcgctgcgggctggcggagcggagcggcgcggcgcggcagagttctcaggcgctgtggtctcaccttccactggggcaacaatgggccatttccagcagggacggcgcagtgttggcctgcatgcctgactgccacacacctccagaatcaggtgtctgaaaagtggcagtgacgaaagaagagactctcccggccgaggccccagtgcatggagagaaggaagaaatcaatttcctaattggtaccatatacatcagatggatggtttctagtgtgcttccaaaccccacctcggctgagtgttgggcagcacttctacatgatcctatgactcttgatatggacgcagtcctgtcagactttgttcggtccacgggggcagaacctggtctggccagagacctgctggaaggcaaaaactgggacctgacagccgctctgagcgactatgagcagctccgccaggtgcacacagccaatctgccacatgtgttcaatgaagggcggggtcccaagcagccagagcgagagccacagcccgggcacaaggtggagcgaccctgcctgcagaggcaggacgacattgcccaagaaaagcggctttcccgggggatttcccacgccagctcagccatcgtctccctggcccggtcccacgtggcaagtgaatgcaacaacgagcagttccccctggagatgccaatctacacattccagttgccagacctgagcgtgtacagcgaggatttcaggagcttcatcgagcgggacttgatcgagcaggcaacaatggtggctttggagcaggcaggtcgcctgaactggtggtccactgtgtgcacgagctgtaaacggcttcttcctctggccacaacaggggatggg

SEQ ID NO: 24275 - protein, 207 aa, Homo sapiens
MVSSVLPNPTSAECWAALLHDPMTLDMDAVLSDFVRSTGAEPGLARDLLEGKNWDLTAALSDYEQLRQVHTANLPHVFNEGRGPKQPEREPQPGHKVERPCLQRQDDIAQEKRLSRGISHASSAIVSLARSHVASECNNEQFPLEMPIYTFQLPDLSVYSEDFRSFIERDLIEQATMVALEQAGRLNWWSTVCTSCKRLLPLATTGD

SEQ ID NO: 24276 - DNA, 3431 bp, Homo sapiens
agaggagggcgcgcgcccggaggcagcaggcggagccgggaggcgggcgttcgagagaaaatggaagtcgggtagcggcgactgcggcgctgcgggctggcggagcggagcggcgcggcgcggcagagttctcaggcgctgtggtctcaccttccactggggcaacaatgggccatttccagcagggacggcgcagtgttggcctgcatgcctgactgccacacacctccagaatcaggtgtctgaaaagtggcagtgacgaaagaagagactctcccggccgaggccccagtgcatggagagaaggaagaaatcaatttcctaattggtaccatatacatcagatggatggtttctagtgtgcttccaaaccccacctcggctgagtgttgggcagcacttctacatgatcctatgactcttgatatggacgcagtcctgtcagactttgttcggtccacgggggcagaacctggtctggccagagacctgctggaagcacctccaactgtgatccaccttcctgagcccggtcgctgctgcctgcacgctgtccaggggtcccggctgcacccagtgggacagagggtggcagtggtgagtgctcactcacctcacccactgctgggtcctgcctttggctttcacaggcaaaaactgggacctgacagccgctctgagcgactatgagcagctccgccaggtgcacacagccaatctgccacatgtgttcaatgaagggcggggtcccaagcagccagagcgagagccacagcccgggcacaaggtggagcgaccctgcctgcagaggcaggacgacattgcccaagaaaagcggctttcccgggggatttcccacgccagctcagccatcgtctccctggcccggtcccacgtggcaagtgaatgcaacaacgagcagttccccctggagatgccaatctacacattccagttgccagacctgagcgtgtacagcgaggatttcaggagcttcatcgagcgggacttgatcgagcaggcaacaatggtggctttggagcaggcagtgtttcctcaccaccctaacatcccaatgaagaaagcgttcaagaagcaagacaaactctcttctttggaatgtttaaggagaaaataatgagtccaaaacaaatgtctaaaacagatttaggttcttcctgagacaaagcaatgccagtttcactcataatcattcacattataaacattgcaaaatcacatatctgggggtttctcaggcacgcatgtggaagatgttatggctgtctcctcaggcccaccacgcccctcccagtgggagccccgcctgcctgcacgggctgacagtgcacatggagcatgtcctcagccagtgggaagccctgctcctgctggggtggggaagcatcgccttccagtgctgacccagccttcagccagctcttcatgtccactgtggagtggagcctccacttccaaggcttggtccgtggagacgtccccagatgtgtcatcccaggagtttagggctgcagccagcaatgcactgttagggagtagagcttttctcggtgctcggcgaagacccaataaaattaccaagcactttctagagttccagaagaagacaggagagaagtacctgtaggttggtatgattctgatattggtggatggaccaatcaggaccctggtaggaaagaaaaggcagcacaaaactgtgagataaaggactccataaagggactgctttccaaggagtgggcaggatttaaggacactagtgaaggatactaccgttcctgggactaccctcaggcctggcaaaaagacaagggatgagagtggctgatggagatagccacgggcagtaggtgtggcatccgggagagagaagatgctggggaaataaatactctgaccacactcttcctccaccatccaggttctgaccagtgcctcttaatggcagaagggcagattgcggggagctcactgatgtggtccacgcaggtcaccctctgcatacagagcagcatggagaaggatagacggtagatctgtggggccaatgggaaacatccagaaagtcaatgtgccgggaagttttaccagacctggcttctgtgtacacgtgtacacctgctttcatgccattgcttgtcattgtttgcccagggctgtcgtcatccaccactttcaagagggaaggcacaagatgcgtttagacaaaggacgagatgtgcctagtggggcttatttgtgttgggcaggcttgcagtcaggtcgtagccacaggactcatagaagcctcaccaatggcatgcttgacattagaacaggctctacattcccaacagctggatctcatgttgtgactgtggagaaattctcatctcagctgcttcgcagccatcaagagcaatccaatgactggcacccacagccttgctctgtcttacctcagcaagactcaacaaacaaaacaattcagctagattagcaataatctaaaccactcactgtgggggctggctattttaaagacgcttctatatgactaattcagataagatattttcaatagaaaaagctcactattcatagagaagcggaaattagtatttgttaagaaagaaacaagtttcatgggttactctctgttgaatgctacggcggtgtagacctttatacagctcagcactgacgattgctaatagcttgggtgatcatagcagctgcctgagtgctgtgtttcgtgtgaagcacagtctcatgcaaggttgtaggtagaccccaccatgttaccttctccttgagccctaccatgcttagcaaaagccttcacttcttttgaacgtcttttctgttatttttttccatattttgcattttaatttttatcacttatattttaccttccagactagcattttaagatgggactctggcttcatccagtcttgaaaaataccttttaaaaacccaaacttagtgagttaagatgttaaattatgaatagctcattgtttatgttgggcaccacgaagagaaccaactggaagcagagatcagtgaaggcaggaagctcaggctcccacccagtggtggagaagccatctggtctacactcgcaggaggccttgaggaagtgggtctcactcttcagggagtggtcaaaggtgcttgtggtgcaattcgcgcctgaagatcagggatctgcctgggacaggagtcctagtagccaacatgtcttcctcgtccctcacgctgaaaaataataaaagtggccaaacgcgatggctcacgcctataatcctagcactttgggaggccaaggcaggagaatcacttgagctcagaagtccgagaccagcttgagcaacatagtaagaccccatctctacaaataataaacaaattagccaagc

SEQ ID NO: 24277 - protein, 113 aa, Homo sapiens
MVSSVLPNPTSAECWAALLHDPMTLDMDAVLSDFVRSTGAEPGLARDLLEAPPTVIHLPEPGRCCLHAVQGSRLHPVGQRVAVVSAHSPHPLLGPAFGFHRQKLGPDSRSERL

SEQ ID NO: 24278 - DNA, 379 bp, Homo sapiens
gagcgtgctctgtgatccctcctctggatgctgctcctgactctccccctccatcgtcctctgcccacaggcccatgctagcctccggcatcttccagttacttagaatccatgtcagcaaatgcgtgcagactatggaggggtccacagaagagctgagcctcctcctagcagccaacaccagcttgccggcgatgtgagcggctgccttggaagtggaccccctgccccagcccagccttcagatgatgcagtgccagctgacagcccaactacaaccccatgggagaccctgagctagagggttccagccaagccacatgtggatcctgacccagaggaagtatgtaagataataaatggttgttttaagctgctg

SEQ ID NO: 24279 - protein, 41 aa, Homo sapiens
MLASGIFQLLRIHVSKCVQTMEGSTEELSLLLAANTSLPAM

SEQ ID NO: 24280 - DNA, 3330 bp, Homo sapiens
gagccgagcggcgaggtgcctctgtggccgcaggcgcaggcccgggcgacagccgagacgtggagcgcgccggctcgctgcagctccgggactcaacatgcgctgctcgccgggaggcgtctggctggcgctggccgcgtcgctcctgcacgtgtccctgcaaggcgagttccagaggaagctttacaaggagctggtcaagaactacaatcccttggagaggcccgtggccaatgactcgcaaccactcaccgtctacttctccctgagcctcctgcagatcatggacgtggatgagaagaaccaagttttaaccaccaacatttggctgcaaatgtcttggacagatcactatttacagtggaatgtgtcagaatatccaggggtgaagactgttcgtttcccagatggccagatttggaaaccagacattcttctctataacagtgctgatgagcgctttgacgccacattccacactaacgtgttggtgaattcttctgggcattgccagtacctgcctccaggcatattcaagagttcctgctacatcgatgtacgctggtttccctttgatgtgcagcactgcaaactgaagtttgggtcctggtcttacggaggctggtccttggatctgcagatgcaggaggcagatatcagtggctatatccccaatggagaatgggacctagtgggaatccccggcaagaggagtgaaaggttctatgagtgctgcaaagagccctaccccgatgtcaccttcacagtgaccatgcgccgcaggacgctctactatggcctcaacctgctgatcccctgtgtgctcatctccgccctcgccctgctggtgttcctgcttcctgcagattccggggagaagatttccctggggataacagtcttactctctcttaccgtcttcatgctgctcgtggctgagatcatgcccgcaacatccgattcggtaccattgatagcccagtacttcgccagcaccatgatcatcgtgggcctctcggtggtggtgacagtgatcgtgctgcagtaccaccaccacgaccccgacgggggcaagatgcccaagtggaccagagtcatccttctgaactggtgcgcgtggttcctgcgaatgaagaggcccggggaggacaaggtgcgcccggcctgccagcacaagcagcggcgctgcagcctggccagtgtggagatgagcgccgtggcgccgccgcccgccagcaacgggaacctgctgtacatcggcttccgcggcctggacggcgtgcactgtgtcccgacccccgactctggggtagtgtgtggccgcatggcctgctcccccacgcacgatgagcacctcctgcacggcgggcaaccccccgagggggacccggacttggccaagatcctggaggaggtccgctacattgccaaccgcttccgctgccaggacgaaagcgaggcggtctgcagcgagtggaagttcgccgcctgtgtggtggaccgcctgtgcctcatggccttctcggtcttcaccatcatctgcaccatcggcatcctgatgtcggctcccaacttcgtggaggccgtgtccaaagactttgcgtaaccacgcctggttctgtacatgtggaaaactcacagatgggcaaggcctttggcttggcgagatttgggggtgctaatccaggacagcattacacgccacaactccagtgttcccttctggctgtcagtcgtgttgcttacggtttctttgttactttaggtagtagaatctcagcactttgtttcatattctcagatgggctgatagatatccttggcacatccgtaccatcggtcagcagggccactgagtagtcattttgcccattagcccactgcctggaaagcccttcggagagctccccatggctcctcaccaccgagacagttggttttgcatgtctgcatgaaggtctacctgaaaattcaacatttgctttttgcttgtgtacaaacccagattgaagctaaaataaaccagactcactaaatcctttccaataattgactggtggaaggaaaacaaaaaacaaaaactaaaaacctcttagcttttctgcaattcaactttttatttttatttttatttctatcaaagacggtagagagaaacagcttgatgctgtttctacattaaaaaaaaaaaaaaaagacagactgttggtcttactaaggatgtttttaccagcctgcctgacttctgcaaacctaccctgtcaaggagatcaaagggacgcaggtttctgtttattctgaacaagggccaggccccgcggagtgtctttggtggatcccagataactcctaggtgctgctctcagacactgaggagttgagcaaatctgttctattctgcagaacccacaggacaaataagagttctactagaattaacagcccaaaagaatagctacagctaagtgaagccacttacgtgggctttaaaaaaataatgtgttagctgattcacatgcactggagttaattagtcttagaaatgtgtgcatccatacaaatgcacaacataaagtgaacatattcctaggccctttctgcctgtgtcagggccaggaagtagaggctgggaactcttctggtccccagtatggcaggcgccagggaggggatggtgtggcccatcccttctctggatacctggccagtggcaggcagcagggaggagctggccgaccctcagtgactgacaagccagcaattctgagttctggcctttgggagtctgcctgctccaagccagtccaccccagctgcagccccaaaagctggctcaaagtccttgggtggattcactggagatgggcaacttaaaacaagagaaactttaatttttaaacctaagtgatgatacagctcttcccttagattatcgcccaggctggagtgcagtggcatgatctcagctcactgcaagctccacctcctgggttcatgccattctcctgcctcagcctccccccgagtaactgggaatacaggcgcccgccaccatgcctggctaattttttgtatttttagtagagatagggtttcatcatgttagccaggatggtctcattcttattctttaatgagatcagagggtaattcaccaagaaagacctctcctgttccattgtgtcatccaacaactgctcagagctcaaaattatagaaggcttctgagcccctagagatttttaatttgcttctaatccctgaggtgggaacatcatgagggaagatttgattttcagagttaaataaattgtatgtgcttttccagcc

SEQ ID NO: 24281 - protein, 502 aa, Homo sapiens; identical to SEQ ID NO: 3215

SEQ ID NO: 24282 - DNA, 3814 bp, Homo sapiens
gagccgagcggcgaggtgcctctgtggccgcaggcgcaggcccgggcgacagccgagacgtggagcgcgccggctcgctgcagctccgggactcaacatgcgctgctcgccgggaggcgtctggctggcgctggccgcgtcgctcctgcacgtgtccctgcaaggcgagttccagaggaagctttacaaggagctggtcaagaactacaatcccttggagaggcccgtggccaatgactcgcaaccactcaccgtctacttctccctgagcctcctgcagatcatggacgtggatgagaagaaccaagttttaaccaccaacatttggctgcaaatgtcttggacagatcactatttacagtggaatgtgtcagaatatccaggggtgaagactgttcgtttcccagatggccagatttggaaaccagacattcttctctataacagtgctgatgagcgctttgacgccacattccacactaacgtgttggtgaattcttctgggcattgccagtacctgcctccaggcatattcaagagttcctgctacatcgatgtacgctggtttccctttgatgtgcagcactgcaaactgaagtttgggtcctggtcttacggaggctggtccttggatctgcagatgcaggaggcagatatcagtggctatatccccaatggagaatgggacctagtgggaatccccggcaagaggagtgaaaggttctatgagtgctgcaaagagccctaccccgatgtcaccttcacagtgaccatgcgccgcaggacgctctactatggcctcaacctgctgatcccctgtgtgctcatctccgccctcgccctgctggtgttcctgcttcctgcagattccggggagaagatttccctggggataacagtcttactctctcttaccgtcttcatgctgctcgtggctgagatcatgcccgcaacatccgattcggtaccattgatagcccagtacttcgccagcaccatgatcatcgtgggcctctcggtggtggtgacagtgatcgtgctgcagtaccaccaccacgaccccgacgggggcaagatgcccaagtggaccagagtcatccttctgaactggtgcgcgtggttcctgcgaatgaagaggcccggggaggacaaggtgcgcccggcctgccagcacaagcagcggcgctgcagcctggccagtgtggagatgagcgccgtggcgccgccgcccgccagcaacgggaacctgctgtacatcggcttccgcggcctggacggcgtgcactgtgtcccgacccccgactctggggtagtgtgtggccgcatggcctgctcccccacgcacgatgagcacctcctgcacggcgggcaaccccccgagggggacccggacttggccaagatcctggaggaggtccgctacattgccaaccgcttccgctgccaggacgaaagcgaggcggtctgcagcgagtggaagttcgccgcctgtgtggtggaccgcctgtgcctcatggccttctcggtcttcaccatcatctgcaccatcggcatcctgatgtcggctcccaacttcgtggaggccgtgtccaaagactttgcgtaaccacgcctggttctgtacatgtggaaaactcacagatgggcaaggcctttggcttggcgagatttgggggtgctaatccaggacagcattacacgccacaactccagtgttcccttctggctgtcagtcgtgttgcttacggtttctttgttactttaggtagtagaatctcagcactttgtttcatattctcagatgggctgatagatatccttggcacatccgtaccatcggtcagcagggccactgagtagtcattttgcccattagcccactgcctggaaagcccttcggagagctccccatggctcctcaccaccgagacagttggttttgcatgtctgcatgaaggtctacctgaaaattcaacatttgctttttgcttgtgtacaaacccagattgaagctaaaataaaccagactcactaaatcctttccaataattgactggtggaaggaaaacaaaaaacaaaaactaaaaacctcttagcttttctgcaattcaactttttatttttatttttatttctatcaaagacggtagagagaaacagcttgatgctgtttctacattaaaaaaaaaaaaaaaagacagactgttggtcttactaaggatgtttttaccagcctgcctgacttctgcaaacctaccctgtcaaggagatcaaagggacgcaggtttctgtttattctgaacaagggccaggccccgcggagtgtctttggtggatcccagataactcctaggtgctgctctcagacactgaggagttgagcaaatctgttctattctgcagaacccacaggacaaataagagttctactagaattaacagcccaaaagaatagctacagctaagtgaagccacttacgtgggctttaaaaaaataatgtgttagctgattcacatgcactggagttaattagtcttagaaatgtgtgcatccatacaaatgcacaacataaagtgaacatattcctaggccctttctgcctgtgtcagggccaggaagtagaggctgggaactcttctggtccccagtatggcaggcgccagggaggggatggtgtggcccatcccttctctggatacctggccagtggcaggcagcagggaggagctggccgaccctcagtgactgacaagccagcaattctgagttctggcctttgggagtctgcctgctccaagccagtccaccccagctgcagccccaaaagctggctcaaagtccttgggtggattcactggagatgggcaacttaaaacaagagaaactttaatttttaaacctaagtgatgatacagctcttcccttagattatcgcccaggctggagtgcagtggcatgatctcagctcactgcaagctccacctcctgggttcatgccattctcctgcctcagcctccccccgagtaactgggaatacaggcgcccgccaccatgcctggctaattttttgtatttttagtagagatagggtttcatcatgttagccaggatggtctcattcttattctttaatgagatcagagggtaattcaccaagaaagacctctcctgttccattgtgtcatccaacaactgctcagagctcaaaattatagaaggcttctgagcccctagagatttttaatttgcttctaatccctgaggtgggaacatcatgagggaagatttgattttcagagttaaataaattgtatgtgcttttccagccatctggctcactcatttctgggtaatgcacatgactttgtttgcactggaggaagatggaagcttgcgtgtgtgcggtgtgtgtgtgtgtgtaagtgtgaggtaccttgtgtgtgacaagagacctcacttacgagaaagttggtggatcaggacattccagcctcaggcggcttggagcaggatcattcctcagcaggcattccttccacatgctatggatgaaccatgcacaagattttcggtttttttttttttttctgttacagtgtctttagaaacaagtagaagtgttttgatatataaaaggaatgcttcatttcttatcattatcccaaaattgatccctcccacatttttgctttaaaaagaaacctttttggttttgtattttatacaggaacacaaaatgcaaacaagttgtgcatattttggactctcaaataacttctctgtcctttaataaagtaataataaggaataga

SEQ ID NO: 24283 - protein, 502 aa, Homo sapiens; identical to SEQ ID NO: 3215

SEQ ID NO: 24284 - DNA, 2021 bp, Homo sapiens
gtggccgcaggcgcaggcccgggcgacagccgagacgtggagcgcgccggctcgctgcagctccgggactcaacatgcgctgctcgccgggaggcgtctggctggcgctggccgcgtcgctcctgcacgtgtccctgcaaggcgagttccagaggaagctttacaaggagctggtcaagaactacaatcccttggagaggcccgtggccaatgactcgcaaccactcaccgtctacttctccctgagcctcctgcagatcatggacgtggatgagaagaaccaagttttaaccaccaacatttggctgcaaatgtcttggacagatcactatttacagtggaatgtgtcagaatatccaggggtgaagactgttcgtttcccagatggccagatttggaaaccagacattcttctctataacagtgctgatgagcgctttgacgccacattccacactaacgtgttggtgaattcttctgggcattgccagtacctgcctccaggcatattcaagagttcctgctacatcgatgtacgctggtttccctttgatgtgcagcactgcaaactgaagtttgggtcctggtcttacggaggctggtccttggatctgcagatgcaggaggcagatatcagtggctatatccccaatggagaatgggacctagtgggaatccccggcaagaggagtgaaaggttctatgagtgctgcaaagagccctaccccgatgtcaccttcacagtgaccatgcgccgcaggacgctctactatggcctcaacctgctgatcccctgtgtgctcatctccgccctcgccctgctggtgttcctgcttcctgcagattccggggagaagatttccctggggataacagtcttactctctcttaccgtcttcatgctgctcgtggctgagatcatgcccgcaacatccgattcggtaccattgatagcccagtacttcgccagcaccatgatcatcgtgggcctctcggtggtggtgacagtgatcgtgctgcagtaccaccaccacgaccccgacgggggcaagatgcccaagtggaccagagtcatccttctgaactggtgcgcgtggttcctgcgaatgaagaggcccggggaggacaaggtgcgcccggcctgccagcacaagcagcggcgctgcagcctggccagtgtggagatgagcgccgtggcgccgccgcccgccagcaacgggaacctgctgtacatcggcttccgcggcctggacggcgtgcactgtgtcccgacccccgactctggggtagtgtgtggccgcatggcctgctcccccacgcacgatgagcacctcctgcacggcgggcaaccccccgagggggacccggacttggccaagatcctggaggaggtccgctacattgccaaccgcttccgctgccaggacgaaagcgaggcggtctgcagcgagtggaagttcgccgcctgtgtggtggaccgcctgtgcctcatggccttctcggtcttcaccatcatctgcaccatcggcatcctgatgtcggctcccaacttcgtggaggccgtgtccaaagactttgcgtaaccacgcctggttctgtacatgtggaaaactcacagatgggcaaggcctttggcttggcgagatttgggggtgctaatccaggacagcattacacgccacaactccagtgttcccttctggctgtcagtcgtgttgcttacggtttctttgttactttaggtagtagaatctcagcactttgtttcatattctcagatgggctgatagatatccttggcacatccgtaccatcggtcagcagggccactgagtagtcattttgcccattagcccactgcctggaaagcccttcggagagctccccatggctcctcaccaccgagacagttggttttgcatgtctgcatgaaggtctacctgaaaattcaacatttgctttttgcttgtgtacaaacccagattgaagctaaaataaaccagactcactaaatcctttcc

SEQ ID NO: 24285 - protein, 502 aa, Homo sapiens; identical to SEQ ID NO: 3215

SEQ ID NO: 24286 - DNA, 1826 bp, Homo sapiens
cgcaggcgcaggcccgggcgacagccgagacgtggagcgcgccggctcgctgcagctccgggactcaacatgcgctgctcgccgggaggcgtctggctggcgctggccgcgtcgctcctgcacgtgtccctgcaaggcgagttccagaggaagctttacaaggagctggtcaagaactacaatcccttggagaggcccgtggccaatgactcgcaaccactcaccgtctacttctccctgagcctcctgcagatcatggacgtggatgagaagaaccaagttttaaccaccaacatttggctgcaaatggcatattcaagagttcctgctacatcgatgtacgctggtttccctttgatgtgcagcactgcaaactgaagtttgggtcctggtcttacggaggctggtccttggatctgcagatgcaggaggcagatatcagtggctatatccccaatggagaatgggacctagtgggaatccccggcaagaggagtgaaaggttctatgagtgctgcaaagagccctaccccgatgtcaccttcacagtgaccatgcgccgcaggacgctctactatggcctcaacctgctgatcccctgtgtgctcatctccgccctcgccctgctggtgttcctgcttcctgcagattccggggagaagatttccctggggataacagtcttactctctcttaccgtcttcatgctgctcgtggctgagatcatgcccgcaacatccgattcggtaccattgatagcccagtacttcgccagcaccatgatcatcgtgggcctctcggtggtggtgacagtgatcgtgctgcagtaccaccaccacgaccccgacgggggcaagatgcccaagtggaccagagtcatccttctgaactggtgcgcgtggttcctgcgaatgaagaggcccggggaggacaaggtgcgcccggcctgccagcacaagcagcggcgctgcagcctggccagtgtggagatgagcgccgtggcgccgccgcccgccagcaacgggaacctgctgtacatcggcttccgcggcctggacggcgtgcactgtgtcccgacccccgactctggggtagtgtgtggccgcatggcctgctcccccacgcacgatgagcacctcctgcacggcgggcaaccccccgagggggacccggacttggccaagatcctggaggaggtccgctacattgccaaccgcttccgctgccaggacgaaagcgaggcggtctgcagcgagtggaagttcgccgcctgtgtggtggaccgcctgtgcctcatggccttctcggtcttcaccatcatctgcaccatcggcatcctgatgtcggctcccaacttcgtggaggccgtgtccaaagactttgcgtaaccacgcctggttctgtacatgtggaaaactcacagatgggcaaggcctttggcttggcgagatttgggggtgctaatccaggacagcattacacgccacaactccagtgttcccttctggctgtcagtcgtgttgcttacggtttctttgttactttaggtagtagaatctcagcactttgtttcatattctcagatgggctgatagatatccttggcacatccgtaccatcggtcagcagggccactgagtagtcattttgcccattagcccactgcctggaaagcccttcggagagctccccatggctcctcaccaccgagacagttggttttgcatgtctgcatgaaggtctacctgaaaattcaacatttgctttttgcttgtgtacaaacccagattgaagctaaaataaaccagactcactaaatcctttcc

SEQ ID NO: 24287 - protein, 321 aa, Homo sapiens
MQEADISGYIPNGEWDLVGIPGKRSERFYECCKEPYPDVTFTVTMRRRTLYYGLNLLIPCVLISALALLVFLLPADSGEKISLGITVLLSLTVFMLLVAEIMPATSDSVPLIAQYFASTMIIVGLSVVVTVIVLQYHHHDPDGGKMPKWTRVILLNWCAWFLRMKRPGEDKVRPACQHKQRRCSLASVEMSAVAPPPASNGNLLYIGFRGLDGVHCVPTPDSGVVCGRMACSPTHDEHLLHGGQPPEGDPDLAKILEEVRYIANRFRCQDESEAVCSEWKFAACVVDRLCLMAFSVFTIICTIGILMSAPNFVEAVSKDFA

SEQ ID NO: 24288 - DNA, 3112 bp, Homo sapiens
cgcaggcgcaggcccgggcgacagccgagacgtggagcgcgccggctcgctgcagctccgggactcaacatgcgctgctcgccgggaggcgtctggctggcgctggccgcgtcgctcctgcacgtgtccctgcaaggcgagttccagaggaagctttacaaggagctggtcaagaactacaatcccttggagaggcccgtggccaatgactcgcaaccactcaccgtctacttctccctgagcctcctgcagatcatggacgtggatgagaagaaccaagttttaaccaccaacatttggctgcaaatggcatattcaagagttcctgctacatcgatgtacgctggtttccctttgatgtgcagcactgcaaactgaagtttgggtcctggtcttacggaggctggtccttggatctgcagatgcaggaggcagatatcagtggctatatccccaatggagaatgggacctagtgggaatccccggcaagaggagtgaaaggttctatgagtgctgcaaagagccctaccccgatgtcaccttcacagtgaccatgcgccgcaggacgctctactatggcctcaacctgctgatcccctgtgtgctcatctccgccctcgccctgctggtgttcctgcttcctgcagattccggggagaagatttccctggggataacagtcttactctctcttaccgtcttcatgctgctcgtggctgagatcatgcccgcaacatccgattcggtaccattgatagcccagtacttcgccagcaccatgatcatcgtgggcctctcggtggtggtgacagtgatcgtgctgcagtaccaccaccacgaccccgacgggggcaagatgcccaagtggaccagagtcatccttctgaactggtgcgcgtggttcctgcgaatgaagaggcccggggaggacaaggtgcgcccggcctgccagcacaagcagcggcgctgcagcctggccagtgtggagatgagcgccgtggcgccgccgcccgccagcaacgggaacctgctgtacatcggcttccgcggcctggacggcgtgcactgtgtcccgacccccgactctggggtagtgtgtggccgcatggcctgctcccccacgcacgatgagcacctcctgcacggcgggcaaccccccgagggggacccggacttggccaagatcctggaggaggtccgctacattgccaaccgcttccgctgccaggacgaaagcgaggcggtctgcagcgagtggaagttcgccgcctgtgtggtggaccgcctgtgcctcatggccttctcggtcttcaccatcatctgcaccatcggcatcctgatgtcggctcccaacttcgtggaggccgtgtccaaagactttgcgtaaccacgcctggttctgtacatgtggaaaactcacagatgggcaaggcctttggcttggcgagatttgggggtgctaatccaggacagcattacacgccacaactccagtgttcccttctggctgtcagtcgtgttgcttacggtttctttgttactttaggtagtagaatctcagcactttgtttcatattctcagatgggctgatagatatccttggcacatccgtaccatcggtcagcagggccactgagtagtcattttgcccattagcccactgcctggaaagcccttcggagagctccccatggctcctcaccaccgagacagttggttttgcatgtctgcatgaaggtctacctgaaaattcaacatttgctttttgcttgtgtacaaacccagattgaagctaaaataaaccagactcactaaatcctttccaataattgactggtggaaggaaaacaaaaaacaaaaactaaaaacctcttagcttttctgcaattcaactttttatttttatttttatttctatcaaagacggtagagagaaacagcttgatgctgtttctacattaaaaaaaaaaaaaaaagacagactgttggtcttactaaggatgtttttaccagcctgcctgacttctgcaaacctaccctgtcaaggagatcaaagggacgcaggtttctgtttattctgaacaagggccaggccccgcggagtgtctttggtggatcccagataactcctaggtgctgctctcagacactgaggagttgagcaaatctgttctattctgcagaacccacaggacaaataagagttctactagaattaacagcccaaaagaatagctacagctaagtgaagccacttacgtgggctttaaaaaaataatgtgttagctgattcacatgcactggagttaattagtcttagaaatgtgtgcatccatacaaatgcacaacataaagtgaacatattcctaggccctttctgcctgtgtcagggccaggaagtagaggctgggaactcttctggtccccagtatggcaggcgccagggaggggatggtgtggcccatcccttctctggatacctggccagtggcaggcagcagggaggagctggccgaccctcagtgactgacaagccagcaattctgagttctggcctttgggagtctgcctgctccaagccagtccaccccagctgcagccccaaaagctggctcaaagtccttgggtggattcactggagatgggcaacttaaaacaagagaaactttaatttttaaacctaagtgatgatacagctcttcccttagattatcgcccaggctggagtgcagtggcatgatctcagctcactgcaagctccacctcctgggttcatgccattctcctgcctcagcctccccccgagtaactgggaatacaggcgcccgccaccatgcctggctaattttttgtatttttagtagagatagggtttcatcatgttagccaggatggtctcattcttattctttaatgagatcagagggtaattcaccaagaaagacctctcctgttccattgtgtcatccaacaactgctcagagctcaaaattatagaaggcttctgagcccctagagatttttaatttgcttctaatccctgaggtgggaacatcatgagggaagatttgattttcagagttaaataaattgtatgtgcttttccagcc

SEQ ID NO: 24289 - protein, 321 aa, Homo sapiens; identical to SEQ ID NO: 24287

SEQ ID NO: 24290 - DNA, 3596 bp, Homo sapiens
cgcaggcgcaggcccgggcgacagccgagacgtggagcgcgccggctcgctgcagctccgggactcaacatgcgctgctcgccgggaggcgtctggctggcgctggccgcgtcgctcctgcacgtgtccctgcaaggcgagttccagaggaagctttacaaggagctggtcaagaactacaatcccttggagaggcccgtggccaatgactcgcaaccactcaccgtctacttctccctgagcctcctgcagatcatggacgtggatgagaagaaccaagttttaaccaccaacatttggctgcaaatggcatattcaagagttcctgctacatcgatgtacgctggtttccctttgatgtgcagcactgcaaactgaagtttgggtcctggtcttacggaggctggtccttggatctgcagatgcaggaggcagatatcagtggctatatccccaatggagaatgggacctagtgggaatccccggcaagaggagtgaaaggttctatgagtgctgcaaagagccctaccccgatgtcaccttcacagtgaccatgcgccgcaggacgctctactatggcctcaacctgctgatcccctgtgtgctcatctccgccctcgccctgctggtgttcctgcttcctgcagattccggggagaagatttccctggggataacagtcttactctctcttaccgtcttcatgctgctcgtggctgagatcatgcccgcaacatccgattcggtaccattgatagcccagtacttcgccagcaccatgatcatcgtgggcctctcggtggtggtgacagtgatcgtgctgcagtaccaccaccacgaccccgacgggggcaagatgcccaagtggaccagagtcatccttctgaactggtgcgcgtggttcctgcgaatgaagaggcccggggaggacaaggtgcgcccggcctgccagcacaagcagcggcgctgcagcctggccagtgtggagatgagcgccgtggcgccgccgcccgccagcaacgggaacctgctgtacatcggcttccgcggcctggacggcgtgcactgtgtcccgacccccgactctggggtagtgtgtggccgcatggcctgctcccccacgcacgatgagcacctcctgcacggcgggcaaccccccgagggggacccggacttggccaagatcctggaggaggtccgctacattgccaaccgcttccgctgccaggacgaaagcgaggcggtctgcagcgagtggaagttcgccgcctgtgtggtggaccgcctgtgcctcatggccttctcggtcttcaccatcatctgcaccatcggcatcctgatgtcggctcccaacttcgtggaggccgtgtccaaagactttgcgtaaccacgcctggttctgtacatgtggaaaactcacagatgggcaaggcctttggcttggcgagatttgggggtgctaatccaggacagcattacacgccacaactccagtgttcccttctggctgtcagtcgtgttgcttacggtttctttgttactttaggtagtagaatctcagcactttgtttcatattctcagatgggctgatagatatccttggcacatccgtaccatcggtcagcagggccactgagtagtcattttgcccattagcccactgcctggaaagcccttcggagagctccccatggctcctcaccaccgagacagttggttttgcatgtctgcatgaaggtctacctgaaaattcaacatttgctttttgcttgtgtacaaacccagattgaagctaaaataaaccagactcactaaatcctttccaataattgactggtggaaggaaaacaaaaaacaaaaactaaaaacctcttagcttttctgcaattcaactttttatttttatttttatttctatcaaagacggtagagagaaacagcttgatgctgtttctacattaaaaaaaaaaaaaaaagacagactgttggtcttactaaggatgtttttaccagcctgcctgacttctgcaaacctaccctgtcaaggagatcaaagggacgcaggtttctgtttattctgaacaagggccaggccccgcggagtgtctttggtggatcccagataactcctaggtgctgctctcagacactgaggagttgagcaaatctgttctattctgcagaacccacaggacaaataagagttctactagaattaacagcccaaaagaatagctacagctaagtgaagccacttacgtgggctttaaaaaaataatgtgttagctgattcacatgcactggagttaattagtcttagaaatgtgtgcatccatacaaatgcacaacataaagtgaacatattcctaggccctttctgcctgtgtcagggccaggaagtagaggctgggaactcttctggtccccagtatggcaggcgccagggaggggatggtgtggcccatcccttctctggatacctggccagtggcaggcagcagggaggagctggccgaccctcagtgactgacaagccagcaattctgagttctggcctttgggagtctgcctgctccaagccagtccaccccagctgcagccccaaaagctggctcaaagtccttgggtggattcactggagatgggcaacttaaaacaagagaaactttaatttttaaacctaagtgatgatacagctcttcccttagattatcgcccaggctggagtgcagtggcatgatctcagctcactgcaagctccacctcctgggttcatgccattctcctgcctcagcctccccccgagtaactgggaatacaggcgcccgccaccatgcctggctaattttttgtatttttagtagagatagggtttcatcatgttagccaggatggtctcattcttattctttaatgagatcagagggtaattcaccaagaaagacctctcctgttccattgtgtcatccaacaactgctcagagctcaaaattatagaaggcttctgagcccctagagatttttaatttgcttctaatccctgaggtgggaacatcatgagggaagatttgattttcagagttaaataaattgtatgtgcttttccagccatctggctcactcatttctgggtaatgcacatgactttgtttgcactggaggaagatggaagcttgcgtgtgtgcggtgtgtgtgtgtgtgtaagtgtgaggtaccttgtgtgtgacaagagacctcacttacgagaaagttggtggatcaggacattccagcctcaggcggcttggagcaggatcattcctcagcaggcattccttccacatgctatggatgaaccatgcacaagattttcggtttttttttttttttctgttacagtgtctttagaaacaagtagaagtgttttgatatataaaaggaatgcttcatttcttatcattatcccaaaattgatccctcccacatttttgctttaaaaagaaacctttttggttttgtattttatacaggaacacaaaatgcaaacaagttgtgcatattttggactctcaaataacttctctgtcctttaataaagtaataataaggaataga

SEQ ID NO: 24291 - protein, 321 aa, Homo sapiens; identical to SEQ ID NO: 24287

SEQ ID NO: 24292 - DNA, 1475 bp, Homo sapiens
cgccgcagctcgcgtgacgcaccgcggggcctcgcccgggtgttcgctccgccgcctgtccgcggatcggcgctgcgagccccgcggctgcctgcgggacacctgagcgcggagggtgcggcaccttggcaccttgaccctgtggcagggacatctcggcccaggaaagaatgaggtttaggcacggcctaaccacctaagtgagggcactgaagctgccgggggaagggcaaggtccgcgttgcagagcccaagcccagtggcgcaggatttgttttggtctcagtttgcttcatctctggaatggagatggtttcctatgtgatcatgaaaatttctcccagctctgaagaccttttattttgtaagaatcattgtgaaggtatgggcttggcaaatgaatggaaagatgagcaatgggagaggaaagaattgaagagggctgtgaggtttgaagaatggcatcccccatgaagtggcgctgaaagatcacgatagcacagttccatgatgtgaaataccacaagtctgcaatttttcggtcttgagagtgtcgctgggctgagaggatggaaatctttcagtaattataccagtttgtattcgtctcacatttgggaccaaatacaaatccgatccactctttctccctgtgaatattcataaaaaacaaagtgccaattctggtctaatcatgtatggaaccaaatatgttgatgagtcctaagtatatactgtatgtatgtatacatatgaatatatatatttgtacacactaattttgcttgtgtcctcctctgtgcaatttgtttgtttagtataggggttgctgttataatgtgttaataagctgctgaaagcttggcacctattacttgaaatgacagctatgttagaagcctattaacactccatagcagcagctctgcagctactagaaatgaatttcaaagaaggtaaatgaacaaaagcgattcatatctctaaggaaagcaaataccatgcctagaaccatatatactttggaaatgtacagtgtataaaatgaaaaacctcttccagttaaagaaacagcggaagggaatatttggggaaaggaagactgcctaaaagatttccaaacaaccttgaagatgtaaatgtaaaggataccaaacataacttcctctctttgtttctattgtatttaaaccagatccatgtcaaacttataagaacagaatatagtacaggtagaggaaattcacttttcatgagcaaaagttaaatcatctggatttagctcaaacttctttttcttcatttctgagcttagaaggacaccctttgctattgttctcggaagcagggctctttatgagtcagcttgctctgcttttgaactactttacttacttttgactgtcattggaatttgcaagatggttgaaagtcctgggtaaaccttaaccatgataataaaaatgtggtaagtt

SEQ ID NO: 24293 - protein, 56 aa, Homo sapiens
MEMVSYVIMKISPSSEDLLFCKNHCEGMGLANEWKDEQWERKELKRAVRFEEWHPP

SEQ ID NO: 24294 - DNA, 495 bp, Homo sapiens
ctaaccacctaagtgagggcactgaagctgccgggggaagggcaaggtccgcgttgcagagcccaagcccagtggcgcaggatttgttttggtctcagtttgcttcatctctggaatggagatggtttcctatgtgatcatgaaaatttctcccagctctgaagaccttttattttcatcccccatgaagtggcgctgaaagatcacgatagcacagttccatgatgtgaaataccacaagtctgcaatttttcggtcttgagagtgtcgctgggctgagaggatggaaatctttcagtaattataccagtttgtattcgtctcacatttgggaccaaatacaaatccgatccactctttctccctgtgaatattcataaaaaacaaagtgccaattctggtctaatcatgtatggaaccaaatatgttgatgagtcctaagtatatactgtatgtatgtatacatatgaatatatatatttgtacacactaatt

SEQ ID NO: 24295 - protein, 49 aa, Homo sapiens
VRALKLPGEGQGPRCRAQAQWRRICFGLSLLHLWNGDGFLCDHENFSQL

SEQ ID NO: 24296 - DNA, 371 bp, Homo sapiens
gagatgatgtttccctatgttgcctaagctggtttcgaactcctgggctcagcatcccccatgaagtggcgctgaaagatcacgatagcacagttccatgatgtgaaataccacaagtctgcaatttttcggtcttgagagtgtcgctgggctgagaggatggaaatctttcagtaattataccagtttgtattcgtctcacatttgggaccaaatacaaatccgatccactctttctccctgtgaatattcataaaaaacaaagtgccaattctggtctaatcatgtatggaaccaaatatgttgatgagtcctaagtatatactgtatgtatgtatacatatgaatatatatatttgtacacactaatt

SEQ ID NO: 24297 - protein, 32 aa, Homo sapiens
DDVSLCCLSWFRTPGLSIPHEVALKDHDSTVP

SEQ ID NO: 24298 - DNA, 691 bp, Homo sapiens
ggcacttaccctccttcctgcaacgatgtgaagaaggacaagtttgcttccccttctgccatgattgtaagaagactggtggtgctgctggaataaaaggagtgatggaagacaggtgagggtgtgaggagaaaagatttggtgaatcacagttatgtttcctggcattaaatcacccttgaatatttctataataaatgaaattcaatagggcctgaaaagggggtcaaccaagtactgcgactttcacaataaaatttgtatgtaacaactgagtttcgtgatggacagaatgctagaagaggattgagaaaagagcagcccaaaagccacctggaaaataaccaaatatcaaaattcactgtaggacattcctcatggggccatctgaaatccttcttattttaatatatgttgtagttacattttttatagttcccacctatcaaatttgtgagagctattcatacctgaagagcatttgttcttcgatccacactatcaaaatttcatggatttctgtcacattttaattataaaaaggattactcttgaaatcttactacttgaattgttgtaaatccttattttcattgtcaagaaatttgcatttcatattatttattcagaaaagcatgattccagttgtataaatgtcatatacatgtatatatctagtcattaagaaaaa

SEQ ID NO: 24299 - protein, 51 aa, Homo sapiens
MGPSEILLILIYVVVTFFIVPTYQICESYSYLKSICSSIHTIKISWISVTF

SEQ ID NO: 24300 - DNA, 1000 bp, Homo sapiens
tggtgaaaataaaattggaagagaaaatactattctgggttgggtatccttaaggattagaaccacaggactcctccaagtctgtaggcctactttctctatgagaatcgtcatgttagtccatctaactgacctcatctctctttcaatgcaggtatcactaccattaaagttaacattcgtaatgccaattccctgggaggaggcttccattgctggacctgcgatgtccggcgccgaggcaccttacagtcctacttggactgaacaggcctgatggagcttgtggctggcctcagatacacctaagaagcttaggggcaaggttcattctcctgctttaaaaagtgcatgaactgtagtgctttaaacaatcatctccttaacaggggtcgtaagcctggtttgcttctattacttttctttgacataaagaaaataacttctgctaggtattactctctactcctaaagttatttactatttggcttcaagtataaaattttggtgaatgtgtaccaagaaaaaattagtcacctgagtaacttggccactaataattaaccatctacctctgtttttaattttctttccaaaaggcagcttgaaatgttggtcctaatcttaattttttttcctcttctatagacttgagaatgtttttctctaaatgagagaaagacttagaatgtacacagatccaaaatagaatcagattatctcttttttttctctttccaaaaatttaggaatgtttagtgtaattggatttcgctatcagttcccatccttaagttttgatattcaatatctgatagatacactgcatctttggtcatctaagatttgtttacaaatgtgcaaattatttagagcatagactttataagcattaaaaaaaactaatggaggtaaaacctaaatgcgatgtgaaataattttagtgttgataccgtatgtgtatttttattctaataaacttttgtgttccagattgaa

SEQ ID NO: 24301 - protein, 58 aa, Homo sapiens
MRIVMLVHLTDLISLSMQVSLPLKLTFVMPIPWEEASIAGPAMSGAEAPYSPTWTEQA

SEQ ID NO: 24302 - DNA, 3913 bp, Homo sapiens
accccgctccgggcgcgctctcgggaaggcttggaccgacgcggcccagaggccaggaacattccgcgcgtggaccagccgggccagggcgatgctgcgggtgcggtgtctgcgcggcgggagccgcggcgccgaggcggtgcactacatcggatctcgggtgcgtgcgccaccggcctcgtctggcggccgcgtgactcactcgatcctgcgggcggcgtggagcactcgctcgctccctgcccggagccgccaccttccctcgctttccctagccggaattgcacgagagtgtcccttctggtatccctgggaagctcagcttcaagagccttcgcaggctccaggagctgggcggcgtcccccagtcagggggaacttgcgttgcggctccagcccttggggtccacttgctgtctgcgcgtccgcggcctgctggcccacggcgcagggggcgccgcccccctctaccggaccttggtgcgctgcaccaagcttcccgctcggagcaaggggttgggacgacggaggctcctcttagtaaaagggtggcgttattggggttcagtagcctgagtgggcgtcgagttggggagatttctggaaaatgcgtgtggggtagatggatggggagaagaggcaagcaaagtgggaatcggggacggggagcgagcgaccagattcactccaagtataacatgggatcccacgtctggagaggagtcggggcgagtgcagcctgtaagcagagtttctgcgctccccgccctcggctgccctggcagcagaccctcccatgcttctagtactggaatcgctccgacattctggcttcctcccagcaactggttcctgaacagctgtcattctccgtctttcttctgcctccacccgagttctcctcctgcccacttcctaaggcttttaacagagcaggatagagatttggggggttgaggtttgctcaggggttgagggaccctccctgctctagattttataggccatgcatttttaaaaggcttttgaagtttttagatctccttcttatttgtttgaatttacgcctgagctaatcctgaccttggctagggtactgtggaccatctgtaaaatggagcagatggcagttgctcactctcagaattgaagtgccaaagaatgcgaagtgtatgtcaaagatgaaaaaaatttgatttgaagctggttattctgaaagataaggtcctttacaaatgttcccaacttttcatttgtaaaaaaaaataaataaaaagcctaatattggtaacctttgatacttaagggaaaaggaggttccgtccccagctgagactggcgggaagttttagagcagctgtctatggttttctgagaggaggactgacccatctgcaaaacagttgcttaaagcttgagtgcaggaattgcattctgagataaagatgggggtgtatggtagctggggacacggtcttctgaggagttttaaagagttacagcaattaatagataagaagacaatttgtagataaacaagagggttaaaaaaattatctgtaatcccactacccacctacacactgttaacgtcttggtttatgctgttctaaaggggtttaagtggcaatgttatgctggatttttactccatctccacttcctcctctctgtaagtactgatagagcaatgcaatacaataatcttttctttgttcttggaagcttggacgaaccttgacaggatgggtgcagcgaactttccagagcacccaggcagctacggcttcctcccggaactcctgtgcagctgacgacaaagccactgagcctctgcccaaggactgccctgtctcttcttacaacgaatgggaccccttagaggaagtgatagtgggcagagcagaaaacgcctgtgttccaccgttcaccatcgaggtgaaggccaacacatatgaaaagtactggccattttaccagaagcaaggagggcattattttcccaaagatcatttgaaaaaggctgttgctgaaattgaagaaatgtgcaatattttaaaaacggaaggagtgacagtaaggaggcctgaccccattgactggtcattgaagtataaaactcctgattttgagtctacgggtttatacagtgcaatgcctcgagacatcctgatagttgtgggcaatgagattatcgaggctcccatggcatggcgttcacgcttctttgagtaccgagcgtacaggtcaattatcaaagactacttccaccgtggcgccaagtggacaacagctcctaagcccacaatggctgatgagctttataaccaggattatcccatccactctgtagaagacagacacaaattggctgctcagggaaaatttgtgacaactgagtttgagccatgctttgatgctgctgacttcattcgagctggaagagatatttttgcacagagaagccaggttacaaactacctaggcattgaatggatgcgtaggcatcttgctccagactacagagtgcatatcatctcctttaaagatcccaatcccatgcatattgatgctaccttcaacatcattggacctggtattgtgctttccaaccctgaccgaccatgtcaccagattgatcttttcaagaaagcaggatggactatcattactcctccaacaccaatcatcccagacgatcatccactctggatgtcatccaaatggctttccatgaatgtcttaatgctagatgaaaaacgtgttatggtggatgccaatgaagttccaattcaaaagatgtttgaaaagctgggtatcactaccattaaagttaacattcgtaatgccaattccctgggaggaggcttccattgctggacctgcgatgtccggcgccgaggcaccttacagtcctacttggactgaacaggcctgatggagcttgtggctggcctcagatacacctaagaagcttaggggcaaggttcattctcctgctttaaaaagtgcatgaactgtagtgctttaaacaatcatctccttaacaggggtcgtaagcctggtttgcttctattacttttctttgacataaagaaaataacttctgctaggtattactctctactcctaaagttatttactatttggcttcaagtataaaattttggtgaatgtgtaccaagaaaaaattagtcacctgagtaacttggccactaataattaaccatctacctctgtttttaattttctttccaaaaggcagcttgaaatgttggtcctaatcttaattttttttcctcttctatagacttgagaatgtttttctctaaatgagagaaagacttagaatgtacacagatccaaaatagaatcagattatctctttttttctaaaggagagaaagacttagaacatacacagatcctaagtagaaccaggtaattgtctctttttctaataaggaatttgggtaatttttaattttttgttttttaaaaaataacctagactatgcaaaacatcaaagtgaattttccatgaatgtttttaatattctcatctcaacattgtgatatatgctactaaaaaccttttcatatacatcttacctcatttcaagtgaattattttaatctttttctctctttccaaaaatttaggaatgtttagtgtaattggatttcgctatcagttcccatccttaagttttgatattcaatatctgatagatacactgcatctttggtcatctaagatttgtttacaaatgtgcaaattatttagagcatagactttataagcattaaaaaaaactaatggaggtaaaacctaaatgcgatgtgaaataattttagtgttgataccgtatgtgtatttttattctaataaacttttgtgttccagattgaa

SEQ ID NO: 24303 - protein, 294 aa, Homo sapiens
MCNILKTEGVTVRRPDPIDWSLKYKTPDFESTGLYSAMPRDILIVVGNEIIEAPMAWRSRFFEYRAYRSIIKDYFHRGAKWTTAPKPTMADELYNQDYPIHSVEDRHKLAAQGKFVTTEFEPCFDAADFIRAGRDIFAQRSQVTNYLGIEWMRRHLAPDYRVHIISFKDPNPMHIDATFNIIGPGIVLSNPDRPCHQIDLFKKAGWTIITPPTPIIPDDHPLWMSSKWLSMNVLMLDEKRVMVDANEVPIQKMFEKLGITTIKVNIRNANSLGGGFHCWTCDVRRRGTLQSYLD

SEQ ID NO: 24304 - DNA, 2585 bp, Homo sapiens
tgcgacgctcgggtctgggtccgggtccggacgtgcaacagaagccgtcagtggccccgctggctaaaaaagggcaagcatcggaggctcgagccagcggccgcggcgcttcccgacagttcctaattcggggcgctacgccggccccaccacctgttcccggcagccaatggggccgcggggggcggccggggcggagcgcggctacaaaaggcctcgggccccgcgcgcccgcccaccccgctccgggcgcgctctcgggaaggcttggaccgacgcggcccagaggccaggaacattccgcgcgtggaccagccgggccagggcgatgctgcgggtgcggtgtctgcgcggcgggagccgcggcgccgaggcggtgcactacatcggatctcggcttggacgaaccttgacaggatgggtgcagcgaactttccagagcacccaggcagctacggcttcctcccggaactcctgtgcagctgacgacaaagccactgagcctctgcccaaggactgccctgtctcttcttacaacgaatgggaccccttagaggaagtgatagtgggcagagcagaaaacgcctgtgttccaccgttcaccatcgaggtgaaggccaacacatatgaaaagtactggccattttaccagaagcaaggagggcattattttcccaaagatcatttgaaaaaggctgttgctgaaattgaagaaatgtgcaatattttaaaaacggaaggagtgacagtaaggaggcctgaccccattgactggtcattgaagtataaaactcctgattttgagtctacgggtttatacagtgcaatgcctcgagacatcctgatagttgtgggcaatgagattatcgaggctcccatggcatggcgttcacgcttctttgagtaccgagcgtacaggtcaattatcaaagactacttccaccgtggcgccaagtggacaacagctcctaagcccacaatggctgatgagctttataaccaggattatcccatccactctgtagaagacagacacaaattggctgctcagggaaaatttgtgacaactgagtttgagccatgctttgatgctgctgacttcattcgagctggaagagatatttttgcacagagaagccaggttacaaactacctaggcattgaatggatgcgtaggcatcttgctccagactacagagtgcatatcatctcctttaaagatcccaatcccatgcatattgatgctaccttcaacatcattggacctggtattgtgctttccaaccctgaccgaccatgtcaccagattgatcttttcaagaaagcaggatggactatcattactcctccaacaccaatcatcccagacgatcatccactctggatgtcatccaaatggctttccatgaatgtcttaatgctagatgaaaaacgtgttatggtggatgccaatgaagttccaattcaaaagatgtttgaaaagctgggtatcactaccattaaagttaacattcgtaatgccaattccctgggaggaggcttccattgctggacctgcgatgtccggcgccgaggcaccttacagtcctacttggactgaacaggcctgatggagcttgtggctggcctcagatacacctaagaagcttaggggcaaggttcattctcctgctttaaaaagtgcatgaactgtagtgctttaaacaatcatctccttaacaggggtcgtaagcctggtttgcttctattacttttctttgacataaagaaaataacttctgctaggtattactctctactcctaaagttatttactatttggcttcaagtataaaattttggtgaatgtgtaccaagaaaaaattagtcacctgagtaacttggccactaataattaaccatctacctctgtttttaattttctttccaaaaggcagcttgaaatgttggtcctaatcttaattttttttcctcttctatagacttgagaatgtttttctctaaatgagagaaagacttagaatgtacacagatccaaaatagaatcagattatctctttttttctaaaggagagaaagacttagaacatacacagatcctaagtagaaccaggtaattgtctctttttctaataaggaatttgggtaatttttaattttttgttttttaaaaaataacctagactatgcaaaacatcaaagtgaattttccatgaatgtttttaatattctcatctcaacattgtgatatatgctactaaaaaccttttcatatacatcttacctcatttcaagtgaattattttaatctttttctctctttccaaaaatttaggaatgtttagtgtaattggatttcgctatcagttcccatccttaagttttgatattcaatatctgatagatacactgcatctttggtcatctaagatttgtttacaaatgtgcaaattatttagagcatagactttataagcattaaaaaaaactaatggaggtaaaacctaaatgcgatgtgaaataattttagtgttgataccgtatgtgtatttttattctaataaacttttgtgttccagattgaa

SEQ ID NO: 24305 - protein, 476 aa, Homo sapiens
MGPRGAAGAERGYKRPRAPRARPPRSGRALGKAWTDAAQRPGTFRAWTSRARAMLRVRCLRGGSRGAEAVHYIGSRLGRTLTGWVQRTFQSTQAATASSRNSCAADDKATEPLPKDCPVSSYNEWDPLEEVIVGRAENACVPPFTIEVKANTYEKYWPFYQKQGGHYFPKDHLKKAVAEIEEMCNILKTEGVTVRRPDPIDWSLKYKTPDFESTGLYSAMPRDILIVVGNEIIEAPMAWRSRFFEYRAYRSIIKDYFHRGAKWTTAPKPTMADELYNQDYPIHSVEDRHKLAAQGKFVTTEFEPCFDAADFIRAGRDIFAQRSQVTNYLGIEWMRRHLAPDYRVHIISFKDPNPMHIDATFNIIGPGIVLSNPDRPCHQIDLFKKAGWTIITPPTPIIPDDHPLWMSSKWLSMNVLMLDEKRVMVDANEVPIQKMFEKLGITTIKVNIRNANSLGGGFHCWTCDVRRRGTLQSYLD

SEQ ID NO: 24306 - DNA, 1102 bp, Homo sapiens
agggcagactgcgttgctagcagctgagtgaaggccgaaagggccaatggaaacgttagacgacgctcgggcctctgggtagagcgttggtgtccgctttcgtgaaatcgagttgcctaacccagagctttcccgagatggtcttcgttacaggtgtctgggaggcggcttaagctcacttcactaggtcattaagcatgtactttggtggttacatatatcttggaagtcaccggctttacattctgttttcctggccttcgaactggagcatcagtactaccgccgttggaatagcaacctagagactttgctattttgtgaagaaactctaactatccgcatgggcacagaattttgggtgctctggtgcaaatgtctcaggtgacttggcgtaactgagaatacagccttgggaccttcgttctggaggctgggaagtcaaagacaaggcactggcagattccatgactggaaaggagagaaggtctctgaggaagtgacattccagctgagacgtgaaggataagtagaaaccaagcagaagaattggaagaggaaagggaagagggaaaagcctgtgccaatgccctgagattggaatatgctttttgtgtttaagaaattaacagaaggagaagcacatctctggctgccctcagtacactaagagaatcagacctcagaggtggctgcattttattgttgggaataagaagactgcaattcaggaagacatatagtagtctataagtgattcaggactggaactcagttatcctaattccctctcggaggctctttccaccatgccatctgctcgtctggtgctttccatccatgaactctggaaaacaagcttgagataccaaaattgaaaagacagctcatcaaaaatgaatagttataattctataagtacaaaaatgaaatactcaaatctcttgccccccctcctgctaggagcataaatgttaacctgagttctctagctctgtacaaatccacagcaattaagactgcactgtgagggaaaatacttttctaaaaaagaatcctgatcaagttgaaacaaaaattttaaaacatgaaatggaaggaa

SEQ ID NO: 24307 - protein, 35 aa, Homo sapiens
MYFGGYIYLGSHRLYILFSWPSNWSISTTAVGIAT

SEQ ID NO: 24308 - DNA, 2564 bp, Homo sapiens
atctgcttccggcctgcgagctcggtgttccgctttttgtgggccgggtgggtttcctaatctggtttcgtctgcctggttcatctgtgtgcgatggctccggactcggatcccttccctgaagggccgctcttaaagctgctacccttagacgctagagaccggggcacccagcgctgccgcctgggcccggccgccctccacgccctgggcgcgcgcttgggctcggcagtgaagatctcgctacccgacggcggctcctgcctctgcactgcctggcctcggcgggacggagcggacggctttgtgcagctggacccgctgtgcgcgagccccggggcggcggtcggggcgtcgagatcccggaggagtctcagcctgaatcgcctcctcctagtgccctgtccgcccctgcggcgcgtcgccgtgtggccggtgttgcgagagcgggcaggcgcgcccggtgcccggaatacagccgcggtgctggaggcggcacaggagctgctgagaaaccgaccgatctccctgggccacgtggtggtcgctccgccaggcgctcctggcctggtggctgccttgcacatcgtcggcgggacgcccagtcccgatcccgctgggctggtcacccctcgtacccgcgtcagccttggcggggagcctccgtcggaagcccagccgcagcccgaggtgcccctgggaggtctttcggaggcggccgactcgctgcgggagctcctccgcctcccgctccgctacccgcgcgccctgaccgcgctgggcttagcggtgcctcgcggggtgctcctggcggggccccccggagtgggcaagacccagctggtgcgggccgtggcgcgcgaggcgggcgcggagctgctggcagtcagcgccccggcgctgcagggttcccggcctggggagaccgaggagaacgtgcggcgggtcttccagcgcgcccgggaactggccagccgcggacccagcctcctcttcctggacgagatggacgccttgtgtccccagcggggcagtcgagcacccgagagccgcgtagtggcccaggtgttgacgctgctggacggcgccagtggggaccgcgaggtcgtggttgtgggagccactaaccggccggacgctctagacccagcgctgcgtaggcccgggagatttgaccgagaggtggtcattgggactcccacacttaaacaaagaaaggaaattctgcaagtgattacctcgaagatgcccatctccagtcatgttgatttgggccttcttgcagaaatgacagttggctatgttggtgccgacctgacagcactctgtagggaggctgccatgcatgccctccttcatagtgagaagaaccaggacaatcctgtgattgatgaaatagacttccttgaagcttttaaaaatattcagccctcatcgtttcgaagcgtcattggattaatggatatcaagcctgttgactgggaggagattggtggccttgaagatgtaaaactgaagttaaaacagagcattgagtggcctctgaaattcccttgggaatttgttagaatgggcctgacacaaccaaagggagttctcctctatgggccccctggatgtgctaaaaccactctggtgagggccctggccacaagctgtcactgctctttcgtttcagtgagtggagctgatctgttttcaccgtttgttggagattcagaaaaagtgttgtctcagatatttcgacaagcaagagcaagcactccagcaattttgtttttggatgaaattgattcaatcttgggagctcgctcagccagcaagacaggatgtgatgttcaagaacgagttctttctgttctcctgaatgaattagatggtgttggacttaagacaatagagagaagaggaagtaaatcaagtcaacaggagtttcaagaagtttttaaccgaagtgtcatgattattgcagcaacaaatagacctgatgtgttagatactgctttgttacgacctggaagattagataagatcatctatatcccacctccagatcacaagggcaggctttctattttaaaagtctgtacaaaaaccatgccaatagggcctgatgtctccttagaaaacctcgcagcagaaacctgttttttttctggagctgatcttagaaacctctgcacagaagctgctttgctggctctgcaagaaaatggactagacgcaactacagtgaaacaagagcactttctaaaatcacttaagactgtaaaaccgtcgttaagttgcaaggacttggctttatatgaaaacttatttaagaaagaaggattttctaacgtggaaggtatttaaaaatcaccttaaactcttgttcagttcacattaattgaaatgtgaacttgcctgtcgtttgcaacttcacacttttagaatttgtgtttatatttcctgtaagtgaataaataaaacaaaacaaaacaaaaaaaacttgtgcctgataagctaaggctcatttatttttaaaaggcatattaaataaaatactgtaatttaggaagaaa

SEQ ID NO: 24309 - protein, 753 aa, Homo sapiens
MAPDSDPFPEGPLLKLLPLDARDRGTQRCRLGPAALHALGARLGSAVKISLPDGGSCLCTAWPRRDGADGFVQLDPLCASPGAAVGASRSRRSLSLNRLLLVPCPPLRRVAVWPVLRERAGAPGARNTAAVLEAAQELLRNRPISLGHVVVAPPGAPGLVAALHIVGGTPSPDPAGLVTPRTRVSLGGEPPSEAQPQPEVPLGGLSEAADSLRELLRLPLRYPRALTALGLAVPRGVLLAGPPGVGKTQLVRAVAREAGAELLAVSAPALQGSRPGETEENVRRVFQRARELASRGPSLLFLDEMDALCPQRGSRAPESRVVAQVLTLLDGASGDREVVVVGATNRPDALDPALRRPGRFDREVVIGTPTLKQRKEILQVITSKMPISSHVDLGLLAEMTVGYVGADLTALCREAAMHALLHSEKNQDNPVIDEIDFLEAFKNIQPSSFRSVIGLMDIKPVDWEEIGGLEDVKLKLKQSIEWPLKFPWEFVRMGLTQPKGVLLYGPPGCAKTTLVRALATSCHCSFVSVSGADLFSPFVGDSEKVLSQIFRQARASTPAILFLDEIDSILGARSASKTGCDVQERVLSVLLNELDGVGLKTIERRGSKSSQQEFQEVFNRSVMIIAATNRPDVLDTALLRPGRLDKIIYIPPPDHKGRLSILKVCTKTMPIGPDVSLENLAAETCFFSGADLRNLCTEAALLALQENGLDATTVKQEHFLKSLKTVKPSLSCKDLALYENLFKKEGFSNVEGI

SEQ ID NO: 24310 - DNA, 1041 bp, Homo sapiens
gccgggtgggtttcctaatctggtttcgtctgcctggttcatctgtgtgcgatggctccggactcggatcccttccctgaagggccgctcttaaagctgctacccttagacgctagagaccggggcacccagcgctgccgcctgggcccggccgccctccacgccctgggcgcgcgcttgggctcggcagtgaagatctcgctacccgacggcggctcctgcctctgcactgcctggcctcggcgggacggagcggacggctttgtgcagctggacccgctgtgcgcgagcccctgcggcgcgtcgccgtgtggccggtgttgcgagagcgggcaggcgcgcccggtgcccggaatacagccgcggtgctggaggcggcacaggagctgctgagaaaccgaccgatctccctgggccacgtggtggtcgctccgccaggcgctcctggcctggtggctgccttgcacatcgtcggcgggacgcccagtcccgatcccgctgggctggtcacccctcgtacccgcgtcagccttggcggggagcctccgtcggaagcccagccgcagcccgaggtgcccctgggaggtctttcggaggcggccgactcgctgcgggagctcctccgcctcccgctccgctacccgcgcgccctgaccgcgctgggcttagcggtgcctcgcggggtgctcctggcggggccccccggagtgggcaagacccagctggtgcgggccgtggcgcgcgaggcgggcgcggagctgctggcagtcagcgccccggcgctgcagggttcccggcctggggagaccgaggagaacgtgcggcgggtcttccagcgcgcccgggaactggccagccgcggacccagcctcctcttcctggacgagatggacgccttgtgtccccagcggggcagtcgagcacccgagagccgcgtagtggcccaggtgttgacgctgctggacggcgccagtggggaccgcgaggtcgtggttgtgggagccactaaccggccggacgctctagacccagcgctgcgta

SEQ ID NO: 24311 - protein, 113 aa, Homo sapiens
MAPDSDPFPEGPLLKLLPLDARDRGTQRCRLGPAALHALGARLGSAVKISLPDGGSCLCTAWPRRDGADGFVQLDPLCASPCGASPCGRCCESGQARPVPGIQPRCWRRHRSC

SEQ ID NO: 24312 - DNA, 603 bp, Homo sapiens
tgaagattgagtcagcatccttatcatacagtgcagaagtctgaaattacagagattatgcagtgtatcgtggtcaaccagtaaatttgttgtccgtaaaggcaggctttctattttaaaagtctgtacaaaaaccatgccaatagggcctgatgtctccttagaaaacctcgcagcagaaacctgttttttttctggagctgatcttagaaacctctgcacagaagctgctttgctggctctgcaagaaaatggactagacgcaactacagtgaaacaagagcactttctaaaatcacttaagactgtaaaaccgtcgttaagttgcaaggacttggctttatatgaaaacttatttaagaaagaaggattttctaacgtggaaggtatttaaaaatcaccttaaactcttgttcagttcacattaattgaaatgtgaacttgcctgtcgtttgcaacttcacacttttagaatttgtgtttatatttcctgtaagtgaataaataaaacaaaacaaaacaaaaaaaacttgtgcctgataagctaaggctcatttatttttaaaaggcatattaaataaaatactgtaatttaggaagaaa

SEQ ID NO: 24313 - protein, 85 aa, Homo sapiens [sequence omitted]

SEQ ID NO: 24314 - DNA, 734 bp, Homo sapiens
cccacgcgcgtgaccagagcgcgctggcccggcccacccggggcggttgtggtcgctatatataaggtggggaggccgccggcccgttcggttccgggcgttaccatcgtccgtgcgcaccgcccggcgtccagatttggcaattcttcgctgaagtcatcatgagctttttccaactcctgatgaaaaggaaggaactcattcccttggtggtgttcatgactgtggcggcgggtggagcctcatctttcgctgtgtattctctttggaaaaccgatgtgatccttgatcgaaaaaaaaatccagaaccttgggaaactgtggaccctactgtacctcaaaagcttataacaatcaaccaacaatggaaacccattgaagagttgcaaaatgtccaaagggtgaccaaatgacgagccctcgcctctttcttctgaagagtactctataaatctagtggaaacatttctgcacaaactagattctggacaccagtgtgcggaaatgcttctgctacatttttagggtttgtctacattttttgggctctggataaggaattaaaggagtgcagcaataactgcactgtctaaaagtttgtgcttattttcttgtaaatttgaatattgcatattgaaatttttgtttatgatctatgaatgtttttcttaaaatttacaaagctttgtaaattagattttctttaataaaatgccatttgtgcaagatttctc

SEQ ID NO: 24315 - protein, 83 aa, Homo sapiens; identical to SEQ ID NO: 3221

SEQ ID NO: 24316 - DNA, 844 bp, Homo sapiens
cccacgcgcgtgaccagagcgcgctggcccggcccacccggggcggttgtggtcgctatatataaggtggggaggccgccggcccgttcggttccgggcgttaccatcgtccgtgcgcaccgcccggcgtccagatttggcaattcttcgctgaagtcatcatgagctttttccaactcctgatgaaaaggaaggaactcattcccttggtggtgttcatgactgtggcggcgggtggagcctcatctttcgctgtgtattctctttggaaaaccgatgtgatccttgatcgaaaaaaaaatccagaaccttgggaaactgtggaccctactgtacctcaaaagcttataacaatcaaccaacaatggaaacccattgaagagttgcaaaatgtccaaagggtgaccaaatgacgagccctcgcctctttcttctgaagagtactctataaatctagtggaaacatttctgcacaaactagattctggacaccagtgtgcggaaatgcttctgctacatttttagggtttgtctacattttttgggctctggataaggaattaaaggagtgcagcaataactgcactgtctaaaagtttgtgcttattttcttgtaaatttgaatattgcatattgaaatttttgtttatgatctatgaatgtttttcttaaaatttacaaagctttgtaaattagattttctttaataaaatgccatttgtgcaagatttctcaaagattaggtatatatttaaatggaagagaaaatatttttatgggagaaaaatacatttgaaccatgaaatttcatcttttaaataacatccagtacagatttctgtgt

SEQ ID NO: 24317 - protein, 83 aa, Homo sapiens; identical to SEQ ID NO: 3221

SEQ ID NO: 24318 - DNA, 915 bp, Homo sapiens
cggttgtggtcgctatatataaggtggggaggccgccggcccgttcggttccgggcgttaccatcgtccgtgcgcaccgcccggcgtccaggtgagtctcccatctgcagagacgcggacgcgccggcccgcagttggcctgcggagcgcggtggacggtttggcgcccaccaggcgatcaatactttggatttttaatttctagatttggcaattcttcgctgaagtcatcatgagctttttccaactcctgatgaaaaggaaggaactcattcccttggtggtgttcatgactgtggcggcgggtggagcctcatctttcgctgtgtattctctttggaaaaccgatgtgatccttgatcgaaaaaaaaatccagaaccttgggaaactgtggaccctactgtacctcaaaagcttataacaatcaaccaacaatggaaacccattgaagagttgcaaaatgtccaaagggtgaccaaatgacgagccctcgcctctttcttctgaagagtactctataaatctagtggaaacatttctgcacaaactagattctggacaccagtgtgcggaaatgcttctgctacatttttagggtttgtctacattttttgggctctggataaggaattaaaggagtgcagcaataactgcactgtctaaaagtttgtgcttattttcttgtaaatttgaatattgcatattgaaatttttgtttatgatctatgaatgtttttcttaaaatttacaaagctttgtaaattagattttctttaataaaatgccatttgtgcaagatttctcaaagattaggtatatatttaaatggaagagaaaatatttttatgggagaaaaatacatttgaaccatgaaatttcatcttttaaataacatccagtacagatttctgtgt

SEQ ID NO: 24319 - protein, 83 aa, Homo sapiens; identical to SEQ ID NO: 3221

SEQ ID NO: 24320 - DNA, 759 bp, Homo sapiens
ggttccgggcgttaccatcgtccgtgcgcaccgcccggcgtccaggtgagtctcccatctgcagagacgcggacgcgccggcccgcagttggcctgcggagcgcggtggacggtttggcgcccaccaggcgatcaatactttggatttttaatttctagatttggcaattcttcgctgaagtcatcatgagctttttccaactcctgatgaaaaggaaggaactcattcccttggtggtgttcatgactgtggcggcgggtggagcctcatctttcgctgtgtattctctttggaaaaccgatgtgatccttgatcgaaaaaaaaatccagaaccttgggaaactgtggaccctactgtacctcaaaagcttataacaatcaaccaacaatggaaacccattgaagagttgcaaaatgtccaaagggtgaccaaatgacgagccctcgcctctttcttctgaagagtactctataaatctagtggaaacatttctgcacaaactagattctggacaccagtgtgcggaaatgcttctgctacatttttagggtttgtctacattttttgggctctggataaggaattaaaggagtgcagcaataactgcactgtctaaaagtttgtgcttattttcttgtaaatttgaatattgcatattgaaatttttgtttatgatctatgaatgtttttcttaaaatttacaaagctttgtaaattagattttctttaataaaatgccatttgtgcaagatttctc

SEQ ID NO: 24321 - protein, 83 aa, Homo sapiens; identical to SEQ ID NO: 3221

SEQ ID NO: 24322 - DNA, 699 bp, Homo sapiens
gggacaggcaggggagcccagcggcatgctggatatgaatgtatcttcagccttcaagttaccattggccagagggaagagtggccccaaactctgaagagcgctggcaaggctccccatcttcctctccctagcctccacaggaacatcacagtatggcttggcattttttttttttttttgagacggagtctcactctgtcacccaggctggagtgcagtggtgtgatctcagctcactgcaagctctgcctcccgggttcatgccattctcctgcctcagcctcccgagtaactgggactacaggcgcccgccaccacgcccagctaattttttgtatttttagtagagacggggtttcactgtgttagccaggatggtctcaatctcctgaccttgtgatctgcccgcctcagcctcccaaagtgctgggatgacaggcgtgagccacgcgcccagcctggcttggcatctttagggcagatctcagtatgccttgcattccaattcatctccagaatcctacacttcctccaaggagttggaaaaagctcatgatgacttcagcgaagaattgccaaatctagaaattaaaaatccaaagtattgatcgcctggtgggcgccaaaccgtccaccgcgctccgcaggccaactgcgggccggcgcgtccgcgtctctgcagatgggagactcacc

SEQ ID NO: 24323 - protein, 31 aa, Homo sapiens
MPCIPIHLQNPTLPPRSWKKLMMTSAKNCQI

SEQ ID NO: 24324 - DNA, 773 bp, Homo sapiens
cagacgagtggccaacactggagcccaggctattgcttcccagtctggtggtgaatcgtccatagtctgggacaggcaggggagcccagcggcatgctggatatgaatgtatcttcagccttcaagttaccattggccagagggaagagtggccccaaactctgaagagcgctggcaaggctccccatcttcctctccctagcctccacaggaacatcacagtatggcttggcattttttttttttttttgagacggagtctcactctgtcacccaggctggagtgcagtggtgtgatctcagctcactgcaagctctgcctcccgggttcatgccattctcctgcctcagcctcccgagtaactgggactacaggcgcccgccaccacgcccagctaattttttgtatttttagtagagacggggtttcactgtgttagccaggatggtctcaatctcctgaccttgtgatctgcccgcctcagcctcccaaagtgctgggatgacaggcgtgagccacgcgcccagcctggcttggcatctttagggcagatctcagtatgccttgcattccaattcatctccagaatcctacacttcctccaaggtcagtcctcatgcgagtctccaacctcatccccacttcattttcctcattgtacttaccatcttttattcgtatcccaccaaattttggctttgttagctatactgcaaatagtagatgctcaataaactactagtgaatgaatgaacttggaaaaaaaagctta

SEQ ID NO: 24325 - protein, 63 aa, Homo sapiens
MAWHFFFFFETESHSVTQAGVQWCDLSSLQALPPGFMPFSCLSLPSNWDYRRPPPRPANFLYF

SEQ ID NO: 24326 - DNA, 477 bp, Homo sapiens
ctgctgggatgtagaggaggggggttccagcccctcctgtcccgcgtcaggtctgtagcacacaagctgcctgcccagggtcctcaaatcagctgtcttcactctgacctgcaggtctcggctcctgcatactgcaagctgggtgccttccttctacagaacccatgcccccttgcaaggaaaccatggaatttccccaggagtcttcgacaactccaggccacaggaaggtcacaaatggtcagaaaaggaatgaatttgaaggaggaagaaccagccctgcccacgttgtctggggcccctcccaaggggacaggaaagctccacaaacaggacctggaacatccagggagcgtctgggctgcagaagcccgctgtgcaaatgtgggaacggaggtagcttgtctaagctagcccagaggctgatccacatcaagccccgtcacagctgctgctcctgccctgtactcccagttg

SEQ ID NO: 24327 - protein, 103 aa, Homo sapiens
MPPCKETMEFPQESSTTPGHRKVTNGQKRNEFEGGRTSPAHVVWGPSQGDRKAPQTGPGTSRERLGCRSPLCKCGNGGSLSKLAQRLIHIKPRHSCCSCPVLP

SEQ ID NO: 24328 - DNA, 744 bp, Homo sapiens
aaacaggacctggaacatccagggagcgtctgggctgcagagacacagactcactctgtcacccaggctggagtgcagtggtgcagttatagctcactatagcctcgacctcctggactcaagtgatcctcccacctcagtctcccgagtagtcaggactacaggatctcactctgtcaccaaggctggagtgcagcagcagaatttcagctcactgcaacctcgacttgctgggttcaagggatctcccaagtagctgggactacaggtgcacaccatcatgcctggctaattttttgtagggatggggttttaccatgctgcccaggctggtcttgaacttctgagttcaagcgatcctccctcctgagcctcctaaagtgctgggattacaggtttaaaaaatatcctggactttggaaaatattcttatataaagaagcaaaaagaggatggaatagacttgtgctaacactgaaactccagtcaagttgtaaactgaaaaagaacgtgttgaaacaaggaattgccccatagccttcacaggctgaagtgcagtggcgcaatctcggctcactgcaacctccacctcccaggttcaagcaattctcctgcctcagcctcccgagtagctggaattacaggcacatgtcaccatgctcggctaactttttggtatttttagtagagacggggtttcaccatgttggccagggtagtttcaaattcctgacctcaggtgat

SEQ ID NO: 24329 - protein, 31 aa, Homo sapiens
MSPCSANFLVFLVETGFHHVGQGSFKFLTSG

SEQ ID NO: 24330 - DNA, 698 bp, Homo sapiens
cacgccttaccgaaaggagtcctgactcagagctgctgtgccgtcccttctcctgtccctgcctggaagaggcctatcaggttgaccaagctttgctcccacctgtggatgagaagggcaggtggccgagagtgggtgtggaggaggaagactggatgccaatgatcctgatctcactctgtcaccaaggctggagtgcagcagcagaatttcagctcactgcaacctcgacttgctgggttcaagggatctcccaagtagctgggactacaggtgcacaccatcatgcctggctaattttttgtagggatggggttttaccatgctgcccaggctggtcttgaacttctgagttcaagcgatcctccctcctgagcctcctaaagtgctgggattacaggtttaaaaaatatcctggactttggaaaatattcttatataaagaagcaaaaagaggatggaatagacttgtgctaacactgaaactccagtcaagttgtaaactgaaaaagaacgtgttgaaacaaggaattgccccatagccttcacaggtaatgctgatgcttcaagtcttggaaccacacttcgagaatcactgttataatgtacagcagaactgcatgatcagctgtatggtagccttgaaaaccaacaggccacaatcacagtgaaaacctcaggttggcagccactggagg

SEQ ID NO: 24331 - protein, 62 aa, Homo sapiens
MPMILISLCHQGWSAAAEFQLTATSTCWVQGISQVAGTTGAHHHAWLIFCRDGVLPCCPGWS

SEQ ID NO: 24332 - DNA, 2641 bp, Homo sapiens
gatctcactctgtcaccaaggctggagtgcagcagcagaatttcagctcactgcaacctcgacttgctgggttcaagggatctcccaagtagctgggactacaggtgcacaccatcatgcctggctaattttttgtagggatggggttttaccatgctgcccaggctggtcttgaacttctgagttcaagcgatcctccctcctgagcctcctaaagtgctgggattacaggtttaaaaaatatcctggactttggaaaatattcttatataaagaagcaaaaagaggatggaatagacttgtgctaacactgaaactccagtcaagttgtaaactgaaaaagaacgtgttgaaacaaggaattgccccatagccttcacaggatctcactctgttgcagtgtcactggagtgcagtggtgcagtcttggcttcctgcaccatctgccttccagaatcaagcaattatccagcttcagcctcccgagtagctgggaccacagacgtgccaccatgcctggcttatttttttattttttgtagagatggggtttcaccattgttgcccaggctgggctcaactcctgagctcaaagtgatccatctgcctcagcctcccaaagtgctggaattacaggctcagtctatactagtatatttacaactatattttattacaatatttattaaatattgttgtcttttgctaggaaacttaaaaaccttaaagaacatcatttgtgagctcccaattggcacaaattacataaggtactctacacatatttttattttcttaactttttgttataacaagtgaaaaatctaaaaatcaactgaataagcttttatgttgaaaagtatacttaaatgattctggtgatcatggtgttctagtaagaaaaatgctttgctagtgatgtgacagcgtacggcatatgaataatatttgaaatcttgctactcttttcttatattctgccccaaacccaaaggaagtttaaaatgagaaaaaaggtaaaggtatgaaagaacctttggtgactcaggtggcttcagacttaccagtcacaaaaacttgcaagcaggttctaggagacttcactgcatccatatatgctgttaatagtgtttttttttttttttgagacggagtctcactctgttgcccaggctagagtgcagtggtgtgatctcggctcggctcgctgcaacctccacctcctgggttcaagtaattcttccacttcagccttacgagtagctgggactataggcacctgccaccatgccaagctaatttttgtatttttagtagagacggggtttcaccatgttggccaggctggtctcaaactcctgacctcaagtgcccactccagcctcccaaagtgctgggattacaggcatgagccaccgcacccggcttgttatagtcttaaaacactctacaccaggggttagtaaacgtttcctataaagggccagatagtaaatattttatgtcactacgcaactctccacggtagcatggaagcagccatagacaatacgtaactgaatgagtgtggtgtgttccggtaacgctttatagacacagaaattcacttaaagtccatataattttcacatgccatgaaatatttactgtttttttttggggggggatggggacagggtctcactgtcactcaggctagagagcagtggcaccatcacggctcagtgtagcctagacctcctgagctcaagtgatcctcctatctctcagcctcctgagtagctgggatcacaggcatgtgccactatgcccagttaatttttgtattttttgtagagatgaggtttcaccatgttgccaaggctggtcttgaactcctgggttcaagcaatccagctgccttggcctcctgaaatgttaggattacaggcgtgagccactgcacccagtgatttaatagatgtaaaaatcattcttagttcttggggcaaataaaacaggcttgcaggccagatttggcctgggaggtatagtgtagactggtccacacgattggagagtcagcaggctcttactctcagacttcctggtggtcctcaccagtctattttacagtggcttctttatttcctttctgccactgttgatgggactgtagcgtcactgcatgtgactgataccaaaagagaaaggttcttttaattaatctttccatactatccagaagatttttttcagttttatttcttaaacatataagagggcattataaaatgacattataattataaaagattttcttttaagaacaatgtttttaggcctactaatattacttaataaaaagagcagatatttaagagactgtacatttttatttaataaaccacatggcaaaacaatactttaataagtgtataggaaattacaatgtgaaagttgcaaatacagcacatatatatatatatatatatactttgatcttaattaacatggacaaaccccagcttcaaaatctttctaaaatcaatcatatgcaaaatacctggtttctgaaagggcatatgataaagtatatacaatttcttaaactgtgatatggcttatttaataacatgtatttattgagagaagcataaac

SEQ ID NO: 24333 - protein, 115 aa, Homo sapiens
MLLIVFFFFFETESHSVAQARVQWCDLGSARCNLHLLGSSNSSTSALRVAGTIGTCHHAKLIFVFLVETGFHHVGQAGLKLLTSSAHSSLPKCWDYRHEPPHPACYSLKTLYTRG

SEQ ID NO: 24334 - DNA, 1122 bp, Homo sapiens
atagatataaaaaaatgattagagtatgatgaatatttttttcctttctacttgctagatactcaaagtccataaatatgtccagatgtccactgaaatatctctcatttattcttacttggtttctatatgtaagaatattttgatttaaatagtttatatgctcctgaaatttctgagaaattcaagtcattattttaaatgacttcacaataggaatcccatcatgtatattttcttttcctttttgtttttgagatagggtctcattttgttactcaggctgcagtgcaatggtgtggacatggctcactgcagcctcaacctcctgggctaaagcacttctgccacagccttacaagtagctgatactacaggtgtgcacgacgcctggctgatttttatatttttgtagagacagggtctctacaaaagaccaggctggtcatgaactcttggcctcgagggatacttccacctttgcctccccaaatgctgagattacaggcatgagccactgtgtctggccacataaattttcagttcaattcaacaaacatctactgggtttcattagagggaccatcaatccttttattgacaccattaactcccaacaatcttataggtaaatctgggttttcttatcttaggtttacttatagtaaggtacttggtaagaagataaaatgtttcctattcttcatttatattgtaagtcatctgcatgcttatctagaatttcaacttacaatttgcctggtacattgttaccctactctgattcttagaggagcccaataaccatatccattcttcgtgtaagaaactgtcactgttgaaaagggactccaaatgtgcataaaagataatctcaaaaccaatggttgcaaaatgaaacatgaacagtcaagctgcctctttaacacaggcatttacaattaggttgccttcagtttggaaacctctgtttagtttccctgcaacacagatttaatgtccatccctatctagtgctttaaaacacacacatacaggccaggcatggtggctcatgctgtaatcccagcactctggaaggccaaggtggaaggattgcttgagcccaggaggtcgaggcca

SEQ ID NO: 24335 - protein, 40 aa, Homo sapiens
MSHCVWPHKFSVQFNKHLLGFIRGTINPFIDTINSQQSYR

SEQ ID NO: 24336 - DNA, 1693 bp, Homo sapiens
gcgtggcctcgcgcagggcggggagaggcggtggctgtgggcgtccggccccgaacctgtcagacctggggagccggcctccagcagcgggcgcggcgggcgcgagcacgaccccactctcctgcggccgcgggtggagcagcgcgagcccgcctcgctgagccggccgggggcggggagatgagttgcggccccgcggcagcgccccaggatggggagggacgcgcggcactgccctcgagaactggcgctccggtgaagtaggcgccgccggccgtccgcctcccccaagccgttccgcaccgcggccgctcagcctctgccatggccggctctggcgcgtggaagcgcctcaaatctatgctaaggaaggatgatgcgccgctgtttttaaatgacaccagcgcctttgacttctcggatgaggcgggggacgaggggctttctcggttcaacaaacttcgagttgtggtggccgatgacggttccgaagccccggaaaggcctgttaacggggcgcacccgaccctccaggccgacgatgattccttactggaccaagacttacctttgaccaacagtcagctgagtttgaaggtggactcctgtgacaactgcagcaaacagagagagatactgaagcagagaaaggtgaaagccaggttgaccattgctgccgttctgtacttgcttttcatgattggagaacttgtaggtggatacattgcaaatagcctagcaatcatgacagatgcacttcatatgttaactgacctaagcgccatcatactcaccctgcttgctttgtggctatcatcaaaatcaccaaccaaaagattcacctttggatttcatcgcttagaggttttgtcagctatgattagtgtgctgttggtgtatatacttatgggattcctcttatatgaagctgtgcaaagaactatccatatgaactatgaaataaatggagatataatgctcatcaccgcagctgttggagttgcagttaatgtaataatggggtttctgttgaaccagtctggtcaccgtcactcccattcccactccctgccttcaaattcccctaccagaggttctgggtgtgaacgtaaccatgggcaggatagcctggcagtgagagctgcatttgtacatgctttgggagatttggtacagagtgttggtgtgctaatagctgcatacatcatacgattcaagccagaatacaagattgctgaccccatctgtacatacgtattttcattacttgtggcttttacaacatttcgaatcatatgggatacagtagttataatactagaaggtgtgccaagccatttgaatgtagactatatcaaagaagccttgatgaaaatagaagatgtatattcagtcgaagatttaaatatctggtctctcacttcaggaaaatctactgccatagttcacatacagctaattcctggaagttcatctaaatgggaggaagtacagtccaaagcaaaccatttattattgaacacatttggcatgtatagatgtactattcagcttcagagttacaggcaagaagtggacagaacttgtgcaaattgtcagagttctagtccctaattttatgtattttgggaactcctgccttatttatcctgcagtcacagacttgagagcaataaatgcaaacctaaatgag

SEQ ID NO: 24337 - protein, 429 aa, Homo sapiens; identical to SEQ ID NO: 3225

SEQ ID NO: 24338 - DNA, 722 bp, Homo sapiens
gctgagccggccgggggcggggagatgagttgcggccccgcggcagcgccccaggatggggagggacgcgcggcactgccctctggcgcgtggaagcgcctcaaatctatgctaaggaaggatgatgcgccgctgtttttaaatgacaccagcgcctttgacttctcggatgaggcgggggacgaggggctttctcggttcaacaaacttcgagttgtggtggccgatgacggttccgaagccccggaaaggcctgttaacggggcgcacccgaccctccaggccgacgatgattccttactggaccaagacttacctttgaccaacagtcagctgagtttgaaggtggactcctgtgacaactgcagcaaacagagagagatactgaagcagagaaaggtgaaagccaggttgaccattgctgccgttctgtacttgcttttcatgattggagaacttgtaggtggatacattgcaaatagcctagcaatcatgacagatgcacttcatatgttaactgacctaagcgccatcatactcaccctgcttgctttgtggctatcatcaaaatcaccaaccaaaagattcacctttggatttcatcgcttagaggttttgtcagctatgattagtgtgctgttggtgtatatacttatgggattcctcttatatgaagctgtgcaaagaactatccatatgaactatgaaataaatggagatat

SEQ ID NO: 24339 - protein, 231 aa, Homo sapiens
MSCGPAAAPQDGEGRAALPSGAWKRLKSMLRKDDAPLFLNDTSAFDFSDEAGDEGLSRFNKLRVVVADDGSEAPERPVNGAHPTLQADDDSLLDQDLPLTNSQLSLKVDSCDNCSKQREILKQRKVKARLTIAAVLYLLFMIGELVGGYIANSLAIMTDALHMLTDLSAIILTLLALWLSSKSPTKRFTFGFHRLEVLSAMISVLLVYILMGFLLYEAVQRTIHMNYEING

SEQ ID NO: 24340 - DNA, 590 bp, Homo sapiens
tttgacttctcggatgaggcgggggacgaggggctttctcggttcaacaaacttcgagttgtggtggccgatgacggttccgaagccccggaaaggcctgttaacggggcgcacccgaccctccaggccgacgatgattccttactggaccaagacttacctttgaccaacagtcagctgagtttgaaggtggactcctgtgacaactgcagcaaacagagagagatactgaagcagagaaaggtgaaagccaggttgaccattgctgccgttctgtacttgcttttcatgattggagaacttgtaggtggatacattgcaaatagcctagcaatcatgacagatgcacttcatatgttaactgacctaagcgccatcatactcaccctgcttgctttgtggctatcatcaaaatcaccaaccaaaagattcacctttggatttcatcgcttaggctggaatacaatgacaccatcatagctcactgcaccgtcgaactcctgagctctagaaatcttaccctcgcagcctccagagtagctaggactgcatgcatataccaccatacccagctaattttttaatttttt

SEQ ID NO: 24341 - protein, 63 aa, Homo sapiens
MIGELVGGYIANSLAIMTDALHMLTDLSAIILTLLALWLSSKSPTKRFTFGFHRLGWNTMTPS

SEQ ID NO: 24342 - DNA, 1946 bp, Homo sapiens
acctaagcgatgaaatccaaaggtgaatcttttggttggtgattttgatgatagccacaaagcaagcagggtaatgctgatgcttcaagtcttggaaccacacttcgagaatcactgttataatgtacagcagaactgcatgatcagctgtatggtagccttgaaaaccaacaggccacaatcacagtgaaaacctcaggttggcagccactggaggatacaaaatgagtttggatctccttcaatgccccattcccagagaactgtcattatttgacctgctggtagttccctaaaggacgtgcaaggatgtttttatttgactggacacttgaagcttgccctgtatgaacagcccccatcttcccatgcttgtcaaaaatcagaggcaactaacactgcggcttcctgagagtctcactctgtcacccaggctggagagcaattgcacaaacacttggctcactgcagcctcaacttcttgtcctcaagtgatcctcccaccttagcctcctaagtagctgggaccacagtgaggtcaaaaaatgtttgaaagccactgagatagaaggaccagccactttgaacgccttagaggcaaaaagagctttgtgagttgtaagaggaaaaagaagaccagcatggctgaagcgagccctggggaggagtgttatgaaagaagatgagtctggaagtgttagttgcaaagatatgcatttacttctctggctacaaaaaagaatagaaatgcacaaagcagagcagtgtgaagaagaagaggcgatgacccctagaccgaccaaagcccgtgctccactgcccagtgcctatgtcccaccactgtcgctgccaccctgcccgagagaaaggctgaaggggatgctaaaggagataaaaccaaggttaagtaggaactgcagagaagatccacaaggttgtctgctaaacctgctcctccaaagccacagccgaagcccagaaaggcctctgcaaagaagagagagaaggtacctacagagaagaagggaaaagctgatgctggcaaggaggggaataaccctgcagaaaatggagatgccaaaacagactaggcacagaaagctaaaggtgctggagatgccaagtgaagtgtgtgcatttttgataactgtgtacttctggtgactgtacagtttgaaatactattttttaatcaagttttataaaaatgcagattttgtttagcttttttttttttttttaagctatgttagtacacagaatacttcattgttgttttggggagaagggccatatgtcactaatagaaagcccctgaagctggactgatgtggggaaaacaccttttccttctggttttgagagacttcctcttgggtcccaggaagagggattccctgactttgatacacatggccaccttggtataaaagccttgtggtatggaaaaacaaattcgttttttatgtcctcttctctgtttctacctttcagaatggacttaaatcccttaaacccagacatcttctgggacctgacccccaataattggttaccagtgtgtcaggcaatctggactttgccctcaaaagagcagtggttcctgtttctaggttgtggatcttcagataaattctgtcattttcctttcacttcctgaaagccagggtcggttcatgaaaagctatgaaacagcatgctaaatgtgaaatgtcaaccctcactaaactttgccggttcagagcatcagatgaagacttcattgggttttacagtggctttctgatttttggtagtccattgaagaagggagtttgaaagttgttgtatactgttaacgattgtctgcccatgtcctgcccaaaataccatgattctttatggaaattatctttaataaagctggatacagtttggcttgggaaaaaaaaaagaaatgcacaaag

SEQ ID NO: 24343 - protein, 163 aa, Homo sapiens; identical to SEQ ID NO: 3235

SEQ ID NO: 24344 - DNA, 1205 bp, Homo sapiens
tccaaaggtgaatcttttggttggtgattttgatgatagccacaaagcaagcaggctgtatggtagccttgaaaaccaacaggccacaatcacagtgaaaacctcaggttggcagccactggaggatacaaaatgagtttggatctccttcaatgccccattcccagagaactgtcattatttgacctgctggtagttccctaaaggacgtgcaaggatgtttttatttgactggacacttgaagcttgccctgtatgaacagcccccatcttcccatgcttgtcaaaaatcagaggcaactaacactgcggcttcctgagagtctcactctgtcacccaggctggagagcaattgcacaaacacttggctcactgcagcctcaacttcttgtcctcaagtgatcctcccaccttagcctcctaagtagctgggaccacagatgagtctggaagtgttagttgcaaagatatgcatttacttctctggctacaaaaaagaatagaaatgcacaaagcagagcagtgtgaagaagaagaggcgatgacccctagaccgaccaaagcccgtgctccactgcccagtgcctatgtcccaccactgtcgctgccaccctgcccgagagaaaggctgaaggggatgctaaaggagataaaaccaaggttaagtaggaactgcagagaagatccacaaggttgtctgctaaacctgctcctccaaagccacagccgaagcccagaaaggcctctgcaaagaagagagagaaggtacctacagagaagaagggaaaagctgatgctggcaaggaggggaataaccctgcagaaaatggagatgccaaaacagactaggcacagaaagctaaaggtgctggagatgccaagtgaagtgtgtgcatttttgataactgtgtacttctggtgactgtacagtttgaaatactattttttaatcaagttttataaaaatgcagattttgtttagcttttttttttttttttaagctatgttagtacacagaatacttcattgttgttttggggagaagggccatatgtcactaatagaaagcccctgaagctggactgatgtggggaaaacaccttttccttctggttttgagagacttcctcttgggtcccaggaagagggattccctgactttgatacacatggccaccttggtataaaagccttgtggtatgg

SEQ ID NO: 24345 - protein, 53 aa, Homo sapiens
MNSPHLPMLVKNQRQLTLRLPESLTLSPRLESNCTNTWLTAASTSCPQVILPP

SEQ ID NO: 24346 - DNA, 1435 bp, Homo sapiens
tccaaaggtgaatcttttggttggtgattttgatgatagccacaaagcaagcaggctgtatggtagccttgaaaaccaacaggccacaatcacagtgaaaacctcaggttggcagccactggaggatacaaaatgagtttggatctccttcaatgccccattcccagagaactgtcattatttgacctgctggtagttccctaaaggacgtgcaaggatgtttttatttgactggacacttgaagcttgccctgtatgaacagcccccatcttcccatgcttgtcaaaaatcagaggcaactaacactgcggcttcctgagagtctcactctgtcacccaggctggagagcaattgcacaaacacttggctcactgcagcctcaacttcttgtcctcaagtgatcctcccaccttagcctcctaagtagctgggaccacagggaactccggatgtgactcctgttacatgaaaatggaagaggtcagagttgtccaagagggaggccagccacatccaggcagggcccccatggtcagaaccctgctagagccatcaaggtcccagagctcccaagatggtggcaagccttttgttctctgaccagaggttcctggcctcacggattccaaggaatggaaccttgggccatgcgtgcacttgattttgcagatgagtctggaagtgttagttgcaaagatatgcatttacttctctggctacaaaaaagaatagaaatgcacaaagcagagcagtgtgaagaagaagaggcgatgacccctagaccgaccaaagcccgtgctccactgcccagtgcctatgtcccaccactgtcgctgccaccctgcccgagagaaaggctgaaggggatgctaaaggagataaaaccaaggttaagtaggaactgcagagaagatccacaaggttgtctgctaaacctgctcctccaaagccacagccgaagcccagaaaggcctctgcaaagaagagagagaaggtacctacagagaagaagggaaaagctgatgctggcaaggaggggaataaccctgcagaaaatggagatgccaaaacagactaggcacagaaagctaaaggtgctggagatgccaagtgaagtgtgtgcatttttgataactgtgtacttctggtgactgtacagtttgaaatactattttttaatcaagttttataaaaatgcagattttgtttagcttttttttttttttttaagctatgttagtacacagaatacttcattgttgttttggggagaagggccatatgtcactaatagaaagcccctgaagctggactgatgtggggaaaacaccttttccttctggttttgagagacttcctcttgggtcccaggaagagggattccctgactttgatacacatggccaccttggtataaaagccttgtggtatgg

SEQ ID NO: 24347 - protein, 172 aa, Homo sapiens; identical to SEQ ID NO: 3227

SEQ ID NO: 24348 - DNA, 1190 bp, Homo sapiens
tccaaaggtgaatcttttggttggtgattttgatgatagccacaaagcaagcaggctgtatggtagccttgaaaaccaacaggccacaatcacagtgaaaacctcaggttggcagccactggaggatacaaaatgagtttggatctccttcaatgccccattcccagagaactgtcattatttgacctgctggtagttccctaaaggacgtgcaaggatgtttttatttgactggacacttgaagcttgccctgtatgaacagcccccatcttcccatgcttgtcaaaaatcagaggcaactaacactgcggcttcctgagagctcccaagatggtggcaagccttttgttctctgaccagaggttcctggcctcacggattccaaggaatggaaccttgggccatgcgtgcacttgattttgcagatgagtctggaagtgttagttgcaaagatatgcatttacttctctggctacaaaaaagaatagaaatgcacaaagcagagcagtgtgaagaagaagaggcgatgacccctagaccgaccaaagcccgtgctccactgcccagtgcctatgtcccaccactgtcgctgccaccctgcccgagagaaaggctgaaggggatgctaaaggagataaaaccaaggttaagtaggaactgcagagaagatccacaaggttgtctgctaaacctgctcctccaaagccacagccgaagcccagaaaggcctctgcaaagaagagagagaaggtacctacagagaagaagggaaaagctgatgctggcaaggaggggaataaccctgcagaaaatggagatgccaaaacagactaggcacagaaagctaaaggtgctggagatgccaagtgaagtgtgtgcatttttgataactgtgtacttctggtgactgtacagtttgaaatactattttttaatcaagttttataaaaatgcagattttgtttagcttttttttttttttttaagctatgttagtacacagaatacttcattgttgttttggggagaagggccatatgtcactaatagaaagcccctgaagctggactgatgtggggaaaacaccttttccttctggttttgagagacttcctcttgggtcccaggaagagggattccctgactttgatacacatggccaccttggtataaaagccttgtggtatgg

SEQ ID NO: 24349 - protein, 172 aa, Homo sapiens; identical to SEQ ID NO: 3227

SEQ ID NO: 24350 - DNA, 1210 bp, Homo sapiens
tccaaaggtgaatcttttggttggtgattttgatgatagccacaaagcaagcaggctgtatggtagccttgaaaaccaacaggccacaatcacagtgaaaacctcaggttggcagccactggaggatacaaaatgagtttggatctccttcaatgccccattcccagagaactgtcattatttgacctgctggtagttccctaaaggacgtgcaaggatgtttttatttgactggacacttgaagcttgccctgtatgaacagcccccatcttcccatgcttgtcaaaaatcagaggcaactaacactgcggcttcctgagggaactccggatgtgactcctgttacatgaaaatggaagaggtcagagttgtccaagagggaggccagccacatccaggcagggcccccatggtcagaaccctgctagagccatcaaggtcccagatgagtctggaagtgttagttgcaaagatatgcatttacttctctggctacaaaaaagaatagaaatgcacaaagcagagcagtgtgaagaagaagaggcgatgacccctagaccgaccaaagcccgtgctccactgcccagtgcctatgtcccaccactgtcgctgccaccctgcccgagagaaaggctgaaggggatgctaaaggagataaaaccaaggttaagtaggaactgcagagaagatccacaaggttgtctgctaaacctgctcctccaaagccacagccgaagcccagaaaggcctctgcaaagaagagagagaaggtacctacagagaagaagggaaaagctgatgctggcaaggaggggaataaccctgcagaaaatggagatgccaaaacagactaggcacagaaagctaaaggtgctggagatgccaagtgaagtgtgtgcatttttgataactgtgtacttctggtgactgtacagtttgaaatactattttttaatcaagttttataaaaatgcagattttgtttagcttttttttttttttttaagctatgttagtacacagaatacttcattgttgttttggggagaagggccatatgtcactaatagaaagcccctgaagctggactgatgtggggaaaacaccttttccttctggttttgagagacttcctcttgggtcccaggaagagggattccctgactttgatacacatggccaccttggtataaaagccttgtggtatgg

SEQ ID NO: 24351 - protein, 53 aa, Homo sapiens
MKMEEVRVVQEGGQPHPGRAPMVRTLLEPSRSQMSLEVLVAKICIYFSGYKKE

SEQ ID NO: 24352 - DNA, 920 bp, Homo sapiens
caaaggtgaatcttttggttggtgattttgatgatagccacaaagcaagcagggtaatgctgatgcttcaagtcttggaaccacacttcgagaatcactgttataatgtacagcagaactgcatgatcagctgtatggtagccttgaaaaccaacaggccacaatcacagtgaaaacctcaggttggcagccactggaggatacaaaatgagtttggatctccttcaatgccccattcccagagaactgtcattatttgacctgctggtagttccctaaaggacgtgcaaggatgtttttatttgactggacacttgaagcttgccctgtatgaacagcccccatcttcccatgcttgtcaaaaatcagaggcaactaacactgcggcttcctgagagtctcactctgtcacccaggctggagagcaattgcacaaacacttggctcactgcagcctcaacttcttgtcctcaagtgatcctcccaccttagcctcctaagtagctgggaccacagagtcccactctgtcacccaggctggagtgcagtggtgcaatcttggctcactgcaacctccacctcccaggttcaagcgattctcgtgtctcagcctccccagtagctgggactacaggtgcgccatgacgcctggctaatttttttgtattttcagtagagacggggtttcaccatgttggccagtctgctttcctcctaacctcaagtgagccgcctgcctcgaagatgctttatttataagcgctttggacacactttaataaatgctctattgtatacagttgaactctatataacattttgaataatattgttaatgcttaccctaagtactactatcatctctgtattgtttaacaaaatatttccacatttgacaataaagtcagtatttgaaagga

SEQ ID NO: 24353 - protein, 53 aa, Homo sapiens; identical to SEQ ID NO: 24345

SEQ ID NO: 24354 - DNA, 749 bp, Homo sapiens
attaactccctaagtggccctcacgacttattccactggtttgtgccctggaaatccttacatgtaaaaaaaaaaaggaggtggagcaggtgttcagtaaggtcccttcatactgtaaaattctatgatcttaagttatttacgatcatttactattttaaacgttgcgaaaattaacctggtattttaccagacctttgtaaaaagaggaagttacatgacatacaatgaagataacgtccttaactttacggtagatgacagtggttgaacaactagaagagaaagtcaaagttatctcggggagtttatattgtacttagattgagctgcactttggaaccgtgtggccttttcacatgagatcagtgtcttgataaatacaaacttcctgaaaagatgggttaaacctcaaagcctgtgtaactacagcttgacaaagactctcgaggaaaggtaaacggaaagtgagttggcaacacaactcacctacaagttctccaatcatgaaaagcaagtacagaacggcagcaatggtcaacctggctttcacctttctctgcttcagtatctctctctgtttgctgcagttgtcacaggagtccaccttcaaactcagctgactgttggtcaaagttttggaggccctatgattacaatcagcccactggaacaatccaggataatgttttttttttaagatggaatctcgccctgtcgcccaggctggagtgcagtggagctgctca

SEQ ID NO: 24355 - protein, 48 aa, Homo sapiens [sequence omitted]

SEQ ID NO: 24356 - DNA, 3720 bp, Homo sapiens
cgctgacactgcgtccggggccagacgacgatatcagcgcggggtccccacaacgccatggggcagagccaactctcgagcgcgtgatcgaagcccgcagttttttcgcccccgtcacttccgggtgcgacaatctcttctgtccggccagccgctggagtcgttaggtgccgccttgcttctgacgagccacacgtttgcttcttccctgtgttcccagctggagggacatgagtgtccctgggccgtcgtctccggacggggccctgacacggccaccctactgcctggaggccggggagccgacgcctgtttgctgaggctaaacactatcatgccaagttggtgaatataagaaaagagatgctgatgcttcatgaaaaaacatcaaagttaaaaaaaagagcacttaaactgcagcagaagaggcaaaaagaagagttggaaagggagcagcaacgagagaaggagtttgaaagagaaaagcagttaactgccagaccagccaaaaggatgtgaaaagttgtgtttgtgtgttttcttctcctgtcccatatttgggttatgatgactcaagtgtagactgaagttgaggtagtgccttatgccattatgtcatatgttgaaatccttattccggtattactgtgtctccatgccttttttccaagtagcagacgtcatgttgcatggtttttgatatttatatgtaagtttttcaaattttgcttaattttaaaatttattattttgatcttgaattatttataaactggaaagtggtttgattattgtgagtcaaaactctaagtggttaaaaattagtatgaattttttagcttcttaatgaatatggatttaaaactctccagttcttattttatgaaatgacttgcctttctggtaatacaatgctgattttttagtaattgccttttcattactttgttaagaagaaatgccagctgtttaatcacacctacccctggaaaagaggtaaaccttttgaacagttgaatttcatcagaagctctatagctttttggtgagaggaagtgatactctttattacaagaaacaaggaattaacaaaaataaggaacttgttgctacctttcttttctgttgaacattaaaaataatttggtttgtggactgggcatggtggcttatggaaaagaggtgagcctttgtgaagaacataatggaaaagtgcatgtacgggaaataacagcactttaggtgtagttcaggtgagcaagatgccagatagtttctactaaccatatactctttctgcttcttagcgtcgttgtcactgcttctgtggcttttgggttcaaagtagattatatatattcctaaagcttggtggaggtagtggagctatcacacactcaaatgagcttgtatatttataatacaatatagtattatagtaacagttatcatacactgagatatagtttctgtgcttgtaaaaaattcttgaagtgaggccgggtgcggtggctcatgcctgtaatcccaacgctttgggacgccgaggcgggtggatcatgaggtcaaaagattgagaccatcctggccaacatggtgaaaccccgtctctactagaaatacaaaaattagctgggtgtgggggcgtgcgcctgtagtcccagctacttgggaggctgaggcaggagaattgcttgaacccaggaggcagaggttgcagtaagccaagatcgtgccactgcactccagccttggtgacagagcaagactccgtctccaaaaaaaagaaaaaaaaatttcttgaagtggaatgatgtacaccaaatacccactttatagataattacagggatggtgaaaaattagtaaatagcttcacaaaagaggcagcgtgatacctttagtgttttctagaatttttttctggatattatatgtaagaatttattgtttgagggaaatacgaggtttcattgtttaaaatcaagagtgtattgtttactgttttacagtattatttaatatccaactggtctccaatctccattacatagggactgtacagagcctgtgaagatgtatgaatggtatcttttataatccacaatacatttctggtaagatggaatcactacctctgatcacatatcaggctaacgatagagaaagcattaggtttaagttgagggctaagaactggtttgtttaaaggtttaaattgttggaaaagagcatttgccttctttaatgaatgatggtctcacaattcagttgactttgacctaatatttaagaatataaatatattttatttgaaaggctgagtgttgccctcaaacacttgctaaaactgcctagggcaggattcattagggcttgcagacaatgtcacctaaattgctgaatgtactcattataatatgatatctgacaaaggtagtacagcgtttctgagtcatttgggaccaactgcagtggttgtttaaaatgctggttcctgcacacaattctctatctactgaagcacatctgttttctttgtttgttttgctttgctttttgtttttaaagtttcccccagtgattccagtgcacctgaaaagttgagaaccacaggcttagtggtacgttggggtttcccacgctaggctgcatagcattataacctgggaacgttaaaaaaaatacagacattcttgattcttagtgtagttatgatgtggatcctacgtattttttaaaaaactctccagataattttgatgtcacgagtcactagtatagactatctatctagtgagttgtattataagcgatgaaatactttaaaagctacccagtaactcttgggattaattttatgaaataaattctgagctgctgcttttgatatagtcagacttaagactgaaccccagtagacaggcaatagatatagaattctggttagctaattgaacttttgtgacctgtttaaaaacaaatcaaatttattgaacaaatgacaaggcacaaatactttcagaattgtatttcagttttgaagatttaaaaaaaatgtgaaaataaatatatattagtatcctttattttaaagtcaattgtaaaccagaagtactgttattttggtgattaaaatccaaaactttagctgtatttcagtaacaaaaacataccttactagactgtgatggctcacacctgtaatcccagtgctttgggaggctgaggtgggaagattctttgagcccaggagttcaaggctgcagtgaattctgatcgcaccactgaactccagcccgtatgacagagtgagaccctgtttctaaaaacaaaacaaacaaacaaacaaacaacgtatcttactgactaaactggaatggaaatcttataattagtgttgtatttttctgcaaaatagtgaattggtacttgggagacttctgttctttgttgaaaaaaattgcctttgttttgaaattatatcacctgtgttctgaactaaaatgatgggagttcattttgtatttactttgcagtaagtatcatgtaaatatgcaaatgttgaatgtaatatagattgtgtcctcattgagtttttgggtgatacagtttataaatataacaattatacaccctcatacattcgtctgattttgagcttgtaagatgagaactgctttttacacatttaataaaaaaaggtctctgaattatctg

SEQ ID NO: 24357 - protein, 51 aa, Homo sapiens
MLMLHEKTSKLKKRALKLQQKRQKEELEREQQREKEFEREKQLTARPAKRM

SEQ ID NO: 24358 - DNA, 3945 bp, Homo sapiens
acactgcgtccggggccagacgacgatatcagcgcggggtccccacaacgccatggggcagagccaactctcgagcgcgtgatcgaagcccgcagttttttcgcccccgtcacttccgggtgcgacaatctcttctgtccggccagccgctggagtcgttaggtgccgccttgcttctgacgagccacacgtttgcttcttccctgtgttcccagctggagggacatgagtgtccctgggccgtcgtctccggacggggccctgacacggccaccctactgcctggaggccggggagccgacgcctggtttaagtgacacttctccagatgaagggttaatagaggacttgactatagaagacaaagcagtggagcaactggcagaaggattgctttctcattatttgccagatctgcagagatcaaaacaagccctccaggaactcacacagaaccaagttgtattgttagacacactggaacaagagatttcaaaatttaaagaatgtcattctatgttggatattaatgctttgtttgctgaggctaaacactatcatgccaagttggtgaatataagaaaagagatgctgatgcttcatgaaaaaacatcaaagttaaaaaaaagagcacttaaactgcagcagaagaggcaaaaagaagagttggaaagggagcagcaacgagagaaggagtttgaaagagaaaagcagttaactgccagaccagccaaaaggatgtgaaaagttgtgtttgtgtgttttcttctcctgtcccatatttgggttatgatgactcaagtgtagactgaagttgaggtagtgccttatgccattatgtcatatgttgaaatccttattccggtattactgtgtctccatgccttttttccaagtagcagacgtcatgttgcatggtttttgatatttatatgtaagtttttcaaattttgcttaattttaaaatttattattttgatcttgaattatttataaactggaaagtggtttgattattgtgagtcaaaactctaagtggttaaaaattagtatgaattttttagcttcttaatgaatatggatttaaaactctccagttcttattttatgaaatgacttgcctttctggtaatacaatgctgattttttagtaattgccttttcattactttgttaagaagaaatgccagctgtttaatcacacctacccctggaaaagaggtaaaccttttgaacagttgaatttcatcagaagctctatagctttttggtgagaggaagtgatactctttattacaagaaacaaggaattaacaaaaataaggaacttgttgctacctttcttttctgttgaacattaaaaataatttggtttgtggactgggcatggtggcttatggaaaagaggtgagcctttgtgaagaacataatggaaaagtgcatgtacgggaaataacagcactttaggtgtagttcaggtgagcaagatgccagatagtttctactaaccatatactctttctgcttcttagcgtcgttgtcactgcttctgtggcttttgggttcaaagtagattatatatattcctaaagcttggtggaggtagtggagctatcacacactcaaatgagcttgtatatttataatacaatatagtattatagtaacagttatcatacactgagatatagtttctgtgcttgtaaaaaattcttgaagtgaggccgggtgcggtggctcatgcctgtaatcccaacgctttgggacgccgaggcgggtggatcatgaggtcaaaagattgagaccatcctggccaacatggtgaaaccccgtctctactagaaatacaaaaattagctgggtgtgggggcgtgcgcctgtagtcccagctacttgggaggctgaggcaggagaattgcttgaacccaggaggcagaggttgcagtaagccaagatcgtgccactgcactccagccttggtgacagagcaagactccgtctccaaaaaaaagaaaaaaaaatttcttgaagtggaatgatgtacaccaaatacccactttatagataattacagggatggtgaaaaattagtaaatagcttcacaaaagaggcagcgtgatacctttagtgttttctagaatttttttctggatattatatgtaagaatttattgtttgagggaaatacgaggtttcattgtttaaaatcaagagtgtattgtttactgttttacagtattatttaatatccaactggtctccaatctccattacatagggactgtacagagcctgtgaagatgtatgaatggtatcttttataatccacaatacatttctggtaagatggaatcactacctctgatcacatatcaggctaacgatagagaaagcattaggtttaagttgagggctaagaactggtttgtttaaaggtttaaattgttggaaaagagcatttgccttctttaatgaatgatggtctcacaattcagttgactttgacctaatatttaagaatataaatatattttatttgaaaggctgagtgttgccctcaaacacttgctaaaactgcctagggcaggattcattagggcttgcagacaatgtcacctaaattgctgaatgtactcattataatatgatatctgacaaaggtagtacagcgtttctgagtcatttgggaccaactgcagtggttgtttaaaatgctggttcctgcacacaattctctatctactgaagcacatctgttttctttgtttgttttgctttgctttttgtttttaaagtttcccccagtgattccagtgcacctgaaaagttgagaaccacaggcttagtggtacgttggggtttcccacgctaggctgcatagcattataacctgggaacgttaaaaaaaatacagacattcttgattcttagtgtagttatgatgtggatcctacgtattttttaaaaaactctccagataattttgatgtcacgagtcactagtatagactatctatctagtgagttgtattataagcgatgaaatactttaaaagctacccagtaactcttgggattaattttatgaaataaattctgagctgctgcttttgatatagtcagacttaagactgaaccccagtagacaggcaatagatatagaattctggttagctaattgaacttttgtgacctgtttaaaaacaaatcaaatttattgaacaaatgacaaggcacaaatactttcagaattgtatttcagttttgaagatttaaaaaaaatgtgaaaataaatatatattagtatcctttattttaaagtcaattgtaaaccagaagtactgttattttggtgattaaaatccaaaactttagctgtatttcagtaacaaaaacataccttactagactgtgatggctcacacctgtaatcccagtgctttgggaggctgaggtgggaagattctttgagcccaggagttcaaggctgcagtgaattctgatcgcaccactgaactccagcccgtatgacagagtgagaccctgtttctaaaaacaaaacaaacaaacaaacaaacaacgtatcttactgactaaactggaatggaaatcttataattagtgttgtatttttctgcaaaatagtgaattggtacttgggagacttctgttctttgttgaaaaaaattgcctttgttttgaaattatatcacctgtgttctgaactaaaatgatgggagttcattttgtatttactttgcagtaagtatcatgtaaatatgcaaatgttgaatgtaatatagattgtgtcctcattgagtttttgggtgatacagtttataaatataacaattatacaccctcatacattcgtctgattttgagcttgtaagatgagaactgctttttacacatttaataaaaaaaggtctctgaattatctg

SEQ ID NO: 24359 - protein, 172 aa, Homo sapiens; identical to SEQ ID NO: 3237

SEQ ID NO: 24360 - DNA, 3679 bp, Homo sapiens
gacgagccacacgtttgcttcttccctgtgttcccagctggagggacatgagtgtccctgggccgtcgtctccggacggggccctgacacggccaccctactgcctggaggccggggagccgacgcctggtttaagtgacacttctccagatgaagggttaatagaggacttgactatagaagacaaagcagtggagcaactggcagaaggattgctttctcattatttgccagatctgcagagatcaaaacaagccctccaggaactcactttgctgaggctaaacactatcatgccaagttggtgaatataagaaaagagatgctgatgcttcatgaaaaaacatcaaagttaaaaaaaagagcacttaaactgcagcagaagaggcaaaaagaagagttggaaagggagcagcaacgagagaaggagtttgaaagagaaaagcagttaactgccagaccagccaaaaggatgtgaaaagttgtgtttgtgtgttttcttctcctgtcccatatttgggttatgatgactcaagtgtagactgaagttgaggtagtgccttatgccattatgtcatatgttgaaatccttattccggtattactgtgtctccatgccttttttccaagtagcagacgtcatgttgcatggtttttgatatttatatgtaagtttttcaaattttgcttaattttaaaatttattattttgatcttgaattatttataaactggaaagtggtttgattattgtgagtcaaaactctaagtggttaaaaattagtatgaattttttagcttcttaatgaatatggatttaaaactctccagttcttattttatgaaatgacttgcctttctggtaatacaatgctgattttttagtaattgccttttcattactttgttaagaagaaatgccagctgtttaatcacacctacccctggaaaagaggtaaaccttttgaacagttgaatttcatcagaagctctatagctttttggtgagaggaagtgatactctttattacaagaaacaaggaattaacaaaaataaggaacttgttgctacctttcttttctgttgaacattaaaaataatttggtttgtggactgggcatggtggcttatggaaaagaggtgagcctttgtgaagaacataatggaaaagtgcatgtacgggaaataacagcactttaggtgtagttcaggtgagcaagatgccagatagtttctactaaccatatactctttctgcttcttagcgtcgttgtcactgcttctgtggcttttgggttcaaagtagattatatatattcctaaagcttggtggaggtagtggagctatcacacactcaaatgagcttgtatatttataatacaatatagtattatagtaacagttatcatacactgagatatagtttctgtgcttgtaaaaaattcttgaagtgaggccgggtgcggtggctcatgcctgtaatcccaacgctttgggacgccgaggcgggtggatcatgaggtcaaaagattgagaccatcctggccaacatggtgaaaccccgtctctactagaaatacaaaaattagctgggtgtgggggcgtgcgcctgtagtcccagctacttgggaggctgaggcaggagaattgcttgaacccaggaggcagaggttgcagtaagccaagatcgtgccactgcactccagccttggtgacagagcaagactccgtctccaaaaaaaagaaaaaaaaatttcttgaagtggaatgatgtacaccaaatacccactttatagataattacagggatggtgaaaaattagtaaatagcttcacaaaagaggcagcgtgatacctttagtgttttctagaatttttttctggatattatatgtaagaatttattgtttgagggaaatacgaggtttcattgtttaaaatcaagagtgtattgtttactgttttacagtattatttaatatccaactggtctccaatctccattacatagggactgtacagagcctgtgaagatgtatgaatggtatcttttataatccacaatacatttctggtaagatggaatcactacctctgatcacatatcaggctaacgatagagaaagcattaggtttaagttgagggctaagaactggtttgtttaaaggtttaaattgttggaaaagagcatttgccttctttaatgaatgatggtctcacaattcagttgactttgacctaatatttaagaatataaatatattttatttgaaaggctgagtgttgccctcaaacacttgctaaaactgcctagggcaggattcattagggcttgcagacaatgtcacctaaattgctgaatgtactcattataatatgatatctgacaaaggtagtacagcgtttctgagtcatttgggaccaactgcagtggttgtttaaaatgctggttcctgcacacaattctctatctactgaagcacatctgttttctttgtttgttttgctttgctttttgtttttaaagtttcccccagtgattccagtgcacctgaaaagttgagaaccacaggcttagtggtacgttggggtttcccacgctaggctgcatagcattataacctgggaacgttaaaaaaaatacagacattcttgattcttagtgtagttatgatgtggatcctacgtattttttaaaaaactctccagataattttgatgtcacgagtcactagtatagactatctatctagtgagttgtattataagcgatgaaatactttaaaagctacccagtaactcttgggattaattttatgaaataaattctgagctgctgcttttgatatagtcagacttaagactgaaccccagtagacaggcaatagatatagaattctggttagctaattgaacttttgtgacctgtttaaaaacaaatcaaatttattgaacaaatgacaaggcacaaatactttcagaattgtatttcagttttgaagatttaaaaaaaatgtgaaaataaatatatattagtatcctttattttaaagtcaattgtaaaccagaagtactgttattttggtgattaaaatccaaaactttagctgtatttcagtaacaaaaacataccttactagactgtgatggctcacacctgtaatcccagtgctttgggaggctgaggtgggaagattctttgagcccaggagttcaaggctgcagtgaattctgatcgcaccactgaactccagcccgtatgacagagtgagaccctgtttctaaaaacaaaacaaacaaacaaacaaacaacgtatcttactgactaaactggaatggaaatcttataattagtgttgtatttttctgcaaaatagtgaattggtacttgggagacttctgttctttgttgaaaaaaattgcctttgttttgaaattatatcacctgtgttctgaactaaaatgatgggagttcattttgtatttactttgcagtaagtatcatgtaaatatgcaaatgttgaatgtaatatagattgtgtcctcattgagtttttgggtgatacagtttataaatataacaattatacaccctcatacattcgtctgattttgagcttgtaagatgagaactgctttttacacatttaataaaaaaaggtctctgaattatctg

SEQ ID NO: 24361 - protein, 86 aa, Homo sapiens
MSVPGPSSPDGALTRPPYCLEAGEPTPGLSDTSPDEGLIEDLTIEDKAVEQLAEGLLSHYLPDLQRSKQALQELTLLRLNTIMPSW

SEQ ID NO: 24362 - DNA, 3617 bp, Homo sapiens
gtgttcccagctggagggacatgagtgtccctgggccgtcgtctccggacggggccctgacacggccaccctactgcctggaggccggggagccgacgcctgcattctttaaaatattcagacagaaccaagttgtattgttagacacactggaacaagagatttcaaaatttaaagaatgtcattctatgttggatattaatgctttgtttgctgaggctaaacactatcatgccaagttggtgaatataagaaaagagatgctgatgcttcatgaaaaaacatcaaagttaaaaaaaagagcacttaaactgcagcagaagaggcaaaaagaagagttggaaagggagcagcaacgagagaaggagtttgaaagagaaaagcagttaactgccagaccagccaaaaggatgtgaaaagttgtgtttgtgtgttttcttctcctgtcccatatttgggttatgatgactcaagtgtagactgaagttgaggtagtgccttatgccattatgtcatatgttgaaatccttattccggtattactgtgtctccatgccttttttccaagtagcagacgtcatgttgcatggtttttgatatttatatgtaagtttttcaaattttgcttaattttaaaatttattattttgatcttgaattatttataaactggaaagtggtttgattattgtgagtcaaaactctaagtggttaaaaattagtatgaattttttagcttcttaatgaatatggatttaaaactctccagttcttattttatgaaatgacttgcctttctggtaatacaatgctgattttttagtaattgccttttcattactttgttaagaagaaatgccagctgtttaatcacacctacccctggaaaagaggtaaaccttttgaacagttgaatttcatcagaagctctatagctttttggtgagaggaagtgatactctttattacaagaaacaaggaattaacaaaaataaggaacttgttgctacctttcttttctgttgaacattaaaaataatttggtttgtggactgggcatggtggcttatggaaaagaggtgagcctttgtgaagaacataatggaaaagtgcatgtacgggaaataacagcactttaggtgtagttcaggtgagcaagatgccagatagtttctactaaccatatactctttctgcttcttagcgtcgttgtcactgcttctgtggcttttgggttcaaagtagattatatatattcctaaagcttggtggaggtagtggagctatcacacactcaaatgagcttgtatatttataatacaatatagtattatagtaacagttatcatacactgagatatagtttctgtgcttgtaaaaaattcttgaagtgaggccgggtgcggtggctcatgcctgtaatcccaacgctttgggacgccgaggcgggtggatcatgaggtcaaaagattgagaccatcctggccaacatggtgaaaccccgtctctactagaaatacaaaaattagctgggtgtgggggcgtgcgcctgtagtcccagctacttgggaggctgaggcaggagaattgcttgaacccaggaggcagaggttgcagtaagccaagatcgtgccactgcactccagccttggtgacagagcaagactccgtctccaaaaaaaagaaaaaaaaatttcttgaagtggaatgatgtacaccaaatacccactttatagataattacagggatggtgaaaaattagtaaatagcttcacaaaagaggcagcgtgatacctttagtgttttctagaatttttttctggatattatatgtaagaatttattgtttgagggaaatacgaggtttcattgtttaaaatcaagagtgtattgtttactgttttacagtattatttaatatccaactggtctccaatctccattacatagggactgtacagagcctgtgaagatgtatgaatggtatcttttataatccacaatacatttctggtaagatggaatcactacctctgatcacatatcaggctaacgatagagaaagcattaggtttaagttgagggctaagaactggtttgtttaaaggtttaaattgttggaaaagagcatttgccttctttaatgaatgatggtctcacaattcagttgactttgacctaatatttaagaatataaatatattttatttgaaaggctgagtgttgccctcaaacacttgctaaaactgcctagggcaggattcattagggcttgcagacaatgtcacctaaattgctgaatgtactcattataatatgatatctgacaaaggtagtacagcgtttctgagtcatttgggaccaactgcagtggttgtttaaaatgctggttcctgcacacaattctctatctactgaagcacatctgttttctttgtttgttttgctttgctttttgtttttaaagtttcccccagtgattccagtgcacctgaaaagttgagaaccacaggcttagtggtacgttggggtttcccacgctaggctgcatagcattataacctgggaacgttaaaaaaaatacagacattcttgattcttagtgtagttatgatgtggatcctacgtattttttaaaaaactctccagataattttgatgtcacgagtcactagtatagactatctatctagtgagttgtattataagcgatgaaatactttaaaagctacccagtaactcttgggattaattttatgaaataaattctgagctgctgcttttgatatagtcagacttaagactgaaccccagtagacaggcaatagatatagaattctggttagctaattgaacttttgtgacctgtttaaaaacaaatcaaatttattgaacaaatgacaaggcacaaatactttcagaattgtatttcagttttgaagatttaaaaaaaatgtgaaaataaatatatattagtatcctttattttaaagtcaattgtaaaccagaagtactgttattttggtgattaaaatccaaaactttagctgtatttcagtaacaaaaacataccttactagactgtgatggctcacacctgtaatcccagtgctttgggaggctgaggtgggaagattctttgagcccaggagttcaaggctgcagtgaattctgatcgcaccactgaactccagcccgtatgacagagtgagaccctgtttctaaaaacaaaacaaacaaacaaacaaacaacgtatcttactgactaaactggaatggaaatcttataattagtgttgtatttttctgcaaaatagtgaattggtacttgggagacttctgttctttgttgaaaaaaattgcctttgttttgaaattatatcacctgtgttctgaactaaaatgatgggagttcattttgtatttactttgcagtaagtatcatgtaaatatgcaaatgttgaatgtaatatagattgtgtcctcattgagtttttgggtgatacagtttataaatataacaattatacaccctcatacattcgtctgattttgagcttgtaagatgagaactgctttttacacatttaataaaaaaaggtctctgaattatctg

SEQ ID NO: 24363 - protein, 131 aa, Homo sapiens
MSVPGPSSPDGALTRPPYCLEAGEPTPAFFKIFRQNQVVLLDTLEQEISKFKECHSMLDINALFAEAKHYHAKLVNIRKEMLMLHEKTSKLKKRALKLQQKRQKEELEREQQREKEFEREKQLTARPAKRM

SEQ ID NO: 24364 - DNA, 3592 bp, Homo sapiens
ccagctggagggacatgagtgtccctgggccgtcgtctccggacggggccctgacacggccaccctactgcctggaggccggggagccgacgcctgacagaaccaagttgtattgttagacacactggaacaagagatttcaaaatttaaagaatgtcattctatgttggatattaatgctttgtttgctgaggctaaacactatcatgccaagttggtgaatataagaaaagagatgctgatgcttcatgaaaaaacatcaaagttaaaaaaaagagcacttaaactgcagcagaagaggcaaaaagaagagttggaaagggagcagcaacgagagaaggagtttgaaagagaaaagcagttaactgccagaccagccaaaaggatgtgaaaagttgtgtttgtgtgttttcttctcctgtcccatatttgggttatgatgactcaagtgtagactgaagttgaggtagtgccttatgccattatgtcatatgttgaaatccttattccggtattactgtgtctccatgccttttttccaagtagcagacgtcatgttgcatggtttttgatatttatatgtaagtttttcaaattttgcttaattttaaaatttattattttgatcttgaattatttataaactggaaagtggtttgattattgtgagtcaaaactctaagtggttaaaaattagtatgaattttttagcttcttaatgaatatggatttaaaactctccagttcttattttatgaaatgacttgcctttctggtaatacaatgctgattttttagtaattgccttttcattactttgttaagaagaaatgccagctgtttaatcacacctacccctggaaaagaggtaaaccttttgaacagttgaatttcatcagaagctctatagctttttggtgagaggaagtgatactctttattacaagaaacaaggaattaacaaaaataaggaacttgttgctacctttcttttctgttgaacattaaaaataatttggtttgtggactgggcatggtggcttatggaaaagaggtgagcctttgtgaagaacataatggaaaagtgcatgtacgggaaataacagcactttaggtgtagttcaggtgagcaagatgccagatagtttctactaaccatatactctttctgcttcttagcgtcgttgtcactgcttctgtggcttttgggttcaaagtagattatatatattcctaaagcttggtggaggtagtggagctatcacacactcaaatgagcttgtatatttataatacaatatagtattatagtaacagttatcatacactgagatatagtttctgtgcttgtaaaaaattcttgaagtgaggccgggtgcggtggctcatgcctgtaatcccaacgctttgggacgccgaggcgggtggatcatgaggtcaaaagattgagaccatcctggccaacatggtgaaaccccgtctctactagaaatacaaaaattagctgggtgtgggggcgtgcgcctgtagtcccagctacttgggaggctgaggcaggagaattgcttgaacccaggaggcagaggttgcagtaagccaagatcgtgccactgcactccagccttggtgacagagcaagactccgtctccaaaaaaaagaaaaaaaaatttcttgaagtggaatgatgtacaccaaatacccactttatagataattacagggatggtgaaaaattagtaaatagcttcacaaaagaggcagcgtgatacctttagtgttttctagaatttttttctggatattatatgtaagaatttattgtttgagggaaatacgaggtttcattgtttaaaatcaagagtgtattgtttactgttttacagtattatttaatatccaactggtctccaatctccattacatagggactgtacagagcctgtgaagatgtatgaatggtatcttttataatccacaatacatttctggtaagatggaatcactacctctgatcacatatcaggctaacgatagagaaagcattaggtttaagttgagggctaagaactggtttgtttaaaggtttaaattgttggaaaagagcatttgccttctttaatgaatgatggtctcacaattcagttgactttgacctaatatttaagaatataaatatattttatttgaaaggctgagtgttgccctcaaacacttgctaaaactgcctagggcaggattcattagggcttgcagacaatgtcacctaaattgctgaatgtactcattataatatgatatctgacaaaggtagtacagcgtttctgagtcatttgggaccaactgcagtggttgtttaaaatgctggttcctgcacacaattctctatctactgaagcacatctgttttctttgtttgttttgctttgctttttgtttttaaagtttcccccagtgattccagtgcacctgaaaagttgagaaccacaggcttagtggtacgttggggtttcccacgctaggctgcatagcattataacctgggaacgttaaaaaaaatacagacattcttgattcttagtgtagttatgatgtggatcctacgtattttttaaaaaactctccagataattttgatgtcacgagtcactagtatagactatctatctagtgagttgtattataagcgatgaaatactttaaaagctacccagtaactcttgggattaattttatgaaataaattctgagctgctgcttttgatatagtcagacttaagactgaaccccagtagacaggcaatagatatagaattctggttagctaattgaacttttgtgacctgtttaaaaacaaatcaaatttattgaacaaatgacaaggcacaaatactttcagaattgtatttcagttttgaagatttaaaaaaaatgtgaaaataaatatatattagtatcctttattttaaagtcaattgtaaaccagaagtactgttattttggtgattaaaatccaaaactttagctgtatttcagtaacaaaaacataccttactagactgtgatggctcacacctgtaatcccagtgctttgggaggctgaggtgggaagattctttgagcccaggagttcaaggctgcagtgaattctgatcgcaccactgaactccagcccgtatgacagagtgagaccctgtttctaaaaacaaaacaaacaaacaaacaaacaacgtatcttactgactaaactggaatggaaatcttataattagtgttgtatttttctgcaaaatagtgaattggtacttgggagacttctgttctttgttgaaaaaaattgcctttgttttgaaattatatcacctgtgttctgaactaaaatgatgggagttcattttgtatttactttgcagtaagtatcatgtaaatatgcaaatgttgaatgtaatatagattgtgtcctcattgagtttttgggtgatacagtttataaatataacaattatacaccctcatacattcgtctgattttgagcttgtaagatgagaactgctttttacacatttaataaaaaaaggtctctgaattatctg

SEQ ID NO: 24365 - protein, 75 aa, Homo sapiens
MLDINALFAEAKHYHAKLVNIRKEMLMLHEKTSKLKKRALKLQQKRQKEELEREQQREKEFEREKQLTARPAKRM

SEQ ID NO: 24366 - DNA, 701 bp, Homo sapiens
ggagggacatgagtgtccctgggccgtcgtctccggacggggccctgacacggccaccctactgcctggaggccggggagccgacgcctggtttaagtgacacttctccagatgaagggttaatagaggacttgactatagaagacaaagcagtggagcaactggcagaaggattgctttctcattatttgccagatctgcagagatcaaaacaagccctccaggaactcacacagaaccaagttgtattgttagacacactggaacaagagatttcaaaatttaaagaatgtcattctatgttggatattaatgctttgtttgctgaggctaaacactatcatgccaagttggtgaatataagaaaagagatgctgatgcttcatgaaaaaacatcaaagttaaaagaattcaaggacgaagatatcaatgaccagcacagagatgtaatcttcctctcggccacacacctgggtgtttcccttatttttttgctgcgtgtttccttcatgtcgtccaatttcttttcttattctcatatttggctagatttttaataccagatctatgtcagctccttctcaaacctaaaattcagagccccagctctgttgagcgtgtattatatttcagttgctttatacatgttatctcataacagcaaccttaggaggtaactattgttattaccattttacagg

SEQ ID NO: 24367 - protein, 182 aa, Homo sapiens
MSVPGPSSPDGALTRPPYCLEAGEPTPGLSDTSPDEGLIEDLTIEDKAVEQLAEGLLSHYLPDLQRSKQALQELTQNQVVLLDTLEQEISKFKECHSMLDINALFAEAKHYHAKLVNIRKEMLMLHEKTSKLKEFKDEDINDQHRDVIFLSATHLGVSLIFLLRVSFMSSNFFSYSHIWLDF

SEQ ID NO: 24368 - DNA, 4018 bp, Homo sapiens
gaactccggagaaaccctgggggagtaagcggtttttggcggctgcggcccccgggccctgccccgagtgcagaaatggggaaccgcgccggcccctctgcccagcgcaatgggcggaactgaagtcccgaggggaagctttgtattgggggtgcaattgaaggcggttgatggtgaagccattctgagtttatgtgttgactccggtttaagtgacacttctccagatgaagggttaatagaggacttgactatagaagacaaagcagtggagcaactggcagaaggattgctttctcattatttgccagatctgcagagatcaaaacaagccctccaggaactcaccacagctgcagttgactgtacgtgcctaaaactgaagaaagcaaaactgcagataaaggaggactgacatattttctggaagagactgtggggaattggtatcacgtcttccttaaatgtttggtaaaaattaccagtgaagccgtttggtcccggtactgtcttttttggaagacagaaccaagttgtattgttagacacactggaacaagagatttcaaaatttaaagaatgtcattctatgttggatattaatgctttgtttgctgaggctaaacactatcatgccaagttggtgaatataagaaaagagatgctgatgcttcatgaaaaaacatcaaagttaaaaaaaagagcacttaaactgcagcagaagaggcaaaaagaagagttggaaagggagcagcaacgagagaaggagtttgaaagagaaaagcagttaactgccagaccagccaaaaggatgtgaaaagttgtgtttgtgtgttttcttctcctgtcccatatttgggttatgatgactcaagtgtagactgaagttgaggtagtgccttatgccattatgtcatatgttgaaatccttattccggtattactgtgtctccatgccttttttccaagtagcagacgtcatgttgcatggtttttgatatttatatgtaagtttttcaaattttgcttaattttaaaatttattattttgatcttgaattatttataaactggaaagtggtttgattattgtgagtcaaaactctaagtggttaaaaattagtatgaattttttagcttcttaatgaatatggatttaaaactctccagttcttattttatgaaatgacttgcctttctggtaatacaatgctgattttttagtaattgccttttcattactttgttaagaagaaatgccagctgtttaatcacacctacccctggaaaagaggtaaaccttttgaacagttgaatttcatcagaagctctatagctttttggtgagaggaagtgatactctttattacaagaaacaaggaattaacaaaaataaggaacttgttgctacctttcttttctgttgaacattaaaaataatttggtttgtggactgggcatggtggcttatggaaaagaggtgagcctttgtgaagaacataatggaaaagtgcatgtacgggaaataacagcactttaggtgtagttcaggtgagcaagatgccagatagtttctactaaccatatactctttctgcttcttagcgtcgttgtcactgcttctgtggcttttgggttcaaagtagattatatatattcctaaagcttggtggaggtagtggagctatcacacactcaaatgagcttgtatatttataatacaatatagtattatagtaacagttatcatacactgagatatagtttctgtgcttgtaaaaaattcttgaagtgaggccgggtgcggtggctcatgcctgtaatcccaacgctttgggacgccgaggcgggtggatcatgaggtcaaaagattgagaccatcctggccaacatggtgaaaccccgtctctactagaaatacaaaaattagctgggtgtgggggcgtgcgcctgtagtcccagctacttgggaggctgaggcaggagaattgcttgaacccaggaggcagaggttgcagtaagccaagatcgtgccactgcactccagccttggtgacagagcaagactccgtctccaaaaaaaagaaaaaaaaatttcttgaagtggaatgatgtacaccaaatacccactttatagataattacagggatggtgaaaaattagtaaatagcttcacaaaagaggcagcgtgatacctttagtgttttctagaatttttttctggatattatatgtaagaatttattgtttgagggaaatacgaggtttcattgtttaaaatcaagagtgtattgtttactgttttacagtattatttaatatccaactggtctccaatctccattacatagggactgtacagagcctgtgaagatgtatgaatggtatcttttataatccacaatacatttctggtaagatggaatcactacctctgatcacatatcaggctaacgatagagaaagcattaggtttaagttgagggctaagaactggtttgtttaaaggtttaaattgttggaaaagagcatttgccttctttaatgaatgatggtctcacaattcagttgactttgacctaatatttaagaatataaatatattttatttgaaaggctgagtgttgccctcaaacacttgctaaaactgcctagggcaggattcattagggcttgcagacaatgtcacctaaattgctgaatgtactcattataatatgatatctgacaaaggtagtacagcgtttctgagtcatttgggaccaactgcagtggttgtttaaaatgctggttcctgcacacaattctctatctactgaagcacatctgttttctttgtttgttttgctttgctttttgtttttaaagtttcccccagtgattccagtgcacctgaaaagttgagaaccacaggcttagtggtacgttggggtttcccacgctaggctgcatagcattataacctgggaacgttaaaaaaaatacagacattcttgattcttagtgtagttatgatgtggatcctacgtattttttaaaaaactctccagataattttgatgtcacgagtcactagtatagactatctatctagtgagttgtattataagcgatgaaatactttaaaagctacccagtaactcttgggattaattttatgaaataaattctgagctgctgcttttgatatagtcagacttaagactgaaccccagtagacaggcaatagatatagaattctggttagctaattgaacttttgtgacctgtttaaaaacaaatcaaatttattgaacaaatgacaaggcacaaatactttcagaattgtatttcagttttgaagatttaaaaaaaatgtgaaaataaatatatattagtatcctttattttaaagtcaattgtaaaccagaagtactgttattttggtgattaaaatccaaaactttagctgtatttcagtaacaaaaacataccttactagactgtgatggctcacacctgtaatcccagtgctttgggaggctgaggtgggaagattctttgagcccaggagttcaaggctgcagtgaattctgatcgcaccactgaactccagcccgtatgacagagtgagaccctgtttctaaaaacaaaacaaacaaacaaacaaacaacgtatcttactgactaaactggaatggaaatcttataattagtgttgtatttttctgcaaaatagtgaattggtacttgggagacttctgttctttgttgaaaaaaattgcctttgttttgaaattatatcacctgtgttctgaactaaaatgatgggagttcattttgtatttactttgcagtaagtatcatgtaaatatgcaaatgttgaatgtaatatagattgtgtcctcattgagtttttgggtgatacagtttataaatataacaattatacaccctcatacattcgtctgattttgagcttgtaagatgagaactgctttttacacatttaataaaaaaaggtctctgaattatctg

SEQ ID NO: 24369 - protein, 101 aa, Homo sapiens
MGGTEVPRGSFVLGVQLKAVDGEAILSLCVDSGLSDTSPDEGLIEDLTIEDKAVEQLAEGLLSHYLPDLQRSKQALQELTTAAVDCTCLKLKKAKLQIKED

SEQ ID NO: 24370 - DNA, 3474 bp, Homo sapiens
atttgtcatacggcagtggtgggggatggatttaccagaaagatgatcagcttataattcagagagtttgctgaggctaaacactatcatgccaagttggtgaatataagaaaagagatgctgatgcttcatgaaaaaacatcaaagttaaaaaaaagagcacttaaactgcagcagaagaggcaaaaagaagagttggaaagggagcagcaacgagagaaggagtttgaaagagaaaagcagttaactgccagaccagccaaaaggatgtgaaaagttgtgtttgtgtgttttcttctcctgtcccatatttgggttatgatgactcaagtgtagactgaagttgaggtagtgccttatgccattatgtcatatgttgaaatccttattccggtattactgtgtctccatgccttttttccaagtagcagacgtcatgttgcatggtttttgatatttatatgtaagtttttcaaattttgcttaattttaaaatttattattttgatcttgaattatttataaactggaaagtggtttgattattgtgagtcaaaactctaagtggttaaaaattagtatgaattttttagcttcttaatgaatatggatttaaaactctccagttcttattttatgaaatgacttgcctttctggtaatacaatgctgattttttagtaattgccttttcattactttgttaagaagaaatgccagctgtttaatcacacctacccctggaaaagaggtaaaccttttgaacagttgaatttcatcagaagctctatagctttttggtgagaggaagtgatactctttattacaagaaacaaggaattaacaaaaataaggaacttgttgctacctttcttttctgttgaacattaaaaataatttggtttgtggactgggcatggtggcttatggaaaagaggtgagcctttgtgaagaacataatggaaaagtgcatgtacgggaaataacagcactttaggtgtagttcaggtgagcaagatgccagatagtttctactaaccatatactctttctgcttcttagcgtcgttgtcactgcttctgtggcttttgggttcaaagtagattatatatattcctaaagcttggtggaggtagtggagctatcacacactcaaatgagcttgtatatttataatacaatatagtattatagtaacagttatcatacactgagatatagtttctgtgcttgtaaaaaattcttgaagtgaggccgggtgcggtggctcatgcctgtaatcccaacgctttgggacgccgaggcgggtggatcatgaggtcaaaagattgagaccatcctggccaacatggtgaaaccccgtctctactagaaatacaaaaattagctgggtgtgggggcgtgcgcctgtagtcccagctacttgggaggctgaggcaggagaattgcttgaacccaggaggcagaggttgcagtaagccaagatcgtgccactgcactccagccttggtgacagagcaagactccgtctccaaaaaaaagaaaaaaaaatttcttgaagtggaatgatgtacaccaaatacccactttatagataattacagggatggtgaaaaattagtaaatagcttcacaaaagaggcagcgtgatacctttagtgttttctagaatttttttctggatattatatgtaagaatttattgtttgagggaaatacgaggtttcattgtttaaaatcaagagtgtattgtttactgttttacagtattatttaatatccaactggtctccaatctccattacatagggactgtacagagcctgtgaagatgtatgaatggtatcttttataatccacaatacatttctggtaagatggaatcactacctctgatcacatatcaggctaacgatagagaaagcattaggtttaagttgagggctaagaactggtttgtttaaaggtttaaattgttggaaaagagcatttgccttctttaatgaatgatggtctcacaattcagttgactttgacctaatatttaagaatataaatatattttatttgaaaggctgagtgttgccctcaaacacttgctaaaactgcctagggcaggattcattagggcttgcagacaatgtcacctaaattgctgaatgtactcattataatatgatatctgacaaaggtagtacagcgtttctgagtcatttgggaccaactgcagtggttgtttaaaatgctggttcctgcacacaattctctatctactgaagcacatctgttttctttgtttgttttgctttgctttttgtttttaaagtttcccccagtgattccagtgcacctgaaaagttgagaaccacaggcttagtggtacgttggggtttcccacgctaggctgcatagcattataacctgggaacgttaaaaaaaatacagacattcttgattcttagtgtagttatgatgtggatcctacgtattttttaaaaaactctccagataattttgatgtcacgagtcactagtatagactatctatctagtgagttgtattataagcgatgaaatactttaaaagctacccagtaactcttgggattaattttatgaaataaattctgagctgctgcttttgatatagtcagacttaagactgaaccccagtagacaggcaatagatatagaattctggttagctaattgaacttttgtgacctgtttaaaaacaaatcaaatttattgaacaaatgacaaggcacaaatactttcagaattgtatttcagttttgaagatttaaaaaaaatgtgaaaataaatatatattagtatcctttattttaaagtcaattgtaaaccagaagtactgttattttggtgattaaaatccaaaactttagctgtatttcagtaacaaaaacataccttactagactgtgatggctcacacctgtaatcccagtgctttgggaggctgaggtgggaagattctttgagcccaggagttcaaggctgcagtgaattctgatcgcaccactgaactccagcccgtatgacagagtgagaccctgtttctaaaaacaaaacaaacaaacaaacaaacaacgtatcttactgactaaactggaatggaaatcttataattagtgttgtatttttctgcaaaatagtgaattggtacttgggagacttctgttctttgttgaaaaaaattgcctttgttttgaaattatatcacctgtgttctgaactaaaatgatgggagttcattttgtatttactttgcagtaagtatcatgtaaatatgcaaatgttgaatgtaatatagattgtgtcctcattgagtttttgggtgatacagtttataaatataacaattatacaccctcatacattcgtctgattttgagcttgtaagatgagaactgctttttacacatttaataaaaaaaggtctctgaattatctg

SEQ ID NO: 24371 - protein, 51 aa, Homo sapiens; identical to SEQ ID NO: 24357

SEQ ID NO: 24372 - DNA, 3366 bp, Homo sapiens
tcaaaatttaaagaatgtcattctatgttggatattaatgctttgaaaagagcacttaaactgcagcagaagaggcaaaaagaagagttggaaagggagcagcaacgagagaaggagtttgaaagagaaaagcagttaactgccagaccagccaaaaggatgtgaaaagttgtgtttgtgtgttttcttctcctgtcccatatttgggttatgatgactcaagtgtagactgaagttgaggtagtgccttatgccattatgtcatatgttgaaatccttattccggtattactgtgtctccatgccttttttccaagtagcagacgtcatgttgcatggtttttgatatttatatgtaagtttttcaaattttgcttaattttaaaatttattattttgatcttgaattatttataaactggaaagtggtttgattattgtgagtcaaaactctaagtggttaaaaattagtatgaattttttagcttcttaatgaatatggatttaaaactctccagttcttattttatgaaatgacttgcctttctggtaatacaatgctgattttttagtaattgccttttcattactttgttaagaagaaatgccagctgtttaatcacacctacccctggaaaagaggtaaaccttttgaacagttgaatttcatcagaagctctatagctttttggtgagaggaagtgatactctttattacaagaaacaaggaattaacaaaaataaggaacttgttgctacctttcttttctgttgaacattaaaaataatttggtttgtggactgggcatggtggcttatggaaaagaggtgagcctttgtgaagaacataatggaaaagtgcatgtacgggaaataacagcactttaggtgtagttcaggtgagcaagatgccagatagtttctactaaccatatactctttctgcttcttagcgtcgttgtcactgcttctgtggcttttgggttcaaagtagattatatatattcctaaagcttggtggaggtagtggagctatcacacactcaaatgagcttgtatatttataatacaatatagtattatagtaacagttatcatacactgagatatagtttctgtgcttgtaaaaaattcttgaagtgaggccgggtgcggtggctcatgcctgtaatcccaacgctttgggacgccgaggcgggtggatcatgaggtcaaaagattgagaccatcctggccaacatggtgaaaccccgtctctactagaaatacaaaaattagctgggtgtgggggcgtgcgcctgtagtcccagctacttgggaggctgaggcaggagaattgcttgaacccaggaggcagaggttgcagtaagccaagatcgtgccactgcactccagccttggtgacagagcaagactccgtctccaaaaaaaagaaaaaaaaatttcttgaagtggaatgatgtacaccaaatacccactttatagataattacagggatggtgaaaaattagtaaatagcttcacaaaagaggcagcgtgatacctttagtgttttctagaatttttttctggatattatatgtaagaatttattgtttgagggaaatacgaggtttcattgtttaaaatcaagagtgtattgtttactgttttacagtattatttaatatccaactggtctccaatctccattacatagggactgtacagagcctgtgaagatgtatgaatggtatcttttataatccacaatacatttctggtaagatggaatcactacctctgatcacatatcaggctaacgatagagaaagcattaggtttaagttgagggctaagaactggtttgtttaaaggtttaaattgttggaaaagagcatttgccttctttaatgaatgatggtctcacaattcagttgactttgacctaatatttaagaatataaatatattttatttgaaaggctgagtgttgccctcaaacacttgctaaaactgcctagggcaggattcattagggcttgcagacaatgtcacctaaattgctgaatgtactcattataatatgatatctgacaaaggtagtacagcgtttctgagtcatttgggaccaactgcagtggttgtttaaaatgctggttcctgcacacaattctctatctactgaagcacatctgttttctttgtttgttttgctttgctttttgtttttaaagtttcccccagtgattccagtgcacctgaaaagttgagaaccacaggcttagtggtacgttggggtttcccacgctaggctgcatagcattataacctgggaacgttaaaaaaaatacagacattcttgattcttagtgtagttatgatgtggatcctacgtattttttaaaaaactctccagataattttgatgtcacgagtcactagtatagactatctatctagtgagttgtattataagcgatgaaatactttaaaagctacccagtaactcttgggattaattttatgaaataaattctgagctgctgcttttgatatagtcagacttaagactgaaccccagtagacaggcaatagatatagaattctggttagctaattgaacttttgtgacctgtttaaaaacaaatcaaatttattgaacaaatgacaaggcacaaatactttcagaattgtatttcagttttgaagatttaaaaaaaatgtgaaaataaatatatattagtatcctttattttaaagtcaattgtaaaccagaagtactgttattttggtgattaaaatccaaaactttagctgtatttcagtaacaaaaacataccttactagactgtgatggctcacacctgtaatcccagtgctttgggaggctgaggtgggaagattctttgagcccaggagttcaaggctgcagtgaattctgatcgcaccactgaactccagcccgtatgacagagtgagaccctgtttctaaaaacaaaacaaacaaacaaacaaacaacgtatcttactgactaaactggaatggaaatcttataattagtgttgtatttttctgcaaaatagtgaattggtacttgggagacttctgttctttgttgaaaaaaattgcctttgttttgaaattatatcacctgtgttctgaactaaaatgatgggagttcattttgtatttactttgcagtaagtatcatgtaaatatgcaaatgttgaatgtaatatagattgtgtcctcattgagtttttgggtgatacagtttataaatataacaattatacaccctcatacattcgtctgattttgagcttgtaagatgagaactgctttttacacatttaataaaaaaaggtctctgaattatctg

SEQ ID NO: 24373 - protein, 46 aa, Homo sapiens
MLDINALKRALKLQQKRQKEELEREQQREKEFEREKQLTARPAKRM

SEQ ID NO: 24374 - DNA, 1808 bp, Homo sapiens
ctcattttctcttgccgccaccatgtaagaagcgcctttcgcctccctccatgattctgaggcctccccagccacatggtacttgtatgcctagacagcgggcacagggcttgctggacacagaaggcaaggactcagagaatatccaccagatgaaagaatgactgcatgacctgatcctgcctgaagatggtgccactggtggctgtggtatcagggccccgtgcccagctctttgcctgcctgctcaggctgggcactcagcaggtcggcccccttcagctgcacaccggggccagccatgcggccaggaaccattatgaggtgctggtgctgggtgggggcagtggcggaatcaccatggctgcccgcatgaagaggaaagtgggtgcagagaatgtggccattgttgagcccagtgagagacatttctaccagccaatctggacactggtgggtgctggtgccaaacaattgtcctcatctggtcgtcccacggcaagtgtgattccatctggtgtagaatggatcaaagctagagtgactgagttgaacccagacaagaactgcattcacacagatgacgacgagaagatctcctaccgatatcttattattgctctcggaatccagctggactatgagaagattaaaggcctacctgaaggtttcgctcatcccaaaatagggtcgaattattcagttaagactgtagagaagacatggaaagctctgcaggacttcaaagagggcaatgccatcttcaccttcccaaatactccagtgaagtgtgctggagcccctcagaagatcatgtacttatcagaagcctacttcaggaagacagggaagcgatccaaggccaatatcattttcaacacttctcttggagccattttcggggttaagaagtatgcagatgccctgcaggagatcatccaggagcggaacctcactgttaactacaagaaaaacctcattgaagtccgagccgataaacaagaggctgtatttgagaacctggacaaaccaggagagacccaagtgatttcatatgaaatgcttcatgtcacacctccaatgagcccaccagatgtcctcaagaccagtcctgtggctgatgctgctggttgggtggatgtggataaagaaactctgcaacacaggaggtacccaaatgtgtttgggattggggactgcaccaaccttcctacgtcaaagaccgctgctgcagtagctgcccagtcaggaatacttgataggacaatttctgtaattatgaagaatcaaacaccaacaaagaagtatgatggctacacatcatgtccactggtgaccggctacaaccgtgtgattcttgctgagtttgactacaaagcagagccgctagaaaccttcccctttgatcaaagcaaagagcgcctttccatgtatctcatgaaagctgacctgatgcctttcctgtattggaatatgatgctaaggggttactggggaggaccagcgtttctgcgcaagttgtttcatctaggtatgagttaaggatggctcagcacttgctcatcttggatggcttctgggccaaaactgcagtcactgaatgaccaagagcagcacgaaggacttggaacctatccttgtaaagagttccttgatgggtaatggtgaccaaatgcctcccttttcagtacctttgaacagcaaccatgtgggctactcatgatgggcttgattctttgggaataataaaatgaaataatacttttattttctgaataaaagtttgtcactgattgtgttctatgaga

SEQ ID NO: 24375 - protein, 450 aa, Homo sapiens; identical to SEQ ID NO: 3239

SEQ ID NO: 24376 - DNA, 1942 bp, Homo sapiens
cgcgcaaggggcgagtctgtccagccggcagcaccccaggccggatggacgcttgttcctggttctgtgccccgtgagcgctcaacgccctggtgtgttcactgaccatggtgcctgggctgcggcgccgggcggggcacggcgggacttttcgggacctttcctggggggagcctcgctttccccgcctccagcctccgcccggatggcaggcgggcggggccccagtccaggccttgagacccagaagggagcgaaggtttttgctgcgccaacgcagtgaccgaaggctccgctcacgcccggcctgatcctgcctgaagatggtgccactggtggctgtggtatcagggccccgtgcccagctctttgcctgcctgctcaggctgggcactcagcaggtcggcccccttcagctgcacaccggggccagccatgcggccaggaaccattatgaggtgctggtgctgggtgggggcagtggcggaatcaccatggctgcccgcatgaagaggaaagtgggtgcagagaatgtggccattgttgagcccagtgagagacatttctaccagccaatctggacactggtgggtgctggtgccaaacaattgtcctcatctggtcgtcccacggcaagtgtgattccatctggtgtagaatggatcaaagctagagtgactgagttgaacccagacaagaactgcattcacacagatgacgacgagaagatctcctaccgatatcttattattgctctcggaatccagctggactatgagaagattaaaggcctacctgaaggtttcgctcatcccaaaatagggtcgaattattcagttaagactgtagagaagacatggaaagctctgcaggacttcaaagagggcaatgccatcttcaccttcccaaatactccagtgaagtgtgctggagcccctcagaagatcatgtacttatcagaagcctacttcaggaagacagggaagcgatccaaggccaatatcattttcaacacttctcttggagccattttcggggttaagaagtatgcagatgccctgcaggagatcatccaggagcggaacctcactgttaactacaagaaaaacctcattgaagtccgagccgataaacaagaggctgtatttgagaacctggacaaaccaggagagacccaagtgatttcatatgaaatgcttcatgtcacacctccaatgagcccaccagatgtcctcaagaccagtcctgtggctgatgctgctggttgggtggatgtggataaagaaactctgcaacacaggaggtacccaaatgtgtttgggattggggactgcaccaaccttcctacgtcaaagaccgctgctgcagtagctgcccagtcaggaatacttgataggacaatttctgtaattatgaagaatcaaacaccaacaaagaagtatgatggctacacatcatgtccactggtgaccggctacaaccgtgtgattcttgctgagtttgactacaaagcagagccgctagaaaccttcccctttgatcaaagcaaagagcgcctttccatgtatctcatgaaagctgacctgatgcctttcctgtattggaatatgatgctaaggggttactggggaggaccagcgtttctgcgcaagttgtttcatctaggtatgagttaaggatggctcagcacttgctcatcttggatggcttctgggccaaaactgcagtcactgaatgaccaagagcagcacgaaggacttggaacctatccttgtaaagagttccttgatgggtaatggtgaccaaatgcctcccttttcagtacctttgaacagcaaccatgtgggctactcatgatgggcttgattctttgggaataataaaatgaaataatacttttattttctgaataaaagtttgtcactgattgtgttctatgaga

SEQ ID NO: 24377 - protein, 450 aa, Homo sapiens; identical to SEQ ID NO: 3239

SEQ ID NO: 24378 - DNA, 656 bp, Homo sapiens
gtatcagggccccgtgcccagctctttgcctgcctgctcaggctgggcactcagcaggtcggcccccttcagctttctcttatagctgcccagtcaggaatacttgataggacaatttctgtaattatgaagaatcaaacaccaacaaagaagtatgatggctacacatcatgtccactggtgaccggctacaaccgtgtgattcttgctgagtttgactacaaagcagagccgctagaaaccttcccctttgatcaaagcaaagagcgcctttccatgtatctcatgaaagctgacctgatgcctttcctgtattggaatatgatgctaaggggttactggggaggaccagcgtttctgcgcaagttgtttcatctaggtatgagttaaggatggctcagcacttgctcatcttggatggcttctgggccaaaactgcagtcactgaatgaccaagagcagcacgaaggacttggaacctatccttgtaaagagttccttgatgggtaatggtgaccaaatgcctcccttttcagtacctttgaacagcaaccatgtgggctactcatgatgggcttgattctttgggaataataaaatgaaataatacttttattttctgaataaaagtttgtcactgattgtgttctatgaga

SEQ ID NO: 24379 - protein, 87 aa, Homo sapiens [sequence omitted]

SEQ ID NO: 24380 - DNA, 251 bp, Homo sapiens
tagctgcccagtcaggaatacttgataggacaatttctgtaattatgaagaatcaaacaccaacaaagaagtatgatggctacacatcatgtccactggtgaccggctacaaccgtgtgattcttgctgagtttgactacaaagcagagccgctagaaaccttcccctttgatcaaagcaaagagcgcctttccatgtatctcatgaaagctgacctgatgcctttcctgtattggaatatgatgctaagg

SEQ ID NO: 24381 - protein, 68 aa, Homo sapiens
MKNQTPTKKYDGYTSCPLVTGYNRVILAEFDYKAEPLETFPFDQSKERLSMYLMKADLMPFLYWNMML

SEQ ID NO: 24382 - DNA, 855 bp, Homo sapiens
cacggcacccagtcccctcagggcacccggttccccgcctccgccaaggcacccggttccccgcctccgccaaggcaaccggtcccccccccccccgccccccgctacggcacccagtcccccgacggctctcggtctcctccacgccgagcctcggagagcaggggctttgcttttccggctgaggtgttcaataaacatctcttaaacaaaggagtgcgcaagtgagataatataagacagaatctcgctctgttgcgcaggctggagtacagtggtgtgatccgggctcactacaacctctgcctcccaggttcaagcgattcttctgcctgggactacagatgaagaaactgaggccttgaggaggcaagtaatatatccgcaaagaggggctgtcctgcctgggaagatgagcgacacatgggttttccgagaagcgacacatctgaagagtgaaagaccaccatcatgaaggcttcgcagcatcggtgcaggtgccaggaaggggcatcagtgaccagtggagactgtgctgaggtcaagtggagtgggaagctcctgcagtctgaaggaatcatgtggggatgcccaactatacaacaaagagttgccaaacatttctctggagcaaataaatggtgtgatggatggaactaactggatcaccaacctgtgagagatggctggttcactggccttggcctcctcgggccatgacattaattcactgggtaaggctctggtggcccagccagagattcttcctttgctgcttccaagtgagaagctcttccctctggccttggcctggaaactgaactcactttcctttgagctcctccaccctccaaa

SEQ ID NO: 24383 - protein, 62 aa, Homo sapiens
MKASQHRCRCQEGASVTSGDCAEVKWSGKLLQSEGIMWGCPTIQQRVAKHFSGANKWCDGWN

SEQ ID NO: 24384 - DNA, 655 bp, Homo sapiens
cgccgagcctcggagagcaggggctttgcttttccggctgaggtgttcaataaacatctcttaaacaaaggagtgcgcaagtgagataatataagggggatgcccaactatacaacaaagagttgccaaacatttctctggagcaaataaatggtgtgatggatggaactaactggatcaccaacctgtgagagatggctggttcactggccttggcctcctcgggccatgacattaattcactggctccaccctccaccctgttctatggccctgggcgtgacttgctcttgccccttgccttctgtttggatcctgccaatgaggactcctagcaggagatgggggctctcatatttaactgaaaggctcagctccacgcagcgtttctgtctccagcccacacagcacgatgagataaagactagaggctgctcactgctgagagtggaccatccagctcatttggtcacataatttccagccagccaccttatgggcaagattttggctcacctgtaagctattagctggaaaatactggcttcatgaaatggcttggaagatttggaggcaacctaaatgtccatcaacagatgaatggataaagaacaacagggtgactaaagtcaataataatttaattatacattta

SEQ ID NO: 24385 - protein, 104 aa, Homo sapiens
MELTGSPTCERWLVHWPWPPRAMTLIHWLHPPPCSMALGVTCSCPLPSVWILPMRTPSRRWGLSYLTERLSSTQRFCLQPTQHDEIKTRGCSLLRVDHPAHLVT

SEQ ID NO: 24386 - DNA, 4261 bp, Homo sapiens
attccagtttggaattataaagatgctatgaacattctttttcttcaacatctgttttgtggacatctagtttgattcctgttggataaatacttatgcaaaactgtacaatctaaagtggactgcattttgcaagaagttgagaagtttacagacctagagaaactctacctctaccttcagctgccttctggtctcagcaatggagagaaaagtgatcagaatgccatgtcatctagtcgggcacaacaaatgcatgccttttcctggattcggaataccctagaggaacatccggagacttcactgcccaaacaggaagtctatgatgagtacaagagctattgtgacaatcttggttaccatccattaagtgctgctgattttggaaagatcatgaaaaacgtctttccaaacatgaaggcacgtcgtttgggcacaagaggcaaatctaaatattgctacagtggactaagaaaaaaagcttttgttcatatgccaacactgcccaaccttgactttcacaaaactggagatgggttggaaggagctgaaccttctgggcagcttcaaaatattgatgaagaagttatctcttctgcttgccgtcttgtgtgtgagtgggcccagaaagtgttaagccaaccatttgacaccgtcttggaattagcccgcttccttgtaaaaagtcactatataggcaccaagtcaatggcagctctaactgtaatggcagcagcaccagcaggaatgaaaggaattacccagccttctgcttttatacctacagctgaaagtaattcctttcagcctcaggtgaagactttgccatctccaattgatgctaaacagcagttgcaacggaaaatccagaagaagcagcaagaacagaaactacaatcccctttgccaggagaatctgcagcaaaaaagtcagaaagtgctacaagcaatggagtgactaatcttcctaatggaaatccttcaatcctttctcctcaacctattggtatcgttgtggcagctgtccctagtcccattccggtccagcggactaggcaattggtaacttcaccgagtccaatgagttcttctgacggcaaagttcttcccctcaatgtacaggtggtcactcagcacatgcagtctgtgaaacaggcaccaaagactccccagaacgttccagccagtcctggtggggatcgttctgcccggcaccgttaccctcagatcttacccaaaccagcgaacaccagtgcactcaccattcgctctccaactactgtcctctttactagtagtcccatcaaaactgctgttgtacccgcttcacacatgagttctctaaatgtggtgaaaatgacaacaatatccctcacacccagcaacagtaacacccctcttaaacattctgcctcagtcagcagtgctacaggaacaacagaagaatcaaggagtgttccacagatcaagaatggttctgtcgtgtcgcttcagtctcctgggtccaggagcagcagtgcggggggaacatctgctgtggaagtcaaagtggaacccgaaacatcatcagatgagcatcctgtacagtgccaagagaactctgatgaggctaaagctccccagacacctagtgcccttttggggcagaaaagtaatacagacggagcactgcagaaaccttcaaatgaaggtgtcattgaaataaaagcaactaaggtctgtgaccagaggaccaaatgtaaaagtcgctgtaatgaaatgctgccaggcacgtcaacaggcaataatcaaagcactatcactctatcagttgcttctcagaacttaactttcaccagcagcagctcaccacctaatggtgactcaatcaataaagaccctaaattatgcactaaaagcccaagaaaacgactgtcttctacattgcaggagacccaggtgcctcctgtaaagaaaccaattgtggaacagctttcagcagctaccatagaagggcagaaacaaggcagtgttaagaaggaccaaaaggttccacattcagggaaaacagaaggttcaacagcaggtgctcagattcctagcaaggtatcagtaaatgtcagttcacacataggagcaaatcaacccttgaattcctctgcccttgttatcagtgattcagctttggaacagcaaacaaccccatcatcatctccagatataaaagtaaaacttgaaggaagtgtctttctcttggacagtgattcaaagtcagttggcagctttaatccaaatggatggcaacaaatcactaaagattctgagtttatatctgccagttgtgaacaacagcaagatatcagtgttatgacaattcctgagcactctgatatcaatgacttagagaaatctgtttgggaattagaaggaatgccacaggacacatatagccagcagctacatagccagatacaggaatcttctttaaatcaaatacaagcacattcttcagatcagttacctctgcaatctgaactgaaggagtttgagccttctgtttcccagacaaatgaaagctactttccttttgatgatgaacttacacaagatagtattgtggaagagctggtgcttatggagcagcaaatgtcaatgaacaattctcattcttacggcaactgtttgggaatgacccttcagagtcagtcagtaactccaggagctccaatgtcatctcacacttccagcacccacttctatcatccaatccacagcaatggcactccaatccacacacccacacccacacccacacccactcctactccaaccccaaccccaaccccgacatctgaaatgattgctggatctcagagtctgtcacgggagagcccttgctccaggctagcccagactacacctgtggatagtgctttaggaagtagccgacatacacccattggtactccacattctaactgcagcagtagtgtcccccccagccctgttgaatgcaggaatccgtttgcattcactccaataagctccagtatggcatatcatgacgccagcattgtctcaagtagtcctgtgaaaccgatgcaaagacccatggccacacaccctgacaaaaccaagcttgaatggatgaataatgggtatagtggggttggtaattcatcagtttctggccatggtattctcccaagctatcaggaactagtggaagaccgtttcaggaaacctcatgcttttgctgtgcctggacagtcttatcagtctcaatccagacatcatgacactaattttggtcgtttgactcctgtctctcctgtgcagcatcaaggtgccactgtaaataacaccaacaaacaggagggttttgcagtccctgcccctcttgataataaaggaactaattcatctgccagcagcaacttcagatgccggagtgtgagccctgctgttcatcgccaacgtaatcttagtggaagcaccctctatccagtatctaatatcccacgatctaatgtgaccccctttggaagtccagttaccccagaagttcatgttttcacaaatgttcacacagacgcatgtgccaacaacatagctcaaagaagccaatcagttccattgacagtcatgatgcagacagccttcccaaacgctcttcagaagcaagcaaacagtaaaaaaataaccaatgttttgttgagtaaacttgattccgacaatgatgatgcagtgagaggtttgggaatgaacaacctgccctctaattatacagcccggatgaatctcactcagattttggaaccttccactgtttttcctagtgccaacccacaaaatatgatcgattccagcacttctgtttatgagttccaaacaccatcttacctcaccaaaagtaatagcaccggtcagatcaatttttctcctggagataatcaagcacaatcagaaattggagagcaacaattagatttcaatagcactgttaaagacctgttgagtggagacagcttgcaaaccaaccagcagctgtgttcttgtccttcctctctgctggctggaatgcaaatgtgatggctagaactcaagcagccctcctggacttcatgttaaagacacatgctgaggatgattgagcaacaagatacaaggagcccagggcatgatgactttggaagggaagatgcccaactagtcctgactgcttacctctggatgtgttttacatgagagaaataaatgtctttctggtttaactcac

SEQ ID NO: 24387 - protein, 1281 aa, Homo sapiens
MSSSRAQQMHAFSWIRNTLEEHPETSLPKQEVYDEYKSYCDNLGYHPLSAADFGKIMKNVFPNMKARRLGTRGKSKYCYSGLRKKAFVHMPTLPNLDFHKTGDGLEGAEPSGQLQNIDEEVISSACRLVCEWAQKVLSQPFDTVLELARFLVKSHYIGTKSMAALTVMAAAPAGMKGITQPSAFIPTAESNSFQPQVKTLPSPIDAKQQLQRKIQKKQQEQKLQSPLPGESAAKKSESATSNGVTNLPNGNPSILSPQPIGIVVAAVPSPIPVQRTRQLVTSPSPMSSSDGKVLPLNVQVVTQHMQSVKQAPKTPQNVPASPGGDRSARHRYPQILPKPANTSALTIRSPTTVLFTSSPIKTAVVPASHMSSLNVVKMTTISLTPSNSNTPLKHSASVSSATGTTEESRSVPQIKNGSVVSLQSPGSRSSSAGGTSAVEVKVEPETSSDEHPVQCQENSDEAKAPQTPSALLGQKSNTDGALQKPSNEGVIEIKATKVCDQRTKCKSRCNEMLPGTSTGNNQSTITLSVASQNLTFTSSSSPPNGDSINKDPKLCTKSPRKRLSSTLQETQVPPVKKPIVEQLSAATIEGQKQGSVKKDQKVPHSGKTEGSTAGAQIPSKVSVNVSSHIGANQPLNSSALVISDSALEQQTTPSSSPDIKVKLEGSVFLLDSDSKSVGSFNPNGWQQITKDSEFISASCEQQQDISVMTIPEHSDINDLEKSVWELEGMPQDTYSQQLHSQIQESSLNQIQAHSSDQLPLQSELKEFEPSVSQTNESYFPFDDELTQDSIVEELVLMEQQMSMNNSHSYGNCLGMTLQSQSVTPGAPMSSHTSSTHFYHPIHSNGTPIHTPTPTPTPTPTPTPTPTPTSEMIAGSQSLSRESPCSRLAQTTPVDSALGSSRHTPIGTPHSNCSSSVPPSPVECRNPFAFTPISSSMAYHDASIVSSSPVKPMQRPMATHPDKTKLEWMNNGYSGVGNSSVSGHGILPSYQELVEDRFRKPHAFAVPGQSYQSQSRHHDTNFGRLTPVSPVQHQGATVNNTNKQEGFAVPAPLDNKGTNSSASSNFRCRSVSPAVHRQRNLSGSTLYPVSNIPRSNVTPFGSPVTPEVHVFTNVHTDACANNIAQRSQSVPLTVMMQTAFPNALQKQANSKKITNVLLSKLDSDNDDAVRGLGMNNLPSNYTARMNLTQILEPSTVFPSANPQNMIDSSTSVYEFQTPSYLTKSNSTGQINFSPGDNQAQSEIGEQQLDFNSTVKDLLSGDSLQTNQQLCSCPSSLLAGMQM

SEQ ID NO: 24388 - DNA, 2316 bp, Homo sapiens
gtaaccgcgtcgcagtcgccgaagatggcggggcgaagtctgtgtctcacgagaagcagcgttccagggactccgttcccgccacccgttcagcaaccctctacacctggacccgacctcctcgccttggaggaagaatataagcgtttaaatgcagaattgcaggcaaaaacagctgacgtggttcaacaagctaaggaaataataagagatcggcaagaagtacgatctaggcctgtttcaacacaaatgaaatcatgtgatgacgaagatgattacagtttaagaggtctgttaccatctgaagggatagttcatcttcattcagaaactaagccaaagaccaaaaacattgatcctgtaaacaaggttcaaaacaaattacactctgcaaataaaggaaggaaaacaaattcaagtgttaaattgaaatactctgatgtccaaactgccgacgatgttgccattccagaggatttctcagacttttcccttgcaaaaacaattagcaaaattgaagggcaactggaggaagaaggcttacctgaatatatagatgatattttttctggtgttagtaatgacattggaacagaagcacagatcagatttctaaaggccaaactccatgttatgcaggaggaattggataatgttgtatgtgaatgcaataaaaaggaggatgaaattcagaatttaaagtctcaagtaaaaaattttgaagaagattttatgagacagcagcgaacaattaatatgcaacagtctcaagtagaaaaatacaaaactcttttcgaagaagcaaacaaaaagtatgatggattacagcaacagttgtcttcagtagaaagggtaattatttggtatttttcctaacttaatgccacagatacaagaaaattattaaggttacacatttgtatagatgccattttgacagttcagttattttattagtatttactgaaaactctttccccttacatagaatatttttaacaactttattgagatgtaattcacccttttaaagtatgcaattcaatggcttttggtgtattcatagaattgtgcaactatcaccacaaccattttcataatccctaaaagatacttcataccctttagccaccacaccctgaccctgctcccctcaatcccttacagccctaggcaaccactattctattttatgtctcaataaatttgtctattctggaaatcacatatacgtggaatcatataatatgtggtcttttgtgactgacttttacttaagatattttcaaggttcattcatgttgcagcccctatcagtattttatttctttttattggcaagtaacattctgttatatggatataacacatttaatttatctgtttatcagttcgtagctttaggttatttgggttgtttctactgtctgacaattttaaatactttgaatattcatgtacaagtttttgtgtgcacgtatgtttctatttctcttggttatatagccaggaatggaattgctgggtcatatggaaatcctatgttgaccttttgaggaattgctgactgttttccaacctgcctgtaccattttacattcctaccagtagtgcatgaagctcctaatttctacacatcctcaccaacatctgctagattatctttttgattatagccatactgcaagtgtaaaagggttacctcattgtggttttgatttgcatttccctaataactaatgatgttgaacatcttttcatgtgcttattggcatttgtatattttctttggagaaatgtctgttaaggtctttgcccattttttaaattggatttgaaaaaattactgaataataagaacttttaagttctttatgtgtttagatacaagtcccttatcaggtatattttgcaaatagttttcccctacagtgggttgtctttcactttctttatggtactctaaaggcacaaaagttttaaattttgatgaagtccagtttatctaatatttatttggtttcctgtgcttttggtgtcatatttaaggggagaatgtattttaaataaactatcctagcttatattagtgtgccattgtgaaaataaaaatatactgtttgagattgctttgtaaaatgtagtgacgataagaattatgtaatatagcatatcccgagatttagtaagaaaatgtgccccctttattagtacccttacatttctcgtttgtatggtcatatttaaaaaccctgctttttaaacattttggtcttgtataattagctttatcttgtaataaattttaatatcaaa

SEQ ID NO: 24389 - protein, 283 aa, Homo sapiens
MAGRSLCLTRSSVPGTPFPPPVQQPSTPGPDLLALEEEYKRLNAELQAKTADVVQQAKEIIRDRQEVRSRPVSTQMKSCDDEDDYSLRGLLPSEGIVHLHSETKPKTKNIDPVNKVQNKLHSANKGRKTNSSVKLKYSDVQTADDVAIPEDFSDFSLAKTISKIEGQLEEEGLPEYIDDIFSGVSNDIGTEAQIRFLKAKLHVMQEELDNVVCECNKKEDEIQNLKSQVKNFEEDFMRQQRTINMQQSQVEKYKTLFEEANKKYDGLQQQLSSVERVIIWYFS

SEQ ID NO: 24390 - DNA, 1432 bp, Homo sapiens
gtaaccgcgtcgcagtcgccgaagatggcggggcgaagtctgtgtctcacgagaagcagcgttccagggactccgttcccgccacccgttcagcaaccctctacacctggacccgacctcctcgccttggaggaagaatataagcgtttaaatgcagaattgcaggcaaaaacagctgacgtggttcaacaagctaaggaaataataagagatcggcaagaagtacgatctaggcctgtttcaacacaaatgaaatcatgtgatgacgaagatgattacagtttaagaggtctgttaccatctgaagggatagttcatcttcattcagaaactaagccaaagaccaaaaacattgatcctgtaaacaaggttcaaaacaaattacactctgcaaataaaggaaggaaaacaaattcaagtgttaaattgaaatactctgatgtccaaactgccgacgatgttgccattccagaggatttctcagacttttcccttgcaaaaacaattagcaaaattgaagggcaactggaggaagaaggcttacctgaatatatagatgatattttttctggtgttagtaatgacattggaacagaagcacagatcagatttctaaaggccaaactccatgttatgcaggaggaattggataatgttgtatgtgaatgcaataaaaaggaggatgaaattcagaatttaaagtctcaagtaaaaaattttgaagaagattttatgagacagcagcgaacaattaatatgcaacagtctcaagtagaaaaatacaaaactcttttcgaagaagcaaacaaaaagtatgatggattacagcaacagttgtcttcagtagaaagggaattagaaaataaaagaagactgcaaaaacaggctgcaagtagtcaaagtgccacagaggttcgcttgaatagagctctagaagaagcagaaaagtataaactggagttaagtaaattaaggcaaaataacaaggacatagcaaatgaagaacacaaaaaaattgaagtgttaaaatcagaaaacaagaagctagaaaaacaaaaaggagaattaatgatagggttcaagaaacagttaaaattaattgatgttttaaaaaggcaaaagatgcatattgaagctgccaagatgctatctttcactgaggaggaatttatgaaagcacttgaatggggaaattcataagtgatctacttcagttagtctctatgacaataagaaaactaaggctcagagaaaaagccaaaactagtacttgcatgacacctagtcaagtcctagtagtattcgactttcattttgtggatcaatttttatttggaaaatagcagcaattctcgtaggagtcagattaaaacgtctacaactaccttgaataacttcaactatcaggataattaaaactgcaaaccactgg

SEQ ID NO: 24391 - protein, 391 aa, Homo sapiens; identical to SEQ ID NO: 3243

SEQ ID NO: 24392 - DNA, 679 bp, Homo sapiens
gaagatggcggggcgaagtctgtgtctcacggtcagttcaactccaggctcctggggagcgtctgggttccggcgactaggacgcctaacttcctttaacttcgggtctgaaagtctgtggctcttttacagagaagcagcgttccagggactccgttcccgccacccgttcagcaaccctctacacctggacccgacctcctcgccttggaggaagaatataagtaagaaattcggcggttgaacttttccttctttctttcatctgaatgaggctgcttacaagtacttttttctggagactggctggatcttcgggaccactcactctgcagcattcccttctcgtcatctcgttcacctgccgtttatcctttctttgtctttgatctgagtagttcgcctgcgtattagaagatatttgaagtgggcgaaaatttagcccaagcgtttaaatgcagaattgcaggcaaaaacagctgacgtggttcaacaagctaaggaaataatatgttaaattgaaatactctgatgtccaaactgccgacgatgttgccattccagaggatttctcagacttttcccttgcaaaaacaattagcaaaattgaagggcaactggaggaagaaggcttacctgaatatatagatgatattttttctggtgttagtaatgacat

SEQ ID NO: 24393 - protein, 79 aa, Homo sapiens
MAGRSLCLTVSSTPGSWGASGFRRLGRLTSFNFGSESLWLFYREAAFQGLRSRHPFSNPLHLDPTSSPWRKNISKKFGG

SEQ ID NO: 24394 - DNA, 4440 bp, Homo sapiens
gaagatggcggggcgaagtctgtgtctcacggtcagttcaactccaggctcctggggagcgtctgggttccggcgactaggacgcctaacttcctttaacttcgggtctgaaagtctgtggctcttttacagagaagcagcgttccagggactccgttcccgccacccgttcagcaaccctctacacctggacccgacctcctcgccttggaggaagaatataagcgtttaaatgcagaattgcaggcaaaaacagctgacgtggttcaacaagctaaggaaataataagagatcggcaagaagtacgatctaggcctgtttcaacacaaatgaaatcatgtgatgacgaagatgattacagtttaagaggtctgttaccatctgaagggatagttcatcttcattcagaaactaagccaaagaccaaaaacattgatcctgtaaacaaggttcaaaacaaattacactctgcaaataaaggaaggaaaacaaattcaagtgttaaattgaaatactctgatgtccaaactgccgacgatgttgccattccagaggatttctcagacttttcccttgcaaaaacaattagcaaaattgaagggcaactggaggaagaaggcttacctgaatatatagatgatattttttctggtgttagtaatgacattggaacagaagcacagatcagatttctaaaggccaaactccatgttatgcaggaggaattggataatgttgtatgtgaatgcaataaaaaggaggatgaaattcagaatttaaagtctcaagtaaaaaattttgaagaagattttatgagacagcagcgaacaattaatatgcaacagtctcaagtagaaaaatacaaaactcttttcgaagaagcaaacaaaaagtatgatggattacagcaacagttgtcttcagtagaaagggtaattatttggtatttttcctaacttaatgccacagatacaagaaaattattaaggttacacatttgtatagatgccattttgacagttcagttattttattagtatttactgaaaactctttccccttacatagaatatttttaacaactttattgagatgtaattcacccttttaaagtatgcaattcaatggcttttggtgtattcatagaattgtgcaactatcaccacaaccattttcataatccctaaaagatacttcataccctttagccaccacaccctgaccctgctcccctcaatcccttacagccctaggcaaccactattctattttatgtctcaataaatttgtctattctggaaatcacatatacgtggaatcatataatatgtggtcttttgtgactgacttttacttaagatattttcaaggttcattcatgttgcagcccctatcagtattttatttctttttattggcaagtaacattctgttatatggatataacacatttaatttatctgtttatcagttcgtagctttaggttatttgggttgtttctactgtctgacaattttaaatactttgaatattcatgtacaagtttttgtgtgcacgtatgtttctatttctcttggttatatagccaggaatggaattgctgggtcatatggaaatcctatgttgaccttttgaggaattgctgactgttttccaacctgcctgtaccattttacattcctaccagtagtgcatgaagctcctaatttctacacatcctcaccaacatctgctagattatctttttgattatagccatactgcaagtgtaaaagggttacctcattgtggttttgatttgcatttccctaataactaatgatgttgaacatcttttcatgtgcttattggcatttgtatattttctttggagaaatgtctgttaaggtctttgcccattttttaaattggatttgaaaaaattactgaataataagaacttttaagttctttatgtgtttagatacaagtcccttatcaggtatattttgcaaatagttttcccctacagtgggttgtctttcactttctttatggtactctaaaggcacaaaagttttaaattttgatgaagtccagtttatctaatatttatttggtttcctgtgcttttggtgtcatatttaaggggagaatgtattttaaataaactatcctagcttatattagtgtgccattgtgaaaataaaaatatactgtttgagattgctttgtaaaatgtagtgacgataagaattatgtaatatagcatatcccgagatttagtaagaaaatgtgccccctttattagtacccttacatttctcgtttgtatggtcatatttaaaaaccctgctttttaaacattttggtcttgtataattagctttatcttgtaataaattttaatatcaaaatcacttagacaaaatttatatgcagtaaattcacactttttagtgtacaattctatgagttttgacaaatgtatgcagtaatataactatcactataattgagacatagaacagttccatcagccccccaaaattccctgtgaatttagtgaaggccttccctaattccaccaccaggcaaccactgatctgtgtttggttcttaaattttggacttttcccaaatgtcacataaatagaatcgcattggatatagacttttgaatctgttttttttttttttttttcagttagcataaaacatttgatatggtttggctgtgtccccacccaaatttcatcttgaattcccacttgttgcgggagggagccggtgggaggtaattgaatcatgggggcaagtctttcctgtgctgttcttgtgatggcgaaaaagtctcaggagatctgatggttttaaaagggagagtttcccagtgcaaactttcttgtctgctgctatgtgagacatgccttttactttccaacatgattgtgaggcctccccagccatgtggaactgtgagtccaataaacctctctcttttgtaaattgcccagtcttgggtgtgtcttaccagcagcatgacgatgaactaatccagtaaattggtactagtagagtcaggcgctactgaaaagataccaaaaagtgttgaagtgaccttggaactgggtaagaggcagaggttggaaaagtttggagggctcagaaaaatacaggaaaatatgggaaagtttggaactccctagagacttgttgaatggctttgaccaatatactgataatgatatggacaatgaaatccaggctgaggtgatctcagatggagatgaggaacttgttaggaactagagcaaatgtgactcttgttatgttttagcaaagagactggtggcattttgtccctcccctagagatctgtggaactttgaacttgagagagatgatttagggtatctggtggaacaaatttctaagcagcaaagcactcaagaggtgacttggtgctgttaaaggcatccagttttgaaagggaaacagagcacaaaaggttggaaaatttgcagcctgagaatgcagtggaaaagaaaatcccattttctgaggagaaattcaagccggctgcagaaatttgcataagtcttgaggagctgaatgttaatccccaggacaatggggaaaatgtctcccaaggtatgcagaggtcttcacggcagcgcctcccatcacaggcccagagacctaggaggcatgattggttttgaaatgtgaggacatgagatttgggagggtcttggggtagaatatggtttggctgtgtccccacccaaatttcatcttgaattcccatgtgttgtgggagggacccagtgggaggtcattgaatcacaggggcaggtctttcctgtgctgttctcatgagagtgaataagtctcaggagatttgatggttttaaaaatgggaatttccctgcacaagctctcgtctgccaccatgtgagatgtgcctttaccttccagcatgattgtgaggcctccccagccatgtgaaactgtgagtgcagtaaatctctttcttttgtaaattgcccagtcttgggtatgtctttatcagcagcatgaaaacggactaatacaacattcaatatttatccctattatagtccattcctttttattgctgagtagtgtaaactatgaatgaatgtacttcagtttgtttccccactcatctagtaataaaagttaattatagtatttaatagtctgaacttgtgtttccagtatggtagccacttaccatatgtggctaaattgcgatgtgctataactataaagtaaaaatcagattttgaagaattcatgtaaaacagaatgaagaatgtaaaatatctcaaaatctctttaatattttttgtattggttatatgttgaaataatatttgaatatattaggttaagtgaaatatgttattaaaattaattttacctgtttgtt

SEQ ID NO: 24395 - protein, 208 aa, Homo sapiens
MKSCDDEDDYSLRGLLPSEGIVHLHSETKPKTKNIDPVNKVQNKLHSANKGRKTNSSVKLKYSDVQTADDVAIPEDFSDFSLAKTISKIEGQLEEEGLPEYIDDIFSGVSNDIGTEAQIRFLKAKLHVMQEELDNVVCECNKKEDEIQNLKSQVKNFEEDFMRQQRTINMQQSQVEKYKTLFEEANKKYDGLQQQLSSVERVIIWYFS

SEQ ID NO: 24396 - DNA, 539 bp, Homo sapiens
ggcggggcgaagtctgtgtctcacgagaagcagcgttccagggactccgttcccgccacccgttcagcaaccctctacacctggacccgacctcctcgccttggaggaagaatataagtaagaaattcggcggttgaacttttccttctttctttcatctgaatgaggctgcttacaagtacttttttctggagactggctggatcttcgggaccactcactctgcagcattcccttctcgtcatctcgttcacctgccgtttatcctttctttgtctttgatctgagtagttcgcctgcgtattagaagatatttgaagtgggcgaaaatttagcccaagcgtttaaatgcagaattgcaggcaaaaacagctgacgtggttcaacaagctaaggaaataataagagatcggcaagaagtacgatctaggcctgtttcaacacaaatgaaatcatgtgatgacgaagatgattacagtttaagcacactcttgattacccttgttgtaactgtggagttgtggagtaagctggtttta

SEQ ID NO: 24397 - protein, 30 aa, Homo sapiens
MKSCDDEDDYSLSTLLITLVVTVELWSKLV

SEQ ID NO: 24398 - DNA, 2392 bp, Homo sapiens
acttttggtcgagcggagggcgcgcagctccaccgttgccaagacgccgcgtaaacacccgagcgcgcgcagccaggtgcgctccttggggctgctggctgctgcgtttgcggcgggaggtggtggccgcggtcccacgagagggggtatttttcgtcagccaagatgggttccaaaaggagaaatttgagctgtagtgaaaggcatcagaaattagtagatgaaaactactgcaaaaaattacatgtccaagctctaaaaaacgtcaacagtcaaatcaggaatcaaatggtgcagaatgaaaatgataaccgtgttcagcgcaagcaatttctcagattattacaaaatgaacaatttgagttggatatggaagaggccattcaaaaggcagaagaaaacaagagattgaaagaactccagctcaaacaagaagaaaaactggctatggaattggcaaaactgaaacatgaaagtctaaaggacgaaaagatgaggcaacaagtaagagaaaacagcattgagcttagagaattggagaagaaattaaaagcagcttacatgaataaagaaagggcagctcagattgctgaaaaggatgccattaaatatgaacaaatgaaacgtgatgctgaaatagccaaaaccatgatggaagaacacaagagaataataaaggaagagaatgctgcagaagacaaacgaaacaaagcgaaagcacagtactatcttgacttagagaaacaacttgaagaacaagaaaaaaaaaagcaggaagcttatgagcagctgctaaaagagaaactcatgattgatgaaattgttaggaagatctatgaagaagatcagttggaaaaacaacaaaagttagaaaaaatgaatgcaatgcgaaggtatatagaagagtttcagaaagagcaggctctctggagaaaaaagaaacgtgaggagatggaagaagaaaacagaaaaatcatagagtttgctaacatgcagcagcaaagagaagaagatcggatggcaaaagttcaagaaaatgaggagaaaaggctacagcttcagaatgcgttgacacagaaattagaagaaatgctgcggcaacgtgaagatttggaacaagtgcgacaagaattataccaggaagaacaagctgaaatatataagagcaagctaaaagaagaagcagaaaagaaattgagaaagcaaaaagagatgaagcaagattttgaagaacaaatggccttgaaggaattagtgctacaggctgcaaaagaggaagaggagaactttagaaaaactatgctagctaaatttgctgaggatgatcgaatagaattaatgaatgctcagaaacaaagaatgaagcagctggaacacaggagggctgtggaaaaacttattgaagagcgtcgccaacaattccttgcagacaaacaacgtgaactagaagagtggcagttgcagcaaaggcggcaaggatttattaatgcaattattgaagaagaaaggctaaaacttcttaaagagcatgctacaaacttactaggctatctccctaaaggagtatttaaaaaagaggatgatattgatctgcttggtgaagagttcaggaaagtatatcaacaaaggagtgaaatttgtgaagagaaatgatatcatcaaaattgggtaaagcatagattttttgcatgttaccactagatgtcagcataacttttgttttacagttcagtggcattaggtatccattgtctgtttggattttgtaaatcatcactgaatttcataacttgtaaacaattatcagatacaaattaattttaatcaagctgttatttttgtactgataatttcaaaatccgatttctacaacactacagagcactgtttgcatccccatcctcaagacagtatatttaccttgactaatacagaactctaccccaaagtgaactgccttctgtctgtgtttacgaactttacttacttgatttagccagggaaataaatatttggaattttcttttaaagcatcttttttggtctactgtaagggaggagaattataaatgaaaagagtcaagaattttattatctgatgtgcttaattgtcacgctaagaacttaaaaaacaactcaaaaagagctaatagctaatctcctaaatctaaaaagggaattctttgaaattattttgctttcataatcaaatatattacttatgaagaataaaaataattcaaaccactacaataagtaaaatgggtatccatcacatactgtcatagagactaactgaagtagatcacttatgaatttccccattcaagtgctttcataaattcctcctcagtgaaagatagcatcttggcagcttcaatatgcatctgtt

SEQ ID NO: 24399 - protein, 495 aa, Homo sapiens; identical to SEQ ID NO: 3245

SEQ ID NO: 24400 - DNA, 1951 bp, Homo sapiens
acttttggtcgagcggagggcgcgcagctccaccgttgccaagacgccgcgtaaacacccgagcgcgcgcagccaggtgcgctccttggggctgctggctgctgcgtttgcggcgggaggtggtggccgcggtcccacgagagggggtatttttcgtcagccaagatgggttccaaaaggagaaatttgagctgtagtgaaaggcatcagaaattagtagatgaaaactactgcaaaaaattacatgtccaagctctaaaaaacgtcaacagtcaaatcaggaatcaaatggtgcagaatgaaaatgataaccgtgttcagcgcaagcaatttctcagattattacaaaatgaacaatttgagttggatatggaagaggccattcaaaaggcagaagaaaacaagagattgaaagaactccagctcaaacaagaagaaaaactggctatggaattggcaaaactgaaacatgaaagtctaaaggacgaaaagatgaggcaacaagtaagagaaaacagcattgagcttagagaattggagaagaaattaaaagcagcttacatgaataaagaaagggcagctcagattgctgaaaaggatgccattaaatatgaacaaatgaaacgtgatgctgaaatagccaaaaccatgatggaagaacacaagagaataataaaggaagagaatgctgcagaagacaaacgaaacaaagcgaaagcacagtactatcttgacttagagaaacaacttgaagaacaagaaaaaaaaaagcaggaagcttatgagcagctgctaaaagagaaactcatgattgatgaaattgttaggaagatctatgaagaagatcagttggaaaaacaacaaaagttagaaaaaatgaatgcaatgcgaaggtatatagaagagtttcagaaagagcaggctctctggagaaaaaagaaacgtgaggagatggaagaagaaaacagaaaaatcatagagtttgctaacatgcagcagcaaagagaagaagatcggatggcaaaagttcaagaaaatgaggagaaaaggctacagcttcagaatgcgttgacacagaaattagaagaaatgctgcggcaacgtgaagatttggaacaagtgcgacaagaattataccaggaagaacaagctgaaatatataagagcaagctaaaagaagaagcagaaaagaaattgagaaagcaaaaagagatgaagcaagattttgaagaacaaatggccttgaaggaattagtgctacaggctgcaaaagaggaagaggagaactttagaaaaactatgctagctaaatttgctgaggatgatcgaatagaattaatgaatgctcagaaacaaagaatgaagcagctggaacacaggagggctgtggaaaaacttattgaagagcgtcgccaacaattccttgcagacaaacaacgtgaactagaagagtggcagttgcagcaaaggcggcaaggatttattaatgcaattattgaagaagaaaggctaaaacttcttaaagagcatgctacaaacttactaggctatctccctaaaggagtatttaaaaaagaggatgatattgatctgcttggtgaagagttcaggaaagtatatcaacaaaggagtgaaatttgtgaagagaaatgatatcatcaaaattgggtaaagcatagattttttgcatgttaccactagatgtcagcataacttttgttttacagttcagtggcattaggtatccattgtctgtttggattttgtaaatcatcactgaatttcataacttgtaaacaattatcagatacaaattaattttaatcaagctgttatttttgtactgataatttcaaaatccgatttctacaacactacagagcactgtttgcatccccatcctcaagacagtatatttaccttgactaatacagaactctaccccaaagtg

SEQ ID NO: 24401 - protein, 495 aa, Homo sapiens; identical to SEQ ID NO: 3245

SEQ ID NO: 24402 - DNA, 1022 bp, Homo sapiens
acttttggtcgagcggagggcgcgcagctccaccgttgccaagacgccgcgtaaacacccgagcgcgcgcagccaggtgcgctccttggggctgctggctgctgcgtttgcggcgggaggtggtggccgcggtcccacgagagggggtatttttcgtcagccaagatgggttccaaaaggagaaatttgagctgtagtgaaaggcatcagaaattagtagatgaaaactactgcaaaaaattacatgtccaagctctaaaaaacgtcaacagtcaaatcaggaatcaaatggtgcagaatgaaaatgataaccgtgttcagcgcaagcaatttctcagattattacaaaatgaacaatttgagttggatatggaagaggccattcaaaaggcagaagaaaacaagagattgaaagaactccagctcaaacaagaagaaaaactggctatggaattggcaaaactgaaacatgaaagtctaaaggacgaaaagatgaggcaacaagtaagagaaaacagcattgagcttagagaattggagaagaaattaaaagcagcttacatgaataaagaaagggcagctcagattgctgaaaaggatgccattaaatatgaacaaatgaaacgtgatgctgaaatagccaaaaccatgatggaagaacacaagagaataataaaggaagagaatgctgcagaagacaaacgaaacaaagcgaaagcacagtactatcttgacttagagaaacaacttgaagaacaagaaaaaaaaaagcaggaagcttatgagcagctgctaaaagagaaactcatgattgatgaaattgttaggaagatctatgaagaagatcagttggaaaaacaacaaaagttagaaaaaatgaatgcaatgcgaaggtatatagaagagtttcagaaagagcaggctctctggagaaaaaagaaacgtgaggagatggaagaagaaaacagaaaaatcatagagtttgctaacatgcagcagcaaagagaagaagatcggatggc

SEQ ID NO: 24403 - protein, 284 aa, Homo sapiens
MGSKRRNLSCSERHQKLVDENYCKKLHVQALKNVNSQIRNQMVQNENDNRVQRKQFLRLLQNEQFELDMEEAIQKAEENKRLKELQLKQEEKLAMELAKLKHESLKDEKMRQQVRENSIELRELEKKLKAAYMNKERAAQIAEKDAIKYEQMKRDAEIAKTMMEEHKRIIKEENAAEDKRNKAKAQYYLDLEKQLEEQEKKKQEAYEQLLKEKLMIDEIVRKIYEEDQLEKQQKLEKMNAMRRYIEEFQKEQALWRKKKREEMEEENRKIIEFANMQQQREEDR

SEQ ID NO: 24404 - DNA, 1489 bp, Homo sapiens
agtggtattcaaagtagcaggtcaatgaactgtttgtacctatatactatgagaaaaggaacctatactggacttgttttaaggaagaaactataaattttttttaccccatgaatttttaaagaactattctaaacatttgttgaaagaaactaacaagagatctgagaataaaatacctgggaataaatttaaccaagaggtgaaagacctggacactgaaaactacaaaaaattgctggcagaagttaaagaggaacgaattaaatgaactttgttacttcacttcactaatgtgtcaaattgaagaactccttttatcgtgtcttgtaaaacaggtctggtgttgacaaaaatccctcagctcttttttgtttcggaaagtctttatttcttcttcatgtttgaatgataattttgctgaacatattctagactccttcagaaatgcaacacagaggactctagcccaacgcataatctacactccaaactgaagtttctccttcaaactttgtctgctttaccatcctgatgagcttgccttcacattaactcaatgacccatgttgccctgttcaccgaaatcctgaaaccaacactgaggtagtcctggagcctggctgtggctctgcccaactttcctgagccacctccactccttgctactactggtcacagtggagagatacacagaggacaacaggcaaggaaaaaagagagctgaagattatcattatttcctcactcttttcatcaaagatattatctcctggtcctgaaatagtaagacagccccattctaaggcaggatgcttggcagtggccctctccccgtgacagatacagaaaggtgatagacactttacaaacatgcttcttaagaagaaaaatactacggtcaccaaaaataaataaattatatacacagctttgggatcaagctgctccttgacaccctcctgagataccagacaataaaaaatgtagattttaaaaagtaaccatcaccttatgctttataataagccacaattttgtgctgttcttattctattaaagacaatcgctacaatatataaacatggttagaaaccatgcaagcaagaaaagcatgtggtgaaatatttaaagaattgaaaggaaaaaaaaatctacctagaagtttgtacccagtgaaattatcctccaaaagtgaaggaaaaataaagactttatcagaaaaaagaattgatgtagacctaccttgcaaagaaggattacaagaagttcttcagagaggaggaaaatggtgtaggtcagaaacttgggtctgcataagcaacagggagcatcaggaaagaagttaggttgtcaataaaagagccacgagagagagagaagagaacttgaagagacaataaaggacacaatttgctgctttctgaatcactgatgaatctgagtcagttaaggtataaatgcttcaaaaataaatagtatgaatggc

SEQ ID NO: 24405 - protein, 83 aa, Homo sapiens
MQARKACGEIFKELKGKKNLPRSLYPVKLSSKSEGKIKTLSEKRIDVDLPCKEGLQEVLQRGGKWCRSETWVCISNREHQERS

SEQ ID NO: 24406 - DNA, 2775 bp, Homo sapiens
aagaggtagatatagatttgaatctttactacttattgtggtattgccttgggttcccactcaagtcttatttctcatatattgaaatagtgtttataaaatctaatatgtagattaaatgagatagtgcatgtaaagttcttaatatactgcttcatgcatcatatgtactccatagctggtaattgttacaagctgttaggttggcctatggcttactgaggttttacacttttcttgcttccctgtaaaacatttgaaataagtagaatgtttcttactttgtgtactgtttcatgtttttggtttgacagtggaagggttaccatgactcaatatgaaatcataaattcagaaatgttttatctaaatacctgtgcctaatatatttatataaaatactgtggatgcatcttgttattcaaattcaagttgtgttttactagttttctatttaagtaattgtaattatgatccacatttgaaatagaggttacgaaaagcagatattgacatgagtgggtaactgcttttttaccttgaatcagaaacttttggtacactgaaacttttataggtttaaaaacattttcaaaacctgcatataattatggagtattctaattatattttatatttaataaattatttttctatttctttgttatattaagttgcacacttgtttcttttatccagaaagtttagtataataaaaatagttttaagattaactgtgaatgtaaaagaaaagtattattaattatttcaggaaattgcaagacctaacatggctgaaagagaaacagaaacatcaaattctgaaagtaaacaagataaagctgcttcttcaaaagaaaaaaatggatgtaatgcaaattcatttgaaggctcatcaacaacaaaaagtgaagaaagcataacagtttcagataaggaaaatgaaacctgtcttgcagaccaggaaactggctcaaaaaacatcgtcagttgtgattcaaatattggtgcagataaagtggaaaagaaaaaacaaatacaacacgtttgtcaggaaatggagttgaagatgtgccaaagttcagaaaacataatcttatctgatcagattaaagatcacaactccagtgaagccagattttcttcaaagaatattaaggatttgcgattagcatcagataatgtaagcattgatcagtttttgagaaaaagacatgaacctgaatctgttagttctgatgttagcgagcaaggcagtattcatttggaacctctgactccatccgaggtacttgagtatgaagccacagagattcttcagaaaggtagtggtgatccttcagccaagactgatgaagtagtgtctgatcaaacagatgacattcctggaggaaataaccctagcacaacagaggcaacagtagacctggaagacgaaaaagaaagaagttgaaattagtcattttaagtttcagtgtaccaacgataagggcatttggaacagtgctatcaggtgagctcagtggtgctgttgtaggttcagaaatggaaatatgtaagggaggtcacacatacactttacctgtatgttcaacctatgttatcaaacaaatcaattcaccaataatagcatgattagtagggattcccaaaaagtttttaaaaacacgaacaggattttaatgataattaaatttgcagtggaaaggtctcatttaatggttttcaaggaaatgggatttggttgctgacatgaattgatgatattagtaatatttataaagcctttcaaacttccatcaatcctaagctaaaaatctttattacctgtatatccttttcagttaactgagaggaagggatttggaaaccatgtacttttggggagtaattgattaaaaacaatggctgattggcattgttaatgaaggctttatttgtgaggatgatgctggtaaatggagcatgcttagagtactaaattgatctaatgagaatttggatgaacataaacttaattttggatttaatataacattccagtcagacgcatgtaaacagaatatttgaatctttgtacctccatacaagtgttagcctgccaggctgtaagcttaccttaattaaactttcagtgaaagtggaattattaagatataaatttatatttgtgctttttgtcagtgtgtaagctgtgtagaaattctttgatgtattagttgtattaatgtaaagtagaaacccattgttgaaactcctgtagctattatgcttttaatattgttttaatgatcttccttagaaataggcccataaaaatggtctggaagccaaaccaaagtatggtataatgtagatattgtaaagcagtaaactgaaaacatgtcctggcatgtattcagccatgtttaagtgacttttctgtaattgtaaaataaaaacttcaaatgggacctaaaacagtgatgtaaaagaactggttttggaaatttagcctaatttatctataagatggctgctaaattgatttttcagttctttttatcatctagaatataatagatatagaaatgaataatatgaagaacagtagtttgctttgaaatactaataaacttttatttaaaatgcttcatttttacttcttaaaatgtgctttggattcttaaattttgtttcactgaatgttcaatgttttaaatggcgattaaaatactctgctgtatatagtagtttttgagtaaatatttgcaataaaaatctgcccccgaataa

SEQ ID NO: 24407 - protein, 220 aa, Homo sapiens
MAERETETSNSESKQDKAASSKEKNGCNANSFEGSSTTKSEESITVSDKENETCLADQETGSKNIVSCDSNIGADKVEKKKQIQHVCQEMELKMCQSSENIILSDQIKDHNSSEARFSSKNIKDLRLASDNVSIDQFLRKRHEPESVSSDVSEQGSIHLEPLTPSEVLEYEATEILQKGSGDPSAKTDEVVSDQTDDIPGGNNPSTTEATVDLEDEKERS

SEQ ID NO: 24408 - DNA, 2196 bp, Homo sapiens
acagaggtcaatttactattaaagtataaaatgtacattagtttcgatctacattttaattattttaggctggcagagaaagaactgtttcatattttaccatcgtacatataaaataaaatattcaatacttatcttgttttcaagattaaaaaaagaagctcccgcaaaggaacaagaacctgtgtctaaggaaattgcaagacctaacatggctgaaagagaaacagaaacatcaaattctgaaagtaaacaagataaagctgcttcttcaaaagaaaaaaatggatgtaatgcaaattcatttgaaggctcatcaacaacaaaaagtgaagaaagcataacagtttcagataaggaaaatgaaacctgtcttgcagaccaggaaactggctcaaaaaacatcgtcagttgtgattcaaatattggtgcagataaagtggaaaagaaaaaacaaatacaacacgtttgtcaggaaatggagttgaagatgtgccaaagttcagaaaacataatcttatctgatcagattaaagatcacaactccagtgaagccagattttcttcaaagaatattaaggatttgcgattagcatcagataatgtaagcattgatcagtttttgagaaaaagacatgaacctgaatctgttagttctgatgttagcgagcaaggcagtattcatttggaacctctgactccatccgaggtacttgagtatgaagccacagagattcttcagaaaggtagtggtgatccttcagccaagactgatgaagtagtgtctgatcaaacagatgacattcctggaggaaataaccctagcacaacagaggcaacagtagacctggaagacgaaaaagaaagaagttgaaattagtcattttaagtttcagtgtaccaacgataagggcatttggaacagtgctatcaggtgagctcagtggtgctgttgtaggttcagaaatggaaatatgtaagggaggtcacacatacactttacctgtatgttcaacctatgttatcaaacaaatcaattcaccaataatagcatgattagtagggattcccaaaaagtttttaaaaacacgaacaggattttaatgataattaaatttgcagtggaaaggtctcatttaatggttttcaaggaaatgggatttggttgctgacatgaattgatgatattagtaatatttataaagcctttcaaacttccatcaatcctaagctaaaaatctttattacctgtatatccttttcagttaactgagaggaagggatttggaaaccatgtacttttggggagtaattgattaaaaacaatggctgattggcattgttaatgaaggctttatttgtgaggatgatgctggtaaatggagcatgcttagagtactaaattgatctaatgagaatttggatgaacataaacttaattttggatttaatataacattccagtcagacgcatgtaaacagaatatttgaatctttgtacctccatacaagtgttagcctgccaggctgtaagcttaccttaattaaactttcagtgaaagtggaattattaagatataaatttatatttgtgctttttgtcagtgtgtaagctgtgtagaaattctttgatgtattagttgtattaatgtaaagtagaaacccattgttgaaactcctgtagctattatgcttttaatattgttttaatgatcttccttagaaataggcccataaaaatggtctggaagccaaaccaaagtatggtataatgtagatattgtaaagcagtaaactgaaaacatgtcctggcatgtattcagccatgtttaagtgacttttctgtaattgtaaaataaaaacttcaaatgggacctaaaacagtgatgtaaaagaactggttttggaaatttagcctaatttatctataagatggctgctaaattgatttttcagttctttttatcatctagaatataatagatatagaaatgaataatatgaagaacagtagtttgctttgaaatactaataaacttttatttaaaatgcttcatttttacttcttaaaatgtgctttggattcttaaattttgtttcactgaatgttcaatgttttaaatggcgattaaaatactctgctgtatatagtagtttttgagtaaatatttgcaataaaaatctgcccccgaataa

SEQ ID NO: 24409 - protein, 220 aa, Homo sapiens; identical to SEQ ID NO: 24407

SEQ ID NO: 24410 - DNA, 4907 bp, Homo sapiens
gacctcgacagggaacgcaagcaaaaccacacatttaaaacagacttggtaaaatcagctcgttatttaaagaaacggacgattcctttttctctcctggtttagtcttcgacccacaggccccttgcttctttcgaacggcggctgtatcccatgaccttttcactttccaagccaacggactgggggtcgttacacacgcggagggcccggaacgcacggctcctcgcctgcaaattccgagcagtccggattttggggctgcctcccggccacaccagccagcagctcgcacccacatggaggcagggccctggccctcgccccggaccggcgcgtggcggggcgcgtgggtcttcgagggcccgcgacgcggcgcacatgccggtgcccgcctcccgcgtcggcgagaagacagggagctcggacacggggaggctgacccggagcctacccatgaggcagcgcgccggctgcacgagagcccccccctttccacggctcggctgccagctccgcaatgggagccgccgccgtcgccgcagtgtagtttttcgtgctcctccttttcctcctcctctttctcctcctcctcagggctccagtcaggccgatccgctccgctcacggaaggaaaacagaaataacttgctggcttgtctggagtcacatggtaattcaaaaatggcagaactgtttatggaatgtgaagaagaggagctggaaccatggcagaagaaagtaaaagaagttgaggatgacgatgatgatgagccaatctttgttggcgagatatcaagttcaaaaccagcaatttcaaatattttgaacagagttaaccccagctcatattcaaggggactaaagaatggtgcactcagtcgaggtattactgctgcattcaagcctacaagtcaacactacacgaatccaacatcaaatccagtgcctgcctcaccaataaattttcatcctgagtctagatcttcagatagttctgttattgttcagcctttttctaaacctggttatataacaaactcatcacgagttgtgtctaataagtcatcagagttactgtttgacttgacccaggatacaggattatcacattaccaagggggaccaacactttctatggcaggtatgagtgaaagttcatttttatcaaaacgtccttctacttctgaagtaaataatgttaatccaaagaagcctaaacccagcgaaagtgtttctggagcaaattcctcagctgtattaccttcagttaaatctccttcagtgacttcttcccaggctatgctagcaaaaggtacaaatacctcatcaaatcagtctaaaaatggaacaccttttccaagagcttgtccaaagtgcaacattcatttcaatcttttggatcctttgaaaaatcacatgaagtattgttgtccagacatgataaataactttttgggactggctaaaacagaattttcaagtacagtaaataaaaacacaactattgattcagagaaaggaaaattgatcatgttagttaatgacttttattatggaaaacatgaaggagatgtccaggaggaacagaagactcacacaacctttaaatgcttcagttgcttgaaaattctaaaaaataacattaggtttatgaaccacatgaaacaccatttggaacttgagaagcagagcagtgagagctgggaaaaccataccacctgccagcactgctaccgtcagtttcccacaccatttcagttgcagtgtcacatcgaaagtacacatacgccccatgaattttctactatttgtaaaatctgtgaattgtcatttgaaacagaacatgttcttttacaacatatgaaggacaatcataaacctggtgaaatgccatatgtctgccaggtttgtaattatagatcatcatcattttctgatgtagaaactcattttagaacatcccatgaaaacactaagaacttgctatgcccgttttgcctcaaagttattaaaattgcaacaccatatatgcatcattatatgaagcatcagaaaaaaggaatacatcgttgtacaaaatgcaggctgcagtttttgacatgcaaggagaaaatggatcataagactcaacaccatcgaacatttataaaacctaaacaactagaaggattgcctcctggaacaaaagttactattcgagcttcagttggacctctgcaatcaggagcttcacctacaccttccattagtgcaagtgcttctacccttcagctctcacctccaaggactaaaaatataactgctaaaaatcctgcaaaatctaatacaagtaaacctaatacagtcaaatccaacgcaagtaaacctaatacaagtaagcctaatggaagtaaatctaaatacaaaccaaaaatctctaatatgcaaaagaaacaaagcacattggctagtagcaataaaaaaagtaaagtcaatacagcattgaggaatttaaggtatcgtcggggcattcacaaatgcattgagtgttgttccgaaataaaagattttgcaaaccactttcctacgtacgtccactgtagtttttgcagatacaacactagctgtagcaaagcctatgtaaatcatatgatgagctttcatagtaaccgtccaagcaaaaggttttgtatttttaagaagcattcagaaaatctccggggcattactctagtgtgccttaattgtgatttcctaagtgatgtttctggcttagataatatggctacacacttaagtcaacataaaactcatacttgccaagttgtaatgcagaaagtttctgtttgtatcccaacttctgagcacctttctgaattaaaaaaagaagctcccgcaaaggaacaagaacctgtgtctaaggaaattgcaagacctaacatggctgaaagagaaacagaaacatcaaattctgaaagtaaacaagataaagctgcttcttcaaaagaaaaaaatggatgtaatgcaaattcatttgaaggctcatcaacaacaaaaagtgaagaaagcataacagtttcagataaggaaaatgaaacctgtcttgcagaccaggaaactggctcaaaaaacatcgtcagttgtgattcaaatattggtgcagataaagtggaaaagaaaaaacaaatacaacacgtttgtcaggaaatggagttgaagatgtgccaaagttcagaaaacataatcttatctgatcagattaaagatcacaactccagtgaagccagattttcttcaaagaatattaaggatttgcgattagcatcagataatgtaagcattgatcagtttttgagaaaaagacatgaacctgaatctgttagttctgatgttagcgagcaaggcagtattcatttggaacctctgactccatccgaggtacttgagtatgaagccacagagattcttcagaaaggtagtggtgatccttcagccaagactgatgaagtagtgtctgatcaaacagatgacattcctggaggaaataaccctagcacaacagaggcaacagtagacctggaagacgaaaaagaaagaagttgaaattagtcattttaagtttcagtgtaccaacgataagggcatttggaacagtgctatcaggtgagctcagtggtgctgttgtaggttcagaaatggaaatatgtaagggaggtcacacatacactttacctgtatgttcaacctatgttatcaaacaaatcaattcaccaataatagcatgattagtagggattcccaaaaagtttttaaaaacacgaacaggattttaatgataattaaatttgcagtggaaaggtctcatttaatggttttcaaggaaatgggatttggttgctgacatgaattgatgatattagtaatatttataaagcctttcaaacttccatcaatcctaagctaaaaatctttattacctgtatatccttttcagttaactgagaggaagggatttggaaaccatgtacttttggggagtaattgattaaaaacaatggctgattggcattgttaatgaaggctttatttgtgaggatgatgctggtaaatggagcatgcttagagtactaaattgatctaatgagaatttggatgaacataaacttaattttggatttaatataacattccagtcagacgcatgtaaacagaatatttgaatctttgtacctccatacaagtgttagcctgccaggctgtaagcttaccttaattaaactttcagtgaaagtggaattattaagatataaatttatatttgtgctttttgtcagtgtgtaagctgtgtagaaattctttgatgtattagttgtattaatgtaaagtagaaacccattgttgaaactcctgtagctattatgcttttaatattgttttaatgatcttccttagaaataggcccataaaaatggtctggaagccaaaccaaagtatggtataatgtagatattgtaaagcagtaaactgaaaacatgtcctggcatgtattcagccatgtttaagtgacttttctgtaattgtaaaataaaaacttcaaatgggacctaaaacagtgatgtaaaagaactggttttggaaatttagcctaatttatctataagatggctgctaaattgatttttcagttctttttatcatctagaatataatagatatagaaatgaataatatgaagaacagtagtttgctttgaaatactaataaacttttatttaaaatgcttcatttttacttcttaaaatgtgctttggattcttaaattttgtttcactgaatgttcaatgttttaaatggcgattaaaatactctgctgtatatagtagtttttgagtaaatatttgcaataaaaatctgcccccgaataa

SEQ ID NO: 24411 - protein, 1143 aa, Homo sapiens
MTFSLSKPTDWGSLHTRRARNARLLACKFRAVRILGLPPGHTSQQLAPTWRQGPGPRPGPARGGARGSSRARDAAHMPVPASRVGEKTGSSDTGRLTRSLPMRQRAGCTRAPPFPRLGCQLRNGSRRRRRSVVFRAPPFPPPLSPPPQGSSQADPLRSRKENRNNLLACLESHGNSKMAELFMECEEEELEPWQKKVKEVEDDDDDEPIFVGEISSSKPAISNILNRVNPSSYSRGLKNGALSRGITAAFKPTSQHYTNPTSNPVPASPINFHPESRSSDSSVIVQPFSKPGYITNSSRVVSNKSSELLFDLTQDTGLSHYQGGPTLSMAGMSESSFLSKRPSTSEVNNVNPKKPKPSESVSGANSSAVLPSVKSPSVTSSQAMLAKGTNTSSNQSKNGTPFPRACPKCNIHFNLLDPLKNHMKYCCPDMINNFLGLAKTEFSSTVNKNTTIDSEKGKLIMLVNDFYYGKHEGDVQEEQKTHTTFKCFSCLKILKNNIRFMNHMKHHLELEKQSSESWENHTTCQHCYRQFPTPFQLQCHIESTHTPHEFSTICKICELSFETEHVLLQHMKDNHKPGEMPYVCQVCNYRSSSFSDVETHFRTSHENTKNLLCPFCLKVIKIATPYMHHYMKHQKKGIHRCTKCRLQFLTCKEKMDHKTQHHRTFIKPKQLEGLPPGTKVTIRASVGPLQSGASPTPSISASASTLQLSPPRTKNITAKNPAKSNTSKPNTVKSNASKPNTSKPNGSKSKYKPKISNMQKKQSTLASSNKKSKVNTALRNLRYRRGIHKCIECCSEIKDFANHFPTYVHCSFCRYNTSCSKAYVNHMMSFHSNRPSKRFCIFKKHSENLRGITLVCLNCDFLSDVSGLDNMATHLSQHKTHTCQVVMQKVSVCIPTSEHLSELKKEAPAKEQEPVSKEIARPNMAERETETSNSESKQDKAASSKEKNGCNANSFEGSSTTKSEESITVSDKENETCLADQETGSKNIVSCDSNIGADKVEKKKQIQHVCQEMELKMCQSSENIILSDQIKDHNSSEARFSSKNIKDLRLASDNVSIDQFLRKRHEPESVSSDVSEQGSIHLEPLTPSEVLEYEATEILQKGSGDPSAKTDEVVSDQTDDIPGGNNPSTTEATVDLEDEKERS

SEQ ID NO: 24412 - DNA, 2055 bp, Homo sapiens
acagaggtcaatttactattaaagtataaaatgtacattagtttcgatctacattttaattattttaggctggcagagaaagaactgtttcatattttaccatcgtacatataaaataaaatattcaatacttatcttgttttcaagattaaaaaaagaagctcccgcaaaggaacaagaacctgtgtctaaggaaattgcaagacctaacatggctgaaagagaaacagaaacatcaaattctgaaagtaaacaagataaagctgcttcttcaaaagaaaaaaatggatgtaatgcaaattcatttgaaggctcatcaacaacaaaaagtgaagaaagcataacagtttcagataaggaaaatgaaacctgtcttgcagaccaggaaactggctcaaaaaacatcgtcagttgtgattcaaatattggtgcagataaagtggaaaagaaaaaacaaatacaacacgtttgtcaggaaatggagttgaagatgtgccaaagttcagaaaacataatcttatctgatcagattaaagatcacaactccagtgaagccagattttcttcaaagaatattaaggatttgcgattagcatcagataatgtaagcattgatcagtttttgagaaaaagacatgaacctgaatctgttagttctgatgttagcgagcaaggcagtattcatttggaacctctgactccatccgaggtacttgagtatgaagccacagagattcttcagaaaggtagtggtgatccttcagccaagactgatgaagtagtgtctgatcaaacagatgacattcctggaggaaataaccctagcacaacagaggcaacagtagacctggaagacgaaaaagaaagaagttgaaattagtcattttaagtttcagtgtaccaacgataagggcatttggaacagtgctatcaggtgagctcagtggtgctgttgtaggttcagaaatggaaatatgtaagggaggtcacacatacactttacctgtatgttcaacctatgttatcaaacaaatcaattcaccaataatagcatgattagtagggattcccaaaaagtttttaaaaacacgaacaggattttaatgataattaaatttgcagtggaaaggtctcatttaatggttttcaaggaaatgggatttggttgctgacatgaattgatgatattagtaatatttataaagcctttcaaacttccatcaatcctaagctaaaaatctttattacctgtatatccttttcagttaactgagaggaagggatttggaaaccatgtacttttggggagtaattgattaaaaacaatggctgattggcattgttaatgaaggctttatttgtgaggatgatgctggtaaatggagcatgcttagagtactaaattgatctaatgagaatttggatgaacataaacttaattttggatttaatataacattccagtcagacgcatgtaaacagaatatttgaatctttgtacctccatacaagtgttagcctgccaggctgtaagcttaccttaattaaactttcagtgaaagtggaattattaagatataaatttatatttgtgctttttgtcagtgtgtaagctgtgtagaaattctttgatgtattagttgtattaatgtaaagtagaaacccattgttgaaactcctgtagctattatgcttttaatattgttttaatgatcttccttagaaataggcccataaaaatggtctggaagccaaaccaaagtatggtataatgtagatattgtaaagcagtaaactgaaaacatgtcctggcatgtattcagccatgtttaagtgacttttctgtaattgtaaaataaaaacttcaaatgggacctaaaacagtgatgtaaaagaactggttttggaaatttagcctaatttatctataagatggctgctaaattgatttttcagttctttttatcatctagaatataatagatatagaaatgaataatatgaagaacagtagtttgctttgaaatactaataaacttttatttaaaatgcttc

SEQ ID NO: 24413 - protein, 220 aa, Homo sapiens; identical to SEQ ID NO: 24407

SEQ ID NO: 24414 - DNA, 4831 bp, Homo sapiens
tcgacagggaacgcaagcaaaaccacacatttaaaacagacttggtaaaatcagctcgttatttaaagaaacggacgattcctttttctctcctggtttagtcttcgacccacaggccccttgcttctttcgaacggcggctgtatcccatgaccttttcactttccaagccaacggactgggggtcgttacacacgcggagggcccggaacgcacggctcctcgcctgcaaattccgagcagtccggattttggggctgcctcccggccacaccagccagcagctcgcacccacatggaggcagggccctggccctcgccccggaccggcgcgtggcggggcgcgtgggtcttcgagggcccgcgacgcggcgcacatgccggtgcccgcctcccgcgtcggcgagaagacagggagctcggacacggggaggctgacccggagcctacccatgaggcagcgcgccggctgcacgagagcccccccctttccacggctcggctgccagctccgcaatgggagccgccgccgtcgccgcagtgtagtttttcgtgctcctccttttcctcctcctctttctcctcctcctcagggctccagtcaggccgatccgctccgctcacggaaggaaaacagaaataacttgctggcttgtctggagtcacatgtacttaggtgacaatttacagaaagtcatctctgcagcttgatgggcgacaacccttttcaaccaaaaagtaattcaaaaatggcagaactgtttatggaatgtgaagaagaggagctggaaccatggcagaagaaagtaaaagaagttgaggatgacgatgatgatgagccaatctttgttggcgagatatcaagttcaaaaccagcaatttcaaatattttgaacagagttaaccccagctcatattcaaggggactaaagaatggtgcactcagtcgaggtattactgctgcattcaagcctacaagtcaacactacacgaatccaacatcaaatccagtgcctgcctcaccaataaattttcatcctgagtctagatcttcagatagttctgttattgttcagcctttttctaaacctggttatataacaaactcatcacgagttgtgtctaataagtcatcagagttactgtttgacttgacccaggatacaggattatcacattaccaagggggaccaacactttctatggcaggtatgagtgaaagttcatttttatcaaaacgtccttctacttctgaagtaaataatgttaatccaaagaagcctaaacccagcgaaagtgtttctggagcaaattcctcagctgtattaccttcagttaaatctccttcagtgacttcttcccaggctatgctagcaaaaggtacaaatacctcatcaaatcagtctaaaaatggaacaccttttccaagagcttgtccaaagtgcaacattcatttcaatcttttggatcctttgaaaaatcacatgaagtattgttgtccagacatgataaataactttttgggactggctaaaacagaattttcaagtacagtaaataaaaacacaactattgattcagagaaaggaaaattgatcatgttagttaatgacttttattatggaaaacatgaaggagatgtccaggaggaacagaagactcacacaacctttaaatgcttcagttgcttgaaaattctaaaaaataacattaggtttatgaaccacatgaaacaccatttggaacttgagaagcagagcagtgagagctgggaaaaccataccacctgccagcactgctaccgtcagtttcccacaccatttcagttgcagtgtcacatcgaaagtacacatacgccccatgaattttctactatttgtaaaatctgtgaattgtcatttgaaacagaacatgttcttttacaacatatgaaggacaatcataaacctggtgaaatgccatatgtctgccaggtttgtaattatagatcatcatcattttctgatgtagaaactcattttagaacatcccatgaaaacactaagaacttgctatgcccgttttgcctcaaagttattaaaattgcaacaccatatatgcatcattatatgaagcatcagaaaaaaggaatacatcgttgtacaaaatgcaggctgcagtttttgacatgcaaggagaaaatggatcataagactcaacaccatcgaacatttataaaacctaaacaactagaaggattgcctcctggaacaaaagttactattcgagcttcagttggacctctgcaatcaggagcttcacctacaccttccattagtgcaagtgcttctacccttcagctctcacctccaaggactaaaaatataactgctaaaaatcctgcaaaatctaatacaagtaaacctaatacagtcaaatccaacgcaagtaaacctaatacaagtaagcctaatggaagtaaatctaaatacaaaccaaaaatctctaatatgcaaaagaaacaaagcacattggctagtagcaataaaaaaagtaaagtcaatacagcattgaggaatttaaggtatcgtcggggcattcacaaatgcattgagtgttgttccgaaataaaagattttgcaaaccactttcctacgtacgtccactgtagtttttgcagatacaacactagctgtagcaaagcctatgtaaatcatatgatgagctttcatagtaaccgtccaagcaaaaggttttgtatttttaagaagcattcagaaaatctccggggcattactctagtgtgccttaattgtgatttcctaagtgatgtttctggcttagataatatggctacacacttaagtcaacataaaactcatacttgccaagttgtaatgcagaaagtttctgtttgtatcccaacttctgagcacctttctgaattaaaaaaagaagctcccgcaaaggaacaagaacctgtgtctaaggaaattgcaagacctaacatggctgaaagagaaacagaaacatcaaattctgaaagtaaacaagataaagctgcttcttcaaaagaaaaaaatggatgtaatgcaaattcatttgaaggctcatcaacaacaaaaagtgaagaaagcataacagtttcagataaggaaaatgaaacctgtcttgcagaccaggaaactggctcaaaaaacatcgtcagttgtgattcaaatattggtgcagataaagtggaaaagaaaaaacaaatacaacacgtttgtcaggaaatggagttgaagatgtgccaaagttcagaaaacataatcttatctgatcagattaaagatcacaactccagtgaagccagattttcttcaaagaatattaaggatttgcgattagcatcagataatgtaagcattgatcagtttttgagaaaaagacatgaacctgaatctgttagttctgatgttagcgagcaaggcagtattcatttggaacctctgactccatccgaggtacttgagtatgaagccacagagattcttcagaaaggtagtggtgatccttcagccaagactgatgaagtagtgtctgatcaaacagatgacattcctggaggaaataaccctagcacaacagaggcaacagtagacctggaagacgaaaaagaaagaagttgaaattagtcattttaagtttcagtgtaccaacgataagggcatttggaacagtgctatcaggtgagctcagtggtgctgttgtaggttcagaaatggaaatatgtaagggaggtcacacatacactttacctgtatgttcaacctatgttatcaaacaaatcaattcaccaataatagcatgattagtagggattcccaaaaagtttttaaaaacacgaacaggattttaatgataattaaatttgcagtggaaaggtctcatttaatggttttcaaggaaatgggatttggttgctgacatgaattgatgatattagtaatatttataaagcctttcaaacttccatcaatcctaagctaaaaatctttattacctgtatatccttttcagttaactgagaggaagggatttggaaaccatgtacttttggggagtaattgattaaaaacaatggctgattggcattgttaatgaaggctttatttgtgaggatgatgctggtaaatggagcatgcttagagtactaaattgatctaatgagaatttggatgaacataaacttaattttggatttaatataacattccagtcagacgcatgtaaacagaatatttgaatctttgtacctccatacaagtgttagcctgccaggctgtaagcttaccttaattaaactttcagtgaaagtggaattattaagatataaatttatatttgtgctttttgtcagtgtgtaagctgtgtagaaattctttgatgtattagttgtattaatgtaaagtagaaacccattgttgaaactcctgtagctattatgcttttaatattgttttaatgatcttccttagaaataggcccataaaaatggtctggaagccaaaccaaagtatggtataatgtagatattgtaaagcagtaaactgaaaacatgtcctggcatgtattcagccatgtttaagtgacttttctgtaattgtaaaataaaaacttcaaatgggacctaaaacagtgatgtaaaagaactggttttggaaatttagcctaatttatctataagatggctgctaaattgatttttcagttctttttatcatctagaatataatagatatagaaatgaataatatgaagaacagtagtttgctttgaaatactaataaacttttatttaaaatgcttc

SEQ ID NO: 24415 - protein, 979 aa, Homo sapiens; identical to SEQ ID NO: 3251

SEQ ID NO: 24416 - DNA, 778 bp, Homo sapiens
aggtctactgttgcctctgttgtgctagggttatttcctccaggaatgtcatctgtttgatcagacactacttcatcagtcttggctgaaggatcaccactacctttctgaagaatctctgtggcttcatactcaagtacctcggatggagtcagaggttccaaatgaatactgccttgctcgctaacatcagaactaacagattcagacacaaaacccaaggatatgaaggattgactgtactcctacattactatattaacaatgtggtttatcctgcttttgacctatgaccaagatcagcttggtggaacaaagacactgacatttcaaggagcaatggcaacataaaataaacaaagaaagttcaagaaatcagaagaatatgaaacaatagcgctcagtggattctaagtgtgtggtataaccaaagataactatcaatgcctttagaaaattttatcaacagttctttcagtatagtaaaattgtataattctctttattttcaaaagaaaatattagaattataaaaatcatatactgatttcaagaattccagtggttaaaggaaatttacttcaaaactaaaaaagtgttcattcctttaagagatagcttagctatctttttaatattcaaatattgttggcgagccttatttttgttctcattttacaatgcaaacgcatcaaggtttcctctggacaccacctttccactgaaataaattcagcaagagaacaatggctaatcatacttctggtctaagaataca

SEQ ID NO: 24417 - protein, 42 aa, Homo sapiens
MNTALLANIRTNRFRHKTQGYEGLTVLLHYYINNVVYPAFDL

SEQ ID NO: 24418 - DNA, 4116 bp, Homo sapiens
tttcctgggtgcaaagaggaaaataagatggtgaatatgtatcattatctctgtcacacttaacgatgatttcagttgcaggaaggaaaacagaaataacttgctggcttgtctggagtcacatgtacttaggtgacaatttacagaaagtcatctctgcagcttgatgggcgacaacccttttcaaccaaaaagtaattcaaaaatggcagaactgtttatggaatgtgaagaagaggagctggaaccatggcagaagaaagtaaaagaagttgaggatgacgatgatgatgagccaatctttgttggcgagatatcaagttcaaaaccagcaatttcaaatattttgaacagagttaaccccagctcatattcaaggggactaaagaatggtgcactcagtcgaggtattactgctgcattcaagcctacaagtcaacactacacgaatccaacatcaaatccagtgcctgcctcaccaataaattttcatcctgagtctagatcttcagatagttctgttattgttcagcctttttctaaacctggttatataacaaactcatcacgagttgtgtctaataagtcatcagagttactgtttgacttgacccaggatacaggattatcacattaccaagggggaccaacactttctatggcaggtatgagtgaaagttcatttttatcaaaacgtccttctacttctgaagtaaataatgttaatccaaagaagcctaaacccagcgaaagtgtttctggagcaaattcctcagctgtattaccttcagttaaatctccttcagtgacttcttcccaggctatgctagcaaaaggtacaaatacctcatcaaatcagtctaaaaatggaacaccttttccaagagcttgtccaaagtgcaacattcatttcaatcttttggatcctttgaaaaatcacatgaagtattgttgtccagacatgataaataactttttgggactggctaaaacagaattttcaagtacagtaaataaaaacacaactattgattcagagaaaggaaaattgatcatgttagttaatgacttttattatggaaaacatgaaggagatgtccaggaggaacagaagactcacacaacctttaaatgcttcagttgcttgaaaattctaaaaaataacattaggtttatgaaccacatgaaacaccatttggaacttgagaagcagagcagtgagagctgggaaaaccataccacctgccagcactgctaccgtcagtttcccacaccatttcagttgcagtgtcacatcgaaagtacacatacgccccatgaattttctactatttgtaaaatctgtgaattgtcatttgaaacagaacatgttcttttacaacatatgaaggacaatcataaacctggtgaaatgccatatgtctgccaggtttgtaattatagatcatcatcattttctgatgtagaaactcattttagaacatcccatgaaaacactaagaacttgctatgcccgttttgcctcaaagttattaaaattgcaacaccatatatgcatcattatatgaagcatcagaaaaaaggaatacatcgttgtacaaaatgcaggctgcagtttttgacatgcaaggagaaaatggatcataagactcaacaccatcgaacatttataaaacctaaacaactagaaggattgcctcctggaacaaaagttactattcgagcttcagttggacctctgcaatcaggagcttcacctacaccttccattagtgcaagtgcttctacccttcagctctcacctccaaggactaaaaatataactgctaaaaatcctgcaaaatctaatacaagtaaacctaatacagtcaaatccaacgcaagtaaacctaatacaagtatcgtcggggcattcacaaatgcattgagtgttgttccgaaataaaagattttgcaaaccactttcctacgtacgtccactgtagtttttgcagatacaacactagctgtagcaaagcctatgtaaatcatatgatgagctttcatagtaaccgtccaagcaaaaggttttgtatttttaagaagcattcagaaaatctccggggcattactctagtgtgccttaattgtgatttcctaagtgatgtttctggcttagataatatggctacacacttaagtcaacataaaactcatacttgccaagttgtaatgcagaaaggtacgtatatgtaactgtgctactttagatttttgacttttattccagtatttttggtcatccacaatatggtctctttactaaatcattattctcactcatcatatttcatatgctgttgtaaatgtaaaacttttcttctaatttcagtttctgtttgtatcccaacttctgagcacctttctgagtaagtttaatttttattcagtgcattttactttgatggattttagcactattgcatttttaaatgtatcattaatacgaatgaaaagtattaaagtatgttgttgtttttttgttttttttttaaagctgcttgttgaaataggttcctgctctatggagctcgtgacctggtgcaagacaagttggaatttcctaagttcaaagttctgagatgttttcttacacaaaggcagttgagcagccaagttcatgacactagctctcattattcagctcttttcagctttcaaatgggactagattcttattccaccttatctttgtgtcaggttgacatatcttaacatatttttttttctccagtttgcgctgtctaaaaataacatttgttgctatggtcttttctttgcttacaataatttttgtttttctctgctgtacttgccttcagaataatagattccaaattatatggctgtttgtcttttgtctgtttgtctgctttcttaatttcttatacgtcttaagttttaggccagataattgtctttttctcattcgttgtctgtcattgtgctatttttcttatttttcagatgcagaagcagcccagagatttcaaaaaatatccagggtatacctggacagtgtcccccttcgatggacacaactgatgcctgttctctctttccaaggaatgtgaataatttgactgtgggacctgctcttaggttgtggcctcaagaaatcagatcttggggagactccctttctacatggctggcctcccataaggctgatgttgtttggccagagatggctttaaggcccaccaaattgagcatacttcccactgggggctttggcttatgatcttaagcttatgagtcagttatgaccaagaaaagcccatcaaaccactgcttcagcatccaagttgaagtttagtcattttggctgctgcctttaaatctttctctagcatgaatgcagtccaaggaatataaaaactctagttgttaggaaaccatggctactttcatatccttggaacaacaggtctccacaattaagttccaaaattgcagttatttttactgacatataaaatctattaaccagtattaattctgtaattttttaacaataccgattcttgcattttgattttttaaaaattaatttaatagcttggttttatgttctcaaaatttattaatgtctattttatgatgtctatttttatattatattatttaaaatttgtttagtgtttgttttaagaactccaagagatttcttagaattctctacagattttgtgtagctgcctatttgtagattttaaatttggctgttactaagcccattaaacattattagatactctgtcctattgggattattattaatattaccttaattgtgagttcttaggtgtaaagaattggcaatactacttgcagaccttaagagccagttttaaagttacgtatttgtgcgtctaagatgtaatgtctacttagccattaatgtagctcctttgggtaaaggtaacatgttaaaaaacatacatatggtgaccagtaatgcatgtatttctttcctttatatattttaaatttgtcatgtgtttattttagttacattgaatatagatctaaactttttatactattatccttttaataaaaattatattgttt

SEQ ID NO: 24419 - protein, 592 aa, Homo sapiens
MGDNPFQPKSNSKMAELFMECEEEELEPWQKKVKEVEDDDDDEPIFVGEISSSKPAISNILNRVNPSSYSRGLKNGALSRGITAAFKPTSQHYTNPTSNPVPASPINFHPESRSSDSSVIVQPFSKPGYITNSSRVVSNKSSELLFDLTQDTGLSHYQGGPTLSMAGMSESSFLSKRPSTSEVNNVNPKKPKPSESVSGANSSAVLPSVKSPSVTSSQAMLAKGTNTSSNQSKNGTPFPRACPKCNIHFNLLDPLKNHMKYCCPDMINNFLGLAKTEFSSTVNKNTTIDSEKGKLIMLVNDFYYGKHEGDVQEEQKTHTTFKCFSCLKILKNNIRFMNHMKHHLELEKQSSESWENHTTCQHCYRQFPTPFQLQCHIESTHTPHEFSTICKICELSFETEHVLLQHMKDNHKPGEMPYVCQVCNYRSSSFSDVETHFRTSHENTKNLLCPFCLKVIKIATPYMHHYMKHQKKGIHRCTKCRLQFLTCKEKMDHKTQHHRTFIKPKQLEGLPPGTKVTIRASVGPLQSGASPTPSISASASTLQLSPPRTKNITAKNPAKSNTSKPNTVKSNASKPNTSIVGAFTNALSVVPK

SEQ ID NO: 24420 - DNA, 842 bp, Homo sapiens
gagaggaggaaggggggcaggagaaaaaagcttttccaaaaaagtattggctgtcttgaggaatgcggtcgcccccttgggaaagtacatatctgggagaagcaggcggctccgcgctcgcactcccgctcctccgcccgaccgcgcgctcgccccgccgctcctgctgcagccccagggcccctcgccgccgccaccatggacgccatcaagaagaagatgcagatgctgaagctcgacaaggagaacgccttggatcgagctgagcaggcggaggccgacaagaaggcggcggaagacaggagcaagcagctggaagatgagctggtgtcactgcaaaagaaactcaagggcaccgaagatgaactggacaaatactctgaggctctcaaagatgcccaggagaagctggagctggcagagaaaaaggccaccgatgctgaagccgacgtagcttctctgaacagacgcatccagctggttgaggaagagttggatcgtgcccaggagcgtctggcaacagctttgcagaagctggaggaagctgagaaggcagcagatgagagtgagagaggcatgaaagtcattgagagtcgagcccaaaaagatgaagaaaaaatggaaattcaggagatccaactgaaagaggccaagcacattgctgaagatgccgaccgcaaatatgaagaggtggcccgtaagctggtcatcattgagagcgacctggaacgtgcagaggagcgggctgagctctcagaaggccaagtccgacagctggaagaacaattaagaataatggatcagaccttgaaagcattaatggctgcagaggataaggtact

SEQ ID NO: 24421 - protein, 213 aa, Homo sapiens
MDAIKKKMQMLKLDKENALDRAEQAEADKKAAEDRSKQLEDELVSLQKKLKGTEDELDKYSEALKDAQEKLELAEKKATDAEADVASLNRRIQLVEEELDRAQERLATALQKLEEAEKAADESERGMKVIESRAQKDEEKMEIQEIQLKEAKHIAEDADRKYEEVARKLVIIESDLERAEERAELSEGQVRQLEEQLRIMDQTLKALMAAEDK

SEQ ID NO: 24422 - DNA, 1870 bp, Homo sapiens
gagaggaggaaggggggcaggagaaaaaagcttttccaaaaaagtattggctgtcttgaggaatgcggtcgcccccttgggaaagtacatatctgggagaagcaggcggctccgcgctcgcactcccgctcctccgcccgaccgcgcgctcgccccgccgctcctgctgcagccccagggcccctcgccgccgccaccatggacgccatcaagaagaagatgcagatgctgaagctcgacaaggagaacgccttggatcgagctgagcaggcggaggccgacaagaaggcggcggaagacaggagcaagcagctggaagatgagctggtgtcactgcaaaagaaactcaagggcaccgaagatgaactggacaaatactctgaggctctcaaagatgcccaggagaagctggagctggcagagaaaaaggccaccgatgctgaagccgacgtagcttctctgaacagacgcatccagctggttgaggaagagttggatcgtgcccaggagcgtctggcaacagctttgcagaagctggaggaagctgagaaggcagcagatgagagtgagagaggcatgaaagtcattgagagtcgagcccaaaaagatgaagaaaaaatggaaattcaggagatccaactgaaagaggccaagcacattgctgaagatgccgaccgcaaatatgaagaggtggcccgtaagctggtcatcattgagagcgacctggaacgtgcagaggagcgggctgagctctcagaaggccaagtccgacagctggaagaacaattaagaataatggatcagaccttgaaagcattaatggctgcagaggataagtactcgcagaaggaagacagatatgaggaagagatcaaggtcctttccgacaagctgaaggaggtaatatgagagttgtggatgaagccaactggattttaaatgagtttgttttcatggaaccggtcagggccttttcattttaaagttccaatgatccaagtcaggaatattcaaaggtcgccttggagtttatgtactgtgctaactgccatttctcacagaggtgactgaaactgacaagtagtttctgatccattttataggtgatgtgcttcattttcatcctctagttttccctatgtttgtagctacaggaaacataaaacttcccaactttaactcaaataaatcattacaggctgagactcgggctgagtttgcggagaggtcagtaactaaattggagaaaagcattgatgacttagaaggtaagatcttaagtagtgtttttagtttaatccttatggttgaataccaacctggcaaaacaattttccaattcaagggcatccacattgatacgctcctttgcacttgcacattcttcctgtgtgtcctctggggtttttctctgtggctcttgaactcatgaacctaagtcttctgctcacgaggtgactagttagccaccagccatagtggcaaatgccatccagcttgacttcatgctcattacaagtgtggcaggtttatttttcactgtgagtgaggtgcttattggtgagaatgactctagtatattttatatctttagtgttacttcctaattaaattgggaatgatgtggtgattgtggtcttgtttttagaagaacccatcttcttccaagtatgaattcaaagtaaggatttaggggttattttaagtcatatattatcttaacaaaatactttatatcctgaaggaggagggaaaaattatacttaagcatttcttccctaaggcacttaggttttattttagtaataaccactctatctcacagatatcctaaatgttgagctttgaagcttgtgaaggattagctgtg

SEQ ID NO: 24423 - protein, 236 aa, Homo sapiens
MDAIKKKMQMLKLDKENALDRAEQAEADKKAAEDRSKQLEDELVSLQKKLKGTEDELDKYSEALKDAQEKLELAEKKATDAEADVASLNRRIQLVEEELDRAQERLATALQKLEEAEKAADESERGMKVIESRAQKDEEKMEIQEIQLKEAKHIAEDADRKYEEVARKLVIIESDLERAEERAELSEGQVRQLEEQLRIMDQTLKALMAAEDKYSQKEDRYEEEIKVLSDKLKEVI

SEQ ID NO: 24424 - DNA, 1294 bp, Homo sapiens
gagaggaggaaggggggcaggagaaaaaagcttttccaaaaaagtattggctgtcttgaggaatgcggtcgcccccttgggaaagtacatatctgggagaagcaggcggctccgcgctcgcactcccgctcctccgcccgaccgcgcgctcgccccgccgctcctgctgcagccccagggcccctcgccgccgccaccatggacgccatcaagaagaagatgcagatgctgaagctcgacaaggagaacgccttggatcgagctgagcaggcggaggccgacaagaaggcggcggaagacaggagcaagcagctggaagatgagctggtgtcactgcaaaagaaactcaagggcaccgaagatgaactggacaaatactctgaggctctcaaagatgcccaggagaagctggagctggcagagaaaaaggccaccgatgctgaagccgacgtagcttctctgaacagacgcatccagctggttgaggaagagttggatcgtgcccaggagcgtctggcaacagctttgcagaagctggaggaagctgagaaggcagcagatgagagtgagagaggcatgaaagtcattgagagtcgagcccaaaaagatgaagaaaaaatggaaattcaggagatccaactgaaagaggccaagcacattgctgaagatgccgaccgcaaatatgaagaggtggcccgtaagctggtcatcattgagagcgacctggaacgtgcagaggagcgggctgagctctcagaaggcaaatgtgccgagcttgaagaagaattgaaaactgtgacgaacaacttgaagtcactggaggctcaggctgagaagtactcgcagaaggaagacagatatgaggaagagatcaaggtcctttccgacaagctgaaggaggctgagactcgggctgagtttgcggagaggtcagtaactaaattggagaaaagcattgatgacttagaagacgagctgtacgctcagaaactgaagtacaaagccatcagcgaggagctggaccacgctctcaacgatatgacttccatgtaaacgttcatccactctgcctgcttacaccctgccctcatgctaatataagtttctttgcttcacttctcccaagactccctcgtcgagctggatgtcccacctctctgagctctgcatttgtctattctccagctgaccctggttctctctcttagcatcctgccttagagccaggcacacactgtgctttctattgtacagaagctcttcgtttcagtgtcaaataaacactgtgtaagct

SEQ ID NO: 24425 - protein, 284 aa, Homo sapiens
MDAIKKKMQMLKLDKENALDRAEQAEADKKAAEDRSKQLEDELVSLQKKLKGTEDELDKYSEALKDAQEKLELAEKKATDAEADVASLNRRIQLVEEELDRAQERLATALQKLEEAEKAADESERGMKVIESRAQKDEEKMEIQEIQLKEAKHIAEDADRKYEEVARKLVIIESDLERAEERAELSEGKCAELEEELKTVTNNLKSLEAQAEKYSQKEDRYEEEIKVLSDKLKEAETRAEFAERSVTKLEKSIDDLEDELYAQKLKYKAISEELDHALNDMTSM

SEQ ID NO: 24426 - DNA, 1294 bp, Homo sapiens
gagaggaggaaggggggcaggagaaaaaagcttttccaaaaaagtattggctgtcttgaggaatgcggtcgcccccttgggaaagtacatatctgggagaagcaggcggctccgcgctcgcactcccgctcctccgcccgaccgcgcgctcgccccgccgctcctgctgcagccccagggcccctcgccgccgccaccatggacgccatcaagaagaagatgcagatgctgaagctcgacaaggagaacgccttggatcgagctgagcaggcggaggccgacaagaaggcggcggaagacaggagcaagcagctggaagatgagctggtgtcactgcaaaagaaactcaagggcaccgaagatgaactggacaaatactctgaggctctcaaagatgcccaggagaagctggagctggcagagaaaaaggccaccgatgctgaagccgacgtagcttctctgaacagacgcatccagctggttgaggaagagttggatcgtgcccaggagcgtctggcaacagctttgcagaagctggaggaagctgagaaggcagcagatgagagtgagagaggcatgaaagtcattgagagtcgagcccaaaaagatgaagaaaaaatggaaattcaggagatccaactgaaagaggccaagcacattgctgaagatgccgaccgcaaatatgaagaggtggcccgtaagctggtcatcattgagagcgacctggaacgtgcagaggagcgggctgagctctcagaaggccaagtccgacagctggaagaacaattaagaataatggatcagaccttgaaagcattaatggctgcagaggataagtactcgcagaaggaagacagatatgaggaagagatcaaggtcctttccgacaagctgaaggaggctgagactcgggctgagtttgcggagaggtcagtaactaaattggagaaaagcattgatgacttagaagacgagctgtacgctcagaaactgaagtacaaagccatcagcgaggagctggaccacgctctcaacgatatgacttccatgtaaacgttcatccactctgcctgcttacaccctgccctcatgctaatataagtttctttgcttcacttctcccaagactccctcgtcgagctggatgtcccacctctctgagctctgcatttgtctattctccagctgaccctggttctctctcttagcatcctgccttagagccaggcacacactgtgctttctattgtacagaagctcttcgtttcagtgtcaaataaacactgtgtaagct

SEQ ID NO: 24427 - protein, 284 aa, Homo sapiens; identical to SEQ ID NO: 3253

SEQ ID NO: 24428 - DNA, 1246 bp, Homo sapiens
gagaggaggaaggggggcaggagaaaaaagcttttccaaaaaagtattggctgtcttgaggaatgcggtcgcccccttgggaaagtacatatctgggagaagcaggcggctccgcgctcgcactcccgctcctccgcccgaccgcgcgctcgccccgccgctcctgctgcagccccagggcccctcgccgccgccaccatggacgccatcaagaagaagatgcagatgctgaagctcgacaaggagaacgccttggatcgagctgagcaggcggaggccgacaagaaggcggcggaagacaggagcaagcagctggaagatgagctggtgtcactgcaaaagaaactcaagggcaccgaagatgaactggacaaatactctgaggctctcaaagatgcccaggagaagctggagctggcagagaaaaaggccaccgatgctgaagccgacgtagcttctctgaacagacgcatccagctggttgaggaagagttggatcgtgcccaggagcgtctggcaacagctttgcagaagctggaggaagctgagaaggcagcagatgagagtgagagaggcatgaaagtcattgagagtcgagcccaaaaagatgaagaaaaaatggaaattcaggagatccaactgaaagaggccaagcacattgctgaagatgccgaccgcaaatatgaagaggtggcccgtaagctggtcatcattgagagcgacctggaacgtgcagaggagcgggctgagctctcagaaggcaaatgtgccgagcttgaagaagaattgaaaactgtgacgaacaacttgaagtcactggaggctcaggctgagaagtactcgcagaaggaagacagatatgaggaagagatcaaggtcctttccgacaagctgaaggaggctgagactcgggctgagtttgcggagaggtcagtaactaaattggagaaaagcattgatgacttagaagacgagctgtacgctcagaaactgaagtacaaagccatcagcgaggagctggaccacgctctcaacgatatgacttccatataagtttctttgcttcacttctcccaagactccctcgtcgagctggatgtcccacctctctgagctctgcatttgtctattctccagctgaccctggttctctctcttagcatcctgccttagagccaggcacacactgtgctttctattgtacagaagctcttcgtttcagtgtcaaataaacactgtgtaagct

SEQ ID NO: 24429 - protein, 284 aa, Homo sapiens; identical to SEQ ID NO: 3257

SEQ ID NO: 24430 - DNA, 2483 bp, Homo sapiens
gagaggaggaaggggggcaggagaaaaaagcttttccaaaaaagtattggctgtcttgaggaatgcggtcgcccccttgggaaagtacatatctgggagaagcaggcggctccgcgctcgcactcccgctcctccgcccgaccgcgcgctcgccccgccgctcctgctgcagccccagggcccctcgccgccgccaccatggacgccatcaagaagaagatgcagatgctgaagctcgacaaggagaacgccttggatcgagctgagcaggcggaggccgacaagaaggcggcggaagacaggagcaagcagctggaagatgagctggtgtcactgcaaaagaaactcaagggcaccgaagatgaactggacaaatactctgaggctctcaaagatgcccaggagaagctggagctggcagagaaaaaggccaccgatgctgaagccgacgtagcttctctgaacagacgcatccagctggttgaggaagagttggatcgtgcccaggagcgtctggcaacagctttgcagaagctggaggaagctgagaaggcagcagatgagagtgagagaggcatgaaagtcattgagagtcgagcccaaaaagatgaagaaaaaatggaaattcaggagatccaactgaaagaggccaagcacattgctgaagatgccgaccgcaaatatgaagaggtggcccgtaagctggtcatcattgagagcgacctggaacgtgcagaggagcgggctgagctctcagaaggcaaatgtgccgagcttgaagaagaattgaaaactgtgacgaacaacttgaagtcactggaggctcaggctgagaagtactcgcagaaggaagacagatatgaggaagagatcaaggtcctttccgacaagctgaaggaggctgagactcgggctgagtttgcggagaggtcagtaactaaattggagaaaagcattgatgacttagaagacgagctgtacgctcagaaactgaagtacaaagccatcagcgaggagctggaccacgctctcaacgatatgacttccatgtaaacgttcatccactctgcctgcttacaccctgccctcatgctaatataagtttctttgcttcacttctcccaagactccctcgtcgagctggatgtcccacctctctgagctctgcatttgtctattctccagctgaccctggttctctctcttagcatcctgccttagagccaggcacacactgtgctttctattgtacagaagctcttcgtttcagtgtcaaataaacactgtgtaagctatttctgtttgctattctttttacttcttatttattgacattttagtttcaacattgaataaaactacaaagctgcttcacacatatgagggttagtgtttggctgctgctttttctttttaaatactgaacactatacagaattatatcaggagtttctaaagcagtagttccttgttgaacttcaaaaaaatacccaggcctgcattccctctcagagttctgattttcaaaggttagaatgaggtctggacatctgggggggttttgggggaattgtgatggctctgctttgcagtctgggtcacacaggggacattgcttgttgagagttgaaaggtctggcttgatcagtgtcttcctttgctggaggtttagctcgggatgtagtgacccctctgtgttgattatttcggtggccttacttgggaggacctggctaactaatgaaaggctcatgatgaatggttctgtagctgtcccatattactaggaagttatacattgagaagggtgaaaaagaacttggattcaaacaatgtaagttttggttattgtcgatcatccttttatagcacaaagaaaagttcaagcttttttgaagtatattcatgactcagccacctttattttgatcatgaaaatgacatcttaggttttctaaatatgattactctgtttagtcgtgatttgttttgtgctttttagcacatactctttgggagggattgtacataatctttgtgttcaatggctgtgttttcatttgtggacatttttaaaatatagcaatgaaagtttctttttttttttcccaaaaagatagttggtggaaattgttcagaagacaattgtatttcatttgggcttctgttttatttcacaaacagcaattaagtgatttttttaaaaaaatacattgcaaaaaatagaactttaactaatatggactttagtgttataattcccaacatttctccttcctcaacaatctagctatatatttctcctgttttttttttaacatggatgatctgcatgttttgtatatagtttttttagcccgagagggctgatataccaccatactcaaataaatttggacaaactcagaagatagtgtcattctcactctacagagacttcaaagcatagaggaaatacttttttttaaagaaagctgtgaatt

SEQ ID NO: 24431 - protein, 284 aa, Homo sapiens; identical to SEQ ID NO: 24425

SEQ ID NO: 24432 - DNA, 1796 bp, Homo sapiens
gagaggaggaaggggggcaggagaaaaaagcttttccaaaaaagtattggctgtcttgaggaatgcggtcgcccccttgggaaagtacatatctgggagaagcaggcggctccgcgctcgcactcccgctcctccgcccgaccgcgcgctcgccccgccgctcctgctgcagccccagggcccctcgccgccgccaccatggacgccatcaagaagaagatgcagatgctgaagctcgacaaggagaacgccttggatcgagctgagcaggcggaggccgacaagaaggcggcggaagacaggagcaagcagctggaagatgagctggtgtcactgcaaaagaaactcaagggcaccgaagatgaactggacaaatactctgaggctctcaaagatgcccaggagaagctggagctggcagagaaaaaggccaccgatgctgaagccgacgtagcttctctgaacagacgcatccagctggttgaggaagagttggatcgtgcccaggagcgtctggcaacagctttgcagaagctggaggaagctgagaaggcagcagatgagagtgagagaggcatgaaagtcattgagagtcgagcccaaaaagatgaagaaaaaatggaaattcaggagatccaactgaaagaggccaagcacattgctgaagatgccgaccgcaaatatgaagaggtggcccgtaagctggtcatcattgagagcgacctggaacgtgcagaggagcgggctgagctctcagaaggccaagtccgacagctggaagaacaattaagaataatggatcagaccttgaaagcattaatggctgcagaggataagtactcgcagaaggaagacagatatgaggaagagatcaaggtcctttccgacaagctgaaggaggctgagactcgggctgagtttgcggagaggtcagtaactaaattggagaaaagcattgatgacttagaagagaaagtggctcatgccaaagaagaaaaccttagtatgcatcagatgctggatcagactttactggagttaaacaacatgtgaaaacctccttagctgcgaccacattctttcgttttgttttgttttgtttttaaacacctgcttaccccttaaatgcaatttatttacttttaccactgtcacagaaacatccacaagataccagctaggtcagggggtggggaaaacacatacaaaaaggcaagcccatgtcagggcgatcctggttcaaatgtgccatttcccgggttgatgctgccacactttgtagagagtttagcaacacagtgtgcttagtcagcgtaggaatcctcactaaagcagaagaagttccattcaaagtgccaatgatagagtcaacaggaaggttaatgttggaaacacaatcaggtgtggattggtgctactttgaacaaaaggtccccctgtggtcttttgttcaacattgtacaatgtagaactctgtccaacactaatttattttgtcttgagttttactacaagatgagactatggatcccgcatgcctgaattcactaaagccaagggtctgtaagccacgctgctcttccgagacttccattcctttctgattggcacacgtgcagctcatgacaatctgtaggataacaatcagtgtggatttccactcttttcagtccttcatgttaaagatttagacaccacatacaactggtaaaggacgttttcttgagagttttaactatatgtaaacattgtataatgatatggaataaaatgcacattgtaggacattttctaaa

SEQ ID NO: 24433 - protein, 284 aa, Homo sapiens; identical to SEQ ID NO: 3259

SEQ ID NO: 24434 - DNA, 590 bp, Homo sapiens
aaaaaagcttttccaaaaaagtattggctgtcttgaggaatgcggtcgcccccttgggaaagtacatatctgggagaagcaggcggctccgcgctcgcactcccgctcctccgcccgaccgcgcgctcgccccgccgctcctgctgcagccccagggcccctcgccgccgccaccatggacgccatcaagaagaagatgcagatgctgaagctcgacaaggagaacgccttggatcgagctgagcaggcggaggccgacaagaaggcggcggaagacaggagcaagcagctggaagatgagctggtgtcactgcaaaagaaactcaagggcaccgaagatgaactggacaaatactctgaggctctcaaagatgcccaggagaagctggagctggcagagaaaaaggccaccgatgctgaagccgacgtagcttctctgaacagacgcatccagctggttgaggaagagttggatcgtgcccaggagcgtctggcaacagctttgcagaagctggaggaagctgagaaggcagcagatgagagtgagagaggcatgaaagtcattgagagtcgagcccaaaaagatgaag

SEQ ID NO: 24435 - protein, 137 aa, Homo sapiens
MDAIKKKMQMLKLDKENALDRAEQAEADKKAAEDRSKQLEDELVSLQKKLKGTEDELDKYSEALKDAQEKLELAEKKATDAEADVASLNRRIQLVEEELDRAQERLATALQKLEEAEKAADESERGMKVIESRAQKD

SEQ ID NO: 24436 - DNA, 668 bp, Homo sapiens
aaaaaagcttttccaaaaaagtattggctgtcttgaggaatgcggtcgcccccttgggaaagtacatatctgggagaagcaggcggctccgcgctcgcactcccgctcctccgcccgaccgcgcgctcgccccgccgctcctgctgcagccccagggcccctcgccgccgccaccatggacgccatcaagaagaagatgcagatgctgaagctcgacaaggagaacgccttggatcgagctgagcaggcggaggccgacaagaaggcggcggaagacaggagcaagcagctggaagatgagctggtgtcactgcaaaagaaactcaagggcaccgaagatgaactggacaaatactctgaggctctcaaagatgcccaggagaagctggagctggcagagaaaaaggccaccgatgctgaagccgacgtagcttctctgaacagacgcatccagctggttgaggaagagttggatcgtgcccaggagcgtctggcaacagctttgcagaagctggaggaagctgagaaggcagcagatgagagtgagagaggcatgaaagtcattgagagtcgagcccaaaaagatgaagaaaaaatggaaattcaggagatccaactgaaagaggccaagcacattgctgaagatgccgaccgcaaatatgaagagg

SEQ ID NO: 24437 - protein, 163 aa, Homo sapiens
MDAIKKKMQMLKLDKENALDRAEQAEADKKAAEDRSKQLEDELVSLQKKLKGTEDELDKYSEALKDAQEKLELAEKKATDAEADVASLNRRIQLVEEELDRAQERLATALQKLEEAEKAADESERGMKVIESRAQKDEEKMEIQEIQLKEAKHIAEDADRKYE

SEQ ID NO: 24438 - DNA, 1007 bp, Homo sapiens
aaaaaagtattggctgtcttgaggaatgcggtcgcccccttgggaaagtacatatctgggagaagcaggcggctccgcgctcgcactcccgctcctccgcccgaccgcgcgctcgccccgccgctcctgctgcagccccagggcccctcgccgccgccaccatggacgccatcaagaagaagatgcagatgctgaagctcgacaaggagaacgccttggatcgagctgagcaggcggaggccgacaagaaggcggcggaagacaggagcaagcagctggaagatgagctggtgtcactgcaaaagaaactcaagggcaccgaagatgaactggacaaatactctgaggctctcaaagatgcccaggagaagctggagctggcagagaaaaaggccaccgatgctgaagccgacgtagcttctctgaacagacgcatccagctggttgaggaagagttggatcgtgcccaggagcgtctggcaacagctttgcagaagctggaggaagctgactctcagaaggcaaatgtgccgagcttgaagaagaattgaaaactgtgacgaacaacttgaagtcactggaggctcaggctgagaagtactcgcagaaggaagacagatatgaggaagagatcaaggtcctttccgacaagctgaaggaggctgagactcgggctgagtttgcggagaggtcagtaactaaattggagaaaagcattgatgacttagaagacgagctgtacgctcagaaactgaagtacaaagccatcagcgaggagctggaccacgctctcaacgatatgacttccatataagtttctttgcttcacttctcccaagactccctcgtcgagctggatgtcccacctctctgagctctgcatttgtctattctccagctgaccctggttctctctcttagcatcctgccttagagccaggcacacactgtgctttctattgtacagaagctcttcgtttcagtgtcaaataaacactgtgtaagct

SEQ ID NO: 24439 - protein, 129 aa, Homo sapiens
MDAIKKKMQMLKLDKENALDRAEQAEADKKAAEDRSKQLEDELVSLQKKLKGTEDELDKYSEALKDAQEKLELAEKKATDAEADVASLNRRIQLVEEELDRAQERLATALQKLEEADSQKANVPSLKKN

SEQ ID NO: 24440 - DNA, 1090 bp, Homo sapiens
aaaaaagtattggctgtcttgaggaatgcggtcgcccccttgggaaagtacatatctgggagaagcaggcggctccgcgctcgcactcccgctcctccgcccgaccgcgcgctcgccccgccgctcctgctgcagccccagggcccctcgccgccgccaccatggacgccatcaagaagaagatgcagatgctgaagctcgacaaggagaacgccttggatcgagctgagcaggcggaggccgacaagaaggcggcggaagacaggagcaagcagctggaagatgagctggtgtcactgcaaaagaaactcaagggcaccgaagatgaactggacaaatactctgaggctctcaaagatgcccaggagaagctggagctggcagagaaaaaggccaccgatgctgaagccgacgtagcttctctgaacagacgcatccagctggttgaggaagagttggatcgtgcccaggagcgtctggcaacagctttgcagaagctggaggaagctgactctcagaaggcaaatgtgccgagcttgaagaagaattgaaaactgtgacgaacaacttgaagtcactggaggctcaggctgagaagtactcgcagaaggaagacagatatgaggaagagatcaaggtcctttccgacaagctgaaggaggctgagactcgggctgagtttgcggagaggtcagtaactaaattggagaaaagcattgatgacttagaagacgagctgtacgctcagaaactgaagtacaaagccatcagcgaggagctggaccacgctctcaacgatatgacttccatataagtttctttgcttcacttctcccaagactccctcgtcgagctggatgtcccacctctctgagctctgcatttgtctattctccagctgaccctggttctctctcttagcatcctgccttagagccaggcacacactgtgctttctattgtacagaagctcttcgtttcagtgtcaaataaacactgtgtaagctatttctgtttgctattctttttacttcttatttattgacattttagtttcaacattgaataaaactacaaagctgcttcacac

SEQ ID NO: 24441 - protein, 129 aa, Homo sapiens; identical to SEQ ID NO: 24439

SEQ ID NO: 24442 - DNA, 2196 bp, Homo sapiens
aaaaaagtattggctgtcttgaggaatgcggtcgcccccttgggaaagtacatatctgggagaagcaggcggctccgcgctcgcactcccgctcctccgcccgaccgcgcgctcgccccgccgctcctgctgcagccccagggcccctcgccgccgccaccatggacgccatcaagaagaagatgcagatgctgaagctcgacaaggagaacgccttggatcgagctgagcaggcggaggccgacaagaaggcggcggaagacaggagcaagcagctggaagatgagctggtgtcactgcaaaagaaactcaagggcaccgaagatgaactggacaaatactctgaggctctcaaagatgcccaggagaagctggagctggcagagaaaaaggccaccgatgctgaagccgacgtagcttctctgaacagacgcatccagctggttgaggaagagttggatcgtgcccaggagcgtctggcaacagctttgcagaagctggaggaagctgactctcagaaggcaaatgtgccgagcttgaagaagaattgaaaactgtgacgaacaacttgaagtcactggaggctcaggctgagaagtactcgcagaaggaagacagatatgaggaagagatcaaggtcctttccgacaagctgaaggaggctgagactcgggctgagtttgcggagaggtcagtaactaaattggagaaaagcattgatgacttagaagacgagctgtacgctcagaaactgaagtacaaagccatcagcgaggagctggaccacgctctcaacgatatgacttccatataagtttctttgcttcacttctcccaagactccctcgtcgagctggatgtcccacctctctgagctctgcatttgtctattctccagctgaccctggttctctctcttagcatcctgccttagagccaggcacacactgtgctttctattgtacagaagctcttcgtttcagtgtcaaataaacactgtgtaagctatttctgtttgctattctttttacttcttatttattgacattttagtttcaacattgaataaaactacaaagctgcttcacacatatgagggttagtgtttggctgctgctttttctttttaaatactgaacactatacagaattatatcaggagtttctaaagcagtagttccttgttgaacttcaaaaaaatacccaggcctgcattccctctcagagttctgattttcaaaggttagaatgaggtctggacatctgggggggttttgggggaattgtgatggctctgctttgcagtctgggtcacacaggggacattgcttgttgagagttgaaaggtctggcttgatcagtgtcttcctttgctggaggtttagctcgggatgtagtgacccctctgtgttgattatttcggtggccttacttgggaggacctggctaactaatgaaaggctcatgatgaatggttctgtagctgtcccatattactaggaagttatacattgagaagggtgaaaaagaacttggattcaaacaatgtaagttttggttattgtcgatcatccttttatagcacaaagaaaagttcaagcttttttgaagtatattcatgactcagccacctttattttgatcatgaaaatgacatcttaggttttctaaatatgattactctgtttagtcgtgatttgttttgtgctttttagcacatactctttgggagggattgtacataatctttgtgttcaatggctgtgttttcatttgtggacatttttaaaatatagcaatgaaagtttctttttttttttcccaaaaagatagttggtggaaattgttcagaagacaattgtatttcatttgggcttctgttttatttcacaaacagcaattaagtgatttttttaaaaaaatacattgcaaaaaatagaactttaactaatatggactttagtgttataattcccaacatttctccttcctcaacaatctagctatatatttctcctgttttttttttaacatggatgatctgcatgttttgtatatagtttttttagcccgagagggctgatataccaccatactcaaataaatttggacaaactcagaagatagtgtcattctcactctacagagacttcaaagcatagaggaaatacttttttttaaagaaagctgtgaatt

SEQ ID NO: 24443 - protein, 129 aa, Homo sapiens; identical to SEQ ID NO: 24439

SEQ ID NO: 24444 - DNA, 894 bp, Homo sapiens
gtcttgaggaatgcggtcgcccccttgggaaagtacatatctgggagaagcaggcggctccgcgctcgcactcccgctcctccgcccgaccgcgcgctcgccccgccgctcctgctgcagccccagggcccctcgccgccgccaccatggacgccatcaagaagaagatgcagatgctgaagctcgacaaggagaacgccttggatcgagctgagcaggcggaggccgacaagaaggcggcggaagacaggagcaagcagctggaagatgagctggtgtcactgcaaaagaaactcaagggcaccgaagatgaactggacaaatactctgaggctctcaaagatgcccaggagaagctggagctggcagagaaaaaggccaccgatgtaagtgcacgctcacactgcttccctcacctcttgcctgcgtggccactccggggtcaccacagggctggagagcaatgaaggaagtttaccttttcctgctggacacctgcacacagccctgccatggcccagagcattggatgccgcctctgactgctactgcacacattcatttatatttcatccactcctctcttcttctcctttcctttacctccctgggggtggaggtgggtggatgagaggctgggagaatagagcagctgaaattggactctggaggtgaacttcacctccctggtggcagaaaacccttgaggtgtcatcaccaaggtttgtgtagagaatgccaggttttcttcactttctttccttttgccgtttccagtgggtgggaagttctgggtttggtggtgggtctagtcagggttcagagaacctggcctctaaatgaaagaaatgacacagcggtacctttacttagatggctgcacttcatggtggg

SEQ ID NO: 24445 - protein, 106 aa, Homo sapiens
MDAIKKKMQMLKLDKENALDRAEQAEADKKAAEDRSKQLEDELVSLQKKLKGTEDELDKYSEALKDAQEKLELAEKKATDVSARSHCFPHLLPAWPLRGHHRAGEQ

SEQ ID NO: 24446 - DNA, 1257 bp, Homo sapiens
gtcttgaggaatgcggtcgcccccttgggaaagtacatatctgggagaagcaggcggctccgcgctcgcactcccgctcctccgcccgaccgcgcgctcgccccgccgctcctgctgcagccccagggcccctcgccgccgccaccatggacgccatcaagaagaagatgcagatgctgaagctcgacaaggagaacgccttggatcgagctgagcaggcggaggccgacaagaaggcggcggaagacaggagcaagcagctcgaggaggacatcgcggccaaggagaagttgctgcgggtgtcggaggacgagcgggaccgggtgctggaggagctgcacaaggcggaggacagcctcctggccgccgaagaggccgccgccaaggtacccggggcgcgcggcacggcgtggcgcacgaatggctaactctttctctttctctctctccctccctgtctttccctctgtctctcccgctgtccctgtccttctggttctgtgcacccacacccctccccttcgggatcacgctgcctgctgcacccccctccctccctgtaccccctggccaactcccagctggaagatgagctggtgtcactgcaaaagaaactcaagggcaccgaagatgaactggacaaatactctgaggctctcaaagatgcccaggagaagctggagctggcagagaaaaaggccaccgatgctgaagccgacgtagcttctctgaacagacgcatccagctggttgaggaagagttggatcgtgcccaggagcgtctggcaacagctttgcagaagctggaggaagctgagaaggcagcagatgagagtgagaggtgagaatgcctcatcagccatcttttgcagctgcctttcctggtggaataaaccggagggctcctgtgatctttgaggtttaagaatttttcagtcccctggtggtgggatcatttcctctattgatcccaggtataactcggttggttttgttcatttagcattagtgaaacacctactatgtccaaagcactgtcctaagccctaaggttacaaagaagaagatgatcttgttcctgcccttacagaactcaccatctaatgagggagacagacatgtaaaggagaaatgtcagggatacaagttggccctttcactcctactgaccacagagcaattgtgcattttttaaagtgtaactttattttataatatacaaggaggcttaggtgtaaataaaggaactgtggacta

SEQ ID NO: 24447 - protein, 100 aa, Homo sapiens
MANSFSFSLSLPVFPSVSPAVPVLLVLCTHTPPLRDHAACCTPLPPCTPWPTPSWKMSWCHCKRNSRAPKMNWTNTLRLSKMPRRSWSWQRKRPPMLKPT

SEQ ID NO: 24448 - DNA, 639 bp, Homo sapiens
gtcttgaggaatgcggtcgcccccttgggaaagtacatatctgggagaagcaggcggctccgcgctcgcactcccgctcctccgcccgaccgcgcgctcgccccgccgctcctgctgcagccccagggcccctcgccgccgccaccatggacgccatcaagaagaagatgcagatgctgaagctcgacaaggagaacgccttggatcgagctgagcaggcggaggccgacaagaaggcggcggaagacaggagcaagcagctcgaggaggacatcgcggccaaggagaagttgctgcgggtgtcggaggacgagcgggaccgggtgctggaggagctgcacaaggcggaggacagcctcctggccgccgaagaggccgccgccaaggctgaagccgacgtagcttctctgaacagacgcatccagctggttgaggaagagttggatcgtgcccaggagcgtctggcaacagctttgcagaagctggaggaagctgagaaggcagcagatgagagtgagagaggcatgaaagtcattgagagtcgagcccaaaaagatgaagaaaaaatggaaattcaggagatccaactgaaagaggccaagcacattgctgaagatgccgaccgcaaatatgaagagg

SEQ ID NO: 24449 - protein, 163 aa, Homo sapiens
MDAIKKKMQMLKLDKENALDRAEQAEADKKAAEDRSKQLEEDIAAKEKLLRVSEDERDRVLEELHKAEDSLLAAEEAAAKAEADVASLNRRIQLVEEELDRAQERLATALQKLEEAEKAADESERGMKVIESRAQKDEEKMEIQEIQLKEAKHIAEDADRKYE

SEQ ID NO: 24450 - DNA, 2947 bp, Homo sapiens
gtcttgaggaatgcggtcgcccccttgggaaagtacatatctgggagaagcaggcggctccgcgctcgcactcccgctcctccgcccgaccgcgcgctcgccccgccgctcctgctgcagccccagggcccctcgccgccgccaccatggacgccatcaagaagaagatgcagatgctgaagctcgacaaggagaacgccttggatcgagctgagcaggcggaggccgacaagaaggcggcggaagacaggagcaagcagctcgaggaggacatcgcggccaaggagaagttgctgcgggtgtcggaggacgagcgggaccgggtgctggaggagctgcacaaggcggaggacagcctcctggccgccgaagaggccgccgccaaggctgaagccgacgtagcttctctgaacagacgcatccagctggttgaggaagagttggatcgtgcccaggagcgtctggcaacagctttgcagaagctggaggaagctgagaaggcagcagatgagagtgagagaggcatgaaagtcattgagagtcgagcccaaaaagatgaagaaaaaatggaaattcaggagatccaactgaaagaggccaagcacattgctgaagatgccgaccgcaaatatgaagaggtggcccgtaagctggtcatcattgagagcgacctggaacgtgcagaggagcgggctgagctctcagaaggcaaatgtgccgagcttgaagaagaattgaaaactgtgacgaacaacttgaagtcactggaggctcaggctgagaagtactcgcagaaggaagacagatatgaggaagagatcaaggtcctttccgacaagctgaaggaggctgagactcgggctgagtttgcggagaggtcagtaactaaattggagaaaagcattgatgacttagaagacgagctgtacgctcagaaactgaagtacaaagccatcagcgaggagctggaccacgctctcaacgatatgacttccatgtaaacgttcatccactctgcctgcttacaccctgccctcatgctaatgtaataaactcaccaccatgccttccttgctccctaatctccatctttgcactcttgtgttcaccctttttgtcataacctagaatagtcattgttttttcactttctgctaatataaaggccaattagattaagtctgtctatacaaaccattttcttttcagaatccgtttattttgtaaacgctgaactagagcagtgaactagaatgagtgaccttgagcactgtccttttgggaaattaagctaaactcaagtaaaactagaaggccatgccgtttgttgtacaggaacttctcaaaaaatatcaaaatttgtttcctgaaattcaactaagtacaacataatcattttcgttaaatataatttgaaggaacccttaaagtgtcaggttattgagaatctgaggataaggaaattggcatgatccaatacagctttaacagtggtactacaaaagatcatctcttttacttttaagaattctagagtaggccgggcacagtggctcacgcctgtaatcccagcactttgggaggccgaggcgggcggatcacgaggtcaggagattgagaccatcctggctaacacggtgaaaccctgtctctactaaaaatacaaaaaaaattagccgggcgtggtggtggatgcctgtagtcccagctactcaggaggctgaggcaggagaatggcatgaacccgggaggtggagcttgcagtcagccgagatcgcaccaccgcactccagcctggacgacagagcgagactctgtctcaagaaaaaaaagaatggtagagtaaaaagaaccctctgctgagtaaccaagcctttaattttgtgtttttatgaaaggaattaaaatacccacgataaatatttaccacaacctgtgtcaaataaatgggaaattaaacacagattgtacaatgtgagcttgggagttaatggcccagattttactgttaggcagtaagagttggagtaggtagtcttgttatcatgagaagaaccttgaacagatacaactaatttacatattactaaccaaacttaaacattaaactttttctactactttaaattctaacctggaatgtttcagagttcttcattctaatatcaccctgaattccattgaagctggaaatgtcattttccaagcccacctgtcattcatttacccatgcagaaaaaatggtaacttgaagagagtggcatgtgcctgctgccttagaggttatagaatccccacagtcaacaaaaaagcctctagagacatgactgttgccatggaaaccagagaaaatgtgtcttctcatccctcatttgtaaatgagggggtggagcagatcatctgtctctaaggtctttttcagtgctaaaatgtggtgattctttgggaaaaactttttgcatcaagtatgattaaatattctgaaagacgagtgtagcttaaaattttttttgtttttaaattctgttcatgggtcttcttaaaatggacccttgccgaaaggcggcctgtgacggcctcaggtgggaagatggatgtccttccaagggtgtggctggcagtggggtttgcatgactgcttcttgtctgtgtttcaagtgctctcatctattggtttggtttcctttcttttttttttttttctcattgtgccactttttttttcctcccacctttttatcttcacgcagataagtttctttgcttcacttctcccaagactccctcgtcgagctggatgtcccacctctctgagctctgcatttgtctattctccagctgaccctggttctctctcttagcatcctgccttagagccaggcacacactgtgctttctattgtacagaagctcttcgtttcagtgtcaaataaacactgtgtaagct

SEQ ID NO: 24451 - protein, 284 aa, Homo sapiens
MDAIKKKMQMLKLDKENALDRAEQAEADKKAAEDRSKQLEEDIAAKEKLLRVSEDERDRVLEELHKAEDSLLAAEEAAAKAEADVASLNRRIQLVEEELDRAQERLATALQKLEEAEKAADESERGMKVIESRAQKDEEKMEIQEIQLKEAKHIAEDADRKYEEVARKLVIIESDLERAEERAELSEGKCAELEEELKTVTNNLKSLEAQAEKYSQKEDRYEEEIKVLSDKLKEAETRAEFAERSVTKLEKSIDDLEDELYAQKLKYKAISEELDHALNDMTSM

SEQ ID NO: 24452 - DNA, 4136 bp, Homo sapiens
gtcttgaggaatgcggtcgcccccttgggaaagtacatatctgggagaagcaggcggctccgcgctcgcactcccgctcctccgcccgaccgcgcgctcgccccgccgctcctgctgcagccccagggcccctcgccgccgccaccatggacgccatcaagaagaagatgcagatgctgaagctcgacaaggagaacgccttggatcgagctgagcaggcggaggccgacaagaaggcggcggaagacaggagcaagcagctcgaggaggacatcgcggccaaggagaagttgctgcgggtgtcggaggacgagcgggaccgggtgctggaggagctgcacaaggcggaggacagcctcctggccgccgaagaggccgccgccaaggctgaagccgacgtagcttctctgaacagacgcatccagctggttgaggaagagttggatcgtgcccaggagcgtctggcaacagctttgcagaagctggaggaagctgagaaggcagcagatgagagtgagagaggcatgaaagtcattgagagtcgagcccaaaaagatgaagaaaaaatggaaattcaggagatccaactgaaagaggccaagcacattgctgaagatgccgaccgcaaatatgaagaggtggcccgtaagctggtcatcattgagagcgacctggaacgtgcagaggagcgggctgagctctcagaaggcaaatgtgccgagcttgaagaagaattgaaaactgtgacgaacaacttgaagtcactggaggctcaggctgagaagtactcgcagaaggaagacagatatgaggaagagatcaaggtcctttccgacaagctgaaggaggctgagactcgggctgagtttgcggagaggtcagtaactaaattggagaaaagcattgatgacttagaagacgagctgtacgctcagaaactgaagtacaaagccatcagcgaggagctggaccacgctctcaacgatatgacttccatgtaaacgttcatccactctgcctgcttacaccctgccctcatgctaatgtaataaactcaccaccatgccttccttgctccctaatctccatctttgcactcttgtgttcaccctttttgtcataacctagaatagtcattgttttttcactttctgctaatataaaggccaattagattaagtctgtctatacaaaccattttcttttcagaatccgtttattttgtaaacgctgaactagagcagtgaactagaatgagtgaccttgagcactgtccttttgggaaattaagctaaactcaagtaaaactagaaggccatgccgtttgttgtacaggaacttctcaaaaaatatcaaaatttgtttcctgaaattcaactaagtacaacataatcattttcgttaaatataatttgaaggaacccttaaagtgtcaggttattgagaatctgaggataaggaaattggcatgatccaatacagctttaacagtggtactacaaaagatcatctcttttacttttaagaattctagagtaggccgggcacagtggctcacgcctgtaatcccagcactttgggaggccgaggcgggcggatcacgaggtcaggagattgagaccatcctggctaacacggtgaaaccctgtctctactaaaaatacaaaaaaaattagccgggcgtggtggtggatgcctgtagtcccagctactcaggaggctgaggcaggagaatggcatgaacccgggaggtggagcttgcagtcagccgagatcgcaccaccgcactccagcctggacgacagagcgagactctgtctcaagaaaaaaaagaatggtagagtaaaaagaaccctctgctgagtaaccaagcctttaattttgtgtttttatgaaaggaattaaaatacccacgataaatatttaccacaacctgtgtcaaataaatgggaaattaaacacagattgtacaatgtgagcttgggagttaatggcccagattttactgttaggcagtaagagttggagtaggtagtcttgttatcatgagaagaaccttgaacagatacaactaatttacatattactaaccaaacttaaacattaaactttttctactactttaaattctaacctggaatgtttcagagttcttcattctaatatcaccctgaattccattgaagctggaaatgtcattttccaagcccacctgtcattcatttacccatgcagaaaaaatggtaacttgaagagagtggcatgtgcctgctgccttagaggttatagaatccccacagtcaacaaaaaagcctctagagacatgactgttgccatggaaaccagagaaaatgtgtcttctcatccctcatttgtaaatgagggggtggagcagatcatctgtctctaaggtctttttcagtgctaaaatgtggtgattctttgggaaaaactttttgcatcaagtatgattaaatattctgaaagacgagtgtagcttaaaattttttttgtttttaaattctgttcatgggtcttcttaaaatggacccttgccgaaaggcggcctgtgacggcctcaggtgggaagatggatgtccttccaagggtgtggctggcagtggggtttgcatgactgcttcttgtctgtgtttcaagtgctctcatctattggtttggtttcctttcttttttttttttttctcattgtgccactttttttttcctcccacctttttatcttcacgcagataagtttctttgcttcacttctcccaagactccctcgtcgagctggatgtcccacctctctgagctctgcatttgtctattctccagctgaccctggttctctctcttagcatcctgccttagagccaggcacacactgtgctttctattgtacagaagctcttcgtttcagtgtcaaataaacactgtgtaagctatttctgtttgctattctttttacttcttatttattgacattttagtttcaacattgaataaaactacaaagctgcttcacacatatgagggttagtgtttggctgctgctttttctttttaaatactgaacactatacagaattatatcaggagtttctaaagcagtagttccttgttgaacttcaaaaaaatacccaggcctgcattccctctcagagttctgattttcaaaggttagaatgaggtctggacatctgggggggttttgggggaattgtgatggctctgctttgcagtctgggtcacacaggggacattgcttgttgagagttgaaaggtctggcttgatcagtgtcttcctttgctggaggtttagctcgggatgtagtgacccctctgtgttgattatttcggtggccttacttgggaggacctggctaactaatgaaaggctcatgatgaatggttctgtagctgtcccatattactaggaagttatacattgagaagggtgaaaaagaacttggattcaaacaatgtaagttttggttattgtcgatcatccttttatagcacaaagaaaagttcaagcttttttgaagtatattcatgactcagccacctttattttgatcatgaaaatgacatcttaggttttctaaatatgattactctgtttagtcgtgatttgttttgtgctttttagcacatactctttgggagggattgtacataatctttgtgttcaatggctgtgttttcatttgtggacatttttaaaatatagcaatgaaagtttctttttttttttcccaaaaagatagttggtggaaattgttcagaagacaattgtatttcatttgggcttctgttttatttcacaaacagcaattaagtgatttttttaaaaaaatacattgcaaaaaatagaactttaactaatatggactttagtgttataattcccaacatttctccttcctcaacaatctagctatatatttctcctgttttttttttaacatggatgatctgcatgttttgtatatagtttttttagcccgagagggctgatataccaccatactcaaataaatttggacaaactcagaagatagtgtcattctcactctacagagacttcaaagcatagaggaaatacttttttttaaagaaagctgtgaatt

SEQ ID NO: 24453 - protein, 284 aa, Homo sapiens; identical to SEQ ID NO: 24451

SEQ ID NO: 24454 - DNA, 1744 bp, Homo sapiens
gtcttgaggaatgcggtcgcccccttgggaaagtacatatctgggagaagcaggcggctccgcgctcgcactcccgctcctccgcccgaccgcgcgctcgccccgccgctcctgctgcagccccagggcccctcgccgccgccaccatggacgccatcaagaagaagatgcagatgctgaagctcgacaaggagaacgccttggatcgagctgagcaggcggaggccgacaagaaggcggcggaagacaggagcaagcagctcgaggaggacatcgcggccaaggagaagttgctgcgggtgtcggaggacgagcgggaccgggtgctggaggagctgcacaaggcggaggacagcctcctggccgccgaagaggccgccgccaaggctgaagccgacgtagcttctctgaacagacgcatccagctggttgaggaagagttggatcgtgcccaggagcgtctggcaacagctttgcagaagctggaggaagctgagaaggcagcagatgagagtgagagaggcatgaaagtcattgagagtcgagcccaaaaagatgaagaaaaaatggaaattcaggagatccaactgaaagaggccaagcacattgctgaagatgccgaccgcaaatatgaagaggtggcccgtaagctggtcatcattgagagcgacctggaacgtgcagaggagcgggctgagctctcagaaggcaaatgtgccgagcttgaagaagaattgaaaactgtgacgaacaacttgaagtcactggaggctcaggctgagaagtactcgcagaaggaagacagatatgaggaagagatcaaggtcctttccgacaagctgaaggaggctgagactcgggctgagtttgcggagaggtcagtaactaaattggagaaaagcattgatgacttagaagagaaagtggctcatgccaaagaagaaaaccttagtatgcatcagatgctggatcagactttactggagttaaacaacatgtgaaaacctccttagctgcgaccacattctttcgttttgttttgttttgtttttaaacacctgcttaccccttaaatgcaatttatttacttttaccactgtcacagaaacatccacaagataccagctaggtcagggggtggggaaaacacatacaaaaaggcaagcccatgtcagggcgatcctggttcaaatgtgccatttcccgggttgatgctgccacactttgtagagagtttagcaacacagtgtgcttagtcagcgtaggaatcctcactaaagcagaagaagttccattcaaagtgccaatgatagagtcaacaggaaggttaatgttggaaacacaatcaggtgtggattggtgctactttgaacaaaaggtccccctgtggtcttttgttcaacattgtacaatgtagaactctgtccaacactaatttattttgtcttgagttttactacaagatgagactatggatcccgcatgcctgaattcactaaagccaagggtctgtaagccacgctgctcttccgagacttccattcctttctgattggcacacgtgcagctcatgacaatctgtaggataacaatcagtgtggatttccactcttttcagtccttcatgttaaagatttagacaccacatacaactggtaaaggacgttttcttgagagttttaactatatgtaaacattgtataatgatatggaataaaatgcacattgtaggacattttctaaa

SEQ ID NO: 24455 - protein, 284 aa, Homo sapiens; identical to SEQ ID NO: 3261

SEQ ID NO: 24456 - DNA, 3447 bp, Homo sapiens
gtcttgaggaatgcggtcgcccccttgggaaagtacatatctgggagaagcaggcggctccgcgctcgcactcccgctcctccgcccgaccgcgcgctcgccccgccgctcctgctgcagccccagggcccctcgccgccgccaccatggacgccatcaagaagaagatgcagatgctgaagctcgacaaggagaacgccttggatcgagctgagcaggcggaggccgacaagaaggcggcggaagacaggagcaagcaggtctgcgcctccccggccctgcgcccgcgcccagagcgccgggactcgagcctggcacccccggctggatccccaccccgaggactcggggagccaccaccctacccccaccaccacccagggcggccagggcgcgcgtctggaaagaaggaagggaaacgcaagagccaggcttagtctaacttagtctggtctgaggacgcttatttcccttctctggttcccatggcccgcgaaatcaagtcctagaggcgctttattctcaggactgggaatcagtttgggggagggaggaggacacccggttcctggggacgtttgaaggaagggcgagggatggagaaagggggtcgagtaactcaagtgttagaagttcgttgacttttgactggggagaaaggaaccttaaacttggggaggagaagggagtcctggagttgttacctaagaacaaagatggggcggaatggaggctacagcccgaaagccaggccagcagtggcgttcttctgtgtccccaagtagtggacttgagcccgctgagacctcggcaggagtctcgtcccagggcaggtgggtgtgcggggtgagccgcggagcggttccagctcgggtaaagaggaagttacctcgggtcctttgcactccaactcggcggcgccccgagcccgaggggccccagccaacccgacgcccgtgtgttgtgtgtgtctaacacccggtccgtgccggccgcccgcgcccgcccgccgctgcccccagctcgaggaggacatcgcggccaaggagaagttgctgcgggtgtcggaggacgagcgggaccgggtgctggaggagctgcacaaggcggaggacagcctcctggccgccgaagaggccgccgccaaggctgaagccgacgtagcttctctgaacagacgcatccagctggttgaggaagagttggatcgtgcccaggagcgtctggcaacagctttgcagaagctggaggaagctgagaaggcagcagatgagagtgagagaggcatgaaagtcattgagagtcgagcccaaaaagatgaagaaaaaatggaaattcaggagatccaactgaaagaggccaagcacattgctgaagatgccgaccgcaaatatgaagaggtggcccgtaagctggtcatcattgagagcgacctggaacgtgcagaggagcgggctgagctctcagaaggccaagtccgacagctggaagaacaattaagaataatggatcagaccttgaaagcattaatggctgcagaggataaggtactgatggctcgtgtggtttttaggtttaactgcaacccagacatctttcagcttccaatgcctcctggttcgtttggtataacgactgcaccttcacttcaccctctgctatttatatcttgccttaagtgctttcccttggtcctttatgctcctttgttttcccttcataaatgctctttgggcagccaaaaaaggagccaaattatcgcacttcaaagttgttggatttggtcaccctgccttctgctgttgcgaggttggggggcagtgttcctggaaaacctaaacattttaatacctgatgatttggctactttaaggcagcccttcgtctctaggactcagttttcattttttcccatccctctcctttttctctcctccttcctttggcttgtctcccaccctttctgcctctgatcgaaaacattagcaaatgtgccgagcttgaagaagaattgaaaactgtgacgaacaacttgaagtcactggaggctcaggctgagaaggtaggccaggaggatggtgtgggggaaaggcatcttttaagagctgctcaaaagaggccctgccagaaagcaacacttacagtagacattttagtaaaatggcaatattgtgaggtgatttttggagagttactagataacaaattcttttttttaactagagaatttattttatgttagggatatgaggcatcaatttaatttaaaccaagtgccaagtggataagttatcttgttgttatcccatgtaaaacaataggcaagaaagcagagaatgtattgcagtgtgccatttgatatcagaggttccattacctcctaagagatccttaacatctgttggctgagctggcgagttctttgcatgagaagccatgagtagattgagctgcagcctgacatctggaatgctctttctaattacagtactcgcagaaggaagacagatatgaggaagagatcaaggtcctttccgacaagctgaaggaggctgagactcgggctgagtttgcggagaggtcagtaactaaattggagaaaagcattgatgacttagaagagaaagtggctcatgccaaagaagaaaaccttagtatgcatcagatgctggatcagactttactggagttaaacaacatgtgaaaacctccttagctgcgaccacattctttcgttttgttttgttttgtttttaaacacctgcttaccccttaaatgcaatttatttacttttaccactgtcacagaaacatccacaagataccagctaggtcagggggtggggaaaacacatacaaaaaggcaagcccatgtcagggcgatcctggttcaaatgtgccatttcccgggttgatgctgccacactttgtagagagtttagcaacacagtgtgcttagtcagcgtaggaatcctcactaaagcagaagaagttccattcaaagtgccaatgatagagtcaacaggaaggttaatgttggaaacacaatcaggtgtggattggtgctactttgaacaaaaggtccccctgtggtcttttgttcaacattgtacaatgtagaactctgtccaacactaatttattttgtcttgagttttactacaagatgagactatggatcccgcatgcctgaattcactaaagccaagggtctgtaagccacgctgctcttccgagacttccattcctttctgattggcacacgtgcagctcatgacaatctgtaggataacaatcagtgtggatttccactcttttcagtccttcatgttaaagatttagacaccacatacaactggtaaaggacgttttcttgagagttttaactatatgtaaacattgtataatgatatggaataaaatgcacattgtaggacattttctaaa

SEQ ID NO: 24457 - protein, 228 aa, Homo sapiens
MKVIESRAQKDEEKMEIQEIQLKEAKHIAEDADRKYEEVARKLVIIESDLERAEERAELSEGQVRQLEEQLRIMDQTLKALMAAEDKVLMARVVFRFNCNPDIFQLPMPPGSFGITTAPSLHPLLFISCLKCFPLVLYAPLFSLHKCSLGSQKRSQIIALQSCWIWSPCLLLLRGWGAVFLENLNILIPDDLATLRQPFVSRTQFSFFPIPLLFLSSFLWLVSHPFCL

SEQ ID NO: 24458 - DNA, 571 bp, Homo sapiens
caggtgggtgtgcggggtgagccgcggagcggttccagctcgggtaaagaggaagttacctcgggtcctttgcactccaactcggcggcgccccgagcccgaggggccccagccaacccgacgcccgtgtgttgtgtgtgtctaacacccggtccgtgccggccgcccgcgcccgcccgccgctgcccccagctcgaggaggacatcgcggccaaggagaagttgctgcgggtgtcggaggacgagcgggaccgggtgctggaggagctgcacaaggcggaggacagcctcctggccgccgaagaggccgccgccaaggctgaagccgacgtagcttctctgaacagacgcatccagctggttgaggaagagttggatcgtgcccaggagcgtctggcaacagctttgcagaagctggaggaagctgagaaggcagcagatgagagtgagagaggcatgaaagtcattgagagtcgagcccaaaaagatgaagaaaaaatggaaattcaggagatccaactgaaagaggccaagcacattgctgaagatgccgaccgcaaatatgaagagg

SEQ ID NO: 24459 - protein, 37 aa, Homo sapiens
MKVIESRAQKDEEKMEIQEIQLKEAKHIAEDADRKYE

SEQ ID NO: 24460 - DNA, 1046 bp, Homo sapiens
gaggaggacatcgcggccaaggagaagttgctgcgggtgtcggaggacgagcgggaccgggtgctggaggagctgcacaaggcggaggacagcctcctggccgccgaagaggccgccgccaaggtacccggggcgcgcggcacggcgtggcgcacgaatggctaactctttctctttctctctctccctccctgtctttccctctgtctctcccgctgtccctgtccttctggttctgtgcacccacacccctccccttcgggatcacgctgcctgctgcacccccctccctccctgtaccccctggccaactcccagctggaagatgagctggtgtcactgcaaaagaaactcaagggcaccgaagatgaactgaacagacgcatccagctggttgaggaagagttggatcgtgcccaggagcgtctggcaacagctttgcagaagctggaggaagctgagaaggcagcagatgagagtgagagaggcatgaaagtcattgagagtcgagcccaaaaagatgaagaaaaaatggaaattcaggagatccaactgaaagagcaaatgtgccgagcttgaagaagaattgaaaactgtgacgaacaacttgaagtcactggaggctcaggctgagaagtactcgcagaaggaagacagatatgaggaagagatcaaggtcctttccgacaagctgaaggaggctgagactcgggctgagtttgcggagaggtcagtaactaaattggagaaaagcattgatgacttagaagacgagctgtacgctcagaaactgaagtacaaagccatcagcgaggagctggaccacgctctcaacgatatgacttccatataagtttctttgcttcacttctcccaagactccctcgtcgagctggatgtcccacctctctgagctctgcatttgtctattctccagctgaccctggttctctctcttagcatcctgccttagagccaggcacacactgtgctttctattgtacagaagctcttcgtttcagtgtcaaataaacactgtgtaagct

SEQ ID NO: 24461 - protein, 72 aa, Homo sapiens
MANSFSFSLSLPVFPSVSPAVPVLLVLCTHTPPLRDHAACCTPLPPCTPWPTPSWKMSWCHCKRNSRAPKMN

SEQ ID NO: 24462 - DNA, 1129 bp, Homo sapiens
gaggaggacatcgcggccaaggagaagttgctgcgggtgtcggaggacgagcgggaccgggtgctggaggagctgcacaaggcggaggacagcctcctggccgccgaagaggccgccgccaaggtacccggggcgcgcggcacggcgtggcgcacgaatggctaactctttctctttctctctctccctccctgtctttccctctgtctctcccgctgtccctgtccttctggttctgtgcacccacacccctccccttcgggatcacgctgcctgctgcacccccctccctccctgtaccccctggccaactcccagctggaagatgagctggtgtcactgcaaaagaaactcaagggcaccgaagatgaactgaacagacgcatccagctggttgaggaagagttggatcgtgcccaggagcgtctggcaacagctttgcagaagctggaggaagctgagaaggcagcagatgagagtgagagaggcatgaaagtcattgagagtcgagcccaaaaagatgaagaaaaaatggaaattcaggagatccaactgaaagagcaaatgtgccgagcttgaagaagaattgaaaactgtgacgaacaacttgaagtcactggaggctcaggctgagaagtactcgcagaaggaagacagatatgaggaagagatcaaggtcctttccgacaagctgaaggaggctgagactcgggctgagtttgcggagaggtcagtaactaaattggagaaaagcattgatgacttagaagacgagctgtacgctcagaaactgaagtacaaagccatcagcgaggagctggaccacgctctcaacgatatgacttccatataagtttctttgcttcacttctcccaagactccctcgtcgagctggatgtcccacctctctgagctctgcatttgtctattctccagctgaccctggttctctctcttagcatcctgccttagagccaggcacacactgtgctttctattgtacagaagctcttcgtttcagtgtcaaataaacactgtgtaagctatttctgtttgctattctttttacttcttatttattgacattttagtttcaacattgaataaaactacaaagctgcttcacac

SEQ ID NO: 24463 - protein, 72 aa, Homo sapiens; identical to SEQ ID NO: 24461

SEQ ID NO: 24464 - DNA, 2235 bp, Homo sapiens
gaggaggacatcgcggccaaggagaagttgctgcgggtgtcggaggacgagcgggaccgggtgctggaggagctgcacaaggcggaggacagcctcctggccgccgaagaggccgccgccaaggtacccggggcgcgcggcacggcgtggcgcacgaatggctaactctttctctttctctctctccctccctgtctttccctctgtctctcccgctgtccctgtccttctggttctgtgcacccacacccctccccttcgggatcacgctgcctgctgcacccccctccctccctgtaccccctggccaactcccagctggaagatgagctggtgtcactgcaaaagaaactcaagggcaccgaagatgaactgaacagacgcatccagctggttgaggaagagttggatcgtgcccaggagcgtctggcaacagctttgcagaagctggaggaagctgagaaggcagcagatgagagtgagagaggcatgaaagtcattgagagtcgagcccaaaaagatgaagaaaaaatggaaattcaggagatccaactgaaagagcaaatgtgccgagcttgaagaagaattgaaaactgtgacgaacaacttgaagtcactggaggctcaggctgagaagtactcgcagaaggaagacagatatgaggaagagatcaaggtcctttccgacaagctgaaggaggctgagactcgggctgagtttgcggagaggtcagtaactaaattggagaaaagcattgatgacttagaagacgagctgtacgctcagaaactgaagtacaaagccatcagcgaggagctggaccacgctctcaacgatatgacttccatataagtttctttgcttcacttctcccaagactccctcgtcgagctggatgtcccacctctctgagctctgcatttgtctattctccagctgaccctggttctctctcttagcatcctgccttagagccaggcacacactgtgctttctattgtacagaagctcttcgtttcagtgtcaaataaacactgtgtaagctatttctgtttgctattctttttacttcttatttattgacattttagtttcaacattgaataaaactacaaagctgcttcacacatatgagggttagtgtttggctgctgctttttctttttaaatactgaacactatacagaattatatcaggagtttctaaagcagtagttccttgttgaacttcaaaaaaatacccaggcctgcattccctctcagagttctgattttcaaaggttagaatgaggtctggacatctgggggggttttgggggaattgtgatggctctgctttgcagtctgggtcacacaggggacattgcttgttgagagttgaaaggtctggcttgatcagtgtcttcctttgctggaggtttagctcgggatgtagtgacccctctgtgttgattatttcggtggccttacttgggaggacctggctaactaatgaaaggctcatgatgaatggttctgtagctgtcccatattactaggaagttatacattgagaagggtgaaaaagaacttggattcaaacaatgtaagttttggttattgtcgatcatccttttatagcacaaagaaaagttcaagcttttttgaagtatattcatgactcagccacctttattttgatcatgaaaatgacatcttaggttttctaaatatgattactctgtttagtcgtgatttgttttgtgctttttagcacatactctttgggagggattgtacataatctttgtgttcaatggctgtgttttcatttgtggacatttttaaaatatagcaatgaaagtttctttttttttttcccaaaaagatagttggtggaaattgttcagaagacaattgtatttcatttgggcttctgttttatttcacaaacagcaattaagtgatttttttaaaaaaatacattgcaaaaaatagaactttaactaatatggactttagtgttataattcccaacatttctccttcctcaacaatctagctatatatttctcctgttttttttttaacatggatgatctgcatgttttgtatatagtttttttagcccgagagggctgatataccaccatactcaaataaatttggacaaactcagaagatagtgtcattctcactctacagagacttcaaagcatagaggaaatacttttttttaaagaaagctgtgaatt

SEQ ID NO: 24465 - protein, 83 aa, Homo sapiens [sequence omitted]

SEQ ID NO: 24466 - DNA, 1668 bp, Homo sapiens
tcccgggatccacggcgcgcgcccctcccagccgcgcgcgcccgcctgcggtttgtctgcgcagccctggaggctgcgacttccggactgctcctggccgcagggggcgccgccatcgcacagagaggcctgggcggggcggaccggcgctgggcagccaggacagccgcggcagccgggtccgcagggcagcagccggcctctcccactgcagccctcccgcccgcctaccgtccggcgcgatggcggggagtagctcgctggaggcggtgcgcaggaagatccggagcctgcaggagcaggcggacgccgctgaggagcgcgcgggcaccctgcagcgcgagctggaccacgagaggaagctgagggagaccgctgaagccgacgtagcttctctgaacagacgcatccagctggttgaggaagagttggatcgtgcccaggagcgtctggcaacagctttgcagaagctggaggaagctgagaaggcagcagatgagagtgagagaggcatgaaagtcattgagagtcgagcccaaaaagatgaagaaaaaatggaaattcaggagatccaactgaaagaggccaagcacattgctgaagatgccgaccgcaaatatgaagaggtggcccgtaagctggtcatcattgagagcgacctggaacgtgcagaggagcgggctgagctctcagaaggcaaatgtgccgagcttgaagaagaattgaaaactgtgacgaacaacttgaagtcactggaggctcaggctgagaagtactcgcagaaggaagacagatatgaggaagagatcaaggtcctttccgacaagctgaaggaggctgagactcgggctgagtttgcggagaggtcagtaactaaattggagaaaagcattgatgacttagaagatcaactctaccagcaacttgagcaaaatcgccgcctcactaatgaactaaagctggccctgaatgaggattaaacttaagagtgaaaaaacttgggctgaattctaggcgtggagcccatgtgcagaaaatctaagactgtcctaccttcaactaatagagttgaaaacagttgctttctgcagaaatgcaaatgcaaggaattggctgaaaggctggccttgcctgcttgtttctctatatggctggaataattacgttctctttaatcacaaaacagcttttatggtagaatacttatatcaattcagcactgctccttgaaatagcaggtcctcttgtttgaactgataaataatgaggagcccccccaaaaaatgttttctatttcctgacagccatgagtcctactttaagtatgtatatatatatatatatgtgtgtgtgtgtgtgtgtgtatatattcctatcagatactcatattcctaacttctaaatatctggtatagtgtttgaaatatgattaaatgtacctatgcttgggcaaaatagcttttgaaaacaggaactcatgccagaagcccctggttgtctgaaaggtatgctttactcagtctaatggtgctgttggagtctggggagaatgtcatgctaataaatagaacactataaaaatattaagagaatgtcctaatgaagtgtgcatgaaacatgttgacaattttttatgagcaacagaaataaatcattttaaaagttctc

SEQ ID NO: 24467 - protein, 245 aa, Homo sapiens; identical to SEQ ID NO: 3263

SEQ ID NO: 24468 - DNA, 2952 bp, Homo sapiens
tcccgggatccacggcgcgcgcccctcccagccgcgcgcgcccgcctgcggtttgtctgcgcagccctggaggctgcgacttccggactgctcctggccgcagggggcgccgccatcgcacagagaggcctgggcggggcggaccggcgctgggcagccaggacagccgcggcagccgggtccgcagggcagcagccggcctctcccactgcagccctcccgcccgcctaccgtccggcgcgatggcggggagtagctcgctggaggcggtgcgcaggaagatccggagcctgcaggagcaggcggacgccgctgaggagcgcgcgggcaccctgcagcgcgagctggaccacgagaggaagctgagggagaccgctgaagccgacgtagcttctctgaacagacgcatccagctggttgaggaagagttggatcgtgcccaggagcgtctggcaacagctttgcagaagctggaggaagctgagaaggcagcagatgagagtgagagaggcatgaaagtcattgagagtcgagcccaaaaagatgaagaaaaaatggaaattcaggagatccaactgaaagaggccaagcacattgctgaagatgccgaccgcaaatatgaagaggtggcccgtaagctggtcatcattgagagcgacctggaacgtgcagaggagcgggctgagctctcagaaggcaaatgtgccgagcttgaagaagaattgaaaactgtgacgaacaacttgaagtcactggaggctcaggctgagaagtactcgcagaaggaagacagatatgaggaagagatcaaggtcctttccgacaagctgaaggaggctgagactcgggctgagtttgcggagaggtcagtaactaaattggagaaaagcattgatgacttagaagatcaactctaccagcaacttgagcaaaatcgccgcctcactaatgaactaaagctggccctgaatgaggattaaacttaagagtgaaaaaacttgggctgaattctaggcgtggagcccatgtgcagaaaatctaagactgtcctaccttcaactaatagagttgaaaacagttgctttctgcagaaatgcaaatgcaaggaattggctgaaaggctggccttgcctgcttgtttctctatatggctggaataattacgttctctttaatcacaaaacagcttttatggtagaatacttatatcaattcagcactgctccttgaaatagcaggtcctcttgtttgaactgataaataatgaggagcccccccaaaaaatgttttctatttcctgacagccatgagtcctactttaagtatgtatatatatatatatatgtgtgtgtgtgtgtgtgtgtatatattcctatcagatactcatattcctaacttctaaatatctggtatagtgtttgaaatatgattaaatgtacctatgcttgggcaaaatagcttttgaaaacaggaactcatgccagaagcccctggttgtctgaaaggtatgctttactcagtctaatggtgctgttggagtctggggagaatgtcatgctaataaatagaacactataaaaatattaagagaatgtcctaatgaagtgtgcatgaaacatgttgacaattttttatgagcaacagaaataaatcattttaaaagttctcagaaaacctatttatgtcatctttgcttttgtgagtttgtgttaccgcacaactcccagacttttaactgcctgtaccttggaaatgtctgctgttcgtaacttcttcagtttgtataacagtgctgcagctgtatttggtttttacctctccctgttcccacggcacaccgtcagtgaaccttcaccaaaccccacgtgcattttatcctcagtgaattgttggtggaggtgcacctgactgctctgtgagaatccgtgccatggctcctttgggtcaaagatgccctcccctccgtcttaggttcttgtctagaaatgagtaatgtcttacaagcatgcctagttctaatcatctcatcctgtgtttgtgattgatgtttgcctgcctaaatgtacaaaccaccattgtgtccaaagcacagctattcatgacttaattttctaatctcaccacagagaaagtggctcatgccaaagaagaaaaccttagtatgcatcagatgctggatcagactttactggagttaaacaacatgtgaaaacctccttagctgcgaccacattctttcgttttgttttgttttgtttttaaacacctgcttaccccttaaatgcaatttatttacttttaccactgtcacagaaacatccacaagataccagctaggtcagggggtggggaaaacacatacaaaaaggcaagcccatgtcagggcgatcctggttcaaatgtgccatttcccgggttgatgctgccacactttgtagagagtttagcaacacagtgtgcttagtcagcgtaggaatcctcactaaagcagaagaagttccattcaaagtgccaatgatagagtcaacaggaaggttaatgttggaaacacaatcaggtgtggattggtgctactttgaacaaaaggtccccctgtggtcttttgttcaacattgtacaatgtagaactctgtccaacactaatttattttgtcttgagttttactacaagatgagactatggatcccgcatgcctgaattcactaaagccaagggtctgtaagccacgctgctcttccgagacttccattcctttctgattggcacacgtgcagctcatgacaatctgtaggataacaatcagtgtggatttccactcttttcagtccttcatgttaaagatttagacaccacatacaactggtaaaggacgttttcttgagagttttaactatatgtaaacattgtataatgatatggaataaaatgcacattgtaggacattttctaaa

SEQ ID NO: 24469 - protein, 245 aa, Homo sapiens; identical to SEQ ID NO: 3263

SEQ ID NO: 24470 - DNA, 492 bp, Homo sapiens
ggggcggaccggcgctgggcagccaggacagccgcggcagccgggtccgcagggcagcagccggcctctcccactgcagccctcccgcccgcctaccgtccggcgcgatggcggggagtagctcgctggaggcggtgcgcaggaagatccggagcctgcaggagcaggcggacgccgctgaggagcgcgcgggcaccctgcagcgcgagctggaccacgagaggaagctgagggagaccgctgaagccgacgtagcttctctgaacagacgcatccagctggttgaggaagagttggatcgtgcccaggagcgtctggcaacagctttgcagaagctggaggaagctgagaaggcagcagatgagagtgagagaggcatgaaagtcattgagagtcgagcccaaaaagatgaagaaaaaatggaaattcaggagatccaactgaaagaggccaagcacattgctgaagatgccgaccgcaaatatgaagagg

SEQ ID NO: 24471 - protein, 127 aa, Homo sapiens
MAGSSSLEAVRRKIRSLQEQADAAEERAGTLQRELDHERKLRETAEADVASLNRRIQLVEEELDRAQERLATALQKLEEAEKAADESERGMKVIESRAQKDEEKMEIQEIQLKEAKHIAEDADRKYE

SEQ ID NO: 24472 - DNA, 2800 bp, Homo sapiens
ggggcggaccggcgctgggcagccaggacagccgcggcagccgggtccgcagggcagcagccggcctctcccactgcagccctcccgcccgcctaccgtccggcgcgatggcggggagtagctcgctggaggcggtgcgcaggaagatccggagcctgcaggagcaggcggacgccgctgaggagcgcgcgggcaccctgcagcgcgagctggaccacgagaggaagctgagggagaccgctgaagccgacgtagcttctctgaacagacgcatccagctggttgaggaagagttggatcgtgcccaggagcgtctggcaacagctttgcagaagctggaggaagctgagaaggcagcagatgagagtgagagaggcatgaaagtcattgagagtcgagcccaaaaagatgaagaaaaaatggaaattcaggagatccaactgaaagaggccaagcacattgctgaagatgccgaccgcaaatatgaagaggtggcccgtaagctggtcatcattgagagcgacctggaacgtgcagaggagcgggctgagctctcagaaggccaagtccgacagctggaagaacaattaagaataatggatcagaccttgaaagcattaatggctgcagaggataagtactcgcagaaggaagacagatatgaggaagagatcaaggtcctttccgacaagctgaaggaggctgagactcgggctgagtttgcggagaggtcagtaactaaattggagaaaagcattgatgacttagaagacgagctgtacgctcagaaactgaagtacaaagccatcagcgaggagctggaccacgctctcaacgatatgacttccatgtaaacgttcatccactctgcctgcttacaccctgccctcatgctaatgtaataaactcaccaccatgccttccttgctccctaatctccatctttgcactcttgtgttcaccctttttgtcataacctagaatagtcattgttttttcactttctgctaatataaaggccaattagattaagtctgtctatacaaaccattttcttttcagaatccgtttattttgtaaacgctgaactagagcagtgaactagaatgagtgaccttgagcactgtccttttgggaaattaagctaaactcaagtaaaactagaaggccatgccgtttgttgtacaggaacttctcaaaaaatatcaaaatttgtttcctgaaattcaactaagtacaacataatcattttcgttaaatataatttgaaggaacccttaaagtgtcaggttattgagaatctgaggataaggaaattggcatgatccaatacagctttaacagtggtactacaaaagatcatctcttttacttttaagaattctagagtaggccgggcacagtggctcacgcctgtaatcccagcactttgggaggccgaggcgggcggatcacgaggtcaggagattgagaccatcctggctaacacggtgaaaccctgtctctactaaaaatacaaaaaaaattagccgggcgtggtggtggatgcctgtagtcccagctactcaggaggctgaggcaggagaatggcatgaacccgggaggtggagcttgcagtcagccgagatcgcaccaccgcactccagcctggacgacagagcgagactctgtctcaagaaaaaaaagaatggtagagtaaaaagaaccctctgctgagtaaccaagcctttaattttgtgtttttatgaaaggaattaaaatacccacgataaatatttaccacaacctgtgtcaaataaatgggaaattaaacacagattgtacaatgtgagcttgggagttaatggcccagattttactgttaggcagtaagagttggagtaggtagtcttgttatcatgagaagaaccttgaacagatacaactaatttacatattactaaccaaacttaaacattaaactttttctactactttaaattctaacctggaatgtttcagagttcttcattctaatatcaccctgaattccattgaagctggaaatgtcattttccaagcccacctgtcattcatttacccatgcagaaaaaatggtaacttgaagagagtggcatgtgcctgctgccttagaggttatagaatccccacagtcaacaaaaaagcctctagagacatgactgttgccatggaaaccagagaaaatgtgtcttctcatccctcatttgtaaatgagggggtggagcagatcatctgtctctaaggtctttttcagtgctaaaatgtggtgattctttgggaaaaactttttgcatcaagtatgattaaatattctgaaagacgagtgtagcttaaaattttttttgtttttaaattctgttcatgggtcttcttaaaatggacccttgccgaaaggcggcctgtgacggcctcaggtgggaagatggatgtccttccaagggtgtggctggcagtggggtttgcatgactgcttcttgtctgtgtttcaagtgctctcatctattggtttggtttcctttcttttttttttttttctcattgtgccactttttttttcctcccacctttttatcttcacgcagataagtttctttgcttcacttctcccaagactccctcgtcgagctggatgtcccacctctctgagctctgcatttgtctattctccagctgaccctggttctctctcttagcatcctgccttagagccaggcacacactgtgctttctattgtacagaagctcttcgtttcagtgtcaaataaacactgtgtaagct

SEQ ID NO: 24473 - protein, 248 aa, Homo sapiens
MAGSSSLEAVRRKIRSLQEQADAAEERAGTLQRELDHERKLRETAEADVASLNRRIQLVEEELDRAQERLATALQKLEEAEKAADESERGMKVIESRAQKDEEKMEIQEIQLKEAKHIAEDADRKYEEVARKLVIIESDLERAEERAELSEGQVRQLEEQLRIMDQTLKALMAAEDKYSQKEDRYEEEIKVLSDKLKEAETRAEFAERSVTKLEKSIDDLEDELYAQKLKYKAISEELDHALNDMTSM

SEQ ID NO: 24474 - DNA, 3989 bp, Homo sapiens
ggggcggaccggcgctgggcagccaggacagccgcggcagccgggtccgcagggcagcagccggcctctcccactgcagccctcccgcccgcctaccgtccggcgcgatggcggggagtagctcgctggaggcggtgcgcaggaagatccggagcctgcaggagcaggcggacgccgctgaggagcgcgcgggcaccctgcagcgcgagctggaccacgagaggaagctgagggagaccgctgaagccgacgtagcttctctgaacagacgcatccagctggttgaggaagagttggatcgtgcccaggagcgtctggcaacagctttgcagaagctggaggaagctgagaaggcagcagatgagagtgagagaggcatgaaagtcattgagagtcgagcccaaaaagatgaagaaaaaatggaaattcaggagatccaactgaaagaggccaagcacattgctgaagatgccgaccgcaaatatgaagaggtggcccgtaagctggtcatcattgagagcgacctggaacgtgcagaggagcgggctgagctctcagaaggccaagtccgacagctggaagaacaattaagaataatggatcagaccttgaaagcattaatggctgcagaggataagtactcgcagaaggaagacagatatgaggaagagatcaaggtcctttccgacaagctgaaggaggctgagactcgggctgagtttgcggagaggtcagtaactaaattggagaaaagcattgatgacttagaagacgagctgtacgctcagaaactgaagtacaaagccatcagcgaggagctggaccacgctctcaacgatatgacttccatgtaaacgttcatccactctgcctgcttacaccctgccctcatgctaatgtaataaactcaccaccatgccttccttgctccctaatctccatctttgcactcttgtgttcaccctttttgtcataacctagaatagtcattgttttttcactttctgctaatataaaggccaattagattaagtctgtctatacaaaccattttcttttcagaatccgtttattttgtaaacgctgaactagagcagtgaactagaatgagtgaccttgagcactgtccttttgggaaattaagctaaactcaagtaaaactagaaggccatgccgtttgttgtacaggaacttctcaaaaaatatcaaaatttgtttcctgaaattcaactaagtacaacataatcattttcgttaaatataatttgaaggaacccttaaagtgtcaggttattgagaatctgaggataaggaaattggcatgatccaatacagctttaacagtggtactacaaaagatcatctcttttacttttaagaattctagagtaggccgggcacagtggctcacgcctgtaatcccagcactttgggaggccgaggcgggcggatcacgaggtcaggagattgagaccatcctggctaacacggtgaaaccctgtctctactaaaaatacaaaaaaaattagccgggcgtggtggtggatgcctgtagtcccagctactcaggaggctgaggcaggagaatggcatgaacccgggaggtggagcttgcagtcagccgagatcgcaccaccgcactccagcctggacgacagagcgagactctgtctcaagaaaaaaaagaatggtagagtaaaaagaaccctctgctgagtaaccaagcctttaattttgtgtttttatgaaaggaattaaaatacccacgataaatatttaccacaacctgtgtcaaataaatgggaaattaaacacagattgtacaatgtgagcttgggagttaatggcccagattttactgttaggcagtaagagttggagtaggtagtcttgttatcatgagaagaaccttgaacagatacaactaatttacatattactaaccaaacttaaacattaaactttttctactactttaaattctaacctggaatgtttcagagttcttcattctaatatcaccctgaattccattgaagctggaaatgtcattttccaagcccacctgtcattcatttacccatgcagaaaaaatggtaacttgaagagagtggcatgtgcctgctgccttagaggttatagaatccccacagtcaacaaaaaagcctctagagacatgactgttgccatggaaaccagagaaaatgtgtcttctcatccctcatttgtaaatgagggggtggagcagatcatctgtctctaaggtctttttcagtgctaaaatgtggtgattctttgggaaaaactttttgcatcaagtatgattaaatattctgaaagacgagtgtagcttaaaattttttttgtttttaaattctgttcatgggtcttcttaaaatggacccttgccgaaaggcggcctgtgacggcctcaggtgggaagatggatgtccttccaagggtgtggctggcagtggggtttgcatgactgcttcttgtctgtgtttcaagtgctctcatctattggtttggtttcctttcttttttttttttttctcattgtgccactttttttttcctcccacctttttatcttcacgcagataagtttctttgcttcacttctcccaagactccctcgtcgagctggatgtcccacctctctgagctctgcatttgtctattctccagctgaccctggttctctctcttagcatcctgccttagagccaggcacacactgtgctttctattgtacagaagctcttcgtttcagtgtcaaataaacactgtgtaagctatttctgtttgctattctttttacttcttatttattgacattttagtttcaacattgaataaaactacaaagctgcttcacacatatgagggttagtgtttggctgctgctttttctttttaaatactgaacactatacagaattatatcaggagtttctaaagcagtagttccttgttgaacttcaaaaaaatacccaggcctgcattccctctcagagttctgattttcaaaggttagaatgaggtctggacatctgggggggttttgggggaattgtgatggctctgctttgcagtctgggtcacacaggggacattgcttgttgagagttgaaaggtctggcttgatcagtgtcttcctttgctggaggtttagctcgggatgtagtgacccctctgtgttgattatttcggtggccttacttgggaggacctggctaactaatgaaaggctcatgatgaatggttctgtagctgtcccatattactaggaagttatacattgagaagggtgaaaaagaacttggattcaaacaatgtaagttttggttattgtcgatcatccttttatagcacaaagaaaagttcaagcttttttgaagtatattcatgactcagccacctttattttgatcatgaaaatgacatcttaggttttctaaatatgattactctgtttagtcgtgatttgttttgtgctttttagcacatactctttgggagggattgtacataatctttgtgttcaatggctgtgttttcatttgtggacatttttaaaatatagcaatgaaagtttctttttttttttcccaaaaagatagttggtggaaattgttcagaagacaattgtatttcatttgggcttctgttttatttcacaaacagcaattaagtgatttttttaaaaaaatacattgcaaaaaatagaactttaactaatatggactttagtgttataattcccaacatttctccttcctcaacaatctagctatatatttctcctgttttttttttaacatggatgatctgcatgttttgtatatagtttttttagcccgagagggctgatataccaccatactcaaataaatttggacaaactcagaagatagtgtcattctcactctacagagacttcaaagcatagaggaaatacttttttttaaagaaagctgtgaatt

SEQ ID NO: 24475 - protein, 248 aa, Homo sapiens; identical to SEQ ID NO: 24473

SEQ ID NO: 24476 - DNA, 1597 bp, Homo sapiens
ggggcggaccggcgctgggcagccaggacagccgcggcagccgggtccgcagggcagcagccggcctctcccactgcagccctcccgcccgcctaccgtccggcgcgatggcggggagtagctcgctggaggcggtgcgcaggaagatccggagcctgcaggagcaggcggacgccgctgaggagcgcgcgggcaccctgcagcgcgagctggaccacgagaggaagctgagggagaccgctgaagccgacgtagcttctctgaacagacgcatccagctggttgaggaagagttggatcgtgcccaggagcgtctggcaacagctttgcagaagctggaggaagctgagaaggcagcagatgagagtgagagaggcatgaaagtcattgagagtcgagcccaaaaagatgaagaaaaaatggaaattcaggagatccaactgaaagaggccaagcacattgctgaagatgccgaccgcaaatatgaagaggtggcccgtaagctggtcatcattgagagcgacctggaacgtgcagaggagcgggctgagctctcagaaggccaagtccgacagctggaagaacaattaagaataatggatcagaccttgaaagcattaatggctgcagaggataagtactcgcagaaggaagacagatatgaggaagagatcaaggtcctttccgacaagctgaaggaggctgagactcgggctgagtttgcggagaggtcagtaactaaattggagaaaagcattgatgacttagaagagaaagtggctcatgccaaagaagaaaaccttagtatgcatcagatgctggatcagactttactggagttaaacaacatgtgaaaacctccttagctgcgaccacattctttcgttttgttttgttttgtttttaaacacctgcttaccccttaaatgcaatttatttacttttaccactgtcacagaaacatccacaagataccagctaggtcagggggtggggaaaacacatacaaaaaggcaagcccatgtcagggcgatcctggttcaaatgtgccatttcccgggttgatgctgccacactttgtagagagtttagcaacacagtgtgcttagtcagcgtaggaatcctcactaaagcagaagaagttccattcaaagtgccaatgatagagtcaacaggaaggttaatgttggaaacacaatcaggtgtggattggtgctactttgaacaaaaggtccccctgtggtcttttgttcaacattgtacaatgtagaactctgtccaacactaatttattttgtcttgagttttactacaagatgagactatggatcccgcatgcctgaattcactaaagccaagggtctgtaagccacgctgctcttccgagacttccattcctttctgattggcacacgtgcagctcatgacaatctgtaggataacaatcagtgtggatttccactcttttcagtccttcatgttaaagatttagacaccacatacaactggtaaaggacgttttcttgagagttttaactatatgtaaacattgtataatgatatggaataaaatgcacattgtaggacattttctaaa

SEQ ID NO: 24477 - protein, 248 aa, Homo sapiens
MAGSSSLEAVRRKIRSLQEQADAAEERAGTLQRELDHERKLRETAEADVASLNRRIQLVEEELDRAQERLATALQKLEEAEKAADESERGMKVIESRAQKDEEKMEIQEIQLKEAKHIAEDADRKYEEVARKLVIIESDLERAEERAELSEGQVRQLEEQLRIMDQTLKALMAAEDKYSQKEDRYEEEIKVLSDKLKEAETRAEFAERSVTKLEKSIDDLEEKVAHAKEENLSMHQMLDQTLLELNNM

SEQ ID NO: 24478 - DNA, 641 bp, Homo sapiens
ggcggaccggcgctgggcagccaggacagccgcggcagccgggtccgcagggcagcagccggcctctcccactgcagccctcccgcccgcctaccgtccggcgcgatggcggggagtagctcgctggaggcggtgcgcaggaagatccggagcctgcaggagcaggcggacgccgctgaggagcgcgcgggcaccctgcagcgcgagctggaccacgagaggaagctgagggagaccgctgaagccgacgtagcttctctgaacagacgcatccagctggttgaggaagagttggatcgtgcccaggagcgtctggcaacagctttgcagaagctggaggaagctgagaaggcagcagatgagagtgagagaggcatgaaagtcattgagagtcgagcccaaaaagatgaagaaaaaatggaaattcaggagatccaactgaaagaggccaagcacattgctgaagatgccgaccgcaaatatgaagaggtggcccgtaagctggtcatcattgagagcgacctggaacgtgcagaggagcgggctgagctctcagaaggccaagtccgacagctggaagaacaattaagaataatggatcagaccttgaaagcattaatggctgcagaggataaggtact

SEQ ID NO: 24479 - protein, 177 aa, Homo sapiens
MAGSSSLEAVRRKIRSLQEQADAAEERAGTLQRELDHERKLRETAEADVASLNRRIQLVEEELDRAQERLATALQKLEEAEKAADESERGMKVIESRAQKDEEKMEIQEIQLKEAKHIAEDADRKYEEVARKLVIIESDLERAEERAELSEGQVRQLEEQLRIMDQTLKALMAAEDK

SEQ ID NO: 24480 - DNA, 825 bp, Homo sapiens
gaccggcgctgggcagccaggacagccgcggcagccgggtccgcagggcagcagccggcctctcccactgcagccctcccgcccgcctaccgtccggcgcgatggcggggagtagctcgctggaggcggtgcgcaggaagatccggagcctgcaggagcaggcggacgccgctgaggagcgcgcgggcaccctgcagcgcgagctggaccacgagaggaagctgagggagaccgctgaagccgacgtagcttctctgaacagacgcatccagctggttgaggaagagttggatcgtgcccaggagcgtctggcaacagctttgcagaagctggaggaagctgagaaggcagcagatgagagtgagagaggcatgaaagtcattgagagtcgagcccaaaaagatgaagaaaaaatggaaattcaggagatccaactgaaagaggccaagcacattgctgaagatgccgaccgcaaatatgaagaggtggcccgtaagctggtcatcattgagagcgacctggaacgtgcagaggagcgggctgagctctcagaagggtaagcgggcccggcgccaggaggccacgaatggggtgctgcagagcagtgactaaacagcatgaccttctggcagctgcacattacctgtttcagctccgggctccttttgtgctcatttgatgtggatgagccacgagtatggaacatggaggactcgtgtggggtgtcttatgtatgaatgcgtgtatcactgcatgccttacctgcacactgattttgtgaatggccttgtgcatttcctgtgtccactaacagccaagtccgac

SEQ ID NO: 24481 - protein, 152 aa, Homo sapiens
MAGSSSLEAVRRKIRSLQEQADAAEERAGTLQRELDHERKLRETAEADVASLNRRIQLVEEELDRAQERLATALQKLEEAEKAADESERGMKVIESRAQKDEEKMEIQEIQLKEAKHIAEDADRKYEEVARKLVIIESDLERAEERAELSEG

SEQ ID NO: 24482 - DNA, 2708 bp, Homo sapiens
ccccaccaccccttagtgaacatacattcaaagtggatgaggatattttacctgattagtaaattccatctcccacttccatgcacaatatttaaacagccaccagtgcaagtgtgtataatggaccatcatagtcttataagtgttctgaggctcatagcaacaatttcttatgacaggaaaaaaatcattgcctctcaaagaaaccaacattttatttcagtgacagataccaagtaaaaacagtacttgtattatttttctttttaggagtttgatacttttcttgtattaaccttgacttcaaagaaaaatcataggcttacatcaaaaacacttgggaaatttgtcttggctctgttccaatgaggccagttattctaaaaggggttactggattgtgttgggccttcatgtggtgtgtattttagaaccactgaattttaaactatttaagttcctttgtaaggatcctatgataaagtggcttgaaggaaagagttgagtgaaactcttgagtccgatttctggctgtactgctattgtcttacatggctgagcctgggtaagtcttgtctcagttcacacttcaggcccccagtgagtgaggtggccgtgatgacgctcttgtttaacaggcaagtaaagccagggtgttgaactctacggaagtgggccgggcgcagtggctcacgcctgtaatcccagcactttgagaggccaaggcaggtggataaggaggtcaggagattgagaccatcctggctaacacggtgaaaccccgtctctactaaaaatacaaaaaaattagccgggcgttgtggcgggcgcctgtagtcccaactactcgggaggctgaggcaggagaatggcgtgaatccaggaggcggagtttgcagtgagctgagatcgtgccactgcaccccagcctgggtgatagagcgagaccctgtctcaaaaacaaaacaaaacaaaacaaaaaaatctacggaagaaaggaaccatgtgaaagagcgtttgctaatgatctgtctgtctgatgagaattgtgtgtatagatttgtgtatacacaaatatggatgttcactgtataaatcaatgtgtaaatgtgtccgagaactccagagttgatgagggcttgtaatgcacttaaaggtagctcaccacaagacagtcttcctatctgaaatcagcattgcagtcccagccatttcctgaagctaccaccctcactttctccccaactctgaaatgcttttcactctctacctaggctgaagccgacgtagcttctctgaacagacgcatccagctggttgaggaagagttggatcgtgcccaggagcgtctggcaacagctttgcagaagctggaggaagctgagaaggcagcagatgagagtgagagaggcatgaaagtcattgagagtcgagcccaaaaagatgaagaaaaaatggaaattcaggagatccaactgaaagaggccaagcacattgctgaagatgccgaccgcaaatatgaagaggtggcccgtaagctggtcatcattgagagcgacctggaacgtgcagaggagcgggctgagctctcagaaggccaagtccgacagctggaagaacaattaagaataatggatcagaccttgaaagcattaatggctgcagaggataagcaaatgtgccgagcttgaagaagaattgaaaactgtgacgaacaacttgaagtcactggaggctcaggctgagaagtactcgcagaaggaagacagatatgaggaagagatcaaggtcctttccgacaagctgaaggaggctgagactcgggctgagtttgcggagaggtcagtaactaaattggagaaaagcattgatgacttagaagagaaagtggctcatgccaaagaagaaaaccttagtatgcatcagatgctggatcagactttactggagttaaacaacatgtgaaaacctccttagctgcgaccacattctttcgttttgttttgttttgtttttaaacacctgcttaccccttaaatgcaatttatttacttttaccactgtcacagaaacatccacaagataccagctaggtcagggggtggggaaaacacatacaaaaaggcaagcccatgtcagggcgatcctggttcaaatgtgccatttcccgggttgatgctgccacactttgtagagagtttagcaacacagtgtgcttagtcagcgtaggaatcctcactaaagcagaagaagttccattcaaagtgccaatgatagagtcaacaggaaggttaatgttggaaacacaatcaggtgtggattggtgctactttgaacaaaaggtccccctgtggtcttttgttcaacattgtacaatgtagaactctgtccaacactaatttattttgtcttgagttttactacaagatgagactatggatcccgcatgcctgaattcactaaagccaagggtctgtaagccacgctgctcttccgagacttccattcctttctgattggcacacgtgcagctcatgacaatctgtaggataacaatcagtgtggatttccactcttttcagtccttcatgttaaagatttagacaccacatacaactggtaaaggacgttttcttgagagttttaactatatgtaaacattgtataatgatatggaataaaatgcacattgtaggacattttctaaa

SEQ ID NO: 24483 - protein, 92 aa, Homo sapiens
MKVIESRAQKDEEKMEIQEIQLKEAKHIAEDADRKYEEVARKLVIIESDLERAEERAELSEGQVRQLEEQLRIMDQTLKALMAAEDKQMCRA

SEQ ID NO: 24484 - DNA, 1275 bp, Homo sapiens
ggcaggagaatggcgtgaatccaggaggcggagtttgcagtgagctgagatcgtgccactgcaccccagcctgggtgatagagcgagaccctgtctcaaaaacaaaacaaaacaaaacaaaaaaatctacggaagaaaggaaccatgtgaaagagcgtttgctaatgatctgtctgtctgatgagaattgtgtgtatagatttgtgtatacacaaatatggatgttcactgtataaatcaatgtgtaaatgtgtccgagaactccagagttgatgagggcttgtaatgcacttaaaggtagctcaccacaagacagtcttcctatctgaaatcagcattgcagtcccagccatttcctgaagctaccaccctcactttctccccaactctgaaatgcttttcactctctacctaggctgaagccgacgtagcttctctgaacagacgcatccagctggttgaggaagagttggatcgtgcccaggagcgtctggcaacagctttgcagaagctggaggaagctgagaaggcagcagatgagagtgagagaggcatgaaagtcattgagagtcgagcccaaaaagatgaagaaaaaatggaaattcaggagatccaactgaaagaggccaagcacattgctgaagatgccgaccgcaaatatgaagaggtcagatcctggggcccaaagccttgtggacacccagcagtggccttcaggaagccagggagcaatgtacagtcttgattcccgagtgaggccatctgctttgttggcagaaatgggtggttttgagaagcagagttcctttgtgtccagaaaacggttctaattttaatcctgctaggggatcccaggctttatcaggaagccaatcagtagcactgcgaagaaggaccaaaactcctctcccccagccacaaagacccggacaaaagatctttggccggaagggagagttgggccctgtgtcttgtgaaaggaggctctcatgctgtcatggtgcaagtcatttcttcccagagtgacctggcacatccagattgggcagcttagagaccacagacagtttctcagtggattcacagaggcctctctcctcaagggtggtagaaaactattatcaacgcaggttttcagcagaatttgctcctggtcgtgtccccatgaaaacagcctcctgtgataagaggcaacttgattattaaggtttctgttttttccttattggatcacatcgtggctatcctgaaacagcattgcccctcctttttatt

SEQ ID NO: 24485 - protein, 64 aa, Homo sapiens
MLSWCKSFLPRVTWHIQIGQLRDHRQFLSGFTEASLLKGGRKLLSTQVFSRICSWSCPHENSLL

SEQ ID NO: 24486 - DNA, 1223 bp, Homo sapiens
ggcaggagaatggcgtgaatccaggaggcggagtttgcagtgagctgagatcgtgccactgcaccccagcctgggtgatagagcgagaccctgtctcaaaaacaaaacaaaacaaaacaaaaaaatctacggaagaaaggaaccatgtgaaagagcgtttgctaatgatctgtctgtctgatgagaattgtgtgtatagatttgtgtatacacaaatatggatgttcactgtataaatcaatgtgtaaatgtgtccgagaactccagagttgatgagggcttgtaatgcacttaaaggtagctcaccacaagacagtcttcctatctgaaatcagcattgcagtcccagccatttcctgaagctaccaccctcactttctccccaactctgaaatgcttttcactctctacctaggctgaagccgacgtagcttctctgaacagacgcatccagctggttgaggaagagttggatcgtgcccaggagcgtctggcaacagctttgcagaagctggaggaagctgagaaggcagcagatgagagtgagagaggcatgaaagtcattgagagtcgagcccaaaaagatgaagaaaaaatggaaattcaggagatccaactgaaagaggccaagcacattgctgaagatgccgaccgcaaatatgaagaggtggcccgtaagctggtcatcattgagagcgacctggaacgtgcagaggagcgggctgagctctcagaaggcaaatgtgccgagcttgaagaagaattgaaaactgtgacgaacaacttgaagtcactggaggctcaggctgagaagtactcgcagaaggaagacagatatgaggaagagatcaaggtcctttccgacaagctgaaggaggctgagactcgggctgagtttgcggagaggtcagtaactaaattggagaaaagcattgatgacttagaagacgagctgtacgctcagaaactgaagtacaaagccatcagcgaggagctggaccacgctctcaacgatatgacttccatataagtttctttgcttcacttctcccaagactccctcgtcgagctggatgtcccacctctctgagctctgcatttgtctattctccagctgaccctggttctctctcttagcatcctgccttagagccaggcacacactgtgctttctattgtacagaagctcttcgtttcagtgtcaaataaacactgtgtaagct

SEQ ID NO: 24487 - protein, 158 aa, Homo sapiens
MKVIESRAQKDEEKMEIQEIQLKEAKHIAEDADRKYEEVARKLVIIESDLERAEERAELSEGKCAELEEELKTVTNNLKSLEAQAEKYSQKEDRYEEEIKVLSDKLKEAETRAEFAERSVTKLEKSIDDLEDELYAQKLKYKAISEELDHALNDMTSI

SEQ ID NO: 24488 - DNA, 1306 bp, Homo sapiens
ggcaggagaatggcgtgaatccaggaggcggagtttgcagtgagctgagatcgtgccactgcaccccagcctgggtgatagagcgagaccctgtctcaaaaacaaaacaaaacaaaacaaaaaaatctacggaagaaaggaaccatgtgaaagagcgtttgctaatgatctgtctgtctgatgagaattgtgtgtatagatttgtgtatacacaaatatggatgttcactgtataaatcaatgtgtaaatgtgtccgagaactccagagttgatgagggcttgtaatgcacttaaaggtagctcaccacaagacagtcttcctatctgaaatcagcattgcagtcccagccatttcctgaagctaccaccctcactttctccccaactctgaaatgcttttcactctctacctaggctgaagccgacgtagcttctctgaacagacgcatccagctggttgaggaagagttggatcgtgcccaggagcgtctggcaacagctttgcagaagctggaggaagctgagaaggcagcagatgagagtgagagaggcatgaaagtcattgagagtcgagcccaaaaagatgaagaaaaaatggaaattcaggagatccaactgaaagaggccaagcacattgctgaagatgccgaccgcaaatatgaagaggtggcccgtaagctggtcatcattgagagcgacctggaacgtgcagaggagcgggctgagctctcagaaggcaaatgtgccgagcttgaagaagaattgaaaactgtgacgaacaacttgaagtcactggaggctcaggctgagaagtactcgcagaaggaagacagatatgaggaagagatcaaggtcctttccgacaagctgaaggaggctgagactcgggctgagtttgcggagaggtcagtaactaaattggagaaaagcattgatgacttagaagacgagctgtacgctcagaaactgaagtacaaagccatcagcgaggagctggaccacgctctcaacgatatgacttccatataagtttctttgcttcacttctcccaagactccctcgtcgagctggatgtcccacctctctgagctctgcatttgtctattctccagctgaccctggttctctctcttagcatcctgccttagagccaggcacacactgtgctttctattgtacagaagctcttcgtttcagtgtcaaataaacactgtgtaagctatttctgtttgctattctttttacttcttatttattgacattttagtttcaacattgaataaaactacaaagctgcttcacac

SEQ ID NO: 24489 - protein, 158 aa, Homo sapiens; identical to SEQ ID NO: 24487

SEQ ID NO: 24490 - DNA, 2412 bp, Homo sapiens
ggcaggagaatggcgtgaatccaggaggcggagtttgcagtgagctgagatcgtgccactgcaccccagcctgggtgatagagcgagaccctgtctcaaaaacaaaacaaaacaaaacaaaaaaatctacggaagaaaggaaccatgtgaaagagcgtttgctaatgatctgtctgtctgatgagaattgtgtgtatagatttgtgtatacacaaatatggatgttcactgtataaatcaatgtgtaaatgtgtccgagaactccagagttgatgagggcttgtaatgcacttaaaggtagctcaccacaagacagtcttcctatctgaaatcagcattgcagtcccagccatttcctgaagctaccaccctcactttctccccaactctgaaatgcttttcactctctacctaggctgaagccgacgtagcttctctgaacagacgcatccagctggttgaggaagagttggatcgtgcccaggagcgtctggcaacagctttgcagaagctggaggaagctgagaaggcagcagatgagagtgagagaggcatgaaagtcattgagagtcgagcccaaaaagatgaagaaaaaatggaaattcaggagatccaactgaaagaggccaagcacattgctgaagatgccgaccgcaaatatgaagaggtggcccgtaagctggtcatcattgagagcgacctggaacgtgcagaggagcgggctgagctctcagaaggcaaatgtgccgagcttgaagaagaattgaaaactgtgacgaacaacttgaagtcactggaggctcaggctgagaagtactcgcagaaggaagacagatatgaggaagagatcaaggtcctttccgacaagctgaaggaggctgagactcgggctgagtttgcggagaggtcagtaactaaattggagaaaagcattgatgacttagaagacgagctgtacgctcagaaactgaagtacaaagccatcagcgaggagctggaccacgctctcaacgatatgacttccatataagtttctttgcttcacttctcccaagactccctcgtcgagctggatgtcccacctctctgagctctgcatttgtctattctccagctgaccctggttctctctcttagcatcctgccttagagccaggcacacactgtgctttctattgtacagaagctcttcgtttcagtgtcaaataaacactgtgtaagctatttctgtttgctattctttttacttcttatttattgacattttagtttcaacattgaataaaactacaaagctgcttcacacatatgagggttagtgtttggctgctgctttttctttttaaatactgaacactatacagaattatatcaggagtttctaaagcagtagttccttgttgaacttcaaaaaaatacccaggcctgcattccctctcagagttctgattttcaaaggttagaatgaggtctggacatctgggggggttttgggggaattgtgatggctctgctttgcagtctgggtcacacaggggacattgcttgttgagagttgaaaggtctggcttgatcagtgtcttcctttgctggaggtttagctcgggatgtagtgacccctctgtgttgattatttcggtggccttacttgggaggacctggctaactaatgaaaggctcatgatgaatggttctgtagctgtcccatattactaggaagttatacattgagaagggtgaaaaagaacttggattcaaacaatgtaagttttggttattgtcgatcatccttttatagcacaaagaaaagttcaagcttttttgaagtatattcatgactcagccacctttattttgatcatgaaaatgacatcttaggttttctaaatatgattactctgtttagtcgtgatttgttttgtgctttttagcacatactctttgggagggattgtacataatctttgtgttcaatggctgtgttttcatttgtggacatttttaaaatatagcaatgaaagtttctttttttttttcccaaaaagatagttggtggaaattgttcagaagacaattgtatttcatttgggcttctgttttatttcacaaacagcaattaagtgatttttttaaaaaaatacattgcaaaaaatagaactttaactaatatggactttagtgttataattcccaacatttctccttcctcaacaatctagctatatatttctcctgttttttttttaacatggatgatctgcatgttttgtatatagtttttttagcccgagagggctgatataccaccatactcaaataaatttggacaaactcagaagatagtgtcattctcactctacagagacttcaaagcatagaggaaatacttttttttaaagaaagctgtgaatt

SEQ ID NO: 24491 - protein, 158 aa, Homo sapiens; identical to SEQ ID NO: 24487

SEQ ID NO: 24492 - DNA, 1773 bp, Homo sapiens
ggcaggagaatggcgtgaatccaggaggcggagtttgcagtgagctgagatcgtgccactgcaccccagcctgggtgatagagcgagaccctgtctcaaaaacaaaacaaaacaaaacaaaaaaatctacggaagaaaggaaccatgtgaaagagcgtttgctaatgatctgtctgtctgatgagaattgtgtgtatagatttgtgtatacacaaatatggatgttcactgtataaatcaatgtgtaaatgtgtccgagaactccagagttgatgagggcttgtaatgcacttaaaggtagctcaccacaagacagtcttcctatctgaaatcagcattgcagtcccagccatttcctgaagctaccaccctcactttctccccaactctgaaatgcttttcactctctacctaggctgaagccgacgtagcttctctgaacagacgcatccagctggttgaggaagagttggatcgtgcccaggagcgtctggcaacagctttgcagaagctggaggaagctgagaaggcagcagatgagagtgagagaggcatgaaagtcattgagagtcgagcccaaaaagatgaagaaaaaatggaaattcaggagatccaactgaaagaggccaagcacattgctgaagatgccgaccgcaaatatgaagaggtggcccgtaagctggtcatcattgagagcgacctggaacgtgcagaggagcgggctgagctctcagaaggccaagtccgacagctggaagaacaattaagaataatggatcagaccttgaaagcattaatggctgcagaggataagtactcgcagaaggaagacagatatgaggaagagatcaaggtcctttccgacaagctgaaggaggctgagactcgggctgagtttgcggagaggtcagtaactaaattggagaaaagcattgatgacttagaagagaaagtggctcatgccaaagaagaaaaccttagtatgcatcagatgctggatcagactttactggagttaaacaacatgtgaaaacctccttagctgcgaccacattctttcgttttgttttgttttgtttttaaacacctgcttaccccttaaatgcaatttatttacttttaccactgtcacagaaacatccacaagataccagctaggtcagggggtggggaaaacacatacaaaaaggcaagcccatgtcagggcgatcctggttcaaatgtgccatttcccgggttgatgctgccacactttgtagagagtttagcaacacagtgtgcttagtcagcgtaggaatcctcactaaagcagaagaagttccattcaaagtgccaatgatagagtcaacaggaaggttaatgttggaaacacaatcaggtgtggattggtgctactttgaacaaaaggtccccctgtggtcttttgttcaacattgtacaatgtagaactctgtccaacactaatttattttgtcttgagttttactacaagatgagactatggatcccgcatgcctgaattcactaaagccaagggtctgtaagccacgctgctcttccgagacttccattcctttctgattggcacacgtgcagctcatgacaatctgtaggataacaatcagtgtggatttccactcttttcagtccttcatgttaaagatttagacaccacatacaactggtaaaggacgttttcttgagagttttaactatatgtaaacattgtataatgatatggaataaaatgcacattgtaggacattttctaaa

SEQ ID NO: 24493 - protein, 158 aa, Homo sapiens
MKVIESRAQKDEEKMEIQEIQLKEAKHIAEDADRKYEEVARKLVIIESDLERAEERAELSEGQVRQLEEQLRIMDQTLKALMAAEDKYSQKEDRYEEEIKVLSDKLKEAETRAEFAERSVTKLEKSIDDLEEKVAHAKEENLSMHQMLDQTLLELNNM

SEQ ID NO: 24494 - DNA, 1773 bp, Homo sapiens
ggcaggagaatggcgtgaatccaggaggcggagtttgcagtgagctgagatcgtgccactgcaccccagcctgggtgatagagcgagaccctgtctcaaaaacaaaacaaaacaaaacaaaaaaatctacggaagaaaggaaccatgtgaaagagcgtttgctaatgatctgtctgtctgatgagaattgtgtgtatagatttgtgtatacacaaatatggatgttcactgtataaatcaatgtgtaaatgtgtccgagaactccagagttgatgagggcttgtaatgcacttaaaggtagctcaccacaagacagtcttcctatctgaaatcagcattgcagtcccagccatttcctgaagctaccaccctcactttctccccaactctgaaatgcttttcactctctacctaggctgaagccgacgtagcttctctgaacagacgcatccagctggttgaggaagagttggatcgtgcccaggagcgtctggcaacagctttgcagaagctggaggaagctgagaaggcagcagatgagagtgagagaggcatgaaagtcattgagagtcgagcccaaaaagatgaagaaaaaatggaaattcaggagatccaactgaaagaggccaagcacattgctgaagatgccgaccgcaaatatgaagaggtggcccgtaagctggtcatcattgagagcgacctggaacgtgcagaggagcgggctgagctctcagaaggcaaatgtgccgagcttgaagaagaattgaaaactgtgacgaacaacttgaagtcactggaggctcaggctgagaagtactcgcagaaggaagacagatatgaggaagagatcaaggtcctttccgacaagctgaaggaggctgagactcgggctgagtttgcggagaggtcagtaactaaattggagaaaagcattgatgacttagaagagaaagtggctcatgccaaagaagaaaaccttagtatgcatcagatgctggatcagactttactggagttaaacaacatgtgaaaacctccttagctgcgaccacattctttcgttttgttttgttttgtttttaaacacctgcttaccccttaaatgcaatttatttacttttaccactgtcacagaaacatccacaagataccagctaggtcagggggtggggaaaacacatacaaaaaggcaagcccatgtcagggcgatcctggttcaaatgtgccatttcccgggttgatgctgccacactttgtagagagtttagcaacacagtgtgcttagtcagcgtaggaatcctcactaaagcagaagaagttccattcaaagtgccaatgatagagtcaacaggaaggttaatgttggaaacacaatcaggtgtggattggtgctactttgaacaaaaggtccccctgtggtcttttgttcaacattgtacaatgtagaactctgtccaacactaatttattttgtcttgagttttactacaagatgagactatggatcccgcatgcctgaattcactaaagccaagggtctgtaagccacgctgctcttccgagacttccattcctttctgattggcacacgtgcagctcatgacaatctgtaggataacaatcagtgtggatttccactcttttcagtccttcatgttaaagatttagacaccacatacaactggtaaaggacgttttcttgagagttttaactatatgtaaacattgtataatgatatggaataaaatgcacattgtaggacattttctaaa

SEQ ID NO: 24495 - protein, 158 aa, Homo sapiens
MKVIESRAQKDEEKMEIQEIQLKEAKHIAEDADRKYEEVARKLVIIESDLERAEERAELSEGKCAELEEELKTVTNNLKSLEAQAEKYSQKEDRYEEEIKVLSDKLKEAETRAEFAERSVTKLEKSIDDLEEKVAHAKEENLSMHQMLDQTLLELNNM

SEQ ID NO: 24496 - DNA, 723 bp, Homo sapiens
ggatcagaccttgaaagcattaatggctgcagaggataaggtactgatggctcgtgtggtttttaggtttaactgcaacccagacatctttcagcttccaatgcctcctggttcgtttggtataacgactgcaccttcacttcaccctctgctatttatatcttgccttaagtgctttcccttggtcctttatgctcctttgttttcccttcataaatgctctttgggcagccaaaaaaggagccaaattatcgcacttcaaagttgttggatttggtcaccctgccttctgctgttgcgaggttggggggcagtgttcctggaaaacctaaacattttaatacctgatgatttggctactttaaggcagcccttcgtctctaggactcagttttcattttttcccatccctctcctttttctctcctccttcctttggcttgtctcccaccctttctgcctctgatcgaaaacattagcaaatgtgccgagcttgaagaagaattgaaaactgtgacgaacaacttgaagtcactggaggctcaggctgagaagtactcgcagaaggaagacagatatgaggaagagatcaaggtcctttccgacaagctgaaggaggtaatatgagagttgtggatgaagccaactggattttaaatgagtttgttttcatggaaccggtcagggccttttcattttaaagttccaatgatccaagtcagg

SEQ ID NO: 24497 - protein, 147 aa, Homo sapiens
MAAEDKVLMARVVFRFNCNPDIFQLPMPPGSFGITTAPSLHPLLFISCLKCFPLVLYAPLFSLHKCSLGSQKRSQIIALQSCWIWSPCLLLLRGWGAVFLENLNILIPDDLATLRQPFVSRTQFSFFPIPLLFLSSFLWLVSHPFCL

SEQ ID NO: 24498 - DNA, 411 bp, Homo sapiens
agtactcgcagaaggaagacagatatgaggaagagatcaaggtcctttccgacaagctgaaggaggctgagactcgggctgagtttgcggagaggtcagtaactaaattggagaaaagcattgatgacttagaagacgagctgtacgctcagaaactgaagtacaaagccatcagcgaggagctggaccacgctctcaacgatatgacttccatataagtttctttgcttcacttctcccaagactccctcgtcgagctggatgtcccacctctctgagctctgcatttgtctattctccagctgaccctggttctctctcttagcatcctgccttagagccaggcacacactgtgctttctattgtacagaagctcttcgtttcagtgtcaaataaacactgtgtaagct

SEQ ID NO: 24499 - protein, 65 aa, Homo sapiens
LRRRAVRSETEVQSHQRGAGPRSQRYDFHISFFASLLPRLPRRAGCPTSLSSAFVYSPADPGSLS

SEQ ID NO: 24500 - DNA, 494 bp, Homo sapiens
agtactcgcagaaggaagacagatatgaggaagagatcaaggtcctttccgacaagctgaaggaggctgagactcgggctgagtttgcggagaggtcagtaactaaattggagaaaagcattgatgacttagaagacgagctgtacgctcagaaactgaagtacaaagccatcagcgaggagctggaccacgctctcaacgatatgacttccatataagtttctttgcttcacttctcccaagactccctcgtcgagctggatgtcccacctctctgagctctgcatttgtctattctccagctgaccctggttctctctcttagcatcctgccttagagccaggcacacactgtgctttctattgtacagaagctcttcgtttcagtgtcaaataaacactgtgtaagctatttctgtttgctattctttttacttcttatttattgacattttagtttcaacattgaataaaactacaaagctgcttcacac

SEQ ID NO: 24501 - protein, 65 aa, Homo sapiens; identical to SEQ ID NO: 24499

SEQ ID NO: 24502 - DNA, 1600 bp, Homo sapiens
agtactcgcagaaggaagacagatatgaggaagagatcaaggtcctttccgacaagctgaaggaggctgagactcgggctgagtttgcggagaggtcagtaactaaattggagaaaagcattgatgacttagaagacgagctgtacgctcagaaactgaagtacaaagccatcagcgaggagctggaccacgctctcaacgatatgacttccatataagtttctttgcttcacttctcccaagactccctcgtcgagctggatgtcccacctctctgagctctgcatttgtctattctccagctgaccctggttctctctcttagcatcctgccttagagccaggcacacactgtgctttctattgtacagaagctcttcgtttcagtgtcaaataaacactgtgtaagctatttctgtttgctattctttttacttcttatttattgacattttagtttcaacattgaataaaactacaaagctgcttcacacatatgagggttagtgtttggctgctgctttttctttttaaatactgaacactatacagaattatatcaggagtttctaaagcagtagttccttgttgaacttcaaaaaaatacccaggcctgcattccctctcagagttctgattttcaaaggttagaatgaggtctggacatctgggggggttttgggggaattgtgatggctctgctttgcagtctgggtcacacaggggacattgcttgttgagagttgaaaggtctggcttgatcagtgtcttcctttgctggaggtttagctcgggatgtagtgacccctctgtgttgattatttcggtggccttacttgggaggacctggctaactaatgaaaggctcatgatgaatggttctgtagctgtcccatattactaggaagttatacattgagaagggtgaaaaagaacttggattcaaacaatgtaagttttggttattgtcgatcatccttttatagcacaaagaaaagttcaagcttttttgaagtatattcatgactcagccacctttattttgatcatgaaaatgacatcttaggttttctaaatatgattactctgtttagtcgtgatttgttttgtgctttttagcacatactctttgggagggattgtacataatctttgtgttcaatggctgtgttttcatttgtggacatttttaaaatatagcaatgaaagtttctttttttttttcccaaaaagatagttggtggaaattgttcagaagacaattgtatttcatttgggcttctgttttatttcacaaacagcaattaagtgatttttttaaaaaaatacattgcaaaaaatagaactttaactaatatggactttagtgttataattcccaacatttctccttcctcaacaatctagctatatatttctcctgttttttttttaacatggatgatctgcatgttttgtatatagtttttttagcccgagagggctgatataccaccatactcaaataaatttggacaaactcagaagatagtgtcattctcactctacagagacttcaaagcatagaggaaatacttttttttaaagaaagctgtgaatt

SEQ ID NO: 24503 - protein, 83 aa, Homo sapiens [sequence omitted]

SEQ ID NO: 24504 - DNA, 1844 bp, Homo sapiens
gtgtaattaaaatatagctctgcaaaagaaagatgttccattagcccctgcctcccctcaccaggagacagccttctgtggtttcgtttacaatttaacatggtttactgatatacctaccatatttgttaggattttcatattgagtctttttcattttattttctaatgggttttgttctctttgtttttgtttcaatttacttaaaacaaaacgcacgcctcctgcattggccacctgctgcggcaccaaccccttcatgcattgcccttttcttgctgctgtgttgggatggtgcgcgcaccaccctcactcaccctccatttcttgatcactctccatgttcttgcacctctgccttccacttcctggtcatagacgagctgtacgctcagaaactgaagtacaaagccatcagcgaggagctggaccacgctctcaacgatatgacttccatataagtttctttgcttcacttctcccaagactccctcgtcgagctggatgtcccacctctctgagctctgcatttgtctattctccagctgaccctggttctctctcttagcatcctgccttagagccaggcacacactgtgctttctattgtacagaagctcttcgtttcagtgtcaaataaacactgtgtaagctatttctgtttgctattctttttacttcttatttattgacattttagtttcaacattgaataaaactacaaagctgcttcacacatatgagggttagtgtttggctgctgctttttctttttaaatactgaacactatacagaattatatcaggagtttctaaagcagtagttccttgttgaacttcaaaaaaatacccaggcctgcattccctctcagagttctgattttcaaaggttagaatgaggtctggacatctgggggggttttgggggaattgtgatggctctgctttgcagtctgggtcacacaggggacattgcttgttgagagttgaaaggtctggcttgatcagtgtcttcctttgctggaggtttagctcgggatgtagtgacccctctgtgttgattatttcggtggccttacttgggaggacctggctaactaatgaaaggctcatgatgaatggttctgtagctgtcccatattactaggaagttatacattgagaagggtgaaaaagaacttggattcaaacaatgtaagttttggttattgtcgatcatccttttatagcacaaagaaaagttcaagcttttttgaagtatattcatgactcagccacctttattttgatcatgaaaatgacatcttaggttttctaaatatgattactctgtttagtcgtgatttgttttgtgctttttagcacatactctttgggagggattgtacataatctttgtgttcaatggctgtgttttcatttgtggacatttttaaaatatagcaatgaaagtttctttttttttttcccaaaaagatagttggtggaaattgttcagaagacaattgtatttcatttgggcttctgttttatttcacaaacagcaattaagtgatttttttaaaaaaatacattgcaaaaaatagaactttaactaatatggactttagtgttataattcccaacatttctccttcctcaacaatctagctatatatttctcctgttttttttttaacatggatgatctgcatgttttgtatatagtttttttagcccgagagggctgatataccaccatactcaaataaatttggacaaactcagaagatagtgtcattctcactctacagagacttcaaagcatagaggaaatacttttttttaaagaaagctgtgaatt

SEQ ID NO: 24505 - protein, 97 aa, Homo sapiens
MGFVLFVFVSIYLKQNARLLHWPPAAAPTPSCIALFLLLCWDGARTTLTHPPFLDHSPCSCTSAFHFLVIDELYAQKLKYKAISEELDHALNDMTSI

SEQ ID NO: 24506 - DNA, 1067 bp, Homo sapiens
aattctgacacttcctaagtctaccaagctttttagggtctacccttcctggatacaggacaggtgactatggggtaagagtaaactgctcagcaagtgaccagttgctgtcctgcttgaggtctctttgtgttctctattaactgcctctcaccaagtctgctaacctgtcttccttctgcctcttttctgctaacctgcttgctgacctgtacagatcaactctaccagcaacttgagcaaaatcgccgcctcactaatgaactaaagctggccctgaatgaggattaaacttaagagtgaaaaaacttgggctgaattctaggcgtggagcccatgtgcagaaaatctaagactgtcctaccttcaactaatagagttgaaaacagttgctttctgcagaaatgcaaatgcaaggaattggctgaaaggctggccttgcctgcttgtttctctatatggctggaataattacgttctctttaatcacaaaacagcttttatggtagaatacttatatcaattcagcactgctccttgaaatagcaggtcctcttgtttgaactgataaataatgaggagcccccccaaaaaatgttttctatttcctgacagccatgagtcctactttaagtatgtatatatatatatatatgtgtgtgtgtgtgtgtgtgtatatattcctatcagatactcatattcctaacttctaaatatctggtatagtgtttgaaatatgattaaatgtacctatgcttgggcaaaatagcttttgaaaacaggaactcatgccagaagcccctggttgtctgaattcactaaagccaagggtctgtaagccacgctgctcttccgagacttccattcctttctgattggcacacgtgcagctcatgacaatctgtaggataacaatcagtgtggatttccactcttttcagtccttcatgttaaagatttagacaccacatacaactggtaaaggacgttttcttgagagttttaactatatgtaaacattgtataatgatatggaataaaatgcacattgtaggacattttctaaa

SEQ ID NO: 24507 - protein, 44 aa, Homo sapiens
MCRKSKTVLPSTNRVENSCFLQKCKCKELAERLALPACFSIWLE

SEQ ID NO: 24508 - DNA, 635 bp, Homo sapiens
agagaaagtggctcatgccaaagaagaaaaccttagtatgcatcagatgctggatcagactttactggagttaaacaacatgtgaaaacctccttagctgcgaccacattctttcgttttgttttgttttgtttttaaacacctgcttacccgtaggaatcctcactaaagcagaagaagttccattcaaagtgccaatgatagagtcaacaggaaggttaatgttggaaacacaatcaggtgtggattggtgctactttgaacaaaaggtccccctgtggtcttttgttcaacattgtacaatgtagaactctgtccaacactaatttattttgtcttgagttttactacaagatgagactatggatcccgcatgcctgaattcactaaagccaagggtctgtaagccacgctgctcttccgagacttccattcctttctgattggcacacgtgcagctcatgacaatctgtaggataacaatcagtgtggatttccactcttttcagtccttcatgttaaagatttagacaccacatacaactggtaaaggacgttttcttgagagttttaactatatgtaaacattgtataatgatatggaataaaatgcacattgtaggacattttctaaa

SEQ ID NO: 24509 - protein, 36 aa, Homo sapiens
MIESTGRLMLETQSGVDWCYFEQKVPLWSFVQHCTM

SEQ ID NO: 24510 - DNA, 318 bp, Homo sapiens
gcgatctaatttattttgtcttgagttttactacaagatgagactatggatcccgcatgcctgaattcactaaagccaagggtctgtaagccacgctgctcttccgagacttccattcctttctgattggcacacgtgcagctcatgacaatctgtaggataacaatcagtgtggatttccactcttttcagtccttcatgttaaagatttagacaccacatacaactggtaaaggacgttttcttgagagttttaactatatgtaaacattgtataatgatatggaataaaatgcacattgtaggacattttctaaa

SEQ ID NO: 24511 - DNA, 1366 bp, Homo sapiens
cttccctccgccccgcgccgcggctggcagggtgtgcgtgagtttggtggcggccggctgtgcagagacgccatgtaccggctcatgtcagcagtgactgcccgggctgccgcccccgggggcttggcctcaagctgcggacgacgcggggtccatcagcgcgccgggctgccgcctctcggccacggctgggtcgggggcctcgggctggggctggggctggcgctcggggtgaagctggcaggtgggctgaggggcgcggccccggcgcagtcccccgcggcccccgaccctgaggcgtcgcctctggccgagccgccacaggagcagtccctcgccccgtggtctccgcagaccccggcgccgccctgctccaggtgcttcgccagagccatcgagagcagccgcgacctgctgcacaggatcaaggatgaggtgggcgcaccgggcatagtggttggagtttctgtagatggaaaagaagtctggtcagaaggtttaggttatgctgatgttgagaaccgtgtaccatgtaaaccagagacagttatgcgaattgctagcatcagcaaaagtctcaccatggttgctcttgccaaattgtgggaagcagggaaactggatcttgatattccagtacaacattatgttcccgaattcccagaaaaagaatatgaaggtgaaaaggtttctgtcacaacaagattactgatttcccatttaagtggaattcgtcattatgaaaaggacataaaaaaggtgaaagaagagaaagcttataaagccttgaagatgatgaaagagaatgttgcatttgagcaagaaaaagaaggcaaaagtaatgaaaagaatgattttactaaatttaaaacagagcaggagaatgaagccaaatgccggaattcaaaacctggcaagaaaaagaatgattttgaacaaggcgaattatatttgagagaaaagtttgaaaattcaattgaatccctaagattatttaaaaatgatcctttgttcttcaaacctggtagtcagtttttgtattcaacttttggctataccctactggcagccatagtagagagagcttcaggatgtaaatatttggactatatgcagaaaatattccatgacttggatatgctgacgactgtgcaggaagaaaacgagccagtgatttacaatagagcaaggtaaatgaataccttctgctgtgtctagctatatcgcatcttaacactattttattaattaaaagtcaaattttctttgtttccattccaaaatcaacctgccacattttgggagcttttctacatgtctgttttctcatctgtaaagtgaaggaagtaaaacatgtttataaagt

SEQ ID NO: 24512 - protein, 373 aa, Homo sapiens; identical to SEQ ID NO: 3269

SEQ ID NO: 24513 - DNA, 2056 bp, Homo sapiens
cttccctccgccccgcgccgcggctggcagggtgtgcgtgagtttggtggcggccggctgtgcagagacgccatgtaccggctcatgtcagcagtgactgcccgggctgccgcccccgggggcttggcctcaagctgcggacgacgcggggtccatcagcgcgccgggctgccgcctctcggccacggctgggtcgggggcctcgggctggggctggggctggcgctcggggtgaagctggcaggtgggctgaggggcgcggccccggcgcagtcccccgcggcccccgaccctgaggcgtcgcctctggccgagccgccacaggagcagtccctcgccccgtggtctccgcagaccccggcgccgccctgctccaggtgcttcgccagagccatcgagagcagccgcgacctgctgcacaggatcaaggatgaggtgggcgcaccgggcatagtggttggagtttctgtagatggaaaagaagtctggtcagaaggtttaggttatgctgatgttgagaaccgtgtaccatgtaaaccagagacagttatgcgaattgctagcatcagcaaaagtctcaccatggttgctcttgccaaattgtgggaagcagggaaactggatcttgatattccagtacaacattatgttcccgaattcccagaaaaagaatatgaaggtgaaaaggtttctgtcacaacaagattactgatttcccatttaagtggaattcgtcattatgaaaaggacataaaaaaggtgaaagaagagaaagcttataaagccttgaagatgatgaaagagaatgttgcatttgagcaagaaaaagaaggcaaaagtaatgaaaagaatgattttactaaatttaaaacagagcaggagaatgaagccaaatgccggaattcaaaacctggcaagaaaaagaatgattttgaacaaggcgaattatatttgagagaaaagtttgaaaattcaattgaatccctaagattatttaaaaatgatcctttgttcttcaaacctggtagtcagtttttgtattcaacttttggctataccctactggcagccatagtagagagagcttcaggatgtaaatatttggactatatgcagaaaatattccatgacttggatatgctgacgactgtgcaggaagaaaacgagccagtgatttacaatagagcaaggtaaatgaataccttctgctgtgtctagctatatcgcatcttaacactattttattaattaaaagtcaaattttctttgtttccattccaaaatcaacctgccacattttgggagcttttctacatgtctgttttctcatctgtaaagtgaaggaagtaaaacatgtttataaagtacactaagaccctttgatgaaagatagcaataatattaataattcaaacatgaataactaaaccaaaattgcacccaccatgagcatctgtaatttgctctttaaccattccttttttaggttttaactaatactttgtttacgtgttattagtttttaattgttttcatactgttttgaaataattttatacttatagaaaagttgcaagagtagtacaaaggattcacatatcctctttactcagattcccttaatgttagtttaccgcatttgcattacctttctgtctacatatgtgtttgtttctgaaccatttggaaataagttgtagacgtgatacccctttacctataaatatttacatgtgtattttctaaaaacaaggacattcagggccgggtgcagtggctcacgcctgtaatcccaacactttggaaggccgaggtgggtggatcacctgaggtcaggagttcaagaccagcctggccaatgtggtgaaatcaaccctctctctactaaaaatgcaaaaattagccaggtgtggtggcgggtgcctataatcccagccacgcgggaggctgaggcaggagaatcgcttgaacccaggaggtggagttgcagtaagccaagatcgtgcccctgcacttcaggctgggcgaaagagtgagactccatgtcaaaaaagga

SEQ ID NO: 24514 - protein, 373 aa, Homo sapiens; identical to SEQ ID NO: 3269

SEQ ID NO: 24515 - DNA, 1976 bp, Homo sapiens
cttccctccgccccgcgccgcggctggcagggtgtgcgtgagtttggtggcggccggctgtgcagagacgccatgtaccggctcatgtcagcagtgactgcccgggctgccgcccccgggggcttggcctcaagctgcggacgacgcggggtccatcagcgcgccgggctgccgcctctcggccacggctgggtcgggggcctcgggctggggctggggctggcgctcggggtgaagctggcaggtgggctgaggggcgcggccccggcgcagtcccccgcggcccccgaccctgaggcgtcgcctctggccgagccgccacaggagcagtccctcgccccgtggtctccgcagaccccggcgccgccctgctccaggtgcttcgccagagccatcgagagcagccgcgacctgctgcacaggatcaaggatgaggtgggcgcaccgggcatagtggttggagtttctgtagatggaaaagaagtctggtcagaaggtttaggttatgctgatgttgagaaccgtgtaccatgtaaaccagagacagttatgcgaattgctagcatcagcaaaagtctcaccatggttgctcttgccaaattgtgggaagcagggaaactggatcttgatattccagtacaacattatgttcccgaattcccagaaaaagaatatgaaggtgaaaaggtttctgtcacaacaagattactgatttcccatttaagtggaattcgtcattatgaaaaggacataaaaaaggtgaaagaagagaaagcttataaagccttgaagatgatgaaagagaatgttgcatttgagcaagaaaaagaaggcaaaagtaatgaaaagaatgattttactaaatttaaaacagagcaggagaatgaagccaaatgccggaattcaaaacctggcaagaaaaagaatgattttgaacaaggcgaattatatttgagagaaaagtttgaaaattcaattgaatccctaagattatttaaaaatgatcctttgttcttcaaacctggtagtcagtttttgtattcaacttttggctataccctactggcagccatagtagagagagcttcaggatgtaaatatttggactatatgcagaaaatattccatgacttggatatgctgacgactgtgcaggaagaaaacgagccagtgatttacaatagagcaagattttatgtttacaataaaaagaaacgtcttgtcaacacaccttacgtggataactcctataaatgggctggtggtggatttctgtctacagtgggtgaccttctgaaatttgggaatgcaatgctttatggttaccaagttgggctgtttaagaactcaaatgaaaatcttttacctggatacctcaaaccagaaacaatggttatgatgtggaccccagtccctaacacagagatgtcttgggataaagagggtaaatatgcaatggcgtggggtgttgtggaaaggaaacaaacgtatggttcgtgtagaaagcaacggcattatgcttcacatactggaggggcagtgggtgccagtagtgtcctgctggtccttcctgaagaactggatacagagactataaataacaaggttcccccaagaggaatcattgtttctatcatatgtaacatgcaatctgttggcctcaatagcaccgctttgaagattgcccttgaatttgataaagacagatcagactgataaccttaacaccataggtgcaaaatgagttgttctgaggtttttttgaaacattaaagttccaaaacatgacatttttaagaataaatttgaaatagagtataactgaatgcagagaattatgtacctctaattgcttaattttgtaatggtcttttattgtagaattggttctttatactcagggaagtaattatattgtttttactttttgaaaaaagtgttaactcttgaaataaaatattctgataaaatatgta

SEQ ID NO: 24516 - protein, 547 aa, Homo sapiens; identical to SEQ ID NO: 3267

SEQ ID NO: 24517 - DNA, 1371 bp, Homo sapiens
gtgtttgcccatttatgccctaaacaatgagtagaggtatattaagaacaaagttgactcaagaaatcaaatttgcttttcttttctttctgttcctgttttgttgtcactttgaaatatttttgttttgttttgaggtaggatttatttgcttactttattatcagagaaaggagcagatttatgtgaaatgttaagtatgctgatcataattttattcttgtgttaaggacttggaataaggacagttgcaaagttaactcaatttgttgatgtattgcctgtgttctttttctgaatgctgaagtaaaatattccagttttaaaagtatgccaattttcagtgggaatatattttatatgtttttgaataataatcaagtattttatttttttcctcctcgcaatgatgtctcaaggtagtcagtttttgtattcaacttttggctataccctactggcagccatagtagagagagcttcaggatgtaaatatttggactatatgcagaaaatattccatgacttggatatgctgacgactgtgcaggaagaaaacgagccagtgatttacaatagagcaagattttatgtttacaataaaaagaaacgtcttgtcaacacaccttacgtggataactcctataaatgggctggtggtggatttctgtctacagtgggtgaccttctgaaatttgggaatgcaatgctttatggttaccaagttgggctgtttaagaactcaaatgaaaatcttttacctggatacctcaaaccagaaacaatggttatgatgtggaccccagtccctaacacagagatgtcttgggataaagagggtaaatatgcaatggcgtggggtgttgtggaaaggaaacaaacgtatggttcgtgtagaaagcaacggcattatgcttcacatactggaggggcagtgggtgccagtagtgtcctgctggtccttcctgaagaactggatacagagactataaataacaaggttcccccaagaggaatcattgtttctatcatatgtaacatgcaatctgttggcctcaatagcaccgctttgaagattgcccttgaatttgataaagacagatcagactgataaccttaacaccataggtgcaaaatgagttgttctgaggtttttttgaaacattaaagttccaaaacatgacatttttaagaataaatttgaaatagagtataactgaatgcagagaattatgtacctctaattgcttaattttgtaatggtcttttattgtagaattggttctttatactcagggaagtaattatattgtttttactttttgaaaaaagtgttaactcttgaaataaaatattctgataaaatatgta

SEQ ID NO: 24518 - protein, 234 aa, Homo sapiens
MMSQGSQFLYSTFGYTLLAAIVERASGCKYLDYMQKIFHDLDMLTTVQEENEPVIYNRARFYVYNKKKRLVNTPYVDNSYKWAGGGFLSTVGDLLKFGNAMLYGYQVGLFKNSNENLLPGYLKPETMVMMWTPVPNTEMSWDKEGKYAMAWGVVERKQTYGSCRKQRHYASHTGGAVGASSVLLVLPEELDTETINNKVPPRGIIVSIICNMQSVGLNSTALKIALEFDKDRSD

SEQ ID NO: 24519 - DNA, 1548 bp, Homo sapiens
agcttctatcccggaagttgatgccgagcgcagatcgcttgcagcttgctagctgtgtgggctgggaggtctggtagggctgagcttgcaagaggatcaacatgcctttggctagagatttactacatccgtccttggaagaggaaaagaaaaaacataaaaagaaacgcctagtacaaagtccaaattcttactttatggatgtaaaatgtccaggttgctacaagatcaccacggttttcagccatgctcagacagtggttctttgtgtaggttgttcaacagtgttgtgccagcctacaggaggaaaggccagactcacagaagggtgttcatttagaagaaagcaacactaatgattcaaacagcttcctgaattttaattttgtgttgtctcacagaaagccttatcataaattccataattctaattaatttaccaagataatgtaattacatttggttttgtaaggtatacagcagtaatctcctattttggtgtcagtttttcaataaagttttgattatgggcaaatcccctctttttctttttttaaaatatatttgagtatgccatacatttatatatatggtgtatatgaatttggtttaaacattttaaaatttattctgattagtttgtgtctttttttttttttttgagagagagagtcctgctctgtcactcaagctggagtgcagtggtgcgatctcggctcactgcaacctccgcctcccaggtccaagcaattctcttgccttgtcctcccaagtagctgggattataggcacacaccaccatgcctggctaatttgtgtctcattttcaagagtagaaaccctaaatattttattttcattccttttccaaattgctatgaatgggattaaaggattacagatgtaaagtctattatttgtgaattctaaatgtagttctgctgttgtacctgtggaaacatcttaaagaagtacatattttgcacgtcctgcacgtgtaccccagaacttaaactataattaaaaagaatagtttcaaaaaaatacatattgatcacagtgtaatgccttggatttatgtggccttgctatactactatataatttaggacagtaactgctagctggggtgtgagttatttattggaagctcctttttagggtagaaaatttgaggagaaatctgaagtggcatgatttacccgcagaagtcctggttggggatagtagatggtgttgaattctctggcccagataggtgagcactcctgactacagatgtgtgttgagtggttctggtgcctgcctcattgtcattttcatagtttatgaagtaatcctggggagctgagacggggagtgtatccactcactatacaactcctcattggactaggaagatagtccagtttctactctgcttctatttgatttgttaccttgtggcaggtatttaaaacaggcatttcctatcaacaggtaggcctctaatgtgagcaactgatcctcttacatactgcttaaatcagagaactgttgcacaagaac

SEQ ID NO: 24520 - protein, 84 aa, Homo sapiens; identical to SEQ ID NO: 3271

SEQ ID NO: 24521 - DNA, 1789 bp, Homo sapiens
ccgggggctgagcggcccgccgggttccggggtggcgccggccccggtggccgcgggcgctccctcgccatggcctaagcccgaggccgctccccagccagattctggcctcaggcactgcagagcccgcggcgctcgccaacaagcccgttagacccacgggacttggcaccctggaacgctcaccatccccgggtcttccctgcgccctggacccgagtaccctgctgcggcgtccccctaccaccgagaggagggcctagagcagacaagcccgccccgccgctcctcccagcagcttctatcccggaagttgatgccgagcgcagatcgcttgcagcttgctagctgtgtgggctgggaggtctggtagggctgagcttgcaagaggatcaacatgcctttggctagagatttactacatccgtccttggaagaggaaaagaaaaaacataaaaagaaacgcctagtacaaagtccaaattcttactttatggattggttctttgtgtaggttgttcaacagtgttgtgccagcctacaggaggaaaggccagactcacagaagggtgttcatttagaagaaagcaacactaatgattcaaacagcttcctgaattttaattttgtgttgtctcacagaaagccttatcataaattccataattctaattaatttaccaagataatgtaattacatttggttttgtaaggtatacagcagtaatctcctattttggtgtcagtttttcaataaagttttgattatgggcaaatcccctctttttctttttttaaaatatatttgagtatgccatacatttatatatatggtgtatatgaatttggtttaaacattttaaaatttattctgattagtttgtgtctttttttttttttttgagagagagagtcctgctctgtcactcaagctggagtgcagtggtgcgatctcggctcactgcaacctccgcctcccaggtccaagcaattctcttgccttgtcctcccaagtagctgggattataggcacacaccaccatgcctggctaatttgtgtctcattttcaagagtagaaaccctaaatattttattttcattccttttccaaattgctatgaatgggattaaaggattacagatgtaaagtctattatttgtgaattctaaatgtagttctgctgttgtacctgtggaaacatcttaaagaagtacatattttgcacgtcctgcacgtgtaccccagaacttaaactataattaaaaagaatagtttcaaaaaaatacatattgatcacagtgtaatgccttggatttatgtggccttgctatactactatataatttaggacagtaactgctagctggggtgtgagttatttattggaagctcctttttagggtagaaaatttgaggagaaatctgaagtggcatgatttacccgcagaagtcctggttggggatagtagatggtgttgaattctctggcccagataggtgagcactcctgactacagatgtgtgttgagtggttctggtgcctgcctcattgtcattttcatagtttatgaagtaatcctggggagctgagacggggagtgtatccactcactatacaactcctcattggactaggaagatagtccagtttctactctgcttctatttgatttgttaccttgtggcaggtatttaaaacaggcatttcctatcaacaggtaggcctctaatgtgagcaactgatcctcttacatactgcttaaatcagagaactgttgcacaagaac

SEQ ID NO: 24522 - protein, 38 aa, Homo sapiens
MPLARDLLHPSLEEEKKKHKKKRLVQSPNSYFMDWFFV

SEQ ID NO: 24523 - DNA, 1547 bp, Homo sapiens
agaacaaagcaaacctaaggcacagccataccccgcagaaaacttcgaaatctgcgccttgaaaagggaagccaaaaggatacgagcctctttcataatctctctgttggctagagatttactacatccgtccttggaagaggaaaagaaaaaacataaaaagaaacgcctagtacaaagtccaaattcttactttatggatgtaaaatgtccaggttgctacaagatcaccacggttttcagccatgctcagacagtggttctttgtgtaggttgttcaacagtgttgtgccagcctacaggaggaaaggccagactcacagaagggtgttcatttagaagaaagcaacactaatgattcaaacagcttcctgaattttaattttgtgttgtctcacagaaagccttatcataaattccataattctaattaatttaccaagataatgtaattacatttggttttgtaaggtatacagcagtaatctcctattttggtgtcagtttttcaataaagttttgattatgggcaaatcccctctttttctttttttaaaatatatttgagtatgccatacatttatatatatggtgtatatgaatttggtttaaacattttaaaatttattctgattagtttgtgtctttttttttttttttgagagagagagtcctgctctgtcactcaagctggagtgcagtggtgcgatctcggctcactgcaacctccgcctcccaggtccaagcaattctcttgccttgtcctcccaagtagctgggattataggcacacaccaccatgcctggctaatttgtgtctcattttcaagagtagaaaccctaaatattttattttcattccttttccaaattgctatgaatgggattaaaggattacagatgtaaagtctattatttgtgaattctaaatgtagttctgctgttgtacctgtggaaacatcttaaagaagtacatattttgcacgtcctgcacgtgtaccccagaacttaaactataattaaaaagaatagtttcaaaaaaatacatattgatcacagtgtaatgccttggatttatgtggccttgctatactactatataatttaggacagtaactgctagctggggtgtgagttatttattggaagctcctttttagggtagaaaatttgaggagaaatctgaagtggcatgatttacccgcagaagtcctggttggggatagtagatggtgttgaattctctggcccagataggtgagcactcctgactacagatgtgtgttgagtggttctggtgcctgcctcattgtcattttcatagtttatgaagtaatcctggggagctgagacggggagtgtatccactcactatacaactcctcattggactaggaagatagtccagtttctactctgcttctatttgatttgttaccttgtggcaggtatttaaaacaggcatttcctatcaacaggtaggcctctaatgtgagcaactgatcctcttacatactgcttaaatcagagaactgttgcacaagaac

SEQ ID NO: 24524 - protein, 52 aa, Homo sapiens
MDVKCPGCYKITTVFSHAQTVVLCVGCSTVLCQPTGGKARLTEGCSFRRKQH

SEQ ID NO: 24525 - DNA, 1037 bp, Homo sapiens
agcttctatcccggaagttgatgccgagcgcagatcgcttgcagcttgctagctgtgtgggctgggaggtctggtagggctgagcttgcaagaggatcaacatgcctttggctagagatttactacatccgtccttggaagaggaaaagaaaaaacataaaaagaaacgcctagtacaaagtccaaattcttactttatggatgtaaaatgtccaggttgctacaagatcaccacggttttcagccatgctcagacagtggttctttgtgtaggttgttcaacagtgttgtgccagcctacaggaggaaaggccagactcacagaagggtgttcatttagaagaaagcaacactaatgattcaaacagcttcctgaattttaattttgtgttgtctcacagaaagccttatcataaattccataattctaattaatttaccaagataatgtaattacatttggttttgtaaggtatacagcagtaatctcctattttggtgtcagtttttcaataaagttttgattatgggcaaatcccctctttttctttttttaaaatatatttgagtatgccatacatttatatatatggtgtatatgaatttggtttaaacattttaaaatttattctgattagtttgtgtctttttttttttttttgagagagagagtcctgctctgtcactcaagctggagtgcagtggtgcgatctcggctcactgcaacctccgcctcccaggtccaagcaattctcttgccttgtcctcccaagtagctgggattataggcacacaccaccatgcctggctaatttgtgtctcattttcaagagtagaaaccctaaatattttattttcattccttttccaaattgctatgaatgggattaaaggattacagatgtaaagtctattatttgtgaattctaaatgtagttctgctgttgtacctgtggaaacatcttaaagaagtacatattttgcacgtcctgcacgtgtaccccagaacttaaactataattaaaaagaatagtttc

SEQ ID NO: 24526 - protein, 84 aa, Homo sapiens; identical to SEQ ID NO: 3271

SEQ ID NO: 24527 - DNA, 1278 bp, Homo sapiens
ccgggggctgagcggcccgccgggttccggggtggcgccggccccggtggccgcgggcgctccctcgccatggcctaagcccgaggccgctccccagccagattctggcctcaggcactgcagagcccgcggcgctcgccaacaagcccgttagacccacgggacttggcaccctggaacgctcaccatccccgggtcttccctgcgccctggacccgagtaccctgctgcggcgtccccctaccaccgagaggagggcctagagcagacaagcccgccccgccgctcctcccagcagcttctatcccggaagttgatgccgagcgcagatcgcttgcagcttgctagctgtgtgggctgggaggtctggtagggctgagcttgcaagaggatcaacatgcctttggctagagatttactacatccgtccttggaagaggaaaagaaaaaacataaaaagaaacgcctagtacaaagtccaaattcttactttatggattggttctttgtgtaggttgttcaacagtgttgtgccagcctacaggaggaaaggccagactcacagaagggtgttcatttagaagaaagcaacactaatgattcaaacagcttcctgaattttaattttgtgttgtctcacagaaagccttatcataaattccataattctaattaatttaccaagataatgtaattacatttggttttgtaaggtatacagcagtaatctcctattttggtgtcagtttttcaataaagttttgattatgggcaaatcccctctttttctttttttaaaatatatttgagtatgccatacatttatatatatggtgtatatgaatttggtttaaacattttaaaatttattctgattagtttgtgtctttttttttttttttgagagagagagtcctgctctgtcactcaagctggagtgcagtggtgcgatctcggctcactgcaacctccgcctcccaggtccaagcaattctcttgccttgtcctcccaagtagctgggattataggcacacaccaccatgcctggctaatttgtgtctcattttcaagagtagaaaccctaaatattttattttcattccttttccaaattgctatgaatgggattaaaggattacagatgtaaagtctattatttgtgaattctaaatgtagttctgctgttgtacctgtggaaacatcttaaagaagtacatattttgcacgtcctgcacgtgtaccccagaacttaaactataattaaaaagaatagtttc

SEQ ID NO: 24528 - protein, 38 aa, Homo sapiens; identical to SEQ ID NO: 24522

SEQ ID NO: 24529 - DNA, 1036 bp, Homo sapiens
agaacaaagcaaacctaaggcacagccataccccgcagaaaacttcgaaatctgcgccttgaaaagggaagccaaaaggatacgagcctctttcataatctctctgttggctagagatttactacatccgtccttggaagaggaaaagaaaaaacataaaaagaaacgcctagtacaaagtccaaattcttactttatggatgtaaaatgtccaggttgctacaagatcaccacggttttcagccatgctcagacagtggttctttgtgtaggttgttcaacagtgttgtgccagcctacaggaggaaaggccagactcacagaagggtgttcatttagaagaaagcaacactaatgattcaaacagcttcctgaattttaattttgtgttgtctcacagaaagccttatcataaattccataattctaattaatttaccaagataatgtaattacatttggttttgtaaggtatacagcagtaatctcctattttggtgtcagtttttcaataaagttttgattatgggcaaatcccctctttttctttttttaaaatatatttgagtatgccatacatttatatatatggtgtatatgaatttggtttaaacattttaaaatttattctgattagtttgtgtctttttttttttttttgagagagagagtcctgctctgtcactcaagctggagtgcagtggtgcgatctcggctcactgcaacctccgcctcccaggtccaagcaattctcttgccttgtcctcccaagtagctgggattataggcacacaccaccatgcctggctaatttgtgtctcattttcaagagtagaaaccctaaatattttattttcattccttttccaaattgctatgaatgggattaaaggattacagatgtaaagtctattatttgtgaattctaaatgtagttctgctgttgtacctgtggaaacatcttaaagaagtacatattttgcacgtcctgcacgtgtaccccagaacttaaactataattaaaaagaatagtttc

SEQ ID NO: 24530 - protein, 52 aa, Homo sapiens; identical to SEQ ID NO: 24524

SEQ ID NO: 24531 - DNA, 920 bp, Homo sapiens
aggttgcgcagcgtcttcgcgcgtggcgggcatgtagtgacttgcccggtcaccgcggcgcggctggccctgcaggggcgtgggctgcaattcagaggcggtggctgggaggggaacagttctctgtgtagcttatgagcggtcttggtctttgaggatgcccctgaggttgtgatctttgggtcttttggctttcccagtgattggtgtttctcgccccctctgccttctttcggaagcgatttcctacttgttttccttttttaaaaactgtcctcgttgttgccttatatattaattccgtcaaggacggtcgctcagcaagaattcctgtcagatcagctgttgagccacaggagcaaaaatcacccaggcgctgacgttgtctggtctacttcagcagtttctactctaagcgagtccacagtcggggtcactttctttgcttagcacctcgacttcgcgcagttttcatcgaagacagttcattacgcattggctagagatttactacatccgtccttggaagaggaaaagaaaaaacataaaaagaaacgcctagtacaaagtccaaattcttactttatggatgtaaaatgtccaggttgctacaagatcaccacggttttcagccatgctcagacagtggttctttgtgtaggttgttcaacagtgttgtgccagcctacaggaggaaaggccagactcacagaagggtgttcatttagaagaaagcaacactaatgattcaaacagcttcctgaattttaattttgtgttgtctcacagaaagccttatcataaattccataattctaattaatttaccaagataatgtaattacatttggttttgtaaggtatacagcagtaatctcctattttggtgtcagtttttcaataaagttttgattatgggc

SEQ ID NO: 24532 - protein, 52 aa, Homo sapiens; identical to SEQ ID NO: 24524

SEQ ID NO: 24533 - DNA, 1378 bp, Homo sapiens
gatcgcttgcagcttgctagctgtgtgggctgggaggtctggtagggctgagcttgcaagaggatcaacatgcctgtgagttgtttacatcgggctccgggtttgttttgggcttctttaccgagagtcatatgggacggatgagtccggctgcctctcgggcctgtagtgtccgagagtggcgaggcggctcaggttgcgcagcgtcttcgcgcgtggcgggcatgtagtgacttgcccggtcaccgcggcgcggctggccctgcaggggcgtgggctgcaattcagaggcggtggctgggaggggaacagttctctgtgtagcttatgagcggtcttggtctttgaggatgcccctgaggttgtgatctttgggtcttttggctttcccagtgattggtgtttctcgccccctctgccttctttcggaagcgatttcctacttgttttccttttttaaaaactgtcctcgttgttgccttatatattaattccgtcaaggacggtcgctcagcaagaattcctgtcagatcagctgttgagccacaggagcaaaaatcacccaggcgctgacgttgtctggtctacttcagcagtttctactctaagcgagtccacagtcggggtcactttctttgcttagcacctcgacttcgcgcagttttcatcgaagacagttcattacgcagttgagtaaagaaggacaaagtttgccttaccatatgtttcctgatcgtgcgaaagcccttttctagggacttggagaacacaagtattatgaaaagtactgatgaaagttattaacaggtttcgaaaaataactttactatctgacgtgttgcttctgccgaggatgaccgttattcctgtttttgcatgtatatttcacgtatggttaaatgtgccagcgttgtggtttaaaactaatagtaataatatgcttctttgttcagttggctagagatttactacatccgtccttggaagaggaaaagaaaaaacataaaaagaaacgcctagtacaaagtccaaattcttactttatggatgtaaaatgtccaggttgctacaagatcaccacggttttcagccatgctcagacagtggttctttgtgtaggttgttcaacagtgttgtgccagcctacaggaggaaaggccagactcacagaagggtgttcatttagaagaaagcaacactaatgattcaaacagcttcctgaattttaattttgtgttgtctcacagaaagccttatcataaattccataattctaattaatttaccaagataatgtaattacatttggttttgtaaggtatacagcagtaatctcctattttggtgtcagtttttcaataaagttttgattatgggc

SEQ ID NO: 24534 - protein, 100 aa, Homo sapiens
MCQRCGLKLIVIICFFVQLARDLLHPSLEEEKKKHKKKRLVQSPNSYFMDVKCPGCYKITTVFSHAQTVVLCVGCSTVLCQPTGGKARLTEGCSFRRKQH

SEQ ID NO: 24535 - DNA, 2941 bp, Homo sapiens
gcagatcgcttgcagcttgctagctgtgtgggctgggaggtctggtagggctgagcttgcaagaggatcaacatgcctgtgagttgtttacatcgggctccgggtttgttttgggcttctttaccgagagtcatatgggacggatgagtccggctgcctctcgggcctgtagtgtccgagagtggcgaggcggctcaggttgcgcagcgtcttcgcgcgtggcgggcatgtagtgacttgcccggtcaccgcggcgcggctggccctgcaggggcgtgggctgcaattcagaggcggtggctgggaggggaacagttctctgtgtagcttatgagcggtcttggtctttgaggatgcccctgaggttgtgatctttgggtcttttggctttcccagtgattggtgtttctcgccccctctgccttctttcggaagcgatttcctacttgttttccttttttaaaaactgtcctcgttgttgccttatatattaattccgtcaaggacggtcgctcagcaagaattcctgtcagatcagctgttgagccacaggagcaaaaatcacccaggcgctgacgttgtctggtctacttcagcagtttctactctaagcgagtccacagtcggggtcactttctttgcttagcacctcgacttcgcgcagttttcatcgaagacagttcattacgcagttgagtaaagaaggacaaagtttgccttaccatatgtttcctgatcgtgcgaaagcccttttctagggacttggagaacacaagtattatgaaaagtactgatgaaagttattaacaggtttcgaaaaataactttactatctgacgtgttgcttctgccgaggatgaccgttattcctgtttttgcatgtatatttcacgtatggttaaatgtgccagcgttgtggtttaaaactaatagtaataatatgcttctttgttcagttggctagagatttactacatccgtccttggaagaggaaaagaaaaaacataaaaagaaacgcctagtacaaagtccaaattcttactttatggatgtaaaatgtccaggttgctacaagatcaccacggttttcagccatgctcagacagtggttctttgtgtaggttgttcaacagtgttgtgccagcctacaggaggaaaggccagactcacagaaggtatatcatttggcattctccaacccagtgatgagattgatgattataaatgtctctatcttcactgaaaagtttaaagaaatcttaatgattaccaaaataacttatctttcattgtgtgctttcagtaaagaatggcctgttcaaatggatatatttatactcttgaccttgcagtgaactccattgacttatttttcttagtttagaacacatttattcacttagtttgcttaacttggaataaattaagtcagaatagaagcaaaagaataactacatgttataggacatgcagatttatttatttatttatttattattttttttttttattaggagtctcgctctgtcacccaggctggagtgcagtggcgccatctcagctcactgcaacttctgcctccccggttcaagtgattctcttgcctctgcctcccaagtagctgggaccacaggcgcgtgccaccatgcctggctaattttttgtatttttagtagaggtggggtttcactgtgttagccaggatggtcttgatctcctgacctcatggtctgcccgcctcggcctcccaaagtgctgggattacaggcatgagccacctcgccggccaggacatacagatttttaaaaccatatagaattttaaaatttcttttacaaaattttgttccatatatatttagtacatataatagttttttttttatcattgccagctaagcaacagatagctaatatataagttaaaatgccagagattttacttttatgagcaactgcaatgattaatataaaaacctaattttaattcctctttcactttagtgcaataagaaaaaaaaattatatatatagtttccatagtaatacttgtaaatttgtgattccataatgatgttataaatttgcttgtgatattttggggagctgtaagttccatgctctcactggaagagttcaagtggattggcagcaaatctgagatctatttggtgtgacctggtgagatctaaatatggagtcagcacatgatttttttaagagtaatattgctaagtaatattgctaagtatacttgggagatttttgaaacaaagtatgtcatgtcatgattttggaatttagtgcccatatgctgacagatggtttaatgggtctatctgttctagagttttcctaataggtctgaaaatacctctaatcaaaattatttacttgagaaaagtattcagaatagttcctaaaaattaagagtatatcttctgacagcttgcttgaaacagtcttcactgttgaattcaggctcatggtcttaagtagacttcattatagcatttgagaaacaggagtgacacttatagtcataccagagtaaactcagatatgatagatgtattatagcaaatttctggtataaaaggataaataatctgtatatgagtattaatccaatattcttaaaacttcagtattttacttaaaagtactttttgtcattaaaattatagcaaaggtagaatgcacttgtttaatatactctcatgattcttttgcagggtgttcatttagaagaaagcaacactaatgattcaaacagcttcctgaattttaattttgtgttgtctcacagaaagccttatcataaattccataattctaattaatttaccaagataatgtaattacatttggttttgtaaggtatacagcagtaatctcctattttggtgtcagtttttcaataaagttttgattatgggc

SEQ ID NO: 24536 - protein, 113 aa, Homo sapiens [sequence omitted]

SEQ ID NO: 24537 - DNA, 525 bp, Homo sapiens
atcccggaagttgatgccgagcgcagatcgcttgcagcttgctagctgtgtgggctgggaggtctggtagggctgagcttgcaagaggatcaacatgcctttggctagagatttactacatccgtccttggaagaggaaaagaaaaaacataaaaagaaacgcctagtacaaagtccaaattcttactttatggatgtaaaatgtccaggttgctacaagatcaccacggttttcagccatgctcagacagtggttctttgtgtaggttgttcaacagtgttgtgccagcctacaggaggaaaggccagactcacagaagggtgttcatttagaagaaagcaacactaatgattcaaacagcttcctgaattttaattttgtgttgtctcacagaaagccttatcataaattccataattctaattaatttaccaagataatgtaattacatttggttttgtaaggtatacagcagtaatctcctattttggtgtcagtttttcaataaagttttgattatgggc

SEQ ID NO: 24538 - protein, 84 aa, Homo sapiens; identical to SEQ ID NO: 3271

SEQ ID NO: 24539 - DNA, 773 bp, Homo sapiens
ccgggggctgagcggcccgccgggttccggggtggcgccggccccggtggccgcgggcgctccctcgccatggcctaagcccgaggccgctccccagccagattctggcctcaggcactgcagagcccgcggcgctcgccaacaagcccgttagacccacgggacttggcaccctggaacgctcaccatccccgggtcttccctgcgccctggacccgagtaccctgctgcggcgtccccctaccaccgagaggagggcctagagcagacaagcccgccccgccgctcctcccagcagcttctatcccggaagttgatgccgagcgcagatcgcttgcagcttgctagctgtgtgggctgggaggtctggtagggctgagcttgcaagaggatcaacatgcctttggctagagatttactacatccgtccttggaagaggaaaagaaaaaacataaaaagaaacgcctagtacaaagtccaaattcttactttatggattggttctttgtgtaggttgttcaacagtgttgtgccagcctacaggaggaaaggccagactcacagaagggtgttcatttagaagaaagcaacactaatgattcaaacagcttcctgaattttaattttgtgttgtctcacagaaagccttatcataaattccataattctaattaatttaccaagataatgtaattacatttggttttgtaaggtatacagcagtaatctcctattttggtgtcagtttttcaataaagttttgattatgggc

SEQ ID NO: 24540 - protein, 38 aa, Homo sapiens; identical to SEQ ID NO: 24522

SEQ ID NO: 24541 - DNA, 531 bp, Homo sapiens
agaacaaagcaaacctaaggcacagccataccccgcagaaaacttcgaaatctgcgccttgaaaagggaagccaaaaggatacgagcctctttcataatctctctgttggctagagatttactacatccgtccttggaagaggaaaagaaaaaacataaaaagaaacgcctagtacaaagtccaaattcttactttatggatgtaaaatgtccaggttgctacaagatcaccacggttttcagccatgctcagacagtggttctttgtgtaggttgttcaacagtgttgtgccagcctacaggaggaaaggccagactcacagaagggtgttcatttagaagaaagcaacactaatgattcaaacagcttcctgaattttaattttgtgttgtctcacagaaagccttatcataaattccataattctaattaatttaccaagataatgtaattacatttggttttgtaaggtatacagcagtaatctcctattttggtgtcagtttttcaataaagttttgattatgggc

SEQ ID NO: 24542 - protein, 52 aa, Homo sapiens; identical to SEQ ID NO: 24524

SEQ ID NO: 24543 - DNA, 1155 bp, Homo sapiens
atcccggaagttgatgccgagcgcagatcgcttgcagcttgctagctgtgtgggctgggaggtctggtagggctgagcttgcaagaggatcaacatgcctttggctagagatttactacatccgtccttggaagaggaaaagaaaaaacataaaaagaaacgcctagtacaaagtccaaattcttactttatggatgtaaaatgtccaggttgctacaagatcaccacggttttcagccatgctcagacagtggttctttgtgtaggttgttcaacagtgttgtgccagcctacaggaggaaaggccagactcacagaaggtatatcatttggcattctccaacccagtgatgagattgatgattataaatgtctctatcttcactgaaaagtttaaagaaatcttaatgattaccaaaataacttatctttcattgtgtgctttcagtaaagaatggcctgttcaaatggatatatttatactcttgaccttgcagtgaactccattgacttatttttcttagtttagaacacatttattcacttagtttgcttaacttggaataaattaagtcagaatagaagcaaaagaataactacatgttataggacatgcagatttatttatttatttatttattattttttttttttattaggagtctcgctctgtcacccaggctggagtgcagtggcgccatctcagctcactgcaacttctgcctccccggttcaagtgattctcttgcctctgcctcccaagtagctgggaccacaggcgcgtgccaccatgcctggctaattttttgtatttttagtagaggtggggtttcactgtgttagccaggatggtcttgatctcctgacctcatggtctgcccgcctcggcctcccaaagtgctgggattacaggcatgagccacctcgccggccaggacatacagatttttaaaaccatatagaattttaaaatttcttttacaaaattttgttccatatatatttagtacatataatagttttttttttatcattgccagctaagcaacagatagctaatatataagttaaaatgccagagattttacttttatgagcaactgcaatgattaatataaaaacctaattttaattcctctttcactttagtgcaat

SEQ ID NO: 24544 - protein, 97 aa, Homo sapiens
MPLARDLLHPSLEEEKKKHKKKRLVQSPNSYFMDVKCPGCYKITTVFSHAQTVVLCVGCSTVLCQPTGGKARLTEGISFGILQPSDEIDDYKCLYLH

SEQ ID NO: 24545 - DNA, 1246 bp, Homo sapiens
gggcggggcgcgcaggccttctccgagaggaggggcggggcgtggggcggggcgagcagcggcggattggcgggcacgccccctcgcccgcggccccctccccgcctctctccaccgcctcctctggctccccggtcagagggccggagcgagaagatggcgaagacgtacgattatctcttcaagctcctgctgatcggcgactcgggggtaggcaagacctgcctcctgttccgcttctcagaggacgccttcaacaccaccttcatctccaccatcggaattgattttaaaattagaacgatagaactagatggaaagaaaattaagcttcagatatgggacacagcgggtcaggaaagattccgaacaatcacgacagcgtactacagaggagccatgggcattatgctggtctatgacatcacaaatgaaaaatcctttgacaatattaaaaattggatcagaaacattgaagagcatgcctcttccgatgtcgaaagaatgatcctgggtaacaaatgtgatatgaatgacaaaagacaagtgtcaaaagaaagaggggagaagctagcaattgactatgggattaaattcttggagacaagcgcaaaatccagtgcaaatgtagaagaggcattttttacacttgcacgagatataatgacaaaactcaacagaaaaatgaatgacagcaattcagcaggagcaggtggaccagtgaaaataacagaaaaccgatcaaagaagaccagtttctttcgttgctcgctactttgatgaactctttctgagagactgcagcacacctagagggccctttcctgcttctctgaaagcacaggtcacccagcctcagaatcacacctcccggctgctgctgagagcaccactgaacttagacctctcaacacagtatgccaagtggattccagcctcatggcctagcaaaagaacagactccctttttcaaacatggaagcaatgaagtggagacacatgcaggacctaactcgttttttccttgttttattacctgttgcagaagcggttatctttcttttttactttgcacatcagtgttagcctttccctatttcagcacaatcttagactcatatttgcacacttttgtgtcgtgaagttctagacaaatttgtacatgtggcaatgttaaaagagcatttacagcagaggttaatatactaaaattaaagggtatttggtctggttcatatggtcaaat

SEQ ID NO: 24546 - protein, 207 aa, Homo sapiens; identical to SEQ ID NO: 3273

SEQ ID NO: 24547 - DNA, 3206 bp, Homo sapiens
gggcggggcgcgcaggccttctccgagaggaggggcggggcgtggggcggggcgagcagcggcggattggcgggcacgccccctcgcccgcggccccctccccgcctctctccaccgcctcctctggctccccggtcagagggccggagcgagaagatggcgaagacgtacgattatctcttcaagctcctgctgatcggcgactcgggggtaggcaagacctgcctcctgttccgcttctcagaggacgccttcaacaccaccttcatctccaccatcggaattgattttaaaattagaacgatagaactagatggaaagaaaattaagcttcagatatgggacacagcgggtcaggaaagattccgaacaatcacgacagcgtactacagaggagccatgggcattatgctggtctatgacatcacaaatgaaaaatcctttgacaatattaaaaattggatcagaaacattgaagagcatgcctcttccgatgtcgaaagaatgatcctgggtaacaaatgtgatatgaatgacaaaagacaagtgtcaaaagaaagaggggagaagctagcaattgactatgggattaaattcttggagacaagcgcaaaatccagtgcaaatgtagaagaggcattttttacacttgcacgagatataatgacaaaactcaacagaaaaatgaatgacagcaattcagcaggagcaggtggaccagtgaaaataacagaaaaccgatcaaagaagaccagtttctttcgttgctcgctactttgatgaactctttctgagagactgcagcacacctagagggccctttcctgcttctctgaaagcacaggtcacccagcctcagaatcacacctcccggctgctgctgagagcaccactgaacttagacctctcaacacagtatgccaagtggattccagcctcatggcctagcaaaagaacagactccctttttcaaacatggaagcaatgaagtggagacacatgcaggacctaactcgttttttccttgttttattacctgttgcagaagcggttatctttcttttttactttgcacatcagtgttagcctttccctatttcagcacaatcttagactcatatttgcacacttttgtgtcgtgaagttctagacaaatttgtacatgtggcaatgttaaaagagcatttacagcagaggttaatatactaaaattaaagggtatttggtctggttcatatggtcaaatattactgccttggtagcatttatttaagggctttttcttaaataagaatcattaaagtcattaaaaaaatttactgaaatgcccatcttgtcatcaaaggccacaatttctttatttcttcagattaagagctttgcctcatccccgacctgttttccagagtctgggtagctgaatgaatcactttaaaatgattacctctgcctaatctatagaaactgcatttggaaatcaccataatctcatttttccctggggtttgtatttgctattctttcccatgtttgacttaagtgtaatcactcttaagtaatatttgaacattattatctgtttctatttgtgaacttcttgagctgaaattttacgtgggctgagagatataccatttagggttttagtgcagcatctaactgtgattctgtcaataaggatatgtaatatattttttcttaggttcactccttagctggctggtttagttgtaataccaaattcctaccataatccctgtctacaaaagttaggtttagattttagtttgcggaaaccttccctatatagagacagattaacttgttgatataaatttaatagagctagctcttggtaatggtgaaaataatgagttttggttggttttatttggcagatgtttttagaaataaaagtacttagacctagtgcagcctctaggaaaagtcttgccttttcattagagaaaacaggaccaaggtttcagttttcaaacagctgttgttgattgtgtagaacccagttccatctgttttggttcattgttacagaacttagtccagtcatttgggctaaagccaaccaaaagcttagttgcctttctcaacaaacactggtactggtatacttttgtagatgaaaccatcacaaggtatttagtgttaacttgtgtgccaaattcagatcactatgtcgttgttgctctagccttcagtgtcataacacaggggggataaaacagaggggatgagggaaatgaattctgttaataattattcttcctggtatgcctgttttgcttcacaaaggctactatcatgctggatagataagaacaggagatggcagtggaaagggattgcttgttaccacagagaattctcttcaaattaagatatgtcattagaatgcttggaccagtcaatcttttgtacttatttgaaaatataggaacaatttagcagctgcaaatatgcccaagctatttttaatagatatactaaacttattgttgacaaatttcagcctccttaatttttttttttttggtaattacctataggcttaaaagtcattcgttgctgttctagtataattagtagttccgtgattgaaagtttattgtaattctactatcttcaaattagatacattttcaaaaggaaaagataattttttagaaacatcttaatattcactatttcctgaaaaaatccaagcagttaacgctttctggatggtaacaaagtaccttctaaaagataagtgctatgacaccatgtatgaatgtaattctcttagtaatttacctctgactatttggtgtcttaacgctttggtttatataatctcaggggttgtctgcaaaccaaaactgacatattctgtggttagcttttattacttttttttttaacagaatgctttgctttggttatatttcttctttcttcttttgtcttatatggattaataactagtctccatgaacttcacttgaaagagcctgtaaaagttagatgagtctaaaagtgctctttgaagtagcagcaaattgggagtatatgctctgttatatagaaataaattgtccttgctattttcttacatttagctttgctagattgtatatacattgagctaagaccttaggaaattcactttctgcatgataaaatgacccaataaatattccactttgctt

SEQ ID NO: 24548 - protein, 207 aa, Homo sapiens; identical to SEQ ID NO: 3273

SEQ ID NO: 24549 - DNA, 4941 bp, Homo sapiens
gggcggggcgcgcaggccttctccgagaggaggggcggggcgtggggcggggcgagcagcggcggattggcgggcacgccccctcgcccgcggccccctccccgcctctctccaccgcctcctctggctccccggtcagagggccggagcgagaagatggcgaagacgtacgattatctcttcaagctcctgctgatcggcgactcgggggtaggcaagacctgcctcctgttccgcttctcagaggacgccttcaacaccaccttcatctccaccatcggaattgattttaaaattagaacgatagaactagatggaaagaaaattaagcttcagatatgggacacagcgggtcaggaaagattccgaacaatcacgacagcgtactacagaggagccatgggcattatgctggtctatgacatcacaaatgaaaaatcctttgacaatattaaaaattggatcagaaacattgaagagcatgcctcttccgatgtcgaaagaatgatcctgggtaacaaatgtgatatgaatgacaaaagacaagtgtcaaaagaaagaggggagaagctagcaattgactatgggattaaattcttggagacaagcgcaaaatccagtgcaaatgtagaagaggcattttttacacttgcacgagatataatgacaaaactcaacagaaaaatgaatgacagcaattcagcaggagcaggtggaccagtgaaaataacagaaaaccgatcaaagaagaccagtttctttcgttgctcgctactttgatgaactctttctgagagactgcagcacacctagagggccctttcctgcttctctgaaagcacaggtcacccagcctcagaatcacacctcccggctgctgctgagagcaccactgaacttagacctctcaacacagtatgccaagtggattccagcctcatggcctagcaaaagaacagactccctttttcaaacatggaagcaatgaagtggagacacatgcaggacctaactcgttttttccttgttttattacctgttgcagaagcggttatctttcttttttactttgcacatcagtgttagcctttccctatttcagcacaatcttagactcatatttgcacacttttgtgtcgtgaagttctagacaaatttgtacatgtggcaatgttaaaagagcatttacagcagaggttaatatactaaaattaaagggtatttggtctggttcatatggtcaaatattactgccttggtagcatttatttaagggctttttcttaaataagaatcattaaagtcattaaaaaaatttactgaaatgcccatcttgtcatcaaaggccacaatttctttatttcttcagattaagagctttgcctcatccccgacctgttttccagagtctgggtagctgaatgaatcactttaaaatgattacctctgcctaatctatagaaactgcatttggaaatcaccataatctcatttttccctggggtttgtatttgctattctttcccatgtttgacttaagtgtaatcactcttaagtaatatttgaacattattatctgtttctatttgtgaacttcttgagctgaaattttacgtgggctgagagatataccatttagggttttagtgcagcatctaactgtgattctgtcaataaggatatgtaatatattttttcttaggttcactccttagctggctggtttagttgtaataccaaattcctaccataatccctgtctacaaaagttaggtttagattttagtttgcggaaaccttccctatatagagacagattaacttgttgatataaatttaatagagctagctcttggtaatggtgaaaataatgagttttggttggttttatttggcagatgtttttagaaataaaagtacttagacctagtgcagcctctaggaaaagtcttgccttttcattagagaaaacaggaccaaggtttcagttttcaaacagctgttgttgattgtgtagaacccagttccatctgttttggttcattgttacagaacttagtccagtcatttgggctaaagccaaccaaaagcttagttgcctttctcaacaaacactggtactggtatacttttgtagatgaaaccatcacaaggtatttagtgttaacttgtgtgccaaattcagatcactatgtcgttgttgctctagccttcagtgtcataacacaggggggataaaacagaggggatgagggaaatgaattctgttaataattattcttcctggtatgcctgttttgcttcacaaaggctactatcatgctggatagataagaacaggagatggcagtggaaagggattgcttgttaccacagagaattctcttcaaattaagatatgtcattagaatgcttggaccagtcaatcttttgtacttatttgaaaatataggaacaatttagcagctgcaaatatgcccaagctatttttaatagatatactaaacttattgttgacaaatttcagcctccttaatttttttttttttggtaattacctataggcttaaaagtcattcgttgctgttctagtataattagtagttccgtgattgaaagtttattgtaattctactatcttcaaattagatacattttcaaaaggaaaagataattttttagaaacatcttaatattcactatttcctgaaaaaatccaagcagttaacgctttctggatggtaacaaagtaccttctaaaagataagtgctatgacaccatgtatgaatgtaattctcttagtaatttacctctgactatttggtgtcttaacgctttggtttatataatctcaggggttgtctgcaaaccaaaactgacatattctgtggttagcttttattacttttttttttaacagaatgctttgctttggttatatttcttctttcttcttttgtcttatatggattaataactagtctccatgaacttcacttgaaagagcctgtaaaagttagatgagtctaaaagtgctctttgaagtagcagcaaattgggagtatatgctctgttatatagaaataaattgtccttgctattttcttacatttagctttgctagattgtatatacattgagctaagaccttaggaaattcactttctgcatgataaaatgacccaataaatattccactttgcttaataatgtacatacagtgcattattttttctatttgtagatgaatttaatgacagataattgtctgttccccgctgaaactgaagaaatctagtttttttgtgaacatttttgtggtcttatggataaggtacatgaagatttttgcagcagtattagtggttcagtggctgcactttattaatcagtgtgttaatttttgacagtgattggactagaccttttcaaatagagtctgagggtatcagacagtgaaaatgtgctgtaactaagtagcatgtaaatcagttgattgtaaaacgtttcgctgggaacttattttagctatattttacttcagacagattatgatacaataatctacctgtgcatcagttagtaggtgctgcagggtttcttactatttacagaaacattttgtgcagtctttgttataaattttcagaagactatactctttactttgaaggtctattttttaattatacctcatttagctaactagtattctaatacctggtagaaaaacagtgagccagcctttaagcatctaacaaaatttagactctttgttttgttttgaactgaagacatcattgggaaaggtaggaaatattagtttaggatagagcatacatgtcatatccagtagcataaaaaaagtattatctccctgtctccattaataaatttagctgtgcaatataggtgcgtttttgcagaagtttctagtaagagattataactccattttacaggttctgaatgctcagagtctatattaaggcttataaagtttttcctgtgatcagtaagtgacacatttaagcagacattcttttcaagttcatgacttagattcctttacaaatttagttctcaatctttaaaaaccacatttcattatgttggttaattattataaattttaagcactcatttctgcaatcaggtttctcagaattttttttttttaaacagaagagacattcctttttccttgttacatccaaggggggcacaggggtgggtggaaaggaatgtctaaaaatgaaatcccttgatatagagggacctagacggacaggatatgctaaaataatttcaaattctagcacaattttagagtagaataagtcatttttttagactaataaaattaatggctgtcatgttcactctgaaaaaaatctaaatgactgaaatgtacagaaataaaaattagcaaacaattattctagggatattttcagattttacttcatttcttgaaatgcgtgtgccatatgcaattgcatttcttgtgccaagaaactaatagaacttatttcactttacctttttttaaaatgtgaatttagttattatagttcaattttatggccttacagatggcttttattttgtttgcagctgacactgcagttcctttcatgcaaaataccataaactgtttgatgaaaatcatgcccctaatggaaactctctagtttttccatataactatcctactgtacatgtttaaacatattttatttttgctccaatggcttaatgtgaaaagctcctgcagataagtggacctgtcatgtggttaatcttgtttaagccaattcattaactgtgtactgatactgatgctatgttttttttaaatggattttattccaggtgaactttttttttataataatgttcgtctaaaataaaaactacataatgaaaatgaaaatgct

SEQ ID NO: 24550 - protein, 207 aa, Homo sapiens; identical to SEQ ID NO: 3273

SEQ ID NO: 24551 - DNA, 3321 bp, Homo sapiens
ctggctccccggtcagagggccggagcgagaagatggcgaagacgtacgattatctcttcaagctcctgctgatcggcgactcgggggtaggcaagacctgcctcctgttccgcttctcagaggacgccttcaacaccaccttcatctccaccatcggaattgattttaaaattagaacgatagaactagatggaaagaaaattaagcttcagatatgggacacagcgggtcaggaaagattccgaacaatcacgacagcgtactacagaggagccatgggcattatgctggtctatgacatcacaaatgaaaaatcctttgacaatatcttgccttttcattagagaaaacaggaccaaggtttcagttttcaaacagctgttgttgattgtgtagaacccagttccatctgttttggttcattgttacagaacttagtccagtcatttgggctaaagccaaccaaaagcttagttgcctttctcaacaaacactggtactggtatacttttgtagatgaaaccatcacaaggtatttagtgttaacttgtgtgccaaattcagatcactatgtcgttgttgctctagccttcagtgtcataacacaggggggataaaacagaggggatgagggaaatgaattctgttaataattattcttcctggtatgcctgttttgcttcacaaaggctactatcatgctggatagataagaacaggagatggcagtggaaagggattgcttgttaccacagagaattctcttcaaattaagatatgtcattagaatgcttggaccagtcaatcttttgtacttatttgaaaatataggaacaatttagcagctgcaaatatgcccaagctatttttaatagatatactaaacttattgttgacaaatttcagcctccttaatttttttttttttggtaattacctataggcttaaaagtcattcgttgctgttctagtataattagtagttccgtgattgaaagtttattgtaattctactatcttcaaattagatacattttcaaaaggaaaagataattttttagaaacatcttaatattcactatttcctgaaaaaatccaagcagttaacgctttctggatggtaacaaagtaccttctaaaagataagtgctatgacaccatgtatgaatgtaattctcttagtaatttacctctgactatttggtgtcttaacgctttggtttatataatctcaggggttgtctgcaaaccaaaactgacatattctgtggttagcttttattacttttttttttaacagaatgctttgctttggttatatttcttctttcttcttttgtcttatatggattaataactagtctccatgaacttcacttgaaagagcctgtaaaagttagatgagtctaaaagtgctctttgaagtagcagcaaattgggagtatatgctctgttatatagaaataaattgtccttgctattttcttacatttagctttgctagattgtatatacattgagctaagaccttaggaaattcactttctgcatgataaaatgacccaataaatattccactttgcttaataatgtacatacagtgcattattttttctatttgtagatgaatttaatgacagataattgtctgttccccgctgaaactgaagaaatctagtttttttgtgaacatttttgtggtcttatggataaggtacatgaagatttttgcagcagtattagtggttcagtggctgcactttattaatcagtgtgttaatttttgacagtgattggactagaccttttcaaatagagtctgagggtatcagacagtgaaaatgtgctgtaactaagtagcatgtaaatcagttgattgtaaaacgtttcgctgggaacttattttagctatattttacttcagacagattatgatacaataatctacctgtgcatcagttagtaggtgctgcagggtttcttactatttacagaaacattttgtgcagtctttgttataaattttcagaagactatactctttactttgaaggtctattttttaattatacctcatttagctaactagtattctaatacctggtagaaaaacagtgagccagcctttaagcatctaacaaaatttagactctttgttttgttttgaactgaagacatcattgggaaaggtaggaaatattagtttaggatagagcatacatgtcatatccagtagcataaaaaaagtattatctccctgtctccattaataaatttagctgtgcaatataggtgcgtttttgcagaagtttctagtaagagattataactccattttacaggttctgaatgctcagagtctatattaaggcttataaagtttttcctgtgatcagtaagtgacacatttaagcagacattcttttcaagttcatgacttagattcctttacaaatttagttctcaatctttaaaaaccacatttcattatgttggttaattattataaattttaagcactcatttctgcaatcaggtttctcagaattttttttttttaaacagaagagacattcctttttccttgttacatccaaggggggcacaggggtgggtggaaaggaatgtctaaaaatgaaatcccttgatatagagggacctagacggacaggatatgctaaaataatttcaaattctagcacaattttagagtagaataagtcatttttttagactaataaaattaatggctgtcatgttcactctgaaaaaaatctaaatgactgaaatgtacagaaataaaaattagcaaacaattattctagggatattttcagattttacttcatttcttgaaatgcgtgtgccatatgcaattgcatttcttgtgccaagaaactaatagaacttatttcactttacctttttttaaaatgtgaatttagttattatagttcaattttatggccttacagatggcttttattttgtttgcagctgacactgcagttcctttcatgcaaaataccataaactgtttgatgaaaatcatgcccctaatggaaactctctagtttttccatataactatcctactgtacatgtttaaacatattttatttttgctccaatggcttaatgtgaaaagctcctgcagataagtggacctgtcatgtggttaatcttgtttaagccaattcattaactgtgtactgatactgatgctatgttttttttaaatggattttattccaggtgaactttttttttataataatgttcgtctaaaataaaaactacataatgaaaatgaaaatgct

SEQ ID NO: 24552 - protein, 103 aa, Homo sapiens
MAKTYDYLFKLLLIGDSGVGKTCLLFRFSEDAFNTTFISTIGIDFKIRTIELDGKKIKLQIWDTAGQERFRTITTAYYRGAMGIMLVYDITNEKSFDNILPFH

SEQ ID NO: 24553 - DNA, 1176 bp, Homo sapiens
ggctccccggtcagagggccggagcgagaagatggcgaagacgtacgattatctcttcaagctcctgctgatcggcgactcgggggtaggcaagacctgcctcctgttccgcttctcagaggacgccttcaacaccaccttcatctccaccatcggaattgattttaaaattagaacgatagaactagatggaaagaaaattaagcttcagatatgggacacagcgggtcaggaaagattccgaacaatcacgacagcgtactacagaggagccatggaaggaattttagggataaaaagaacatcataacagggatgatttggaatagtttacagggcattatgctggtctatgacatcacaaatgaaaaatcctttgacaatattaaaaattggatcagaaacattgaagagcatgcctcttccgatgtcgaaagaatgatcctgggtaacaaatgtgatatgaatgacaaaagacaagtgtcaaaagaaagaggggagaagctagcaattgactatgggattaaattcttggagacaagcgcaaaatccagtgcaaatgtagaagaggcattttttacacttgcacgagatataatgacaaaactcaacagaaaaatgaatgacagcaattcagcaggagcaggtggaccagtgaaaataacagaaaaccgatcaaagaagaccagtttctttcgttgctcgctactttgatgaactctttctgagagactgcagcacacctagagggccctttcctgcttctctgaaagcacaggtcacccagcctcagaatcacacctcccggctgctgctgagagcaccactgaacttagacctctcaacacagtatgccaagtggattccagcctcatggcctagcaaaagaacagactccctttttcaaacatggaagcaatgaagtggagacacatgcaggacctaactcgttttttccttgttttattacctgttgcagaagcggttatctttcttttttactttgcacatcagtgttagcctttccctatttcagcacaatcttagactcatatttgcacacttttgtgtcgtgaagttctagacaaatttgtacatgtggcaatgttaaaagagcatttacagcagaggttaatatactaaaattaaagggtatttggtctggttcatatggtc

SEQ ID NO: 24554 - protein, 166 aa, Homo sapiens
MGHSGSGKIPNNHDSVLQRSHGRNFRDKKNIITGMIWNSLQGIMLVYDITNEKSFDNIKNWIRNIEEHASSDVERMILGNKCDMNDKRQVSKERGEKLAIDYGIKFLETSAKSSANVEEAFFTLARDIMTKLNRKMNDSNSAGAGGPVKITENRSKKTSFFRCSLL

SEQ ID NO: 24555 - DNA, 4875 bp, Homo sapiens
ggctccccggtcagagggccggagcgagaagatggcgaagacgtacgattatctcttcaagctcctgctgatcggcgactcgggggtaggcaagacctgcctcctgttccgcttctcagaggacgccttcaacaccaccttcatctccaccatcggaattgattttaaaattagaacgatagaactagatggaaagaaaattaagcttcagatatgggacacagcgggtcaggaaagattccgaacaatcacgacagcgtactacagaggagccatggaaggaattttagggataaaaagaacatcataacagggatgatttggaatagtttacagggcattatgctggtctatgacatcacaaatgaaaaatcctttgacaatattaaaaattggatcagaaacattgaagagcatgcctcttccgatgtcgaaagaatgatcctgggtaacaaatgtgatatgaatgacaaaagacaagtgtcaaaagaaagaggggagaagctagcaattgactatgggattaaattcttggagacaagcgcaaaatccagtgcaaatgtagaagaggcattttttacacttgcacgagatataatgacaaaactcaacagaaaaatgaatgacagcaattcagcaggagcaggtggaccagtgaaaataacagaaaaccgatcaaagaagaccagtttctttcgttgctcgctactttgatgaactctttctgagagactgcagcacacctagagggccctttcctgcttctctgaaagcacaggtcacccagcctcagaatcacacctcccggctgctgctgagagcaccactgaacttagacctctcaacacagtatgccaagtggattccagcctcatggcctagcaaaagaacagactccctttttcaaacatggaagcaatgaagtggagacacatgcaggacctaactcgttttttccttgttttattacctgttgcagaagcggttatctttcttttttactttgcacatcagtgttagcctttccctatttcagcacaatcttagactcatatttgcacacttttgtgtcgtgaagttctagacaaatttgtacatgtggcaatgttaaaagagcatttacagcagaggttaatatactaaaattaaagggtatttggtctggttcatatggtcaaatattactgccttggtagcatttatttaagggctttttcttaaataagaatcattaaagtcattaaaaaaatttactgaaatgcccatcttgtcatcaaaggccacaatttctttatttcttcagattaagagctttgcctcatccccgacctgttttccagagtctgggtagctgaatgaatcactttaaaatgattacctctgcctaatctatagaaactgcatttggaaatcaccataatctcatttttccctggggtttgtatttgctattctttcccatgtttgacttaagtgtaatcactcttaagtaatatttgaacattattatctgtttctatttgtgaacttcttgagctgaaattttacgtgggctgagagatataccatttagggttttagtgcagcatctaactgtgattctgtcaataaggatatgtaatatattttttcttaggttcactccttagctggctggtttagttgtaataccaaattcctaccataatccctgtctacaaaagttaggtttagattttagtttgcggaaaccttccctatatagagacagattaacttgttgatataaatttaatagagctagctcttggtaatggtgaaaataatgagttttggttggttttatttggcagatgtttttagaaataaaagtacttagacctagtgcagcctctaggaaaagtcttgccttttcattagagaaaacaggaccaaggtttcagttttcaaacagctgttgttgattgtgtagaacccagttccatctgttttggttcattgttacagaacttagtccagtcatttgggctaaagccaaccaaaagcttagttgcctttctcaacaaacactggtactggtatacttttgtagatgaaaccatcacaaggtatttagtgttaacttgtgtgccaaattcagatcactatgtcgttgttgctctagccttcagtgtcataacacaggggggataaaacagaggggatgagggaaatgaattctgttaataattattcttcctggtatgcctgttttgcttcacaaaggctactatcatgctggatagataagaacaggagatggcagtggaaagggattgcttgttaccacagagaattctcttcaaattaagatatgtcattagaatgcttggaccagtcaatcttttgtacttatttgaaaatataggaacaatttagcagctgcaaatatgcccaagctatttttaatagatatactaaacttattgttgacaaatttcagcctccttaatttttttttttttggtaattacctataggcttaaaagtcattcgttgctgttctagtataattagtagttccgtgattgaaagtttattgtaattctactatcttcaaattagatacattttcaaaaggaaaagataattttttagaaacatcttaatattcactatttcctgaaaaaatccaagcagttaacgctttctggatggtaacaaagtaccttctaaaagataagtgctatgacaccatgtatgaatgtaattctcttagtaatttacctctgactatttggtgtcttaacgctttggtttatataatctcaggggttgtctgcaaaccaaaactgacatattctgtggttagcttttattacttttttttttaacagaatgctttgctttggttatatttcttctttcttcttttgtcttatatggattaataactagtctccatgaacttcacttgaaagagcctgtaaaagttagatgagtctaaaagtgctctttgaagtagcagcaaattgggagtatatgctctgttatatagaaataaattgtccttgctattttcttacatttagctttgctagattgtatatacattgagctaagaccttaggaaattcactttctgcatgataaaatgacccaataaatattccactttgcttaataatgtacatacagtgcattattttttctatttgtagatgaatttaatgacagataattgtctgttccccgctgaaactgaagaaatctagtttttttgtgaacatttttgtggtcttatggataaggtacatgaagatttttgcagcagtattagtggttcagtggctgcactttattaatcagtgtgttaatttttgacagtgattggactagaccttttcaaatagagtctgagggtatcagacagtgaaaatgtgctgtaactaagtagcatgtaaatcagttgattgtaaaacgtttcgctgggaacttattttagctatattttacttcagacagattatgatacaataatctacctgtgcatcagttagtaggtgctgcagggtttcttactatttacagaaacattttgtgcagtctttgttataaattttcagaagactatactctttactttgaaggtctattttttaattatacctcatttagctaactagtattctaatacctggtagaaaaacagtgagccagcctttaagcatctaacaaaatttagactctttgttttgttttgaactgaagacatcattgggaaaggtaggaaatattagtttaggatagagcatacatgtcatatccagtagcataaaaaaagtattatctccctgtctccattaataaatttagctgtgcaatataggtgcgtttttgcagaagtttctagtaagagattataactccattttacaggttctgaatgctcagagtctatattaaggcttataaagtttttcctgtgatcagtaagtgacacatttaagcagacattcttttcaagttcatgacttagattcctttacaaatttagttctcaatctttaaaaaccacatttcattatgttggttaattattataaattttaagcactcatttctgcaatcaggtttctcagaattttttttttttaaacagaagagacattcctttttccttgttacatccaaggggggcacaggggtgggtggaaaggaatgtctaaaaatgaaatcccttgatatagagggacctagacggacaggatatgctaaaataatttcaaattctagcacaattttagagtagaataagtcatttttttagactaataaaattaatggctgtcatgttcactctgaaaaaaatctaaatgactgaaatgtacagaaataaaaattagcaaacaattattctagggatattttcagattttacttcatttcttgaaatgcgtgtgccatatgcaattgcatttcttgtgccaagaaactaatagaacttatttcactttacctttttttaaaatgtgaatttagttattatagttcaattttatggccttacagatggcttttattttgtttgcagctgacactgcagttcctttcatgcaaaataccataaactgtttgatgaaaatcatgcccctaatggaaactctctagtttttccatataactatcctactgtacatgtttaaacatattttatttttgctccaatggcttaatgtgaaaagctcctgcagataagtggacctgtcatgtggttaatcttgtttaagccaattcattaactgtgtactgatactgatgctatgttttttttaaatggattttattccaggtgaactttttttttataataatgttcgtctaaaataaaaactacataatgaaaatgaaaatgct

SEQ ID NO: 24556 - protein, 166 aa, Homo sapiens; identical to SEQ ID NO: 24554

SEQ ID NO: 24557 - DNA, 4217 bp, Homo sapiens
agagggccggagcgagaagatggcgaagacgtacgattatctcttcaagctcctgctgatcggcgactcgggggtaggcaagacctgcctcctgttccgcttctcagaggacgccttcaacaccaccttcatctccaccatcggaattgattttaaaattagaacgatagaactagatggaaagaaaattaagcttcagatatgggacacagcgggtcaggaaagattccgaacaactccctttttcaaacatggaagcaatgaagtggagacacatgcaggacctaactcgttttttccttgttttattacctgttgcagaagcggttatctttcttttttactttgcacatcagtgttagcctttccctatttcagcacaatcttagactcatatttgcacacttttgtgtcgtgaagttctagacaaatttgtacatgtggcaatgttaaaagagcatttacagcagaggttaatatactaaaattaaagggtatttggtctggttcatatggtcaaatattactgccttggtagcatttatttaagggctttttcttaaataagaatcattaaagtcattaaaaaaatttactgaaatgcccatcttgtcatcaaaggccacaatttctttatttcttcagattaagagctttgcctcatccccgacctgttttccagagtctgggtagctgaatgaatcactttaaaatgattacctctgcctaatctatagaaactgcatttggaaatcaccataatctcatttttccctggggtttgtatttgctattctttcccatgtttgacttaagtgtaatcactcttaagtaatatttgaacattattatctgtttctatttgtgaacttcttgagctgaaattttacgtgggctgagagatataccatttagggttttagtgcagcatctaactgtgattctgtcaataaggatatgtaatatattttttcttaggttcactccttagctggctggtttagttgtaataccaaattcctaccataatccctgtctacaaaagttaggtttagattttagtttgcggaaaccttccctatatagagacagattaacttgttgatataaatttaatagagctagctcttggtaatggtgaaaataatgagttttggttggttttatttggcagatgtttttagaaataaaagtacttagacctagtgcagcctctaggaaaagtcttgccttttcattagagaaaacaggaccaaggtttcagttttcaaacagctgttgttgattgtgtagaacccagttccatctgttttggttcattgttacagaacttagtccagtcatttgggctaaagccaaccaaaagcttagttgcctttctcaacaaacactggtactggtatacttttgtagatgaaaccatcacaaggtatttagtgttaacttgtgtgccaaattcagatcactatgtcgttgttgctctagccttcagtgtcataacacaggggggataaaacagaggggatgagggaaatgaattctgttaataattattcttcctggtatgcctgttttgcttcacaaaggctactatcatgctggatagataagaacaggagatggcagtggaaagggattgcttgttaccacagagaattctcttcaaattaagatatgtcattagaatgcttggaccagtcaatcttttgtacttatttgaaaatataggaacaatttagcagctgcaaatatgcccaagctatttttaatagatatactaaacttattgttgacaaatttcagcctccttaatttttttttttttggtaattacctataggcttaaaagtcattcgttgctgttctagtataattagtagttccgtgattgaaagtttattgtaattctactatcttcaaattagatacattttcaaaaggaaaagataattttttagaaacatcttaatattcactatttcctgaaaaaatccaagcagttaacgctttctggatggtaacaaagtaccttctaaaagataagtgctatgacaccatgtatgaatgtaattctcttagtaatttacctctgactatttggtgtcttaacgctttggtttatataatctcaggggttgtctgcaaaccaaaactgacatattctgtggttagcttttattacttttttttttaacagaatgctttgctttggttatatttcttctttcttcttttgtcttatatggattaataactagtctccatgaacttcacttgaaagagcctgtaaaagttagatgagtctaaaagtgctctttgaagtagcagcaaattgggagtatatgctctgttatatagaaataaattgtccttgctattttcttacatttagctttgctagattgtatatacattgagctaagaccttaggaaattcactttctgcatgataaaatgacccaataaatattccactttgcttaataatgtacatacagtgcattattttttctatttgtagatgaatttaatgacagataattgtctgttccccgctgaaactgaagaaatctagtttttttgtgaacatttttgtggtcttatggataaggtacatgaagatttttgcagcagtattagtggttcagtggctgcactttattaatcagtgtgttaatttttgacagtgattggactagaccttttcaaatagagtctgagggtatcagacagtgaaaatgtgctgtaactaagtagcatgtaaatcagttgattgtaaaacgtttcgctgggaacttattttagctatattttacttcagacagattatgatacaataatctacctgtgcatcagttagtaggtgctgcagggtttcttactatttacagaaacattttgtgcagtctttgttataaattttcagaagactatactctttactttgaaggtctattttttaattatacctcatttagctaactagtattctaatacctggtagaaaaacagtgagccagcctttaagcatctaacaaaatttagactctttgttttgttttgaactgaagacatcattgggaaaggtaggaaatattagtttaggatagagcatacatgtcatatccagtagcataaaaaaagtattatctccctgtctccattaataaatttagctgtgcaatataggtgcgtttttgcagaagtttctagtaagagattataactccattttacaggttctgaatgctcagagtctatattaaggcttataaagtttttcctgtgatcagtaagtgacacatttaagcagacattcttttcaagttcatgacttagattcctttacaaatttagttctcaatctttaaaaaccacatttcattatgttggttaattattataaattttaagcactcatttctgcaatcaggtttctcagaattttttttttttaaacagaagagacattcctttttccttgttacatccaaggggggcacaggggtgggtggaaaggaatgtctaaaaatgaaatcccttgatatagagggacctagacggacaggatatgctaaaataatttcaaattctagcacaattttagagtagaataagtcatttttttagactaataaaattaatggctgtcatgttcactctgaaaaaaatctaaatgactgaaatgtacagaaataaaaattagcaaacaattattctagggatattttcagattttacttcatttcttgaaatgcgtgtgccatatgcaattgcatttcttgtgccaagaaactaatagaacttatttcactttacctttttttaaaatgtgaatttagttattatagttcaattttatggccttacagatggcttttattttgtttgcagctgacactgcagttcctttcatgcaaaataccataaactgtttgatgaaaatcatgcccctaatggaaactctctagtttttccatataactatcctactgtacatgtttaaacatattttatttttgctccaatggcttaatgtgaaaagctcctgcagataagtggacctgtcatgtggttaatcttgtttaagccaattcattaactgtgtactgatactgatgctatgttttttttaaatggattttattccaggtgaactttttttttataataatgttcgtctaaaataaaaactacataatgaaaatgaaaatgct

SEQ ID NO: 24558 - protein, 132 aa, Homo sapiens
MAKTYDYLFKLLLIGDSGVGKTCLLFRFSEDAFNTTFISTIGIDFKIRTIELDGKKIKLQIWDTAGQERFRTTPFFKHGSNEVETHAGPNSFFPCFITCCRSGYLSFLLCTSVLAFPYFSTILDSYLHTFVS

SEQ ID NO: 24559 - DNA, 434 bp, Homo sapiens
catttggaaggtaaaccttttagaaataccagacatgggtgggattacaggtgtgaggcaccatgcccagccacattttgtttttcaatctgactgtgaacttttgctgcaaacttttttcccctaaaaacatttacttaattttagcattgtaaatgaactaggaactttttgaggaatatataagagttcgcaatttgtctcaatcaatagaaatcaaagcatgaatactttagtatttaagtttttgttcaattctggactcatttattaaaattaattaaggcctggcgcagtggctcccaaagtgctgggattacaggcgtgagccaccacacccggcctaaaagtcaatacagtaactgttggagaattaaactttgggagcagataaaaggagtgaatgaatcccaagataatggtagttttaccag

SEQ ID NO: 24560 - protein, 30 aa, Homo sapiens [sequence omitted]

SEQ ID NO: 24561 - DNA, 3408 bp, Homo sapiens
ctcgttttttccttgttttattacctgttgcagaagcggttatctttcttttttactttgcacatcagtgttagcctttccgtgggctgagagatataccatttagggttttagtgcagcatctaactgtgattctgtcaataaggatatgtaatatattttttcttaggttcactccttagctggctggtttagttgtaataccaaattcctaccataatccctgtctacaaaagttaggtttagattttagtttgcggaaaccttccctatatagagacagattaacttgttgatataaatttaatagagctagctcttggtaatggtgaaaataatgagttttggttggttttatttggcagatgtttttagaaataaaagtacttagacctagtgcagcctctaggaaaagtcttgccttttcattagagaaaacaggaccaaggtttcagttttcaaacagctgttgttgattgtgtagaacccagttccatctgttttggttcattgttacagaacttagtccagtcatttgggctaaagccaaccaaaagcttagttgcctttctcaacaaacactggtactggtatacttttgtagatgaaaccatcacaaggtatttagtgttaacttgtgtgccaaattcagatcactatgtcgttgttgctctagccttcagtgtcataacacaggggggataaaacagaggggatgagggaaatgaattctgttaataattattcttcctggtatgcctgttttgcttcacaaaggctactatcatgctggatagataagaacaggagatggcagtggaaagggattgcttgttaccacagagaattctcttcaaattaagatatgtcattagaatgcttggaccagtcaatcttttgtacttatttgaaaatataggaacaatttagcagctgcaaatatgcccaagctatttttaatagatatactaaacttattgttgacaaatttcagcctccttaatttttttttttttggtaattacctataggcttaaaagtcattcgttgctgttctagtataattagtagttccgtgattgaaagtttattgtaattctactatcttcaaattagatacattttcaaaaggaaaagataattttttagaaacatcttaatattcactatttcctgaaaaaatccaagcagttaacgctttctggatggtaacaaagtaccttctaaaagataagtgctatgacaccatgtatgaatgtaattctcttagtaatttacctctgactatttggtgtcttaacgctttggtttatataatctcaggggttgtctgcaaaccaaaactgacatattctgtggttagcttttattacttttttttttaacagaatgctttgctttggttatatttcttctttcttcttttgtcttatatggattaataactagtctccatgaacttcacttgaaagagcctgtaaaagttagatgagtctaaaagtgctctttgaagtagcagcaaattgggagtatatgctctgttatatagaaataaattgtccttgctattttcttacatttagctttgctagattgtatatacattgagctaagaccttaggaaattcactttctgcatgataaaatgacccaataaatattccactttgcttaataatgtacatacagtgcattattttttctatttgtagatgaatttaatgacagataattgtctgttccccgctgaaactgaagaaatctagtttttttgtgaacatttttgtggtcttatggataaggtacatgaagatttttgcagcagtattagtggttcagtggctgcactttattaatcagtgtgttaatttttgacagtgattggactagaccttttcaaatagagtctgagggtatcagacagtgaaaatgtgctgtaactaagtagcatgtaaatcagttgattgtaaaacgtttcgctgggaacttattttagctatattttacttcagacagattatgatacaataatctacctgtgcatcagttagtaggtgctgcagggtttcttactatttacagaaacattttgtgcagtctttgttataaattttcagaagactatactctttactttgaaggtctattttttaattatacctcatttagctaactagtattctaatacctggtagaaaaacagtgagccagcctttaagcatctaacaaaatttagactctttgttttgttttgaactgaagacatcattgggaaaggtaggaaatattagtttaggatagagcatacatgtcatatccagtagcataaaaaaagtattatctccctgtctccattaataaatttagctgtgcaatataggtgcgtttttgcagaagtttctagtaagagattataactccattttacaggttctgaatgctcagagtctatattaaggcttataaagtttttcctgtgatcagtaagtgacacatttaagcagacattcttttcaagttcatgacttagattcctttacaaatttagttctcaatctttaaaaaccacatttcattatgttggttaattattataaattttaagcactcatttctgcaatcaggtttctcagaattttttttttttaaacagaagagacattcctttttccttgttacatccaaggggggcacaggggtgggtggaaaggaatgtctaaaaatgaaatcccttgatatagagggacctagacggacaggatatgctaaaataatttcaaattctagcacaattttagagtagaataagtcatttttttagactaataaaattaatggctgtcatgttcactctgaaaaaaatctaaatgactgaaatgtacagaaataaaaattagcaaacaattattctagggatattttcagattttacttcatttcttgaaatgcgtgtgccatatgcaattgcatttcttgtgccaagaaactaatagaacttatttcactttacctttttttaaaatgtgaatttagttattatagttcaattttatggccttacagatggcttttattttgtttgcagctgacactgcagttcctttcatgcaaaataccataaactgtttgatgaaaatcatgcccctaatggaaactctctagtttttccatataactatcctactgtacatgtttaaacatattttatttttgctccaatggcttaatgtgaaaagctcctgcagataagtggacctgtcatgtggttaatcttgtttaagccaattcattaactgtgtactgatactgatgctatgttttttttaaatggattttattccaggtgaactttttttttataataatgttcgtctaaaataaaaactacataatgaaaatgaaaatgct

SEQ ID NO: 24562 - protein, 59 aa, Homo sapiens
MVTKYLLKDKCYDTMYECNSLSNLPLTIWCLNALVYIISGVVCKPKLTYSVVSFYYFFF

SEQ ID NO: 24563 - DNA, 472 bp, Homo sapiens
agtcctgctaattccctgaatcaggccactgccatctcatgcctgcgttgcactgaggacctccagtctggaagctcattttccatatctttacaaagcagatctatcactctgaactgttgtctcgacccgagttttgataggtattgtgctgggatctgaccattcaaaatacaatcactggaatctgaagaagtattctgtgggagtgaatggaaatatatatgacttttaaatgggcaaagatattagtgaacttctaggtgctgaggaaacaacaaagagcaaagcaaagtccctgtcccccaggagttcgcgttttaacggggaagaaaaataagcaagtgaaatggacgactgtgagaagacggagcagggagatgttactattgcttgtagggtggtcacagaatgcctgcaaaaacaacccttttgaagaattgggaaaaaaataaaaaccatttggctgaaa

SEQ ID NO: 24564 - protein, 34 aa, Homo sapiens
MGKDISELLGAEETTKSKAKSLSPRSSRFNGEEK

SEQ ID NO: 24565 - DNA, 936 bp, Homo sapiens
agtcctgctaattccctgaatcaggccactgccatctcatgcctgcgttgcactgaggacctccagtctggaagctcattttccatatctttacaaagcagatctatcactctgaactgttgtctcgacccgagttttgatagagctttcttctggttggtgtctctactgatttcgtcccttgtttggttcatggcaagagtcattattgacaacaaagatggaccaacacagaaatatctgctgatctttggagcgtttgtctctgtctatatccaagaaatgttccgatttgcatattataaactcttaaaaaaagccagtgaaggtttgaagagtataaacccaggtgagacagcaccctctatgcgactgctggcctatgtttctggcttgggctttggaatcatgagtggagtattttcctttgtgaataccctatctgactccttggggccaggcacagtgggcattcatggagattctcctcaattcttcctttattcagctttcatgacgctggtcattatcttgctgcatgtattctggggcattgtattttttgatggctgtgagaagaaaaagtggggcatcctccttatcgttctcctgacccacctgctggtgtcagcccagaccttcataagttcttattatggaataaacctggcgtcagcatttataatcctggtgctcatgggcacctgggcattcttagctgcgggaggcagctgccgaagcctgaaactctgcctgctctgccaagacaagaactttcttctttacaaccagcgctccagataacctcagggaaccagcacttcccaaaccgcagactacatctttagaggaagcacaactgtgcctttttctgaaaatccctttttctggtggaattgagaaagaaataaaactatgcagatatgcgttccattc

SEQ ID NO: 24566 - protein, 203 aa, Homo sapiens
MARVIIDNKDGPTQKYLLIFGAFVSVYIQEMFRFAYYKLLKKASEGLKSINPGETAPSMRLLAYVSGLGFGIMSGVFSFVNTLSDSLGPGTVGIHGDSPQFFLYSAFMTLVIILLHVFWGIVFFDGCEKKKWGILLIVLLTHLLVSAQTFISSYYGINLASAFIILVLMGTWAFLAAGGSCRSLKLCLLCQDKNFLLYNQRSR

SEQ ID NO: 24567 - DNA, 4149 bp, Homo sapiens
agtcctgctaattccctgaatcaggccactgccatctcatgcctgcgttgcactgaggacctccagtctggaagctcattttccatatctttacaaagcagatctatcactctgaactgttgtctcgacccgagttttgatagagctttcttctggttggtgtctctactgatttcgtcccttgtttggttcatggcaagagtcattattgacaacaaagatggaccaacacagaaatatctgctgatctttggagcgtttgtctctgtctatatccaagaaatgttccgatttgcatattataaactcttaaaaaaagccagtgaaggtttgaagagtataaacccaggtgagacagcaccctctatgcgactgctggcctatgtttctggcttgggctttggaatcatgagtggagtattttcctttgtgaataccctatctgactccttggggccaggcacagtgggcattcatggagattctcctcaattcttcctttattcagctttcatgacgctggtcattatcttgctgcatgtattctggggcattgtattttttgatggctgtgagaagaaaaagtggggcatcctccttatcgttctcctgacccacctgctggtgtcagcccagaccttcataagttcttattatggaataaacctggcgtcagcatttataatcctggtgctcatgggcacctgggcattcttagctgcgggaggcagctgccgaagcctgaaactctgcctgctctgccaagacaagaactttcttctttacaaccagcgctccagataacctcagggaaccagcacttcccaaaccgcagactacatctttagaggaagcacaactgtgcctttttctgaaaatccctttttctggtggaattgagaaagaaataaaactatgcagatatgcgttccattcacttggctttcacacaactgctctccgaaaggggtgctcagtggtgtgcgtcctggctgcacgagaatcacctgggacagtgtaaagccgactgattctgggctccaccttccagagctaattggcctgggcacgtggtgagttttaaaagcttcccaggtgattctgatgtgcagccatgttgagacccactggtttggtatccaaataggagcttcctgagaacaccttaagtggatgagaatctggtctttagctgtctcctaactcaactcgtgctgagcaagtaagtatctgaatgtcaaatcctggttatcttttatcttcctaagttctgaagtcacaaaaggctaaagggctatcacccctgctcactgtttgcgtgtacttcaccatcttaggagaacacggtaggttgggcttctaaatgcaataataaattacgctgactgtggtaacttagccaaagtaagatactgattaagccgtatttttctgaagtgcttccattccaggttttgctttctgaggcattacattgtttttgagtatagattacattttattaactaaaaatgattgttttgtgacttccttgggaaggtattttaaaatcaggaatttttatgcaatgtctataagcctgtttaaagctttccatgggctctgccccaaggccgttggctgcagcgttcaccatctgagtgccagttgctggactagttgaggtgaagtgcattgttttctctctgagcagctgtgcggggagctgagtgatgtgccctgggacaggcttcactggagctggtggaagtataaccagaagcacaaggaaatgagccaaaagggtgtcattgacacttttcatttgctcctgtgatactaacaacactttcacccaaatggcttaatgtaatattggaaatagatcttaaactgccaaatctcacactattgcataatccatatgctctttagatctagtcagtgtctctgggttttggtagcagatacagcgttccctttacaggaatacccaaggtgttctttcagcttccagacaggtcctttgatttcctttataaagggaaaattctggcaaatcgtgcctttactattagaaattgttcccagttgatgtcttttggggagctggtggcatgaaatgcaaatgacctatacattaaagtgatgtctcagtgaataccatacatgcagtagaacattcagaagagaggagcagcaatcctgaggggctgggggagtgacagtggcaggacggatgggcgggtttgacagattgtggtgggaagaagaatgatcatgtttaaagctaacatagccagtgttttgggctagccacacatcattccagagaccaaaaccttactcatgaactagacctttatcgatatcagtgaacccccatgtttaaaatattagaatgtttagagataaaatagagataatagagataaaagaagaggagggcttctatcaatgctgtaaacagtctgataagcgactgtggttattcccctaaagtttacttcagcactaacactagtgcttccgctggagtttgcagttttccagctttatacaggattttcctttgactggaagagtcaaggatatagagactcaacagtgacatttattgtacaacatcaaggggaataggatactcatcaaactgggattattcttatcaaaacatggtcttctttgaataagaaaaatacatagttggttattatggacttaaaactgtgttaaatggatattctgataaaatatttgctgctctgtagagtgtggaaagtctgagaatattagctttactcatcttgagctttgaggatgttctctgtacgccgatggtttcatattaactaaaaaagctgggtattgtaaaatctcatttataaaaactcagatgagaagaaaattttctttgatggtgagactgttgtcttagttcaggaaattatttaataatcctttgttacctgtgaatgaaggaactttgtaattctgatttatcgtaaaacatgagcctttccagagtcagcttagacactgttgtcgcaaatagccatgctttgccttatgccaaggaggcccagagggagggcctagtcttcctctgttgctgtacatatattgaaatgcttttttttttttattttgcatttgttatctataatgagctttctgagccctgatattatgtgagacaaacaggagttattgatgttatacactcccttccattcaggattttctgcttggagggaaatatgttgaccttagagaattgtgaatattgttgcaattcttgaatatattaccatgtgaataatagagactgtgttgctctctagtataagctatatttatttttgattcatttgaattactagttataactggagaaattttgttacctctatcctggcttgcctgactggctgtataatagcagcagcctcttttagagcatcttaatgaaaacatggatgaaaggaattaatgatgatatctgcagactgcgtagaaaatggcttttgttcccagcgttaacattttcttctcaatcacatttcaatgtttgtggagagtggcagattcacaccagaaacactaggtgttcatatccatagcatggatgcagaataagcagttgggagagaagcttcttcctacctggtactcctcccattcacctcagcccagccccagacaggcgttagcattcagtgtgggccctcaggcagccctgaagcctggctgggtcatcagatgggggcagcctgtgacgggcaccagcggcctgattccagggaagagttcctggagggtgttggctgtttttgttagctcagtttttttctgggctccaccattcctaactccaggtagacaagatagatgtcacacacaacaattttaaagtattttgcttagtgcattttgtttatgattgcagtgtttgtttcttatttaataggctttttacttcattctattaaattttagtgtttagaagaggcgggtactgtcactgtgtaaaatatgtaatattttatatgttataccatgtcatatatacttgcaatatcagaccttgcattcaatatacaatgcaattgactctttgcagacctgcatttttcagtgaacaataaaaagattgtctggcactcctca

SEQ ID NO: 24568 - protein, 203 aa, Homo sapiens; identical to SEQ ID NO: 24566

SEQ ID NO: 24569 - DNA, 976 bp, Homo sapiens
accgaaccccgcccgcgccgggagcatctcgcgtccccaacgggcccccgggtcggtttccgcggtggccatgactgcggccgtgttcttcggctgcgccttcattgccttcgggcctgcgctcgccctttatgtcttcaccatcgccaccgagccgttgcgtatcatcttcctcatcgccggagctttcttctggttggtgtctctactgatttcgtcccttgtttggttcatggcaagagtcattattgacaacaaagatggaccaacacagaaatatctgctgatctttggagcgtttgtctctgtctatatccaagaaatgttccgatttgcatattataaactcttaaaaaaagccagtgaaggtttgaagagtataaacccaggtgagacagcaccctctatgcgactgctggcctatgtttctggcttgggctttggaatcatgagtggagtattttcctttgtgaataccctatctgactccttggggccaggcacagtgggcattcatggagattctcctcaattcttcctttattcagctttcatgacgctggtcattatcttgctgcatgtattctggggcattgtattttttgatggctgtgagaagaaaaagtggggcatcctccttatcgttctcctgacccacctgctggtgtcagcccagaccttcataagttcttattatggaataaacctggcgtcagcatttataatcctggtgctcatgggcacctgggcattcttagctgcgggaggcagctgccgaagcctgaaactctgcctgctctgccaagacaagaactttcttctttacaaccagcgctccagataacctcagggaaccagcacttcccaaaccgcagactacatctttagaggaagcacaactgtgcctttttctgaaaatccctttttctggtggaattgagaaagaaataaaactatgcagatatgcgttccattc

SEQ ID NO: 24570 - protein, 257 aa, Homo sapiens; identical to SEQ ID NO: 3275

SEQ ID NO: 24571 - DNA, 4189 bp, Homo sapiens
accgaaccccgcccgcgccgggagcatctcgcgtccccaacgggcccccgggtcggtttccgcggtggccatgactgcggccgtgttcttcggctgcgccttcattgccttcgggcctgcgctcgccctttatgtcttcaccatcgccaccgagccgttgcgtatcatcttcctcatcgccggagctttcttctggttggtgtctctactgatttcgtcccttgtttggttcatggcaagagtcattattgacaacaaagatggaccaacacagaaatatctgctgatctttggagcgtttgtctctgtctatatccaagaaatgttccgatttgcatattataaactcttaaaaaaagccagtgaaggtttgaagagtataaacccaggtgagacagcaccctctatgcgactgctggcctatgtttctggcttgggctttggaatcatgagtggagtattttcctttgtgaataccctatctgactccttggggccaggcacagtgggcattcatggagattctcctcaattcttcctttattcagctttcatgacgctggtcattatcttgctgcatgtattctggggcattgtattttttgatggctgtgagaagaaaaagtggggcatcctccttatcgttctcctgacccacctgctggtgtcagcccagaccttcataagttcttattatggaataaacctggcgtcagcatttataatcctggtgctcatgggcacctgggcattcttagctgcgggaggcagctgccgaagcctgaaactctgcctgctctgccaagacaagaactttcttctttacaaccagcgctccagataacctcagggaaccagcacttcccaaaccgcagactacatctttagaggaagcacaactgtgcctttttctgaaaatccctttttctggtggaattgagaaagaaataaaactatgcagatatgcgttccattcacttggctttcacacaactgctctccgaaaggggtgctcagtggtgtgcgtcctggctgcacgagaatcacctgggacagtgtaaagccgactgattctgggctccaccttccagagctaattggcctgggcacgtggtgagttttaaaagcttcccaggtgattctgatgtgcagccatgttgagacccactggtttggtatccaaataggagcttcctgagaacaccttaagtggatgagaatctggtctttagctgtctcctaactcaactcgtgctgagcaagtaagtatctgaatgtcaaatcctggttatcttttatcttcctaagttctgaagtcacaaaaggctaaagggctatcacccctgctcactgtttgcgtgtacttcaccatcttaggagaacacggtaggttgggcttctaaatgcaataataaattacgctgactgtggtaacttagccaaagtaagatactgattaagccgtatttttctgaagtgcttccattccaggttttgctttctgaggcattacattgtttttgagtatagattacattttattaactaaaaatgattgttttgtgacttccttgggaaggtattttaaaatcaggaatttttatgcaatgtctataagcctgtttaaagctttccatgggctctgccccaaggccgttggctgcagcgttcaccatctgagtgccagttgctggactagttgaggtgaagtgcattgttttctctctgagcagctgtgcggggagctgagtgatgtgccctgggacaggcttcactggagctggtggaagtataaccagaagcacaaggaaatgagccaaaagggtgtcattgacacttttcatttgctcctgtgatactaacaacactttcacccaaatggcttaatgtaatattggaaatagatcttaaactgccaaatctcacactattgcataatccatatgctctttagatctagtcagtgtctctgggttttggtagcagatacagcgttccctttacaggaatacccaaggtgttctttcagcttccagacaggtcctttgatttcctttataaagggaaaattctggcaaatcgtgcctttactattagaaattgttcccagttgatgtcttttggggagctggtggcatgaaatgcaaatgacctatacattaaagtgatgtctcagtgaataccatacatgcagtagaacattcagaagagaggagcagcaatcctgaggggctgggggagtgacagtggcaggacggatgggcgggtttgacagattgtggtgggaagaagaatgatcatgtttaaagctaacatagccagtgttttgggctagccacacatcattccagagaccaaaaccttactcatgaactagacctttatcgatatcagtgaacccccatgtttaaaatattagaatgtttagagataaaatagagataatagagataaaagaagaggagggcttctatcaatgctgtaaacagtctgataagcgactgtggttattcccctaaagtttacttcagcactaacactagtgcttccgctggagtttgcagttttccagctttatacaggattttcctttgactggaagagtcaaggatatagagactcaacagtgacatttattgtacaacatcaaggggaataggatactcatcaaactgggattattcttatcaaaacatggtcttctttgaataagaaaaatacatagttggttattatggacttaaaactgtgttaaatggatattctgataaaatatttgctgctctgtagagtgtggaaagtctgagaatattagctttactcatcttgagctttgaggatgttctctgtacgccgatggtttcatattaactaaaaaagctgggtattgtaaaatctcatttataaaaactcagatgagaagaaaattttctttgatggtgagactgttgtcttagttcaggaaattatttaataatcctttgttacctgtgaatgaaggaactttgtaattctgatttatcgtaaaacatgagcctttccagagtcagcttagacactgttgtcgcaaatagccatgctttgccttatgccaaggaggcccagagggagggcctagtcttcctctgttgctgtacatatattgaaatgcttttttttttttattttgcatttgttatctataatgagctttctgagccctgatattatgtgagacaaacaggagttattgatgttatacactcccttccattcaggattttctgcttggagggaaatatgttgaccttagagaattgtgaatattgttgcaattcttgaatatattaccatgtgaataatagagactgtgttgctctctagtataagctatatttatttttgattcatttgaattactagttataactggagaaattttgttacctctatcctggcttgcctgactggctgtataatagcagcagcctcttttagagcatcttaatgaaaacatggatgaaaggaattaatgatgatatctgcagactgcgtagaaaatggcttttgttcccagcgttaacattttcttctcaatcacatttcaatgtttgtggagagtggcagattcacaccagaaacactaggtgttcatatccatagcatggatgcagaataagcagttgggagagaagcttcttcctacctggtactcctcccattcacctcagcccagccccagacaggcgttagcattcagtgtgggccctcaggcagccctgaagcctggctgggtcatcagatgggggcagcctgtgacgggcaccagcggcctgattccagggaagagttcctggagggtgttggctgtttttgttagctcagtttttttctgggctccaccattcctaactccaggtagacaagatagatgtcacacacaacaattttaaagtattttgcttagtgcattttgtttatgattgcagtgtttgtttcttatttaataggctttttacttcattctattaaattttagtgtttagaagaggcgggtactgtcactgtgtaaaatatgtaatattttatatgttataccatgtcatatatacttgcaatatcagaccttgcattcaatatacaatgcaattgactctttgcagacctgcatttttcagtgaacaataaaaagattgtctggcactcctca

SEQ ID NO: 24572 - protein, 257 aa, Homo sapiens; identical to SEQ ID NO: 3275

SEQ ID NO: 24573 - DNA, 804 bp, Homo sapiens
gggtcggtttccgcggtggccatgactgcggccgtgttcttcggctgcgccttcattgccttcgggcctgcgctcgccctttatgtcttcaccatcgccaccgagccgttgcgtatcatcttcctcatcgccggagctttcttctggttggtgtctctactgatttcgtcccttgtttggttcatggcaagagtcattattgacaacaaagatggaccaacacagaaatatctgctgatctttggagcgtttgtctctgtctatatccaagaaatgttccgatttgcatattataaactcttaaaaaaagccagtgaaggtttgaagagtataaacccaggtgagacagcaccctctatgcgactgctggcctatgctttcatgacgctggtcattatcttgctgcatgtattctggggcattgtattttttgatggctgtgagaagaaaaagtggggcatcctccttatcgttctcctgacccacctgctggtgtcagcccagaccttcataagttcttattatggaataaacctggcgtcagcatttataatcctggtgctcatgggcacctgggcattcttagctgcgggaggcagctgccgaagcctgaaactctgcctgctctgccaagacaagaactttcttctttacaaccagcgctccagataacctcagggaaccagcacttcccaaaccgcagactacatctttagaggaagcacaactgtgcctttttctgaaaatccctttttctggtggaattgagaaagaaataaaactatgcagatatgcgttccattc

SEQ ID NO: 24574 - protein, 216 aa, Homo sapiens
MTAAVFFGCAFIAFGPALALYVFTIATEPLRIIFLIAGAFFWLVSLLISSLVWFMARVIIDNKDGPTQKYLLIFGAFVSVYIQEMFRFAYYKLLKKASEGLKSINPGETAPSMRLLAYAFMTLVIILLHVFWGIVFFDGCEKKKWGILLIVLLTHLLVSAQTFISSYYGINLASAFIILVLMGTWAFLAAGGSCRSLKLCLLCQDKNFLLYNQRSR

SEQ ID NO: 24575 - DNA, 4017 bp, Homo sapiens
gggtcggtttccgcggtggccatgactgcggccgtgttcttcggctgcgccttcattgccttcgggcctgcgctcgccctttatgtcttcaccatcgccaccgagccgttgcgtatcatcttcctcatcgccggagctttcttctggttggtgtctctactgatttcgtcccttgtttggttcatggcaagagtcattattgacaacaaagatggaccaacacagaaatatctgctgatctttggagcgtttgtctctgtctatatccaagaaatgttccgatttgcatattataaactcttaaaaaaagccagtgaaggtttgaagagtataaacccaggtgagacagcaccctctatgcgactgctggcctatgctttcatgacgctggtcattatcttgctgcatgtattctggggcattgtattttttgatggctgtgagaagaaaaagtggggcatcctccttatcgttctcctgacccacctgctggtgtcagcccagaccttcataagttcttattatggaataaacctggcgtcagcatttataatcctggtgctcatgggcacctgggcattcttagctgcgggaggcagctgccgaagcctgaaactctgcctgctctgccaagacaagaactttcttctttacaaccagcgctccagataacctcagggaaccagcacttcccaaaccgcagactacatctttagaggaagcacaactgtgcctttttctgaaaatccctttttctggtggaattgagaaagaaataaaactatgcagatatgcgttccattcacttggctttcacacaactgctctccgaaaggggtgctcagtggtgtgcgtcctggctgcacgagaatcacctgggacagtgtaaagccgactgattctgggctccaccttccagagctaattggcctgggcacgtggtgagttttaaaagcttcccaggtgattctgatgtgcagccatgttgagacccactggtttggtatccaaataggagcttcctgagaacaccttaagtggatgagaatctggtctttagctgtctcctaactcaactcgtgctgagcaagtaagtatctgaatgtcaaatcctggttatcttttatcttcctaagttctgaagtcacaaaaggctaaagggctatcacccctgctcactgtttgcgtgtacttcaccatcttaggagaacacggtaggttgggcttctaaatgcaataataaattacgctgactgtggtaacttagccaaagtaagatactgattaagccgtatttttctgaagtgcttccattccaggttttgctttctgaggcattacattgtttttgagtatagattacattttattaactaaaaatgattgttttgtgacttccttgggaaggtattttaaaatcaggaatttttatgcaatgtctataagcctgtttaaagctttccatgggctctgccccaaggccgttggctgcagcgttcaccatctgagtgccagttgctggactagttgaggtgaagtgcattgttttctctctgagcagctgtgcggggagctgagtgatgtgccctgggacaggcttcactggagctggtggaagtataaccagaagcacaaggaaatgagccaaaagggtgtcattgacacttttcatttgctcctgtgatactaacaacactttcacccaaatggcttaatgtaatattggaaatagatcttaaactgccaaatctcacactattgcataatccatatgctctttagatctagtcagtgtctctgggttttggtagcagatacagcgttccctttacaggaatacccaaggtgttctttcagcttccagacaggtcctttgatttcctttataaagggaaaattctggcaaatcgtgcctttactattagaaattgttcccagttgatgtcttttggggagctggtggcatgaaatgcaaatgacctatacattaaagtgatgtctcagtgaataccatacatgcagtagaacattcagaagagaggagcagcaatcctgaggggctgggggagtgacagtggcaggacggatgggcgggtttgacagattgtggtgggaagaagaatgatcatgtttaaagctaacatagccagtgttttgggctagccacacatcattccagagaccaaaaccttactcatgaactagacctttatcgatatcagtgaacccccatgtttaaaatattagaatgtttagagataaaatagagataatagagataaaagaagaggagggcttctatcaatgctgtaaacagtctgataagcgactgtggttattcccctaaagtttacttcagcactaacactagtgcttccgctggagtttgcagttttccagctttatacaggattttcctttgactggaagagtcaaggatatagagactcaacagtgacatttattgtacaacatcaaggggaataggatactcatcaaactgggattattcttatcaaaacatggtcttctttgaataagaaaaatacatagttggttattatggacttaaaactgtgttaaatggatattctgataaaatatttgctgctctgtagagtgtggaaagtctgagaatattagctttactcatcttgagctttgaggatgttctctgtacgccgatggtttcatattaactaaaaaagctgggtattgtaaaatctcatttataaaaactcagatgagaagaaaattttctttgatggtgagactgttgtcttagttcaggaaattatttaataatcctttgttacctgtgaatgaaggaactttgtaattctgatttatcgtaaaacatgagcctttccagagtcagcttagacactgttgtcgcaaatagccatgctttgccttatgccaaggaggcccagagggagggcctagtcttcctctgttgctgtacatatattgaaatgcttttttttttttattttgcatttgttatctataatgagctttctgagccctgatattatgtgagacaaacaggagttattgatgttatacactcccttccattcaggattttctgcttggagggaaatatgttgaccttagagaattgtgaatattgttgcaattcttgaatatattaccatgtgaataatagagactgtgttgctctctagtataagctatatttatttttgattcatttgaattactagttataactggagaaattttgttacctctatcctggcttgcctgactggctgtataatagcagcagcctcttttagagcatcttaatgaaaacatggatgaaaggaattaatgatgatatctgcagactgcgtagaaaatggcttttgttcccagcgttaacattttcttctcaatcacatttcaatgtttgtggagagtggcagattcacaccagaaacactaggtgttcatatccatagcatggatgcagaataagcagttgggagagaagcttcttcctacctggtactcctcccattcacctcagcccagccccagacaggcgttagcattcagtgtgggccctcaggcagccctgaagcctggctgggtcatcagatgggggcagcctgtgacgggcaccagcggcctgattccagggaagagttcctggagggtgttggctgtttttgttagctcagtttttttctgggctccaccattcctaactccaggtagacaagatagatgtcacacacaacaattttaaagtattttgcttagtgcattttgtttatgattgcagtgtttgtttcttatttaataggctttttacttcattctattaaattttagtgtttagaagaggcgggtactgtcactgtgtaaaatatgtaatattttatatgttataccatgtcatatatacttgcaatatcagaccttgcattcaatatacaatgcaattgactctttgcagacctgcatttttcagtgaacaataaaaagattgtctggcactcctca

SEQ ID NO: 24576 - protein, 216 aa, Homo sapiens; identical to SEQ ID NO: 24574

SEQ ID NO: 24577 - DNA, 784 bp, Homo sapiens
gtggccatgactgcggccgtgttcttcggctgcgccttcattgccttcgggcctgcgctcgccctttatgtcttcaccatcgccaccgagccgttgcgtatcatcttcctcatcgccggagctttcttctggttggtgtctctactgatttcgtcccttgtttggttcatggcaagagtcattattgacaacaaagatggaccaacacagaaatatctgctgatctttggagcgtttgtctctgtctatatccaagaaatgttccgatttgcatattataaactcttaaaaaaagccagtgaaggtttgaagagtataaacccaggtgagacagcaccctctatgcgactgctggcctatgtttctggcttgggctttggaatcatgagtggagtattttcctttgtgaataccctatctgactccttggggccaggcacagtgggcattcatggagattctcctcaattcttcctttattcagaccttcataagttcttattatggaataaacctggcgtcagcatttataatcctggtgctcatgggcacctgggcattcttagctgcgggaggcagctgccgaagcctgaaactctgcctgctctgccaagacaagaactttcttctttacaaccagcgctccagataacctcagggaaccagcacttcccaaaccgcagactacatctttagaggaagcacaactgtgcctttttctgaaaatccctttttctggtggaattgagaaagaaataaaactatgcagatatgcgttccattc

SEQ ID NO: 24578 - protein, 229 aa, Homo sapiens
MTAAVFFGCAFIAFGPALALYVFTIATEPLRIIFLIAGAFFWLVSLLISSLVWFMARVIIDNKDGPTQKYLLIFGAFVSVYIQEMFRFAYYKLLKKASEGLKSINPGETAPSMRLLAYVSGLGFGIMSGVFSFVNTLSDSLGPGTVGIHGDSPQFFLYSDLHKFLLWNKPGVSIYNPGAHGHLGILSCGRQLPKPETLPALPRQELSSLQPALQITSGNQHFPNRRLHL

SEQ ID NO: 24579 - DNA, 3997 bp, Homo sapiens
gtggccatgactgcggccgtgttcttcggctgcgccttcattgccttcgggcctgcgctcgccctttatgtcttcaccatcgccaccgagccgttgcgtatcatcttcctcatcgccggagctttcttctggttggtgtctctactgatttcgtcccttgtttggttcatggcaagagtcattattgacaacaaagatggaccaacacagaaatatctgctgatctttggagcgtttgtctctgtctatatccaagaaatgttccgatttgcatattataaactcttaaaaaaagccagtgaaggtttgaagagtataaacccaggtgagacagcaccctctatgcgactgctggcctatgtttctggcttgggctttggaatcatgagtggagtattttcctttgtgaataccctatctgactccttggggccaggcacagtgggcattcatggagattctcctcaattcttcctttattcagaccttcataagttcttattatggaataaacctggcgtcagcatttataatcctggtgctcatgggcacctgggcattcttagctgcgggaggcagctgccgaagcctgaaactctgcctgctctgccaagacaagaactttcttctttacaaccagcgctccagataacctcagggaaccagcacttcccaaaccgcagactacatctttagaggaagcacaactgtgcctttttctgaaaatccctttttctggtggaattgagaaagaaataaaactatgcagatatgcgttccattcacttggctttcacacaactgctctccgaaaggggtgctcagtggtgtgcgtcctggctgcacgagaatcacctgggacagtgtaaagccgactgattctgggctccaccttccagagctaattggcctgggcacgtggtgagttttaaaagcttcccaggtgattctgatgtgcagccatgttgagacccactggtttggtatccaaataggagcttcctgagaacaccttaagtggatgagaatctggtctttagctgtctcctaactcaactcgtgctgagcaagtaagtatctgaatgtcaaatcctggttatcttttatcttcctaagttctgaagtcacaaaaggctaaagggctatcacccctgctcactgtttgcgtgtacttcaccatcttaggagaacacggtaggttgggcttctaaatgcaataataaattacgctgactgtggtaacttagccaaagtaagatactgattaagccgtatttttctgaagtgcttccattccaggttttgctttctgaggcattacattgtttttgagtatagattacattttattaactaaaaatgattgttttgtgacttccttgggaaggtattttaaaatcaggaatttttatgcaatgtctataagcctgtttaaagctttccatgggctctgccccaaggccgttggctgcagcgttcaccatctgagtgccagttgctggactagttgaggtgaagtgcattgttttctctctgagcagctgtgcggggagctgagtgatgtgccctgggacaggcttcactggagctggtggaagtataaccagaagcacaaggaaatgagccaaaagggtgtcattgacacttttcatttgctcctgtgatactaacaacactttcacccaaatggcttaatgtaatattggaaatagatcttaaactgccaaatctcacactattgcataatccatatgctctttagatctagtcagtgtctctgggttttggtagcagatacagcgttccctttacaggaatacccaaggtgttctttcagcttccagacaggtcctttgatttcctttataaagggaaaattctggcaaatcgtgcctttactattagaaattgttcccagttgatgtcttttggggagctggtggcatgaaatgcaaatgacctatacattaaagtgatgtctcagtgaataccatacatgcagtagaacattcagaagagaggagcagcaatcctgaggggctgggggagtgacagtggcaggacggatgggcgggtttgacagattgtggtgggaagaagaatgatcatgtttaaagctaacatagccagtgttttgggctagccacacatcattccagagaccaaaaccttactcatgaactagacctttatcgatatcagtgaacccccatgtttaaaatattagaatgtttagagataaaatagagataatagagataaaagaagaggagggcttctatcaatgctgtaaacagtctgataagcgactgtggttattcccctaaagtttacttcagcactaacactagtgcttccgctggagtttgcagttttccagctttatacaggattttcctttgactggaagagtcaaggatatagagactcaacagtgacatttattgtacaacatcaaggggaataggatactcatcaaactgggattattcttatcaaaacatggtcttctttgaataagaaaaatacatagttggttattatggacttaaaactgtgttaaatggatattctgataaaatatttgctgctctgtagagtgtggaaagtctgagaatattagctttactcatcttgagctttgaggatgttctctgtacgccgatggtttcatattaactaaaaaagctgggtattgtaaaatctcatttataaaaactcagatgagaagaaaattttctttgatggtgagactgttgtcttagttcaggaaattatttaataatcctttgttacctgtgaatgaaggaactttgtaattctgatttatcgtaaaacatgagcctttccagagtcagcttagacactgttgtcgcaaatagccatgctttgccttatgccaaggaggcccagagggagggcctagtcttcctctgttgctgtacatatattgaaatgcttttttttttttattttgcatttgttatctataatgagctttctgagccctgatattatgtgagacaaacaggagttattgatgttatacactcccttccattcaggattttctgcttggagggaaatatgttgaccttagagaattgtgaatattgttgcaattcttgaatatattaccatgtgaataatagagactgtgttgctctctagtataagctatatttatttttgattcatttgaattactagttataactggagaaattttgttacctctatcctggcttgcctgactggctgtataatagcagcagcctcttttagagcatcttaatgaaaacatggatgaaaggaattaatgatgatatctgcagactgcgtagaaaatggcttttgttcccagcgttaacattttcttctcaatcacatttcaatgtttgtggagagtggcagattcacaccagaaacactaggtgttcatatccatagcatggatgcagaataagcagttgggagagaagcttcttcctacctggtactcctcccattcacctcagcccagccccagacaggcgttagcattcagtgtgggccctcaggcagccctgaagcctggctgggtcatcagatgggggcagcctgtgacgggcaccagcggcctgattccagggaagagttcctggagggtgttggctgtttttgttagctcagtttttttctgggctccaccattcctaactccaggtagacaagatagatgtcacacacaacaattttaaagtattttgcttagtgcattttgtttatgattgcagtgtttgtttcttatttaataggctttttacttcattctattaaattttagtgtttagaagaggcgggtactgtcactgtgtaaaatatgtaatattttatatgttataccatgtcatatatacttgcaatatcagaccttgcattcaatatacaatgcaattgactctttgcagacctgcatttttcagtgaacaataaaaagattgtctggcactcctca

SEQ ID NO: 24580 - protein, 229 aa, Homo sapiens; identical to SEQ ID NO: 24578

SEQ ID NO: 24581 - DNA, 3592 bp, Homo sapiens
ctgccattcatttcctttcctcttcccgcttccctctctgattcatcatttagccaagcacatgcctctccagagccagctgtccactgcttcaggaagaacataagcaccctttcccctccaacacactttgtattaactagtccttggaaatttgacttgaaatcttggcagctgccgaagcctgaaactctgcctgctctgccaagacaagaactttcttctttacaaccagcgctccagataacctcagggaaccagcacttcccaaaccgcagactacatctttagaggaagcacaactgtgcctttttctgaaaatccctttttctggtggaattgagaaagaaataaaactatgcagatatgcgttccattcacttggctttcacacaactgctctccgaaaggggtgctcagtggtgtgcgtcctggctgcacgagaatcacctgggacagtgtaaagccgactgattctgggctccaccttccagagctaattggcctgggcacgtggtgagttttaaaagcttcccaggtgattctgatgtgcagccatgttgagacccactggtttggtatccaaataggagcttcctgagaacaccttaagtggatgagaatctggtctttagctgtctcctaactcaactcgtgctgagcaagtaagtatctgaatgtcaaatcctggttatcttttatcttcctaagttctgaagtcacaaaaggctaaagggctatcacccctgctcactgtttgcgtgtacttcaccatcttaggagaacacggtaggttgggcttctaaatgcaataataaattacgctgactgtggtaacttagccaaagtaagatactgattaagccgtatttttctgaagtgcttccattccaggttttgctttctgaggcattacattgtttttgagtatagattacattttattaactaaaaatgattgttttgtgacttccttgggaaggtattttaaaatcaggaatttttatgcaatgtctataagcctgtttaaagctttccatgggctctgccccaaggccgttggctgcagcgttcaccatctgagtgccagttgctggactagttgaggtgaagtgcattgttttctctctgagcagctgtgcggggagctgagtgatgtgccctgggacaggcttcactggagctggtggaagtataaccagaagcacaaggaaatgagccaaaagggtgtcattgacacttttcatttgctcctgtgatactaacaacactttcacccaaatggcttaatgtaatattggaaatagatcttaaactgccaaatctcacactattgcataatccatatgctctttagatctagtcagtgtctctgggttttggtagcagatacagcgttccctttacaggaatacccaaggtgttctttcagcttccagacaggtcctttgatttcctttataaagggaaaattctggcaaatcgtgcctttactattagaaattgttcccagttgatgtcttttggggagctggtggcatgaaatgcaaatgacctatacattaaagtgatgtctcagtgaataccatacatgcagtagaacattcagaagagaggagcagcaatcctgaggggctgggggagtgacagtggcaggacggatgggcgggtttgacagattgtggtgggaagaagaatgatcatgtttaaagctaacatagccagtgttttgggctagccacacatcattccagagaccaaaaccttactcatgaactagacctttatcgatatcagtgaacccccatgtttaaaatattagaatgtttagagataaaatagagataatagagataaaagaagaggagggcttctatcaatgctgtaaacagtctgataagcgactgtggttattcccctaaagtttacttcagcactaacactagtgcttccgctggagtttgcagttttccagctttatacaggattttcctttgactggaagagtcaaggatatagagactcaacagtgacatttattgtacaacatcaaggggaataggatactcatcaaactgggattattcttatcaaaacatggtcttctttgaataagaaaaatacatagttggttattatggacttaaaactgtgttaaatggatattctgataaaatatttgctgctctgtagagtgtggaaagtctgagaatattagctttactcatcttgagctttgaggatgttctctgtacgccgatggtttcatattaactaaaaaagctgggtattgtaaaatctcatttataaaaactcagatgagaagaaaattttctttgatggtgagactgttgtcttagttcaggaaattatttaataatcctttgttacctgtgaatgaaggaactttgtaattctgatttatcgtaaaacatgagcctttccagagtcagcttagacactgttgtcgcaaatagccatgctttgccttatgccaaggaggcccagagggagggcctagtcttcctctgttgctgtacatatattgaaatgcttttttttttttattttgcatttgttatctataatgagctttctgagccctgatattatgtgagacaaacaggagttattgatgttatacactcccttccattcaggattttctgcttggagggaaatatgttgaccttagagaattgtgaatattgttgcaattcttgaatatattaccatgtgaataatagagactgtgttgctctctagtataagctatatttatttttgattcatttgaattactagttataactggagaaattttgttacctctatcctggcttgcctgactggctgtataatagcagcagcctcttttagagcatcttaatgaaaacatggatgaaaggaattaatgatgatatctgcagactgcgtagaaaatggcttttgttcccagcgttaacattttcttctcaatcacatttcaatgtttgtggagagtggcagattcacaccagaaacactaggtgttcatatccatagcatggatgcagaataagcagttgggagagaagcttcttcctacctggtactcctcccattcacctcagcccagccccagacaggcgttagcattcagtgtgggccctcaggcagccctgaagcctggctgggtcatcagatgggggcagcctgtgacgggcaccagcggcctgattccagggaagagttcctggagggtgttggctgtttttgttagctcagtttttttctgggctccaccattcctaactccaggtagacaagatagatgtcacacacaacaattttaaagtattttgcttagtgcattttgtttatgattgcagtgtttgtttcttatttaataggctttttacttcattctattaaattttagtgtttagaagaggcgggtactgtcactgtgtaaaatatgtaatattttatatgttataccatgtcatatatacttgcaatatcagaccttgcattcaatatacaatgcaattgactctttgcagacctgcatttttcagtgaacaataaaaagattgtctggcactcctca

SEQ ID NO: 24582 - protein, 94 aa, Homo sapiens
MQNKQLGEKLLPTWYSSHSPQPSPRQALAFSVGPQAALKPGWVIRWGQPVTGTSGLIPGKSSWRVLAVFVSSVFFWAPPFLTPGRQDRCHTQQF

SEQ ID NO: 24583 - DNA, 740 bp, Homo sapiens
ctgtaataagtctcatggtggctggaatgttcttttctaccctttgactttgagctcagtcatgtggcttgaattggccaattagtggttatgatgtaagttagaggcttaaaaagtatttgcatgattggaccttccttcttggactctggtgccatgagaagaagataccttgggaagttaatggccacttagcctggacccttgaatgaatatacccagagccacacagagcccaccccaggagcttgcagcagagttttccagctgatcccagcctttatcagcaatgcacagtcagcctttagacctctttcatgacgctggtcattatcttgctgcatgtattctggggcattgtattttttgatggctgtgagaagaaaaagtggggcatcctccttatcgttctcctgacccacctgctggtgtcagcccagaccttcataagttcttattatggaataaacctggcgtcagcatttataatcctggtgctcatgggcacctgggcattcttagctgcgggaggcagctgccgaagcctgaaactctgcctgctctgccaagacaagaactttcttctttacaaccagcgctccagataacctcagggaaccagcacttcccaaaccgcagactacatctttagaggaagcacaactgtgcctttttctgaaaatccctttttctggtggaattgagaaagaaataaaactatgcagatatgcgttccattc

SEQ ID NO: 24584 - protein, 96 aa, Homo sapiens [sequence omitted]

SEQ ID NO: 24585 - DNA, 3953 bp, Homo sapiens
ctgtaataagtctcatggtggctggaatgttcttttctaccctttgactttgagctcagtcatgtggcttgaattggccaattagtggttatgatgtaagttagaggcttaaaaagtatttgcatgattggaccttccttcttggactctggtgccatgagaagaagataccttgggaagttaatggccacttagcctggacccttgaatgaatatacccagagccacacagagcccaccccaggagcttgcagcagagttttccagctgatcccagcctttatcagcaatgcacagtcagcctttagacctctttcatgacgctggtcattatcttgctgcatgtattctggggcattgtattttttgatggctgtgagaagaaaaagtggggcatcctccttatcgttctcctgacccacctgctggtgtcagcccagaccttcataagttcttattatggaataaacctggcgtcagcatttataatcctggtgctcatgggcacctgggcattcttagctgcgggaggcagctgccgaagcctgaaactctgcctgctctgccaagacaagaactttcttctttacaaccagcgctccagataacctcagggaaccagcacttcccaaaccgcagactacatctttagaggaagcacaactgtgcctttttctgaaaatccctttttctggtggaattgagaaagaaataaaactatgcagatatgcgttccattcacttggctttcacacaactgctctccgaaaggggtgctcagtggtgtgcgtcctggctgcacgagaatcacctgggacagtgtaaagccgactgattctgggctccaccttccagagctaattggcctgggcacgtggtgagttttaaaagcttcccaggtgattctgatgtgcagccatgttgagacccactggtttggtatccaaataggagcttcctgagaacaccttaagtggatgagaatctggtctttagctgtctcctaactcaactcgtgctgagcaagtaagtatctgaatgtcaaatcctggttatcttttatcttcctaagttctgaagtcacaaaaggctaaagggctatcacccctgctcactgtttgcgtgtacttcaccatcttaggagaacacggtaggttgggcttctaaatgcaataataaattacgctgactgtggtaacttagccaaagtaagatactgattaagccgtatttttctgaagtgcttccattccaggttttgctttctgaggcattacattgtttttgagtatagattacattttattaactaaaaatgattgttttgtgacttccttgggaaggtattttaaaatcaggaatttttatgcaatgtctataagcctgtttaaagctttccatgggctctgccccaaggccgttggctgcagcgttcaccatctgagtgccagttgctggactagttgaggtgaagtgcattgttttctctctgagcagctgtgcggggagctgagtgatgtgccctgggacaggcttcactggagctggtggaagtataaccagaagcacaaggaaatgagccaaaagggtgtcattgacacttttcatttgctcctgtgatactaacaacactttcacccaaatggcttaatgtaatattggaaatagatcttaaactgccaaatctcacactattgcataatccatatgctctttagatctagtcagtgtctctgggttttggtagcagatacagcgttccctttacaggaatacccaaggtgttctttcagcttccagacaggtcctttgatttcctttataaagggaaaattctggcaaatcgtgcctttactattagaaattgttcccagttgatgtcttttggggagctggtggcatgaaatgcaaatgacctatacattaaagtgatgtctcagtgaataccatacatgcagtagaacattcagaagagaggagcagcaatcctgaggggctgggggagtgacagtggcaggacggatgggcgggtttgacagattgtggtgggaagaagaatgatcatgtttaaagctaacatagccagtgttttgggctagccacacatcattccagagaccaaaaccttactcatgaactagacctttatcgatatcagtgaacccccatgtttaaaatattagaatgtttagagataaaatagagataatagagataaaagaagaggagggcttctatcaatgctgtaaacagtctgataagcgactgtggttattcccctaaagtttacttcagcactaacactagtgcttccgctggagtttgcagttttccagctttatacaggattttcctttgactggaagagtcaaggatatagagactcaacagtgacatttattgtacaacatcaaggggaataggatactcatcaaactgggattattcttatcaaaacatggtcttctttgaataagaaaaatacatagttggttattatggacttaaaactgtgttaaatggatattctgataaaatatttgctgctctgtagagtgtggaaagtctgagaatattagctttactcatcttgagctttgaggatgttctctgtacgccgatggtttcatattaactaaaaaagctgggtattgtaaaatctcatttataaaaactcagatgagaagaaaattttctttgatggtgagactgttgtcttagttcaggaaattatttaataatcctttgttacctgtgaatgaaggaactttgtaattctgatttatcgtaaaacatgagcctttccagagtcagcttagacactgttgtcgcaaatagccatgctttgccttatgccaaggaggcccagagggagggcctagtcttcctctgttgctgtacatatattgaaatgcttttttttttttattttgcatttgttatctataatgagctttctgagccctgatattatgtgagacaaacaggagttattgatgttatacactcccttccattcaggattttctgcttggagggaaatatgttgaccttagagaattgtgaatattgttgcaattcttgaatatattaccatgtgaataatagagactgtgttgctctctagtataagctatatttatttttgattcatttgaattactagttataactggagaaattttgttacctctatcctggcttgcctgactggctgtataatagcagcagcctcttttagagcatcttaatgaaaacatggatgaaaggaattaatgatgatatctgcagactgcgtagaaaatggcttttgttcccagcgttaacattttcttctcaatcacatttcaatgtttgtggagagtggcagattcacaccagaaacactaggtgttcatatccatagcatggatgcagaataagcagttgggagagaagcttcttcctacctggtactcctcccattcacctcagcccagccccagacaggcgttagcattcagtgtgggccctcaggcagccctgaagcctggctgggtcatcagatgggggcagcctgtgacgggcaccagcggcctgattccagggaagagttcctggagggtgttggctgtttttgttagctcagtttttttctgggctccaccattcctaactccaggtagacaagatagatgtcacacacaacaattttaaagtattttgcttagtgcattttgtttatgattgcagtgtttgtttcttatttaataggctttttacttcattctattaaattttagtgtttagaagaggcgggtactgtcactgtgtaaaatatgtaatattttatatgttataccatgtcatatatacttgcaatatcagaccttgcattcaatatacaatgcaattgactctttgcagacctgcatttttcagtgaacaataaaaagattgtctggcactcctca

SEQ ID NO: 24586 - protein, 96 aa, Homo sapiens [sequence omitted]

SEQ ID NO: 24587 - DNA, 2586 bp, Homo sapiens
gaggagtgccagacaatctttttattgttcactgaaaaatgcaggtctgcaaagagtcaattgcattgtatattgaatgcaaggtctgatattgcaagtatatatgacatggtataacatataaaatattacatattttacacagtgacagtacccgcctcttctaaacactaaaatttaatagaatgaagtaaaaagcctattaaataagaaacaaacactgcaatcataaacaaaatgcactaagcaaaatactttaaaattgttgtgtgtgacatctatcttgtctacctggagttaggaatggtggagcccagaaaaaaactgagctaacaaaaacagccaacaccctccaggaactcttccctggaatcaggccgctggtgcccgtcacaggctgcccccatctgatgacccagccaggcttcagggctgcctgagggcccacactgaatgctaacgcctgtctggggctgggctgaggtgaatgggaggagtaccaggtaggaagaagcttctctcccaactgcttattctgcatccatgctatggatatgaacacctagtgtttctggtgtgaatctgccactctccacaaacattgaaatgtgattgagaagaaaatgttaacgctgggaacaaaagccattttctacgcagtctgcagatatcatcattaattcctttcatccatgttttcattaagatgctctaaaagaggctgctgctattatacagccagtcaggcaagccaggatagaggtaacaaaatttctccagttataactagtaattcaaatgaatcaaaaataaatatagcttatactagagagcaacacagtctctattattcacatggtaatatattcaagaattgcaacaatattcacaattctctaaggtcaacatatttccctccaagcagaaaatcctgaatggaagggagtgtataacatcaataactcctgtttgtctcacataatatcagggctcagaaagctcattatagataacaaatgcaaaataaaaaaaaaaaagcatttcaatatatgtacagcaacagaggaagactaggccctccctctgggcctccttggcataaggcaaagcatggctatttgcgacaacagtgtctaagctgactctggaaaggctcatgttttacgataaatcagaattacaaagttccttcattcacaggtaacaaaggattattaaataatttcctgaactaagacaacagtctcaccatcaaagaaaattttcttctcatctgagtttttataaatgagattttacaatacccagcttttttagttaatatgaaaccatcggcgtacagagaacatcctcaaagctcaagatgagtaaagctaatattctcagactttccacactctacagagcagcaaatattttatcagaatatccatttaacacagttttaagtccataataaccaactatgtatttttcttattcaaagaagaccatgttttgataagaataatcccagtttgatgagtatcctattccccttgatgttgtacaataaatgtcactgttgagtctctatatccttgactcttccagtcaaaggaaaatcctgtataaagctggaaaactgcaaactccagcggaagcactagtgttagtgctgaagtaaactttaggggaataaccacagtcgcttatcagactgtttacagcattgatagaagccctcctcttcttttatctctattatctctattttatctctaaacattctaatattttaaacatgggggttcactgatatcgataaaggtctagttcatgagtaaggttttggtctctggaatgatgtgtggctagcccaaaacactggctatgttagctttaaacatgatcattcttcttcccaccacaatctgtcaaacccgcccatccgtcctgccactgtcactcccccagcccctcaggattgctgctcctctcttctgaatgttctactgcatgtatggtattcactgagacatcactttaatgtataggtcatttgcatttcatgccaccagctccccaaaagacatcaactgggaacaatttctaatagtaaaggcacgatttgccagaattttccctttataaaggaaatcaaaggacctgtctggaagctgaaagaacaccttgggtattcctgtaaagggaacgctgtatctgctaccaaaacccagagacactgactagatctaaagagcatatggattatgcaatagtgtgagatttggcagtttaagatctatttccaatattacattaagccatttgggtgaaagtgttgttagtatcacaggagcaaatgaaaagtgtcaatgacacccttttggctcatttccttgtgcttctggttatacttccaccagctccagtgaagcctgtcccagggcacatcactcagctccccgcacagctgctcagagagaaaacaatgcacttcacctcaactagtccagcaactggcactcagatggtgaacgctgcagccaacggccttggggcagagcccatggaaagctttaaacaggcttatagacattgcat

SEQ ID NO: 24588 - protein, 80 aa, Homo sapiens
MFSLRCSKRGCCYYTASQASQDRGNKISPVITSNSNESKINIAYTREQHSLYYSHGNIFKNCNNIHNSLRSTYFPPSRKS

SEQ ID NO: 24589 - DNA, 4956 bp, Homo sapiens
cggcctgggcaacagagcgagactccgtctcaaacaaacaaacaaaggaacgaaaacctccggtctccggcacggcaagctctgcgtgaattactttctccattgcaactcccctgtcttgataaatgggctctgtctaagcagcgggcaaggtgaactcgttgggctgttacaggaccagtgacagaccaagggcatgccactgaaggaatccctagacgcacccttctggatgtgagacaggcggatctcacccacgcctgccagcagctcctcggagaactgtgttcctgggtcagccctggcccagaggagcgccggggacccgcagagtgctgctgaagtcaaggctacaactcacctaggatctggggcgccagccctccggtgggcagggcgttctcctcccccaccccctccccgcacgatgacatcaagtgtttggcgttgagttgctccataaaagctgcccggggaagccaggagagcgaagggcggacgtactcgccacggcacccaggctgcgcgcacgcggtcccggtgtgcagctggagagcgagcggccaccgggagcccccggcacagcccgcgcccgccccgcaggagcccgcgaagatgccccggcgcagcctgcacgcggcggccgtgctcctgctggtgatcttaaaggaacagccttccagcccggccccagtgaacggttccaagtggacttattttggtcctgatggggagaatagctggtccaagaagtacccgtcgtgtgggggcctgctgcagtcccccatagacctgcacagtgacatcctccagtatgacgccagcctcacgcccctcgagttccaaggctacaatctgtctgccaacaagcagtttctcctgaccaacaatggccattcagtgaagctgaacctgccctcggacatgcacatccagggcctccagtctcgctacagtgccacgcagctgcacctgcactgggggaacccgaatgacccgcacggctctgagcacaccgtcagcggacagcacttcgccgccgagctgcacattgtccattataactcagacctttatcctgacgccagcactgccagcaacaagtcagaaggcctcgctgtcctggctgttctcattgagatgggctccttcaatccgtcctatgacaagatcttcagtcaccttcaacatgtaaagtacaaaggccaggaagcattcgtcccgggattcaacattgaagagctgcttccggagaggaccgctgaatattaccgctaccgggggtccctgaccacacccccttgcaaccccactgtgctctggacagttttccgaaaccccgtgcaaatttcccaggagcagctgctggctttggagacagccctgtactgcacacacatggacgacccttcccccagagaaatgatcaacaacttccggcaggtccagaagttcgatgagaggctggtatacacctccttctcccaagtgcaagtctgtactgcggcaggactgagtctgggcatcatcctctcactggccctggctggcattcttggcatctgtattgtggtggtggtgtccatttggcttttcagaaggaagagtatcaaaaaaggtgataacaagggagtcatttacaagccagccaccaagatggagactgaggcccacgcttgaggtccccggagctcccgggcacatccaggaaggaccttgctttggaccctacacacttcggctctctggacacttgcgacacctcaaggtgttctctgtagctcaatctgcaaacatgccaggcctcagggatcctctgctgggtgcctccttgccttgggaccatggccaccccagagccatccgatcgatggatgggatgcactctcagaccaagcagcaggaattcaaagctgcttgctgtaactgtgtgagattgtgaagtggtctgaattctggaatcacaaaccaagccatgctggtgggccattaatggttggaaaacactttcatccggggctttgccagagcgtgctttcaagtgtcctggaaattctgctgcttctccaagctttcagacaagaatgtgcactctctgcttaggttttgcttgggaaactcaacttctttcctctggagacggggcatctccctctgatttccttctgctatgacaaaacctttaatctgcaccttacaactcggggacaaatggggacaggaaggatcaagttgtagagagaaaaagaaaacaagagatatacattgtgatatattagggacactttcacagtcctgtcctctggatcacagacactgcacagaccttagggaatggcaggttcaagttccacttcttggtggggatgagaagggagagagagctagagggacaaagagaatgagaagacatggatgatctgggagagtctcactttggaatcagaattggaatcacattctgtttatcaagccataatgtaaggacagaataatacaatattaagtccaaatccaacctcctgtcagtggagcagttatgttttatactctacagattttacaaataatgaggctgttccttgaaaatgtgttgttgctgtgtcctggaggagacatgagttccgagatgacccaatctgcctttgaatctggaggaaataggcagaaacaaaatgactgtagaacttattctctgtaggccaaatttcatttcagccacttctgcaggatccctactgccaacctggaatggagacttttatctacttctctctctctgaagatgtcaaatcgtggtttagatcaaatatatttcaagctataaaagcaggaggttatctgtgcagggggctggcatcatgtatttaggggcaagtaataatggaatgctactaagatactccatattcttccccgaatcacacagacagtttctgacaggcgcaactcctccattttcctcccgcaggtgagaaccctgtggagatgagtcagtgccatgactgagaaggaaccgacccctagttgagagcaccttgcagttccccgagaactttctgattcacagtctcattttgacagcatgaaatgtcctcttgaagcatagctttttaaatatctttttccttctactcctccctctgactctaagaattctctcttctggaatcgcttgaacccaggaggcggaggttgcagtaagccaaggtcatgccactgcactctagcctgggtgacagagcgagactccatctcaaaaaaaaaaaaaaaaaaattattctgtaccatcacaacttttcacaacgatggcaagccttatgtcttgggagcctgttttgctaggcaaagttacaagtgacctaatgggagctcaaatgtgtgtgtgtctctctgtgtgtttgtgtgtgtgtgtgcactcaagacctctaacagcctcgaagcctggggtggcatcccggccttgccattagcatgcctcatgcatcatcagatgacaaggacaaccctcatgacgaagcaacatgaattagggggcctcttggccttggtccaaaattgtcaatcagaaatgaacataaaggactccagagcagtgggactgtctgtcaaaagactctgtatatcttttgtggatgagttttgtgagagaacagagagaccattgtacctggcacaagggctgttcatgaaaagggagacttactgggaggtgcaagacagtggcatttctcctctcctcttgctgctcagcacagccctggattgcagccccgaggctgagaccagacaaagcccgggaggcagaaagatgctccaagaaccaacactatcaatgtctttgcaaatcctcacaggattcctgtgggtccagctttggaactgggaaacctttcttcggatccgcactcattccactgatgccagctgcccctgaaggatgccagtactgtggtgtgtgagtctcagcagccgcccacacgctcctaactctgctgcatggcagatgcctaggtggaaatagcaaaaacaaggcccaggctggggccagggccagaggggaaggccctggattctcactcatgtgagatcttgaatctctttctttgttctgtttgtttagttagtatcatctggtaaaatagttaaaaaacaacaaaaaactctgtatctgtttctagcatgtgctgcattgactctattaatcacatttcaaattcaccctacattcctctcctcttcactagcctctctgaaggtgtcctggccagccctggagaagcactggtgtctgcagcacccctcagttcctgtgcctcagcccacaggccactgtgataatggtctgtttagcacttctgtatttattgtaagaatgattataatgaagatacacactgtaactacaagaaattataaatgtttttcacatcaggctgttctttttttttttttggaggcgaggttaaagcattactatttgcaaagcactctgtagctccctgttatggggataggtaactaatcagaataataatgtcactcgcatccacttcttagaacctggctccaaaggaaaataagctgatagactcaatcactttcctgaggatggaggcctatggcatgtgtggctgcaggtcgcgaagctgcttaatggtgctgggaagcctagaggaattaaataaagaccctggaggaggtgggatcggagctgcaccttgaacaaatagctcagatttgaacagatggatggaaaagagggaggtgttcccaaccaaggggacatgatacagggaacaggtcctatgtctctttactcctgagagtattaaacctagtaggtgggcagcccctcttggttgcctgttaccttattttgaattctttttgcaaaacatactatcacccgtccaaataatcttttgtctaaatccagacttcacattctgactg

SEQ ID NO: 24590 - protein, 354 aa, Homo sapiens; identical to SEQ ID NO: 3277

SEQ ID NO: 24591 - DNA, 4743 bp, Homo sapiens
cggcctgggcaacagagcgagactccgtctcaaacaaacaaacaaaggaacgaaaacctccggtctccggcacggcaagctctgcgtgaattactttctccattgcaactcccctgtcttgataaatgggctctgtctaagcagcgggcaaggtgaactcgttgggctgttacaggaccagtgacagaccaagggcatgccactgaaggaatccctagacgcacccttctggatgtgagacaggcggatctcacccacgcctgccagcagctcctcggagaactgtgttcctgggtcagccctggcccagaggagcgccggggacccgcagagtgctgctgaagtcaaggctacaactcacctaggatctggggcgccagccctccggtgggcagggcgttctcctcccccaccccctccccgcacgatgacatcaagtgtttggcgttgagttgctccataaaagctgcccggggaagccaggagagcgaagggcggacgtactcgccacggcacccaggctgcgcgcacgcggtcccggtgtgcagctggagagcgagcggccaccgggagcccccggcacagcccgcgcccgccccgcaggagcccgcgaagatgccccggcgcagcctgcacgcggcggccgtgctcctgctggtgatcttaaaggaacagccttccagcccggccccagtgaacggttccaagtggacttattttgtgaagctgaacctgccctcggacatgcacatccagggcctccagtctcgctacagtgccacgcagctgcacctgcactgggggaacccgaatgacccgcacggctctgagcacaccgtcagcggacagcacttcgccgccgagctgcacattgtccattataactcagacctttatcctgacgccagcactgccagcaacaagtcagaaggcctcgctgtcctggctgttctcattgagatgggctccttcaatccgtcctatgacaagatcttcagtcaccttcaacatgtaaagtacaaaggccaggaagcattcgtcccgggattcaacattgaagagctgcttccggagaggaccgctgaatattaccgctaccgggggtccctgaccacacccccttgcaaccccactgtgctctggacagttttccgaaaccccgtgcaaatttcccaggagcagctgctggctttggagacagccctgtactgcacacacatggacgacccttcccccagagaaatgatcaacaacttccggcaggtccagaagttcgatgagaggctggtatacacctccttctcccaaggcatcatcctctcactggccctggctggcattcttggcatctgtattgtggtggtggtgtccatttggcttttcagaaggaagagtatcaaaaaaggtgataacaagggagtcatttacaagccagccaccaagatggagactgaggcccacgcttgaggtccccggagctcccgggcacatccaggaaggaccttgctttggaccctacacacttcggctctctggacacttgcgacacctcaaggtgttctctgtagctcaatctgcaaacatgccaggcctcagggatcctctgctgggtgcctccttgccttgggaccatggccaccccagagccatccgatcgatggatgggatgcactctcagaccaagcagcaggaattcaaagctgcttgctgtaactgtgtgagattgtgaagtggtctgaattctggaatcacaaaccaagccatgctggtgggccattaatggttggaaaacactttcatccggggctttgccagagcgtgctttcaagtgtcctggaaattctgctgcttctccaagctttcagacaagaatgtgcactctctgcttaggttttgcttgggaaactcaacttctttcctctggagacggggcatctccctctgatttccttctgctatgacaaaacctttaatctgcaccttacaactcggggacaaatggggacaggaaggatcaagttgtagagagaaaaagaaaacaagagatatacattgtgatatattagggacactttcacagtcctgtcctctggatcacagacactgcacagaccttagggaatggcaggttcaagttccacttcttggtggggatgagaagggagagagagctagagggacaaagagaatgagaagacatggatgatctgggagagtctcactttggaatcagaattggaatcacattctgtttatcaagccataatgtaaggacagaataatacaatattaagtccaaatccaacctcctgtcagtggagcagttatgttttatactctacagattttacaaataatgaggctgttccttgaaaatgtgttgttgctgtgtcctggaggagacatgagttccgagatgacccaatctgcctttgaatctggaggaaataggcagaaacaaaatgactgtagaacttattctctgtaggccaaatttcatttcagccacttctgcaggatccctactgccaacctggaatggagacttttatctacttctctctctctgaagatgtcaaatcgtggtttagatcaaatatatttcaagctataaaagcaggaggttatctgtgcagggggctggcatcatgtatttaggggcaagtaataatggaatgctactaagatactccatattcttccccgaatcacacagacagtttctgacaggcgcaactcctccattttcctcccgcaggtgagaaccctgtggagatgagtcagtgccatgactgagaaggaaccgacccctagttgagagcaccttgcagttccccgagaactttctgattcacagtctcattttgacagcatgaaatgtcctcttgaagcatagctttttaaatatctttttccttctactcctccctctgactctaagaattctctcttctggaatcgcttgaacccaggaggcggaggttgcagtaagccaaggtcatgccactgcactctagcctgggtgacagagcgagactccatctcaaaaaaaaaaaaaaaaaaattattctgtaccatcacaacttttcacaacgatggcaagccttatgtcttgggagcctgttttgctaggcaaagttacaagtgacctaatgggagctcaaatgtgtgtgtgtctctctgtgtgtttgtgtgtgtgtgtgcactcaagacctctaacagcctcgaagcctggggtggcatcccggccttgccattagcatgcctcatgcatcatcagatgacaaggacaaccctcatgacgaagcaacatgaattagggggcctcttggccttggtccaaaattgtcaatcagaaatgaacataaaggactccagagcagtgggactgtctgtcaaaagactctgtatatcttttgtggatgagttttgtgagagaacagagagaccattgtacctggcacaagggctgttcatgaaaagggagacttactgggaggtgcaagacagtggcatttctcctctcctcttgctgctcagcacagccctggattgcagccccgaggctgagaccagacaaagcccgggaggcagaaagatgctccaagaaccaacactatcaatgtctttgcaaatcctcacaggattcctgtgggtccagctttggaactgggaaacctttcttcggatccgcactcattccactgatgccagctgcccctgaaggatgccagtactgtggtgtgtgagtctcagcagccgcccacacgctcctaactctgctgcatggcagatgcctaggtggaaatagcaaaaacaaggcccaggctggggccagggccagaggggaaggccctggattctcactcatgtgagatcttgaatctctttctttgttctgtttgtttagttagtatcatctggtaaaatagttaaaaaacaacaaaaaactctgtatctgtttctagcatgtgctgcattgactctattaatcacatttcaaattcaccctacattcctctcctcttcactagcctctctgaaggtgtcctggccagccctggagaagcactggtgtctgcagcacccctcagttcctgtgcctcagcccacaggccactgtgataatggtctgtttagcacttctgtatttattgtaagaatgattataatgaagatacacactgtaactacaagaaattataaatgtttttcacatcaggctgttctttttttttttttggaggcgaggttaaagcattactatttgcaaagcactctgtagctccctgttatggggataggtaactaatcagaataataatgtcactcgcatccacttcttagaacctggctccaaaggaaaataagctgatagactcaatcactttcctgaggatggaggcctatggcatgtgtggctgcaggtcgcgaagctgcttaatggtgctgggaagcctagaggaattaaataaagaccctggaggaggtgggatcggagctgcaccttgaacaaatagctcagatttgaacagatggatggaaaagagggaggtgttcccaaccaaggggacatgatacagggaacaggtcctatgtctctttactcctgagagtattaaacctagtaggtgggcagcccctcttggttgcctgttaccttattttgaattctttttgcaaaacatactatcacccgtccaaataatcttttgtctaaatccagacttcacattctgactg

SEQ ID NO: 24592 - protein, 283 aa, Homo sapiens
MPRRSLHAAAVLLLVILKEQPSSPAPVNGSKWTYFVKLNLPSDMHIQGLQSRYSATQLHLHWGNPNDPHGSEHTVSGQHFAAELHIVHYNSDLYPDASTASNKSEGLAVLAVLIEMGSFNPSYDKIFSHLQHVKYKGQEAFVPGFNIEELLPERTAEYYRYRGSLTTPPCNPTVLWTVFRNPVQISQEQLLALETALYCTHMDDPSPREMINNFRQVQKFDERLVYTSFSQGIILSLALAGILGICIVVVVSIWLFRRKSIKKGDNKGVIYKPATKMETEAHA

SEQ ID NO: 24593 - DNA, 4923 bp, Homo sapiens
cggcctgggcaacagagcgagactccgtctcaaacaaacaaacaaaggaacgaaaacctccggtctccggcacggcaagctctgcgtgaattactttctccattgcaactcccctgtcttgataaatgggctctgtctaagcagcgggcaaggtgaactcgttgggctgttacaggaccagtgacagaccaagggcatgccactgaaggaatccctagacgcacccttctggatgtgagacaggcggatctcacccacgcctgccagcagctcctcggagaactgtgttcctgggtcagccctggcccagaggagcgccggggacccgcagagtgctgctgaagtcaaggctacaactcacctaggatctggggcgccagccctccggtgggcagggcgttctcctcccccaccccctccccgcacgatgacatcaagtgtttggcgttgagttgctccataaaagctgcccggggaagccaggagagcgaagggcggacgtactcgccacggcacccaggctgcgcgcacgcggtcccggtgtgcagctggagagcgagcggccaccgggagcccccggcacagcccgcgcccgccccgcaggagcccgcgaagatgccccggcgcagcctgcacgcggcggccgtgctcctgctggtgatcttaaaggaacagccttccagcccggccccagtgaacggttccaagtggacttattttggtcctgatggggagaatagctggtccaagaagtacccgtcgtgtgggggcctgctgcagtcccccatagacctgcacagtgacatcctccagtatgacgccagcctcacgcccctcgagttccaaggctacaatctgtctgccaacaagcagtttctcctgaccaacaatggccattcagtgaagctgaacctgccctcggacatgcacatccagggcctccagtctcgctacagtgccacgcagctgcacctgcactgggggaacccgaatgacccgcacggctctgagcacaccgtcagcggacagcacttcgccgccgagctgcacattgtccattataactcagacctttatcctgacgccagcactgccagcaacaagtcagaaggcctcgctgtcctggctgttctcattgagatgggctccttcaatccgtcctatgacaagatcttcagtcaccttcaacatgtaaagtacaaaggccaggaagcattcgtcccgggattcaacattgaagagctgcttccggagaggaccgctgaatattaccgctaccgggggtccctgaccacacccccttgcaaccccactgtgctctggacagttttccgaaaccccgtgcaaatttcccaggagcagctgctggctttggagacagccctgtactgcacacacatggacgacccttcccccagagaaatgatcaacaacttccggcaggtccagaagttcgatgagaggctggtatacacctccttctcccaaggcatcatcctctcactggccctggctggcattcttggcatctgtattgtggtggtggtgtccatttggcttttcagaaggaagagtatcaaaaaaggtgataacaagggagtcatttacaagccagccaccaagatggagactgaggcccacgcttgaggtccccggagctcccgggcacatccaggaaggaccttgctttggaccctacacacttcggctctctggacacttgcgacacctcaaggtgttctctgtagctcaatctgcaaacatgccaggcctcagggatcctctgctgggtgcctccttgccttgggaccatggccaccccagagccatccgatcgatggatgggatgcactctcagaccaagcagcaggaattcaaagctgcttgctgtaactgtgtgagattgtgaagtggtctgaattctggaatcacaaaccaagccatgctggtgggccattaatggttggaaaacactttcatccggggctttgccagagcgtgctttcaagtgtcctggaaattctgctgcttctccaagctttcagacaagaatgtgcactctctgcttaggttttgcttgggaaactcaacttctttcctctggagacggggcatctccctctgatttccttctgctatgacaaaacctttaatctgcaccttacaactcggggacaaatggggacaggaaggatcaagttgtagagagaaaaagaaaacaagagatatacattgtgatatattagggacactttcacagtcctgtcctctggatcacagacactgcacagaccttagggaatggcaggttcaagttccacttcttggtggggatgagaagggagagagagctagagggacaaagagaatgagaagacatggatgatctgggagagtctcactttggaatcagaattggaatcacattctgtttatcaagccataatgtaaggacagaataatacaatattaagtccaaatccaacctcctgtcagtggagcagttatgttttatactctacagattttacaaataatgaggctgttccttgaaaatgtgttgttgctgtgtcctggaggagacatgagttccgagatgacccaatctgcctttgaatctggaggaaataggcagaaacaaaatgactgtagaacttattctctgtaggccaaatttcatttcagccacttctgcaggatccctactgccaacctggaatggagacttttatctacttctctctctctgaagatgtcaaatcgtggtttagatcaaatatatttcaagctataaaagcaggaggttatctgtgcagggggctggcatcatgtatttaggggcaagtaataatggaatgctactaagatactccatattcttccccgaatcacacagacagtttctgacaggcgcaactcctccattttcctcccgcaggtgagaaccctgtggagatgagtcagtgccatgactgagaaggaaccgacccctagttgagagcaccttgcagttccccgagaactttctgattcacagtctcattttgacagcatgaaatgtcctcttgaagcatagctttttaaatatctttttccttctactcctccctctgactctaagaattctctcttctggaatcgcttgaacccaggaggcggaggttgcagtaagccaaggtcatgccactgcactctagcctgggtgacagagcgagactccatctcaaaaaaaaaaaaaaaaaaattattctgtaccatcacaacttttcacaacgatggcaagccttatgtcttgggagcctgttttgctaggcaaagttacaagtgacctaatgggagctcaaatgtgtgtgtgtctctctgtgtgtttgtgtgtgtgtgtgcactcaagacctctaacagcctcgaagcctggggtggcatcccggccttgccattagcatgcctcatgcatcatcagatgacaaggacaaccctcatgacgaagcaacatgaattagggggcctcttggccttggtccaaaattgtcaatcagaaatgaacataaaggactccagagcagtgggactgtctgtcaaaagactctgtatatcttttgtggatgagttttgtgagagaacagagagaccattgtacctggcacaagggctgttcatgaaaagggagacttactgggaggtgcaagacagtggcatttctcctctcctcttgctgctcagcacagccctggattgcagccccgaggctgagaccagacaaagcccgggaggcagaaagatgctccaagaaccaacactatcaatgtctttgcaaatcctcacaggattcctgtgggtccagctttggaactgggaaacctttcttcggatccgcactcattccactgatgccagctgcccctgaaggatgccagtactgtggtgtgtgagtctcagcagccgcccacacgctcctaactctgctgcatggcagatgcctaggtggaaatagcaaaaacaaggcccaggctggggccagggccagaggggaaggccctggattctcactcatgtgagatcttgaatctctttctttgttctgtttgtttagttagtatcatctggtaaaatagttaaaaaacaacaaaaaactctgtatctgtttctagcatgtgctgcattgactctattaatcacatttcaaattcaccctacattcctctcctcttcactagcctctctgaaggtgtcctggccagccctggagaagcactggtgtctgcagcacccctcagttcctgtgcctcagcccacaggccactgtgataatggtctgtttagcacttctgtatttattgtaagaatgattataatgaagatacacactgtaactacaagaaattataaatgtttttcacatcaggctgttctttttttttttttggaggcgaggttaaagcattactatttgcaaagcactctgtagctccctgttatggggataggtaactaatcagaataataatgtcactcgcatccacttcttagaacctggctccaaaggaaaataagctgatagactcaatcactttcctgaggatggaggcctatggcatgtgtggctgcaggtcgcgaagctgcttaatggtgctgggaagcctagaggaattaaataaagaccctggaggaggtgggatcggagctgcaccttgaacaaatagctcagatttgaacagatggatggaaaagagggaggtgttcccaaccaaggggacatgatacagggaacaggtcctatgtctctttactcctgagagtattaaacctagtaggtgggcagcccctcttggttgcctgttaccttattttgaattctttttgcaaaacatactatcacccgtccaaataatcttttgtctaaatccagacttcacattctgactg

SEQ ID NO: 24594 - protein, 343 aa, Homo sapiens; identical to SEQ ID NO: 3279

SEQ ID NO: 24595 - DNA, 4433 bp, Homo sapiens
cggcctgggcaacagagcgagactccgtctcaaacaaacaaacaaaggaacgaaaacctccggtctccggcacggcaagctctgcgtgaattactttctccattgcaactcccctgtcttgataaatgggctctgtctaagcagcgggcaaggtgaactcgttgggctgttacaggaccagtgacagaccaagggcatgccactgaaggaatccctagacgcacccttctggatgtgagacaggcggatctcacccacgcctgccagcagctcctcggagaactgtgttcctgggtcagccctggcccagaggagcgccggggacccgcagagtgctgctgaagtcaaggctacaactcacctaggatctggggcgccagccctccggtgggcagggcgttctcctcccccaccccctccccgcacgatgacatcaagtgtttggcgttgagttgctccataaaagctgcccggggaagccaggagagcgaagggcggacgtactcgccacggcacccaggctgcgcgcacgcggtcccggtgtgcagctggagagcgagcggccaccgggagcccccggcacagcccgcgcccgccccgcaggagcccgcgaagatgccccggcgcagcctgcacgcggcggccgtgctcctgctggtgatcttaaaggaacagccttccagcccggccccagtgaacggttccaagtggacttattttggtcctgatggggagaatagctggtccaagaagtacccgtcgtgtgggggcctgctgcagtcccccatagacctgcacagtgacatcctccagtatgacgccagcctcacgcccctcgagttccaaggctacaatctgtctgccaacaagcagtttctcctgaccaacaatggccattcagtgaagctgaacctgccctcggacatgcacatccagggcctccagtctcgctacagtgccacgcagctgcacctgcactgggggaacccgaatgacccgcacggctctgagcacaccgtcagcggacagcacttcgccgccgagctgcacattgtccattataactcagacctttatcctgacgccagcactgccagcaacaagtcagaaggcctcgctgtcctggctgttctcattgagatgggctccttcaatccgtcctatgacaagatcttcagtcaccttcaacatgtaaagtacaaaggccaggaagcattcgtcccgggattcaacattgaagagctgcttccggagaggaccgctgaatattaccgctaccgggggtccctgaccacacccccttgcaaccccactgtgctctggacagttttccgaaaccccgtgcaaatttcccaggagcagctgctggctttggagacagccctgtactgcacacacatggacgacccttcccccagagaaatgatcaacaacttccggcaggtccagaagttcgatgagaggctggtatacacctccttctcccaagtgcaagtctgtactgcggcaggactgagtctgggcatcatcctctcactggccctggctggcattcttggcatctgtattgtggtggtggtgtccatttggcttttcagaaggaagagtatcaaaaaaggtgataacaagggagtcatttacaagccagccaccaagatggagactgaggcccacgcttgaggtccccggagctcccgggcacatccaggaaggaccttgctttggaccctacacacttcggctctctggacacttgcgacacctcaaggtgttctctgtagctcaatctgcaaacatgccaggcctcagggatcctctgctgggtgcctccttgccttgggaccatggccaccccagagccatccgatcgatggatgggatgcactctcagaccaagcagcaggaattcaaagctgcttgctgtaactgtgtgagattgtgaagtggtctgaattctggaatcacaaaccaagccatgctggtgggccattaatggttggaaaacactttcatccggggctttgccagagcgtgctttcaagtgtcctggaaattctgctgcttctccaagctttcagacaagaatgtgcactctctgcttaggttttgcttgggaaactcaacttctttcctctggagacggggcatctccctctgatttccttctgctatgacaaaacctttaatctgcaccttacaactcggggacaaatggggacaggaaggatcaagttgtagagagaaaaagaaaacaagagatatacattgtgatatattagggacactttcacagtcctgtcctctggatcacagacactgcacagaccttagggaatggcaggttcaagttccacttcttggtggggatgagaagggagagagagctagagggacaaagagaatgagaagacatggatgatctgggagagtctcactttggaatcagaattggaatcacattctgtttatcaagccataatgtaaggacagaataatacaatattaagtccaaatccaacctcctgtcagtggagcagttatgttttatactctacagattttacaaataatgaggctgttccttgaaaatgtgttgttgctgtgtcctggaggagacatgagttccgagatgacccaatctgcctttgaatctggaggaaataggcagaaacaaaatgactgtagaacttattctctgtaggccaaatttcatttcagccacttctgcaggatccctactgccaacctggaatggagacttttatctacttctctctctctgaagatgtcaaatcgtggtttagatcaaatatatttcaagctataaaagcaggaggttatctgtgcagggggctggcatcatgtatttaggggcaagtaataatggaatgctactaagatactccatattcttccccgaatcacacagacagtttctgacaggcgcaactcctccattttcctcccgcaggtgagaaccctgtggagatgagtcagtgccatgactgagaaggaaccgacccctagttgagagcaccttgcagttccccgagaactttctgattcacagtctcattttgacagcatgaaatgtcctcttgaagcatagctttttaaatatctttttccttctactcctccctctgactctaagaattctctcttctggaatcgcttgaacccaggaggcggaggttgcagtaagccaaggtcatgccactgcactctagcctgggtgacagagcgagactccatctcaaaaaaaaaaaaaaaaaaattattctgtaccatcacaacttttcacaacgatggcaagccttatgtcttgggagcctgttttgctaggcaaagttacaagtgacctaatgggagctcaaatgtgtgtgtgtctctctgtgtgtttgtgtgtgtgtgtgcactcaagacctctaacagcctcgaagcctggggtggcatcccggccttgccattagcatgcctcatgcatcatcagatgacaaggacaaccctcatgacgaagcaacatgaattagggggcctcttggccttggtccaaaattgtcaatcagaaatgaacataaaggactccagagcagtgggactgtctgtcaaaagactctgtatatcttttgtggatgagttttgtgagagaacagagagaccattgtacctggcacaagggctgttcatgaaaagggagacttactgggaggtgcaagacagtggcatttctcctctcctcttgctgctcagcacagccctggattgcagccccgaggctgagaccagacaaagcccgggaggcagaaagatgctccaagaaccaacactatcaatgtctttgcaaatcctcacaggattcctgtgggtccagctttggaactgggaaacctttcttcggatccgcactcattccactgatgccagctgcccctgaaggatgccagtactgtggtgtgtgagtctcagcagccgcccacacgctcctaactctgctgcatggcagatgcctaggtggaaatagcaaaaacaaggcccaggctggggccagggccagaggggaaggccctggattctcactcatgtgagatcttgaatctctttctttgttctgtttgtttagttagtatcatctggtaaaatagttaaaaaacaacaaaaaactctgtatctgtttctagcatgtgctgcattgactctattaatcacatttcaaattcaccctacattcctctcctcttcactagcctctctgaaggtgtcctggccagccctggagaagcactggtgtctgcagcacccctcagttcctgtgcctcagcccacaggccactgtgataatggtctgtttagcacttctgtatttattgtaagaatgattataatgaagatacacactgtaactacaagaaattataaatgtttttcacatc

SEQ ID NO: 24596 - protein, 354 aa, Homo sapiens; identical to SEQ ID NO: 3277

SEQ ID NO: 24597 - DNA, 4220 bp, Homo sapiens
cggcctgggcaacagagcgagactccgtctcaaacaaacaaacaaaggaacgaaaacctccggtctccggcacggcaagctctgcgtgaattactttctccattgcaactcccctgtcttgataaatgggctctgtctaagcagcgggcaaggtgaactcgttgggctgttacaggaccagtgacagaccaagggcatgccactgaaggaatccctagacgcacccttctggatgtgagacaggcggatctcacccacgcctgccagcagctcctcggagaactgtgttcctgggtcagccctggcccagaggagcgccggggacccgcagagtgctgctgaagtcaaggctacaactcacctaggatctggggcgccagccctccggtgggcagggcgttctcctcccccaccccctccccgcacgatgacatcaagtgtttggcgttgagttgctccataaaagctgcccggggaagccaggagagcgaagggcggacgtactcgccacggcacccaggctgcgcgcacgcggtcccggtgtgcagctggagagcgagcggccaccgggagcccccggcacagcccgcgcccgccccgcaggagcccgcgaagatgccccggcgcagcctgcacgcggcggccgtgctcctgctggtgatcttaaaggaacagccttccagcccggccccagtgaacggttccaagtggacttattttgtgaagctgaacctgccctcggacatgcacatccagggcctccagtctcgctacagtgccacgcagctgcacctgcactgggggaacccgaatgacccgcacggctctgagcacaccgtcagcggacagcacttcgccgccgagctgcacattgtccattataactcagacctttatcctgacgccagcactgccagcaacaagtcagaaggcctcgctgtcctggctgttctcattgagatgggctccttcaatccgtcctatgacaagatcttcagtcaccttcaacatgtaaagtacaaaggccaggaagcattcgtcccgggattcaacattgaagagctgcttccggagaggaccgctgaatattaccgctaccgggggtccctgaccacacccccttgcaaccccactgtgctctggacagttttccgaaaccccgtgcaaatttcccaggagcagctgctggctttggagacagccctgtactgcacacacatggacgacccttcccccagagaaatgatcaacaacttccggcaggtccagaagttcgatgagaggctggtatacacctccttctcccaaggcatcatcctctcactggccctggctggcattcttggcatctgtattgtggtggtggtgtccatttggcttttcagaaggaagagtatcaaaaaaggtgataacaagggagtcatttacaagccagccaccaagatggagactgaggcccacgcttgaggtccccggagctcccgggcacatccaggaaggaccttgctttggaccctacacacttcggctctctggacacttgcgacacctcaaggtgttctctgtagctcaatctgcaaacatgccaggcctcagggatcctctgctgggtgcctccttgccttgggaccatggccaccccagagccatccgatcgatggatgggatgcactctcagaccaagcagcaggaattcaaagctgcttgctgtaactgtgtgagattgtgaagtggtctgaattctggaatcacaaaccaagccatgctggtgggccattaatggttggaaaacactttcatccggggctttgccagagcgtgctttcaagtgtcctggaaattctgctgcttctccaagctttcagacaagaatgtgcactctctgcttaggttttgcttgggaaactcaacttctttcctctggagacggggcatctccctctgatttccttctgctatgacaaaacctttaatctgcaccttacaactcggggacaaatggggacaggaaggatcaagttgtagagagaaaaagaaaacaagagatatacattgtgatatattagggacactttcacagtcctgtcctctggatcacagacactgcacagaccttagggaatggcaggttcaagttccacttcttggtggggatgagaagggagagagagctagagggacaaagagaatgagaagacatggatgatctgggagagtctcactttggaatcagaattggaatcacattctgtttatcaagccataatgtaaggacagaataatacaatattaagtccaaatccaacctcctgtcagtggagcagttatgttttatactctacagattttacaaataatgaggctgttccttgaaaatgtgttgttgctgtgtcctggaggagacatgagttccgagatgacccaatctgcctttgaatctggaggaaataggcagaaacaaaatgactgtagaacttattctctgtaggccaaatttcatttcagccacttctgcaggatccctactgccaacctggaatggagacttttatctacttctctctctctgaagatgtcaaatcgtggtttagatcaaatatatttcaagctataaaagcaggaggttatctgtgcagggggctggcatcatgtatttaggggcaagtaataatggaatgctactaagatactccatattcttccccgaatcacacagacagtttctgacaggcgcaactcctccattttcctcccgcaggtgagaaccctgtggagatgagtcagtgccatgactgagaaggaaccgacccctagttgagagcaccttgcagttccccgagaactttctgattcacagtctcattttgacagcatgaaatgtcctcttgaagcatagctttttaaatatctttttccttctactcctccctctgactctaagaattctctcttctggaatcgcttgaacccaggaggcggaggttgcagtaagccaaggtcatgccactgcactctagcctgggtgacagagcgagactccatctcaaaaaaaaaaaaaaaaaaattattctgtaccatcacaacttttcacaacgatggcaagccttatgtcttgggagcctgttttgctaggcaaagttacaagtgacctaatgggagctcaaatgtgtgtgtgtctctctgtgtgtttgtgtgtgtgtgtgcactcaagacctctaacagcctcgaagcctggggtggcatcccggccttgccattagcatgcctcatgcatcatcagatgacaaggacaaccctcatgacgaagcaacatgaattagggggcctcttggccttggtccaaaattgtcaatcagaaatgaacataaaggactccagagcagtgggactgtctgtcaaaagactctgtatatcttttgtggatgagttttgtgagagaacagagagaccattgtacctggcacaagggctgttcatgaaaagggagacttactgggaggtgcaagacagtggcatttctcctctcctcttgctgctcagcacagccctggattgcagccccgaggctgagaccagacaaagcccgggaggcagaaagatgctccaagaaccaacactatcaatgtctttgcaaatcctcacaggattcctgtgggtccagctttggaactgggaaacctttcttcggatccgcactcattccactgatgccagctgcccctgaaggatgccagtactgtggtgtgtgagtctcagcagccgcccacacgctcctaactctgctgcatggcagatgcctaggtggaaatagcaaaaacaaggcccaggctggggccagggccagaggggaaggccctggattctcactcatgtgagatcttgaatctctttctttgttctgtttgtttagttagtatcatctggtaaaatagttaaaaaacaacaaaaaactctgtatctgtttctagcatgtgctgcattgactctattaatcacatttcaaattcaccctacattcctctcctcttcactagcctctctgaaggtgtcctggccagccctggagaagcactggtgtctgcagcacccctcagttcctgtgcctcagcccacaggccactgtgataatggtctgtttagcacttctgtatttattgtaagaatgattataatgaagatacacactgtaactacaagaaattataaatgtttttcacatc

SEQ ID NO: 24598 - protein, 283 aa, Homo sapiens; identical to SEQ ID NO: 24592

SEQ ID NO: 24599 - DNA, 4400 bp, Homo sapiens
cggcctgggcaacagagcgagactccgtctcaaacaaacaaacaaaggaacgaaaacctccggtctccggcacggcaagctctgcgtgaattactttctccattgcaactcccctgtcttgataaatgggctctgtctaagcagcgggcaaggtgaactcgttgggctgttacaggaccagtgacagaccaagggcatgccactgaaggaatccctagacgcacccttctggatgtgagacaggcggatctcacccacgcctgccagcagctcctcggagaactgtgttcctgggtcagccctggcccagaggagcgccggggacccgcagagtgctgctgaagtcaaggctacaactcacctaggatctggggcgccagccctccggtgggcagggcgttctcctcccccaccccctccccgcacgatgacatcaagtgtttggcgttgagttgctccataaaagctgcccggggaagccaggagagcgaagggcggacgtactcgccacggcacccaggctgcgcgcacgcggtcccggtgtgcagctggagagcgagcggccaccgggagcccccggcacagcccgcgcccgccccgcaggagcccgcgaagatgccccggcgcagcctgcacgcggcggccgtgctcctgctggtgatcttaaaggaacagccttccagcccggccccagtgaacggttccaagtggacttattttggtcctgatggggagaatagctggtccaagaagtacccgtcgtgtgggggcctgctgcagtcccccatagacctgcacagtgacatcctccagtatgacgccagcctcacgcccctcgagttccaaggctacaatctgtctgccaacaagcagtttctcctgaccaacaatggccattcagtgaagctgaacctgccctcggacatgcacatccagggcctccagtctcgctacagtgccacgcagctgcacctgcactgggggaacccgaatgacccgcacggctctgagcacaccgtcagcggacagcacttcgccgccgagctgcacattgtccattataactcagacctttatcctgacgccagcactgccagcaacaagtcagaaggcctcgctgtcctggctgttctcattgagatgggctccttcaatccgtcctatgacaagatcttcagtcaccttcaacatgtaaagtacaaaggccaggaagcattcgtcccgggattcaacattgaagagctgcttccggagaggaccgctgaatattaccgctaccgggggtccctgaccacacccccttgcaaccccactgtgctctggacagttttccgaaaccccgtgcaaatttcccaggagcagctgctggctttggagacagccctgtactgcacacacatggacgacccttcccccagagaaatgatcaacaacttccggcaggtccagaagttcgatgagaggctggtatacacctccttctcccaaggcatcatcctctcactggccctggctggcattcttggcatctgtattgtggtggtggtgtccatttggcttttcagaaggaagagtatcaaaaaaggtgataacaagggagtcatttacaagccagccaccaagatggagactgaggcccacgcttgaggtccccggagctcccgggcacatccaggaaggaccttgctttggaccctacacacttcggctctctggacacttgcgacacctcaaggtgttctctgtagctcaatctgcaaacatgccaggcctcagggatcctctgctgggtgcctccttgccttgggaccatggccaccccagagccatccgatcgatggatgggatgcactctcagaccaagcagcaggaattcaaagctgcttgctgtaactgtgtgagattgtgaagtggtctgaattctggaatcacaaaccaagccatgctggtgggccattaatggttggaaaacactttcatccggggctttgccagagcgtgctttcaagtgtcctggaaattctgctgcttctccaagctttcagacaagaatgtgcactctctgcttaggttttgcttgggaaactcaacttctttcctctggagacggggcatctccctctgatttccttctgctatgacaaaacctttaatctgcaccttacaactcggggacaaatggggacaggaaggatcaagttgtagagagaaaaagaaaacaagagatatacattgtgatatattagggacactttcacagtcctgtcctctggatcacagacactgcacagaccttagggaatggcaggttcaagttccacttcttggtggggatgagaagggagagagagctagagggacaaagagaatgagaagacatggatgatctgggagagtctcactttggaatcagaattggaatcacattctgtttatcaagccataatgtaaggacagaataatacaatattaagtccaaatccaacctcctgtcagtggagcagttatgttttatactctacagattttacaaataatgaggctgttccttgaaaatgtgttgttgctgtgtcctggaggagacatgagttccgagatgacccaatctgcctttgaatctggaggaaataggcagaaacaaaatgactgtagaacttattctctgtaggccaaatttcatttcagccacttctgcaggatccctactgccaacctggaatggagacttttatctacttctctctctctgaagatgtcaaatcgtggtttagatcaaatatatttcaagctataaaagcaggaggttatctgtgcagggggctggcatcatgtatttaggggcaagtaataatggaatgctactaagatactccatattcttccccgaatcacacagacagtttctgacaggcgcaactcctccattttcctcccgcaggtgagaaccctgtggagatgagtcagtgccatgactgagaaggaaccgacccctagttgagagcaccttgcagttccccgagaactttctgattcacagtctcattttgacagcatgaaatgtcctcttgaagcatagctttttaaatatctttttccttctactcctccctctgactctaagaattctctcttctggaatcgcttgaacccaggaggcggaggttgcagtaagccaaggtcatgccactgcactctagcctgggtgacagagcgagactccatctcaaaaaaaaaaaaaaaaaaattattctgtaccatcacaacttttcacaacgatggcaagccttatgtcttgggagcctgttttgctaggcaaagttacaagtgacctaatgggagctcaaatgtgtgtgtgtctctctgtgtgtttgtgtgtgtgtgtgcactcaagacctctaacagcctcgaagcctggggtggcatcccggccttgccattagcatgcctcatgcatcatcagatgacaaggacaaccctcatgacgaagcaacatgaattagggggcctcttggccttggtccaaaattgtcaatcagaaatgaacataaaggactccagagcagtgggactgtctgtcaaaagactctgtatatcttttgtggatgagttttgtgagagaacagagagaccattgtacctggcacaagggctgttcatgaaaagggagacttactgggaggtgcaagacagtggcatttctcctctcctcttgctgctcagcacagccctggattgcagccccgaggctgagaccagacaaagcccgggaggcagaaagatgctccaagaaccaacactatcaatgtctttgcaaatcctcacaggattcctgtgggtccagctttggaactgggaaacctttcttcggatccgcactcattccactgatgccagctgcccctgaaggatgccagtactgtggtgtgtgagtctcagcagccgcccacacgctcctaactctgctgcatggcagatgcctaggtggaaatagcaaaaacaaggcccaggctggggccagggccagaggggaaggccctggattctcactcatgtgagatcttgaatctctttctttgttctgtttgtttagttagtatcatctggtaaaatagttaaaaaacaacaaaaaactctgtatctgtttctagcatgtgctgcattgactctattaatcacatttcaaattcaccctacattcctctcctcttcactagcctctctgaaggtgtcctggccagccctggagaagcactggtgtctgcagcacccctcagttcctgtgcctcagcccacaggccactgtgataatggtctgtttagcacttctgtatttattgtaagaatgattataatgaagatacacactgtaactacaagaaattataaatgtttttcacatc

SEQ ID NO: 24600 - protein, 343 aa, Homo sapiens; identical to SEQ ID NO: 3279

SEQ ID NO: 24601 - DNA, 3258 bp, Homo sapiens
cggcctgggcaacagagcgagactccgtctcaaacaaacaaacaaaggaacgaaaacctccggtctccggcacggcaagctctgcgtgaattactttctccattgcaactcccctgtcttgataaatgggctctgtctaagcagcgggcaaggtgaactcgttgggctgttacaggaccagtgacagaccaagggcatgccactgaaggaatccctagacgcacccttctggatgtgagacaggcggatctcacccacgcctgccagcagctcctcggagaactgtgttcctgggtcagccctggcccagaggagcgccggggacccgcagagtgctgctgaagtcaaggctacaactcacctaggatctggggcgccagccctccggtgggcagggcgttctcctcccccaccccctccccgcacgatgacatcaagtgtttggcgttgagttgctccataaaagctgcccggggaagccaggagagcgaagggcggacgtactcgccacggcacccaggctgcgcgcacgcggtcccggtgtgcagctggagagcgagcggccaccgggagcccccggcacagcccgcgcccgccccgcaggagcccgcgaagatgccccggcgcagcctgcacgcggcggccgtgctcctgctggtgatcttaaaggaacagccttccagcccggccccagtgaacggttccaagtggacttattttggtcctgatggggagaatagctggtccaagaagtacccgtcgtgtgggggcctgctgcagtcccccatagacctgcacagtgacatcctccagtatgacgccagcctcacgcccctcgagttccaaggctacaatctgtctgccaacaagcagtttctcctgaccaacaatggccattcagtgaagctgaacctgccctcggacatgcacatccagggcctccagtctcgctacagtgccacgcagctgcacctgcactgggggaacccgaatgacccgcacggctctgagcacaccgtcagcggacagcacttcgccgccgagctgcacattgtccattataactcagacctttatcctgacgccagcactgccagcaacaagtcagaaggcctcgctgtcctggctgttctcattgagatgggctccttcaatccgtcctatgacaagatcttcagtcaccttcaacatgtaaagtacaaaggccaggaagcattcgtcccgggattcaacattgaagagctgcttccggagaggaccgctgaatattaccgctaccgggggtccctgaccacacccccttgcaaccccactgtgctctggacagttttccgaaaccccgtgcaaatttcccaggagcagctgctggctttggagacagccctgtactgcacacacatggacgacccttcccccagagaaatgatcaacaacttccggcaggtccagaagttcgatgagaggctggtatacacctccttctcccaagtgcaagtctgtactgcggcaggactgagtctgggcatcatcctctcactggccctggctggcattcttggcatctgtattgtggtggtggtgtccatttggcttttcagaaggaagagtatcaaaaaaggtgataacaagggagtcatttacaagccagccaccaagatggagactgaggcccacgcttgaggtccccggagctcccgggcacatccaggaaggaccttgctttggaccctacacacttcggctctctggacacttgcgacacctcaaggtgttctctgtagctcaatctgcaaacatgccaggcctcagggatcctctgctgggtgcctccttgccttgggaccatggccaccccagagccatccgatcgatggatgggatgcactctcagaccaagcagcaggaattcaaagctgcttgctgtaactgtgtgagattgtgaagtggtctgaattctggaatcacaaaccaagccatgctggtgggccattaatggttggaaaacactttcatccggggctttgccagagcgtgctttcaagtgtcctggaaattctgctgcttctccaagctttcagacaagaatgtgcactctctgcttaggttttgcttgggaaactcaacttctttcctctggagacggggcatctccctctgatttccttctgctatgacaaaacctttaatctgcaccttacaactcggggacaaatggggacaggaaggatcaagttgtagagagaaaaagaaaacaagagatatacattgtgatatattagggacactttcacagtcctgtcctctggatcacagacactgcacagaccttagggaatggcaggttcaagttccacttcttggtggggatgagaagggagagagagctagagggacaaagagaatgagaagacatggatgatctgggagagtctcactttggaatcagaattggaatcacattctgtttatcaagccataatgtaaggacagaataatacaatattaagtccaaatccaacctcctgtcagtggagcagttatgttttatactctacagattttacaaataatgaggctgttccttgaaaatgtgttgttgctgtgtcctggaggagacatgagttccgagatgacccaatctgcctttgaatctggaggaaataggcagaaacaaaatgactgtagaacttattctctgtaggccaaatttcatttcagccacttctgcaggatccctactgccaacctggaatggagacttttatctacttctctctctctgaagatgtcaaatcgtggtttagatcaaatatatttcaagctataaaagcaggaggttatctgtgcagggggctggcatcatgtatttaggggcaagtaataatggaatgctactaagatactccatattcttccccgaatcacacagacagtttctgacaggcgcaactcctccattttcctcccgcaggtgagaaccctgtggagatgagtcagtgccatgactgagaaggaaccgacccctagttgagagcaccttgcagttccccgagaactttctgattcacagtctcattttgacagcatgaaatgtcctcttgaagcatagctttttaaatatctttttccttctactcctccctctgactctaagaattctctcttctggaatcgcttgaacccaggaggcggaggttgcagtaagccaaggtcatgccactgcactctagcctgggtgacagagcgagactccatctc

SEQ ID NO: 24602 - protein, 354 aa, Homo sapiens; identical to SEQ ID NO: 3277

SEQ ID NO: 24603 - DNA, 636 bp, Homo sapiens
agagcaggtagtcagccaaggcttcatagttctcacccacggcaattcagctagcaaactagagacacttccccaagaagacacagcgtggcaagactgctgagacgcataaagaaatcttagctggaatgccttctcagaatcttgattttcaaagtgatggattgggagatcccaagccatgaataaagggtgctcatcacagatggaacaatggcgagagcacacctggacaggggaggggcaggagttctgattcctgacacaggtttcctggttgaatgttctgttgtagaagaatgcaactgagttttctaaacagatcttcttcttgacatccttgctgaacgagagcaaaggagacagctgggagcagatgggcaaatcccagtttgcccaaagaaatgtctattttccaaggggcatgaagaatttaggaataaagcagatctgatttctaattctgactttgctactggcaaattgtgtggactcaggaaagtgaccggccctctttaagactcagtgtgcttacctctgaaatggagctgtcaatcacatctgcctcacaggcttgttctgaggatgaagtgagaaaatgcccacgaggtgctggttgcagcagctggtgcatag

SEQ ID NO: 24604 - protein, 31 aa, Homo sapiens
MARAHLDRGGAGVLIPDTGFLVECSVVEECN

SEQ ID NO: 24605 - DNA, 1173 bp, Homo sapiens
ggaatgccttctcagaatcttgattttcaaagtgatggattgggagatcccaagccatgaataaagggtgctcatcacagatggaacaatggcgagagcacacctggacaggggaggggcaggagttctgattcctgacacaggtttcctggttgaatgttctgttgtagaagaatgcaactgagttttctaaacagatcttcttcttgacatccttgctgaacgaaagtgaccggccctctttaagactcagtgtgcttacctctgaaatggagctgtcaatcacatctgcctcacaggcttgttctgaggatgaagtgagaaaatgcccacgaggtgctggttgcagcagctggtgcatagagcttaaaaaggatgcagtcccaaaacatagaaggatttactccagatccaagcaatgagtcaggaacagaaagcctgatgccctcacctggaactctccctcctccctggatgaggaccttccccagaattgcagggcacccacacaagaccaagcaagttcagagaaaattgaaacctgactttagagcctctgggatgttcactacacctcattgaacctgtttggttcacagagctccaactaccgtctacttcctgcaactggcctgctgccaactccccagatctcttgtggagctgccggaagagacagcctgccacagaagaaagcagccctcctctttcatggcctcccacatcttgaaacaaacacaagcaaacaaaacaaaagcttgagtcccagcctgattcaccaggtttggttcccaattgttgaaattcccttcccagggctctcagaaccagggttggctggaggggtgaaagaggctggccctgagcccagtaataggacaccaagggggagctaaaagctgggatctggggtgaagatggggtcttccaagctgggaggcagacaccaggccagagcaaccggcctgccccagctcaggcctcttaacccatgcagggcaagagtataaacagaggccacggaccacatgcctcagtatttaaacttataaatcaagctaacataacatgaaatcaaatatgttctatcctcctagcttgacaaatactttcataacgagatggaatgccaggttcagatttagaattttcacactccttaaagttccaagt

SEQ ID NO: 24606 - protein, 50 aa, Homo sapiens
MELSITSASQACSEDEVRKCPRGAGCSSWCIELKKDAVPKHRRIYSRSKQ

SEQ ID NO: 24607 - DNA, 615 bp, Homo sapiens
gattcatcctggcatcatggtacctgagtacttagaatgttggaaggtgtgctcagtgaagatgaataatttgcctaagaacacttgactggtgaatcccattctcatttttgcagtatccaagagctggatgcctacatgatgcagtccacagtggctgagcaccttctgtccctgggatctcagactctgcctgccacagagcagatgactggaaaaccctccccacttgctgtcatcattcctgaaaggtcttcaggtgtgccagcaattttcagactgaatatctacaccagaaaagcacataactaccatgagcataagacgtgggagtgccatggagtgaccatagaagtatagacagtaagatcacagccagatacaacttcttgttttatagatgagagacctgaggcccagaaagaggaaggcacttgcccatggtcacacagtgagttagtgagactggagcccagctctccagggttctgtgctgtgctagtcacaggctgttaggcaattggctttcctgggttctggtcaaattcattttttgcctactctgctgcatctacacagtcagatgtgatttgggttaaagttcattgaatcatg

SEQ ID NO: 24608 - protein, 73 aa, Homo sapiens
MMQSTVAEHLLSLGSQTLPATEQMTGKPSPLAVIIPERSSGVPAIFRLNIYTRKAHNYHEHKTWECHGVTIEV

SEQ ID NO: 24609 - DNA, 2421 bp, Homo sapiens
tctacggagcggggcgccgggagacggcgggcgagaaaacccggcgtccggaagcccgtgctttctttgacgcaagggctcgagacgcagccgccgtcggccgagcgcccggctagaagcgacaccagacggagcctccggagttcctccgcccccacctcgccgggtcctggagccgcagtcctcccagctgccctcctcgtggccatggagtgtccacacctgagctccagcgtctgcattgctccggactcagccaagttccccaacggctccccgtcgtcctggtgctgcagcgtgtgccggtccaacaaaagcccttgggtctgtttgacttgttcaagtgtccactgtggaaggtatgtgaatggccatgcaaaaaaacattatgaagatgcacaagtacctttaaccaaccataagaaatcagaaaagcaagataaagttcagcacacagtatgtatggattgcagtagctacagtacatactgttatcgctgtgatgattttgtggttaatgacaccaagctgggactggtacagaaagtcagagaacacttacagaacttggaaaactcagctttcacagctgacaggcataagaaaagaaaacttttggaaaactcaacactaaacagcaagttattaaaagtaaatggaagcaccactgccatttgtgccacaggccttcggaatttggggaacacatgtttcatgaatgccatccttcagtcactcagtaacattgagcagttttgctgttatttcaaagaactgcccgccgtggagttaaggaatgggaaaacagcaggaaggcggacataccacaccaggagccaaggggataacaatgtgtctttggtagaagagtttagaaagacactctgtgctttatggcaaggcagccagactgcatttagcccagagtccttattttatgttgtttggaagattatgccaaactttaggggctatcaacagcaggacgcccatgaattcatgcgctaccttttggaccacctacacttggaacttcagggcggtttcaacggtgtttcccgctcagcaattctgcaggagaattctactctgtctgcaagtaacaagtgttgcataaatggagcatctactgttgtcacggctatattcggaggcattctccaaaatgaggttaactgcctcatatgtgggacagaatctagaaagtttgatccattcctagacctttcattagatattccaagtcagttcagaagtaagcgctctaagaatcaagaaaatggaccagtttgttcgttacgagattgtcttcgcagttttaccgacttagaagaacttgatgagacagagttatatatgtgccataaatgcaaaaagaaacaaaagtccacaaaaaagttttggattcaaaaactacccaaggtgctatgcttacatttgaaaagatttcattggacagcatatttaagaaataaagttgatacatacgtagaatttccactgagaggcctagacatgaaatgctacttactagagcctgagaacagtggcccggagagctgcctgtatgacctcgccgctgtggtggtgcaccatggttccggggttggttctggacattacacagcatacgcaactcacgaaggccgctggttccacttcaatgacagtactgtaacactgactgacgaggagactgtggtgaaggcgaaggcctacatccttttctacgtggaacaccaggccaaagctggatcggataaactttaatacctcctccaaatcatcattcaccaaccataccagagaaacatttccagttttccacaaatacttgatacaagatttaatttcattatgcacttttcaatttcctattttggatttagttttgtcaatggtagtgacttactgaacatgggcaccaactaattttgttgttgttctaccagaaaacctcagcagatgttttgatttgctgctttagttgtaataattcaatttttataggtagttgtaagaacttagtcttatttgacttttttattttatgttaatgttttcagttctcactttgaggcacatttacatcaatgcttttgttcctctcacatgctgaaagcaagatgtgttccttattgtgaagagcgacacaactgcctgctgcctttccacagctataatggacatcaggttgactctaaatcaaggatcatgtgtgcacaatacttgtggcccacaaaatttcacaatgactgctgaggaatcattctttttgcctgtaaaatataacaaagggcatcattaagtagaccaggtaattactgcttgtctctcaaggctgctgtctttatcagcactaactaaataaatttgttggttcagttgtacttgtcctgcaaatacaagaattactctctt

SEQ ID NO: 24610 - protein, 520 aa, Homo sapiens; identical to SEQ ID NO: 3281

SEQ ID NO: 24611 - DNA, 3287 bp, Homo sapiens
tctacggagcggggcgccgggagacggcgggcgagaaaacccggcgtccggaagcccgtgctttctttgacgcaagggctcgagacgcagccgccgtcggccgagcgcccggctagaagcgacaccagacggagcctccggagttcctccgcccccacctcgccgggtcctggagccgcagtcctcccagctgccctcctcgtggccatggagtgtccacacctgagctccagcgtctgcattgctccggactcagccaagttccccaacggctccccgtcgtcctggtgctgcagcgtgtgccggtccaacaaaagcccttgggtctgtttgacttgttcaagtgtccactgtggaaggtatgtgaatggccatgcaaaaaaacattatgaagatgcacaagtacctttaaccaaccataagaaatcagaaaagcaagataaagttcagcacacagtatgtatggattgcagtagctacagtacatactgttatcgctgtgatgattttgtggttaatgacaccaagctgggactggtacagaaagtcagagaacacttacagaacttggaaaactcagctttcacagctgacaggcataagaaaagaaaacttttggaaaactcaacactaaacagcaagttattaaaagtaaatggaagcaccactgccatttgtgccacaggccttcggaatttggggaacacatgtttcatgaatgccatccttcagtcactcagtaacattgagcagttttgctgttatttcaaagaactgcccgccgtggagttaaggaatgggaaaacagcaggaaggcggacataccacaccaggagccaaggggataacaatgtgtctttggtagaagagtttagaaagacactctgtgctttatggcaaggcagccagactgcatttagcccagagtccttattttatgttgtttggaagattatgccaaactttaggggctatcaacagcaggacgcccatgaattcatgcgctaccttttggaccacctacacttggaacttcagggcggtttcaacggtgtttcccgctcagcaattctgcaggagaattctactctgtctgcaagtaacaagtgttgcataaatggagcatctactgttgtcacggctatattcggaggcattctccaaaatgaggttaactgcctcatatgtgggacagaatctagaaagtttgatccattcctagacctttcattagatattccaagtcagttcagaagtaagcgctctaagaatcaagaaaatggaccagtttgttcgttacgagattgtcttcgcagttttaccgacttagaagaacttgatgagacagagttatatatgtgccataaatgcaaaaagaaacaaaagtccacaaaaaagttttggattcaaaaactacccaaggtgctatgcttacatttgaaaagatttcattggacagcatatttaagaaataaagttgatacatacgtagaatttccactgagaggcctagacatgaaatgctacttactagagcctgagaacagtggcccggagagctgcctgtatgacctcgccgctgtggtggtgcaccatggttccggggttggttctggacattacacagcatacgcaactcacgaaggccgctggttccacttcaatgacagtactgtaacactgactgacgaggagactgtggtgaaggcgaaggcctacatccttttctacgtggaacaccaggccaaagctggatcggataaactttaatacctcctccaaatcatcattcaccaaccataccagagaaacatttccagttttccacaaatacttgatacaagatttaatttcattatgcacttttcaatttcctattttggatttagttttgtcaatggtagtgacttactgaacatgggcaccaactaattttgttgttgttctaccagaaaacctcagcagatgttttgatttgctgctttagttgtaataattcaatttttataggtagttgtaagaacttagtcttatttgacttttttattttatgttaatgttttcagttctcactttgaggcacatttacatcaatgcttttgttcctctcacatgctgaaagcaagatgtgttccttattgtgaagagcgacacaactgcctgctgcctttccacagctataatggacatcaggttgactctaaatcaaggatcatgtgtgcacaatacttgtggcccacaaaatttcacaatgactgctgaggaatcattctttttgcctgtaaaatataacaaagggcatcattaagtagaccaggtaattactgcttgtctctcaaggctgctgtctttatcagcactaactaaataaatttgttggttcagttgtacttgtcctgcaaatacaagaattactctctttgttggtttttttggttttggggcatacttgtttgcggggaggtaagatgggagtaaagaccaaatacatgtaatgtttaaaaaaaatgctgtgactcactgacatggtataggtgttaccagtgaggtaaagccatggcgtctgcctccttttgaatcagtatctcattcccccttagttgtaccactggaagtcacgacatgtccattatagacttacttactgcttgtgtttggcatctgagtctgaggtgtgaccctctgggatttacttggatcatcacccgcacttcagtttatcactggggggtgtgcttccacaggaggaaatttagaatcttcgctgctctgggttttaacacctctctctggcctatcctgattgataggacaagttgaaaatactgttggagtaagtaagtggagttttcgttttgttttttgggggtttttggagacaagagtctctctctgttgcccaggctggagtgcagtggcacgatctcagctcattgcaacctcggcctcccgagtagcaattctcctgcctcaacctcctgagtagctgggattacaggtgcccaccactacacctggctaattttttttttgtatttttagtaaagacgggggtttaccatgttggctagggtggtctcaacctccctcctgacctcaggtgatccgcctgcctcagcctcccaaagtgctgagattacaggcgtgagccatcacgcccagacagttttgtttttaaaaaacagatttaactcaaagattcaaatttggaaccagaatcccatttaaagaaagcagttgtggtttctacaagtgttctaagacagtcctgtggtggtttttttttt

SEQ ID NO: 24612 - protein, 520 aa, Homo sapiens; identical to SEQ ID NO: 3281

SEQ ID NO: 24613 - DNA, 2157 bp, Homo sapiens
caagggctcgagacgcagccgccgtcggccgagcgcccggctagaagcgacaccagacggagcctccggagttcctccgcccccacctcgccgggtcctggagccgcagtcctcccagctgccctcctcgtggccatggagtgtccacacctgagctccagcgtctgcattgctccggactcagccaagttccccaacggctccccgtcgtcctggtgctgcagcggttatcgctgtgatgattttgtggttaatgacaccaagctgggactggtacagaaagtcagagaacacttacagaacttggaaaactcagctttcacagctgacaggcataagaaaagaaaacttttggaaaactcaacactaaacagcaagttattaaaagtaaatggaagcaccactgccatttgtgccacaggccttcggaatttggggaacacatgtttcatgaatgccatccttcagtcactcagtaacattgagcagttttgctgttatttcaaagaactgcccgccgtggagttaaggaatgggaaaacagcaggaaggcggacataccacaccaggagccaaggggataacaatgtgtctttggtagaagagtttagaaagacactctgtgctttatggcaaggcagccagactgcatttagcccagagtccttattttatgttgtttggaagattatgccaaactttaggggctatcaacagcaggacgcccatgaattcatgcgctaccttttggaccacctacacttggaacttcagggcggtttcaacggtgtttcccgctcagcaattctgcaggagaattctactctgtctgcaagtaacaagtgttgcataaatggagcatctactgttgtcacggctatattcggaggcattctccaaaatgaggttaactgcctcatatgtgggacagaatctagaaagtttgatccattcctagacctttcattagatattccaagtcagttcagaagtaagcgctctaagaatcaagaaaatggaccagtttgttcgttacgagattgtcttcgcagttttaccgacttagaagaacttgatgagacagagttatatatgtgccataaatgcaaaaagaaacaaaagtccacaaaaaagttttggattcaaaaactacccaaggtgctatgcttacatttgaaaagatttcattggacagcatatttaagaaataaagttgatacatacgtagaatttccactgagaggcctagacatgaaatgctacttactagagcctgagaacagtggcccggagagctgcctgtatgacctcgccgctgtggtggtgcaccatggttccggggttggttctggacattacacagcatacgcaactcacgaaggccgctggttccacttcaatgacagtactgtaacactgactgacgaggagactgtggtgaaggcgaaggcctacatccttttctacgtggaacaccaggccaaagctggatcggataaactttaatacctcctccaaatcatcattcaccaaccataccagagaaacatttccagttttccacaaatacttgatacaagatttaatttcattatgcacttttcaatttcctattttggatttagttttgtcaatggtagtgacttactgaacatgggcaccaactaattttgttgttgttctaccagaaaacctcagcagatgttttgatttgctgctttagttgtaataattcaatttttataggtagttgtaagaacttagtcttatttgacttttttattttatgttaatgttttcagttctcactttgaggcacatttacatcaatgcttttgttcctctcacatgctgaaagcaagatgtgttccttattgtgaagagcgacacaactgcctgctgcctttccacagctataatggacatcaggttgactctaaatcaaggatcatgtgtgcacaatacttgtggcccacaaaatttcacaatgactgctgaggaatcattctttttgcctgtaaaatataacaaagggcatcattaagtagaccaggtaattactgcttgtctctcaaggctgctgtctttatcagcactaactaaataaatttgttggttcagttgtacttgtcctgcaaatacaagaattactctctt

SEQ ID NO: 24614 - protein, 456 aa, Homo sapiens
MECPHLSSSVCIAPDSAKFPNGSPSSWCCSGYRCDDFVVNDTKLGLVQKVREHLQNLENSAFTADRHKKRKLLENSTLNSKLLKVNGSTTAICATGLRNLGNTCFMNAILQSLSNIEQFCCYFKELPAVELRNGKTAGRRTYHTRSQGDNNVSLVEEFRKTLCALWQGSQTAFSPESLFYVVWKIMPNFRGYQQQDAHEFMRYLLDHLHLELQGGFNGVSRSAILQENSTLSASNKCCINGASTVVTAIFGGILQNEVNCLICGTESRKFDPFLDLSLDIPSQFRSKRSKNQENGPVCSLRDCLRSFTDLEELDETELYMCHKCKKKQKSTKKFWIQKLPKVLCLHLKRFHWTAYLRNKVDTYVEFPLRGLDMKCYLLEPENSGPESCLYDLAAVVVHHGSGVGSGHYTAYATHEGRWFHFNDSTVTLTDEETVVKAKAYILFYVEHQAKAGSDKL

SEQ ID NO: 24615 - DNA, 3023 bp, Homo sapiens
caagggctcgagacgcagccgccgtcggccgagcgcccggctagaagcgacaccagacggagcctccggagttcctccgcccccacctcgccgggtcctggagccgcagtcctcccagctgccctcctcgtggccatggagtgtccacacctgagctccagcgtctgcattgctccggactcagccaagttccccaacggctccccgtcgtcctggtgctgcagcggttatcgctgtgatgattttgtggttaatgacaccaagctgggactggtacagaaagtcagagaacacttacagaacttggaaaactcagctttcacagctgacaggcataagaaaagaaaacttttggaaaactcaacactaaacagcaagttattaaaagtaaatggaagcaccactgccatttgtgccacaggccttcggaatttggggaacacatgtttcatgaatgccatccttcagtcactcagtaacattgagcagttttgctgttatttcaaagaactgcccgccgtggagttaaggaatgggaaaacagcaggaaggcggacataccacaccaggagccaaggggataacaatgtgtctttggtagaagagtttagaaagacactctgtgctttatggcaaggcagccagactgcatttagcccagagtccttattttatgttgtttggaagattatgccaaactttaggggctatcaacagcaggacgcccatgaattcatgcgctaccttttggaccacctacacttggaacttcagggcggtttcaacggtgtttcccgctcagcaattctgcaggagaattctactctgtctgcaagtaacaagtgttgcataaatggagcatctactgttgtcacggctatattcggaggcattctccaaaatgaggttaactgcctcatatgtgggacagaatctagaaagtttgatccattcctagacctttcattagatattccaagtcagttcagaagtaagcgctctaagaatcaagaaaatggaccagtttgttcgttacgagattgtcttcgcagttttaccgacttagaagaacttgatgagacagagttatatatgtgccataaatgcaaaaagaaacaaaagtccacaaaaaagttttggattcaaaaactacccaaggtgctatgcttacatttgaaaagatttcattggacagcatatttaagaaataaagttgatacatacgtagaatttccactgagaggcctagacatgaaatgctacttactagagcctgagaacagtggcccggagagctgcctgtatgacctcgccgctgtggtggtgcaccatggttccggggttggttctggacattacacagcatacgcaactcacgaaggccgctggttccacttcaatgacagtactgtaacactgactgacgaggagactgtggtgaaggcgaaggcctacatccttttctacgtggaacaccaggccaaagctggatcggataaactttaatacctcctccaaatcatcattcaccaaccataccagagaaacatttccagttttccacaaatacttgatacaagatttaatttcattatgcacttttcaatttcctattttggatttagttttgtcaatggtagtgacttactgaacatgggcaccaactaattttgttgttgttctaccagaaaacctcagcagatgttttgatttgctgctttagttgtaataattcaatttttataggtagttgtaagaacttagtcttatttgacttttttattttatgttaatgttttcagttctcactttgaggcacatttacatcaatgcttttgttcctctcacatgctgaaagcaagatgtgttccttattgtgaagagcgacacaactgcctgctgcctttccacagctataatggacatcaggttgactctaaatcaaggatcatgtgtgcacaatacttgtggcccacaaaatttcacaatgactgctgaggaatcattctttttgcctgtaaaatataacaaagggcatcattaagtagaccaggtaattactgcttgtctctcaaggctgctgtctttatcagcactaactaaataaatttgttggttcagttgtacttgtcctgcaaatacaagaattactctctttgttggtttttttggttttggggcatacttgtttgcggggaggtaagatgggagtaaagaccaaatacatgtaatgtttaaaaaaaatgctgtgactcactgacatggtataggtgttaccagtgaggtaaagccatggcgtctgcctccttttgaatcagtatctcattcccccttagttgtaccactggaagtcacgacatgtccattatagacttacttactgcttgtgtttggcatctgagtctgaggtgtgaccctctgggatttacttggatcatcacccgcacttcagtttatcactggggggtgtgcttccacaggaggaaatttagaatcttcgctgctctgggttttaacacctctctctggcctatcctgattgataggacaagttgaaaatactgttggagtaagtaagtggagttttcgttttgttttttgggggtttttggagacaagagtctctctctgttgcccaggctggagtgcagtggcacgatctcagctcattgcaacctcggcctcccgagtagcaattctcctgcctcaacctcctgagtagctgggattacaggtgcccaccactacacctggctaattttttttttgtatttttagtaaagacgggggtttaccatgttggctagggtggtctcaacctccctcctgacctcaggtgatccgcctgcctcagcctcccaaagtgctgagattacaggcgtgagccatcacgcccagacagttttgtttttaaaaaacagatttaactcaaagattcaaatttggaaccagaatcccatttaaagaaagcagttgtggtttctacaagtgttctaagacagtcctgtggtggtttttttttt

SEQ ID NO: 24616 - protein, 456 aa, Homo sapiens; identical to SEQ ID NO: 24614

SEQ ID NO: 24617 - DNA, 5632 bp, Homo sapiens
caagggctcgagacgcagccgccgtcggccgagcgcccggctagaagcgacaccagacggagcctccggagttcctccgcccccacctcgccgggtcctggagccgcagtcctcccagctgccctcctcgtggccatggagtgtccacacctgagctccagcgtctgcattgctccggactcagccaagttccccaacggctccccgtcgtcctggtgctgcagcgtgtgccggtccaacaaaagcccttgggtctgtttgacttgttcaagtgtccactgtggaaggatttggggaacctgaaaatactttgtacagataacttttttttaaaaaagaagaaaagtagaagcacttaaattctgcagttgaagagacagattcctctcctagattttgagaggtatgtgaatggccatgcaaaaaaacattatgaagatgcacaagtacctttaaccaaccataagaaatcagaaaagcaagataaagttcagcacacagtatgtatggattgcagtagctacagtacatactgttatcgctgtgatgattttgtggttaatgacaccaagctgggactggtacagaaagtcagagaacacttacagaacttggaaaactcagctttcacagctgacaggcataagaaaagaaaacttttggaaaactcaacactaaacagcaagttattaaaagtaaatggaagcaccactgccatttgtgccacaggccttcggaatttggggaacacatgtttcatgaatgccatccttcagtcactcagtaacattgagcagttttgctgttatttcaaagaactgcccgccgtggagttaaggaatgggaaaacagcaggaaggcggacataccacaccaggagccaaggggataacaatgtgtctttggtagaagagtttagaaagacactctgtgctttatggcaaggcagccagactgcatttagcccagagtccttattttatgttgtttggaagattatgccaaactttaggggctatcaacagcaggacgcccatgaattcatgcgctaccttttggaccacctacacttggaacttcagggcggtttcaacggtgtttcccgctcagcaattctgcaggagaattctactctgtctgcaagtaacaagtgttgcataaatggagcatctactgttgtcacggctatattcggaggcattctccaaaatgaggttaactgcctcatatgtgggacagaatctagaaagtttgatccattcctagacctttcattagatattccaagtcagttcagaagtaagcgctctaagaatcaagaaaatggaccagtttgttcgttacgagattgtcttcgcagttttaccgacttagaagaacttgatgagacagagttatatatgtgccataaatgcaaaaagaaacaaaagtccacaaaaaagttttggattcaaaaactacccaaggtgctatgcttacatttgaaaagatttcattggacagcatatttaagaaataaagttgatacatacgtagaatttccactgagaggcctagacatgaaatgctacttactagagcctgagaacagtggcccggagagctgcctgtatgacctcgccgctgtggtggtgcaccatggttccggggttggttctggacattacacagcatacgcaactcacgaaggccgctggttccacttcaatgacagtactgtaacactgactgacgaggagactgtggtgaaggcgaaggcctacatccttttctacgtggaacaccaggccaaagctggatcggataaactttaatacctcctccaaatcatcattcaccaaccataccagagaaacatttccagttttccacaaatacttgatacaagatttaatttcattatgcacttttcaatttcctattttggatttagttttgtcaatggtagtgacttactgaacatgggcaccaactaattttgttgttgttctaccagaaaacctcagcagatgttttgatttgctgctttagttgtaataattcaatttttataggtagttgtaagaacttagtcttatttgacttttttattttatgttaatgttttcagttctcactttgaggcacatttacatcaatgcttttgttcctctcacatgctgaaagcaagatgtgttccttattgtgaagagcgacacaactgcctgctgcctttccacagctataatggacatcaggttgactctaaatcaaggatcatgtgtgcacaatacttgtggcccacaaaatttcacaatgactgctgaggaatcattctttttgcctgtaaaatataacaaagggcatcattaagtagaccaggtaattactgcttgtctctcaaggctgctgtctttatcagcactaactaaataaatttgttggttcagttgtacttgtcctgcaaatacaagaattactctctttgttggtttttttggttttggggcatacttgtttgcggggaggtaagatgggagtaaagaccaaatacatgtaatgtttaaaaaaaatgctgtgactcactgacatggtataggtgttaccagtgaggtaaagccatggcgtctgcctccttttgaatcagtatctcattcccccttagttgtaccactggaagtcacgacatgtccattatagacttacttactgcttgtgtttggcatctgagtctgaggtgtgaccctctgggatttacttggatcatcacccgcacttcagtttatcactggggggtgtgcttccacaggaggaaatttagaatcttcgctgctctgggttttaacacctctctctggcctatcctgattgataggacaagttgaaaatactgttggagtaagtaagtggagttttcgttttgttttttgggggtttttggagacaagagtctctctctgttgcccaggctggagtgcagtggcacgatctcagctcattgcaacctcggcctcccgagtagcaattctcctgcctcaacctcctgagtagctgggattacaggtgcccaccactacacctggctaattttttttttgtatttttagtaaagacgggggtttaccatgttggctagggtggtctcaacctccctcctgacctcaggtgatccgcctgcctcagcctcccaaagtgctgagattacaggcgtgagccatcacgcccagacagttttgtttttaaaaaacagatttaactcaaagattcaaatttggaaccagaatcccatttaaagaaagcagttgtggtttctacaagtgttctaagacagtcctgtggtggttttttttttttcttttttttggttgggggcggtgggggttggtagacatagcctaccaattctccacaagggacaaaatgtatcttgtgttaagccaacgagactttctggcaattttttttttttttttttaatggagtcttactctgtccctcaggctggagtgcagtgtggcatgatcacagctcactgtagcctcaacctcccaggctcaagcgatcctcccacttcagcctcgaagtagctggcaccaccacacccagctaatttttaatatttttactagagatggggtttcaccacgttgcccaggctggtcttgcactcctgggctcaagtgatccacccaccttggcttcccaaggtgctagcattacaggcatgagccaccacgcccagcctgttctattaaaaacatcttgacctttttttttttttaagtttatgatataaaaacagtctggtggctttccctcaggttggatatctgaagttgtgggagcagatgtagctccatttccattttaatattaactggataaatcccacatcttcccagaacacatctgctaaacactttaacatgacaaggagcaaattacaattatgtgtaaacttatatcatccagtacaatggcccctagccacatgtgactgaaatttaaattagaaactcagtgccttcagtcacactagccacatttcaagtgctcagcacccacatacggcgtaggacaatgctggtctaaattttcactccaaagaataaaactttgccatcatgtttaggtcttacaactttgagtcctaaaagataatagggagatgtgtgcttaaattaatttacaatgctaaattatattaggttaaactgtatgaaaccctgctatttgatgagttctgatctacaaaaatgacagctccacctgatctgatgtatcacacattaacatcacatctaattcaacctgaaatgtgagtctcctttgatcttgcaaagtatctcctatgaatccgggctcttttgcttagaaggtagacagctgtaacctctaacattgatacttcgatcttcagtctctctgaatgggcagctgttaaacagtaaaggcctgggcagagttgatggtgaaaaaaagctgtatttttataccaaatggaacttcagcaacacgttggactactttgtcgggcagagtggtcttcagacaggtgatgctgttggcttaagagatgaacacgtcttctctctgaatttgtttttattggttggttttacttgaacagaaacgtttgaatggtgtgaagattctttagaaaagtgattggatccatctcaattgtgcacttgaacagcagtgatgtaaatgtgcttatttgtgttttcatttttaactgtgcagccttaccacacctattttgaaagctgatcttttgtcctcttcagggcttttcccttgtgccatgttgtctccagcaatatatgtggcttctggctcagagcttctgctgaggcagggcctcgcgctgagtcacatggctccttggaacaagaaaactttctcagaagtccccacacgggtgggtgacagaaacagtttgtggcaacacaaatctctctccatggtggagaaacctttgcttatccactgtattctactcagtgtatagtgatgacagatgtactagaattaaaccagtcaagtgtactggcccggggtgagtgttaaatgtgtatctcgcctgtggaacctactcagcagcttggtttctggggttgggggcatatttatttcttaaagccaaacctctccttcattggtttagtgtacataagtctatttagatacacttatcccactttaatctccaccagcccctaaactctctcctgtaccctctgttgctgaagtggcctcttcacctgggccctggaaaagccgatggaaaaagtctgttcctgcagccaaggcctgggtcccaggtgactaggagtagccataggaaggtgaggaaggagaagtgggcatgtggtgtcatctgtagtccaaggtctctgcgtctcgtcagtgggtgcagtgccttccccctcaggtgtgagcgtgatggactctagactgccttccatgagtgttggtcatgctatgatgtcatcatttgccattaaaacccagtttgtatgatgccaagaggattaattgtgcaagtgactgattcatttaaattgtaatcacatcccttttctgcttcaccaacctgaactgtttttaaaaatatcattaaaagtctgttctctttccttttgactta

SEQ ID NO: 24618 - protein, 435 aa, Homo sapiens
MDCSSYSTYCYRCDDFVVNDTKLGLVQKVREHLQNLENSAFTADRHKKRKLLENSTLNSKLLKVNGSTTAICATGLRNLGNTCFMNAILQSLSNIEQFCCYFKELPAVELRNGKTAGRRTYHTRSQGDNNVSLVEEFRKTLCALWQGSQTAFSPESLFYVVWKIMPNFRGYQQQDAHEFMRYLLDHLHLELQGGFNGVSRSAILQENSTLSASNKCCINGASTVVTAIFGGILQNEVNCLICGTESRKFDPFLDLSLDIPSQFRSKRSKNQENGPVCSLRDCLRSFTDLEELDETELYMCHKCKKKQKSTKKFWIQKLPKVLCLHLKRFHWTAYLRNKVDTYVEFPLRGLDMKCYLLEPENSGPESCLYDLAAVVVHHGSGVGSGHYTAYATHEGRWFHFNDSTVTLTDEETVVKAKAYILFYVEHQAKAGSDKL

SEQ ID NO: 24619 - DNA, 541 bp, Homo sapiens
cagaactcttggggtaaagagaaatagaagcagaatgagtaatgttctcaagtcttgtaattatttagaagcatttttccaagttcaaccttcagtaaagcctggggtttcctagaatgcttattaagtaacataatccaaagaagcaaaaggaaggaaggataaggatttgtgccttttaatgaagacaaaaggaatttctgccactgtttatggcactttcttaagaatctttacctagaatttgggatttctatggaaatagtgcttttgaaaatttgaaggttttaaacttacttgttactgagttattgttaggaatgatgtttgtgctcaagaattaggttgtcctgagatagaggtggcacatctagatttgagttattaaaatattgatgtgatacacaaagatttagtccaaaggacagtggcagcttagttgaagataaatatcaagtctttactctcatgctccctctgttaagtggtggtctggttatctgttgctgcatgacaaacagccatacatcctagaagccta

SEQ ID NO: 24620 - protein, 34 aa, Homo sapiens
LFRSIFPSSTFSKAWGFLECLLSNIIQRSKRKEG

SEQ ID NO: 24621 - DNA, 2069 bp, Homo sapiens
gatgagtgaagaatggtttgctttgggaatattttcttagttcttcaaggacatgatgtggaagtcatgacttgagtaacttcaatagcactaacaacaggaattgaaaaaaacttagaattttaaagctgagaaagagttatcgctgtgatgattttgtggttaatgacaccaagctgggactggtacagaaagtcagagaacacttacagaacttggaaaactcagctttcacagctgacaggcataagaaaagaaaacttttggaaaactcaacactaaacagcaagttattaaaagtaaatggaagcaccactgccatttgtgccacaggccttcggaatttggggaacacatgtttcatgaatgccatccttcagtcactcagtaacattgagcagttttgctgttatttcaaagaactgcccgccgtggagttaaggaatgggaaaacagcaggaaggcggacataccacaccaggagccaaggggataacaatgtgtctttggtagaagagtttagaaagacactctgtgctttatggcaaggcagccagactgcatttagcccagagtccttattttatgttgtttggaagattatgccaaactttaggggctatcaacagcaggacgcccatgaattcatgcgctaccttttggaccacctacacttggaacttcagggcggtttcaacggtgtttcccgctcagcaattctgcaggagaattctactctgtctgcaagtaacaagtgttgcataaatggagcatctactgttgtcacggctatattcggaggcattctccaaaatgaggttaactgcctcatatgtgggacagaatctagaaagtttgatccattcctagacctttcattagatattccaagtcagttcagaagtaagcgctctaagaatcaagaaaatggaccagtttgttcgttacgagattgtcttcgcagttttaccgacttagaagaacttgatgagacagagttatatatgtgccataaatgcaaaaagaaacaaaagtccacaaaaaagttttggattcaaaaactacccaaggtgctatgcttacatttgaaaagatttcattggacagcatatttaagaaataaagttgatacatacgtagaatttccactgagaggcctagacatgaaatgctacttactagagcctgagaacagtggcccggagagctgcctgtatgacctcgccgctgtggtggtgcaccatggttccggggttggttctggacattacacagcatacgcaactcacgaaggccgctggttccacttcaatgacagtactgtaacactgactgacgaggagactgtggtgaaggcgaaggcctacatccttttctacgtggaacaccaggccaaagctggatcggataaactttaatacctcctccaaatcatcattcaccaaccataccagagaaacatttccagttttccacaaatacttgatacaagatttaatttcattatgcacttttcaatttcctattttggatttagttttgtcaatggtagtgacttactgaacatgggcaccaactaattttgttgttgttctaccagaaaacctcagcagatgttttgatttgctgctttagttgtaataattcaatttttataggtagttgtaagaacttagtcttatttgacttttttattttatgttaatgttttcagttctcactttgaggcacatttacatcaatgcttttgttcctctcacatgctgaaagcaagatgtgttccttattgtgaagagcgacacaactgcctgctgcctttccacagctataatggacatcaggttgactctaaatcaaggatcatgtgtgcacaatacttgtggcccacaaaatttcacaatgactgctgaggaatcattctttttgcctgtaaaatataacaaagggcatcattaagtagaccaggtaattactgcttgtctctcaaggctgctgtctttatcagcactaactaaataaatttgttggttcagttgtacttgtcctgcaaatacaagaattactctctt

SEQ ID NO: 24622 - protein, 351 aa, Homo sapiens
MNAILQSLSNIEQFCCYFKELPAVELRNGKTAGRRTYHTRSQGDNNVSLVEEFRKTLCALWQGSQTAFSPESLFYVVWKIMPNFRGYQQQDAHEFMRYLLDHLHLELQGGFNGVSRSAILQENSTLSASNKCCINGASTVVTAIFGGILQNEVNCLICGTESRKFDPFLDLSLDIPSQFRSKRSKNQENGPVCSLRDCLRSFTDLEELDETELYMCHKCKKKQKSTKKFWIQKLPKVLCLHLKRFHWTAYLRNKVDTYVEFPLRGLDMKCYLLEPENSGPESCLYDLAAVVVHHGSGVGSGHYTAYATHEGRWFHFNDSTVTLTDEETVVKAKAYILFYVEHQAKAGSDKL

SEQ ID NO: 24623 - DNA, 407 bp, Homo sapiens
caccaggtattcccacccaccagaagctggctgttgtactcacccggaaccatggtgcaccaccacagcggcgaggtcatacaggcagctctccgggccactgttctcaggctacagaacaaggaagaaggagcagtggtcaatgacatcagtatctcgatgacctctaccctctccatgtgatgacaatcttactgaagagccattttttcaccatgctaaaaaggtatactgctgagaaagaatcaaatgaaaagaaaaaagactcaacaagacctcactcatattaactggactctacaagcagtgagcatccagacctgcatttggttacaaaagaagccttcaagctattttcatcagcttcctaatcaagttaaaaaataaaccacaaaactgagtatcca

SEQ ID NO: 24624 - protein, 45 aa, Homo sapiens
MKRKKTQQDLTHINWTLQAVSIQTCIWLQKKPSSYFHQLPNQVKK

SEQ ID NO: 24625 - DNA, 455 bp, Homo sapiens
ccaccaggtattcccacccaccagaagctggctgttgtactcacccggaaccatggtgcaccaccacagcggcgaggtcatacaggcagctctccgggccactgttctcaggctacagaacaaggaagaaggagcagtggtcaatgacatcagtatctcgatgacctctaccctctccatgtgatgacaatcttactgaagagccattttttcaccatgctaaaaaggccagttgggtccagcagctttgcctctctacccttttatcaccaaagtatactgctgagaaagaatcaaatgaaaagaaaaaagactcaacaagacctcactcatattaactggactctacaagcagtgagcatccagacctgcatttggttacaaaagaagccttcaagctattttcatcagcttcctaatcaagttaaaaaataaaccacaaaactgagtatcca

SEQ ID NO: 24626 - protein, 83 aa, Homo sapiens
MTILLKSHFFTMLKRPVGSSSFASLPFYHQSILLRKNQMKRKKTQQDLTHINWTLQAVSIQTCIWLQKKPSSYFHQLPNQVKK

SEQ ID NO: 24627 - DNA, 366 bp, Homo sapiens
ccagcagaggtgggctggacactgctcctggcaaagctggccgggaagatgcagcccgtgggacactccccaccaccactctcacagtctgactgactgcgaagcttcacagaccagaaggttcattcctcacaagaaaaggaaaaccctggtctgatactactgttctgaaatttaacagccagttgggtccagcagctttgcctctctacccttttatcaccaaagtatactgctgagaaagaatcaaatgaaaagaaaaaagactcaacaagacctcactcatattaactggactctacaagcagtgagcatccagacctgcatttggttacaaaagaagccttcaagctattttcatcagct

SEQ ID NO: 24628 - protein, 37 aa, Homo sapiens
MKRKKTQQDLTHINWTLQAVSIQTCIWLQKKPSSYFH

SEQ ID NO: 24629 - DNA, 610 bp, Homo sapiens
gaagaactagcaagagtggtacaaaactgcaggtcattgggctggccaccaggtattcccacccaccagaagctggctgttgtactcacccggaaccatggtgcaccaccacagcggcgaggtcatacaggcagctctccgggccactgttctcaggctacagaacaaggaagaaggagcagtggtcaatgacatcagtatctcgatgacctctaccctctccatgtgatgacaatcttactgaagagccattttttcaccatgctaaaaagggaagaggagcacagcagtaacgctgatgggaagaaggtgctgacagatggactcactggggtcacggcaacaatcgacagtacaggtggcaaacattgtgtaaaatactccaaatccaagacacacatttataaaagtctgtaacaggtaacattacatgttagagttgtaacaaaacagtgattaaatctcaactaactcttatatttgaataaattttaattacttacatttacttttaataacttgctgtttagtgttgagttttccaaaagttttcttttcttatgcctgtcagctgtgaaagctgagctattaaaacacaaacagatagtga

SEQ ID NO: 24630 - protein, 62 aa, Homo sapiens
MTILLKSHFFTMLKREEEHSSNADGKKVLTDGLTGVTATIDSTGGKHCVKYSKSKTHIYKSL

SEQ ID NO: 24631 - DNA, 1530 bp, Homo sapiens
aatggcacagtgcaacctccgcctcccaggttcaagttattcttctgcctcagcctcccgagtagctgggattacaggggctatcaacagcaggacgcccatgaattcatgcgctaccttttggaccacctacacttggaacttcagggcggtttcaacggtgtttcccgctcagcaattctgcaggagaattctactctgtctgcaagtaacaagtgttgcataaatggagcatctactgttgtcacggctatattcggaggcattctccaaaatgaggttaactgcctcatatgtgggacagaatctagaaagtttgatccattcctagacctttcattagatattccaagtcagttcagaagtaagcgctctaagaatcaagaaaatggaccagtttgttcgttacgagattgtcttcgcagttttaccgacttagaagaacttgatgagacagagttatatatgtgccataaatgcaaaaagaaacaaaagtccacaaaaaagttttggattcaaaaactacccaaggtgctatgcttacatttgaaaagatttcattggacagcatatttaagaaataaagttgatacatacgtagaatttccactgagaggcctagacatgaaatgctacttactagagcctgagaacagtggcccggagagctgcctgtatgacctcgccgctgtggtggtgcaccatggttccggggttggttctggacattacacagcatacgcaactcacgaaggccgctggttccacttcaatgacagtactgtaacactgactgacgaggagactgtggtgaaggcgaaggcctacatccttttctacgtggaacaccaggccaaagctggatcggataaactttaatacctcctccaaatcatcattcaccaaccataccagagaaacatttccagttttccacaaatacttgatacaagatttaatttcattatgcacttttcaatttcctattttggatttagttttgtcaatggtagtgacttactgaacatgggcaccaactaattttgttgttgttctaccagaaaacctcagcagatgttttgatttgctgctttagttgtaataattcaatttttataggtagttgtaagaacttagtcttatttgacttttttattttatgttaatgttttcagttctcactttgaggcacatttacatcaatgcttttgttcctctcacatgctgaaagcaagatgtgttccttattgtgaagagcgacacaactgcctgctgcctttccacagctataatggacatcaggttgactctaaatcaaggatcatgtgtgcacaatacttgtggcccacaaaatttcacaatgactgctgaggaatcattctttttgcctgtaaaatataacaaagggcatcattaagtagaccaggtaattactgcttgtctctcaaggctgctgtctttatcagcactaactaaataaatttgttggttcagttgtacttgtcctgcaaatacaagaattactctctt

SEQ ID NO: 24632 - protein, 256 aa, Homo sapiens [sequence omitted]

SEQ ID NO: 24633 - DNA, 2396 bp, Homo sapiens
aatggcacagtgcaacctccgcctcccaggttcaagttattcttctgcctcagcctcccgagtagctgggattacaggggctatcaacagcaggacgcccatgaattcatgcgctaccttttggaccacctacacttggaacttcagggcggtttcaacggtgtttcccgctcagcaattctgcaggagaattctactctgtctgcaagtaacaagtgttgcataaatggagcatctactgttgtcacggctatattcggaggcattctccaaaatgaggttaactgcctcatatgtgggacagaatctagaaagtttgatccattcctagacctttcattagatattccaagtcagttcagaagtaagcgctctaagaatcaagaaaatggaccagtttgttcgttacgagattgtcttcgcagttttaccgacttagaagaacttgatgagacagagttatatatgtgccataaatgcaaaaagaaacaaaagtccacaaaaaagttttggattcaaaaactacccaaggtgctatgcttacatttgaaaagatttcattggacagcatatttaagaaataaagttgatacatacgtagaatttccactgagaggcctagacatgaaatgctacttactagagcctgagaacagtggcccggagagctgcctgtatgacctcgccgctgtggtggtgcaccatggttccggggttggttctggacattacacagcatacgcaactcacgaaggccgctggttccacttcaatgacagtactgtaacactgactgacgaggagactgtggtgaaggcgaaggcctacatccttttctacgtggaacaccaggccaaagctggatcggataaactttaatacctcctccaaatcatcattcaccaaccataccagagaaacatttccagttttccacaaatacttgatacaagatttaatttcattatgcacttttcaatttcctattttggatttagttttgtcaatggtagtgacttactgaacatgggcaccaactaattttgttgttgttctaccagaaaacctcagcagatgttttgatttgctgctttagttgtaataattcaatttttataggtagttgtaagaacttagtcttatttgacttttttattttatgttaatgttttcagttctcactttgaggcacatttacatcaatgcttttgttcctctcacatgctgaaagcaagatgtgttccttattgtgaagagcgacacaactgcctgctgcctttccacagctataatggacatcaggttgactctaaatcaaggatcatgtgtgcacaatacttgtggcccacaaaatttcacaatgactgctgaggaatcattctttttgcctgtaaaatataacaaagggcatcattaagtagaccaggtaattactgcttgtctctcaaggctgctgtctttatcagcactaactaaataaatttgttggttcagttgtacttgtcctgcaaatacaagaattactctctttgttggtttttttggttttggggcatacttgtttgcggggaggtaagatgggagtaaagaccaaatacatgtaatgtttaaaaaaaatgctgtgactcactgacatggtataggtgttaccagtgaggtaaagccatggcgtctgcctccttttgaatcagtatctcattcccccttagttgtaccactggaagtcacgacatgtccattatagacttacttactgcttgtgtttggcatctgagtctgaggtgtgaccctctgggatttacttggatcatcacccgcacttcagtttatcactggggggtgtgcttccacaggaggaaatttagaatcttcgctgctctgggttttaacacctctctctggcctatcctgattgataggacaagttgaaaatactgttggagtaagtaagtggagttttcgttttgttttttgggggtttttggagacaagagtctctctctgttgcccaggctggagtgcagtggcacgatctcagctcattgcaacctcggcctcccgagtagcaattctcctgcctcaacctcctgagtagctgggattacaggtgcccaccactacacctggctaattttttttttgtatttttagtaaagacgggggtttaccatgttggctagggtggtctcaacctccctcctgacctcaggtgatccgcctgcctcagcctcccaaagtgctgagattacaggcgtgagccatcacgcccagacagttttgtttttaaaaaacagatttaactcaaagattcaaatttggaaccagaatcccatttaaagaaagcagttgtggtttctacaagtgttctaagacagtcctgtggtggtttttttttt

SEQ ID NO: 24634 - protein, 256 aa, Homo sapiens [sequence omitted]

SEQ ID NO: 24635 - DNA, 1269 bp, Homo sapiens
gatgtaggacttgggaggctcctgagaacagcatcactctatttgcaagtttggttgtaatgtctgagacttgcttcaggaattgtaatgtcaaaatataatacatcctttcccaggaaccatcactgacataaaatagcaggttgagcagattgtcttcgcagttttaccgacttagaagaacttgatgagacagagttatatatgtgccataaatgcaaaaagaaacaaaagtccacaaaaaagttttggattcaaaaactacccaaggtgctatgcttacatttgaaaagatttcattggacagcatatttaagaaataaagttgatacatacgtagaatttccactgagaggcctagacatgaaatgctacttactagagcctgagaacagtggcccggagagctgcctgtatgacctcgccgctgtggtggtgcaccatggttccggggttggttctggacattacacagcatacgcaactcacgaaggccgctggttccacttcaatgacagtactgtaacactgactgacgaggagactgtggtgaaggcgaaggcctacatccttttctacgtggaacaccaggccaaagctggatcggataaactttaatacctcctccaaatcatcattcaccaaccataccagagaaacatttccagttttccacaaatacttgatacaagatttaatttcattatgcacttttcaatttcctattttggatttagttttgtcaatggtagtgacttactgaacatgggcaccaactaattttgttgttgttctaccagaaaacctcagcagatgttttgatttgctgctttagttgtaataattcaatttttataggtagttgtaagaacttagtcttatttgacttttttattttatgttaatgttttcagttctcactttgaggcacatttacatcaatgcttttgttcctctcacatgctgaaagcaagatgtgttccttattgtgaagagcgacacaactgcctgctgcctttccacagctataatggacatcaggttgactctaaatcaaggatcatgtgtgcacaatacttgtggcccacaaaatttcacaatgactgctgaggaatcattctttttgcctgtaaaatataacaaagggcatcattaagtagaccaggtaattactgcttgtctctcaaggctgctgtctttatcagcactaactaaataaatttgttggttcagttgtacttgtcctgcaaatacaagaattactctctt

SEQ ID NO: 24636 - protein, 137 aa, Homo sapiens [sequence omitted]

SEQ ID NO: 24637 - DNA, 2135 bp, Homo sapiens
gatgtaggacttgggaggctcctgagaacagcatcactctatttgcaagtttggttgtaatgtctgagacttgcttcaggaattgtaatgtcaaaatataatacatcctttcccaggaaccatcactgacataaaatagcaggttgagcagattgtcttcgcagttttaccgacttagaagaacttgatgagacagagttatatatgtgccataaatgcaaaaagaaacaaaagtccacaaaaaagttttggattcaaaaactacccaaggtgctatgcttacatttgaaaagatttcattggacagcatatttaagaaataaagttgatacatacgtagaatttccactgagaggcctagacatgaaatgctacttactagagcctgagaacagtggcccggagagctgcctgtatgacctcgccgctgtggtggtgcaccatggttccggggttggttctggacattacacagcatacgcaactcacgaaggccgctggttccacttcaatgacagtactgtaacactgactgacgaggagactgtggtgaaggcgaaggcctacatccttttctacgtggaacaccaggccaaagctggatcggataaactttaatacctcctccaaatcatcattcaccaaccataccagagaaacatttccagttttccacaaatacttgatacaagatttaatttcattatgcacttttcaatttcctattttggatttagttttgtcaatggtagtgacttactgaacatgggcaccaactaattttgttgttgttctaccagaaaacctcagcagatgttttgatttgctgctttagttgtaataattcaatttttataggtagttgtaagaacttagtcttatttgacttttttattttatgttaatgttttcagttctcactttgaggcacatttacatcaatgcttttgttcctctcacatgctgaaagcaagatgtgttccttattgtgaagagcgacacaactgcctgctgcctttccacagctataatggacatcaggttgactctaaatcaaggatcatgtgtgcacaatacttgtggcccacaaaatttcacaatgactgctgaggaatcattctttttgcctgtaaaatataacaaagggcatcattaagtagaccaggtaattactgcttgtctctcaaggctgctgtctttatcagcactaactaaataaatttgttggttcagttgtacttgtcctgcaaatacaagaattactctctttgttggtttttttggttttggggcatacttgtttgcggggaggtaagatgggagtaaagaccaaatacatgtaatgtttaaaaaaaatgctgtgactcactgacatggtataggtgttaccagtgaggtaaagccatggcgtctgcctccttttgaatcagtatctcattcccccttagttgtaccactggaagtcacgacatgtccattatagacttacttactgcttgtgtttggcatctgagtctgaggtgtgaccctctgggatttacttggatcatcacccgcacttcagtttatcactggggggtgtgcttccacaggaggaaatttagaatcttcgctgctctgggttttaacacctctctctggcctatcctgattgataggacaagttgaaaatactgttggagtaagtaagtggagttttcgttttgttttttgggggtttttggagacaagagtctctctctgttgcccaggctggagtgcagtggcacgatctcagctcattgcaacctcggcctcccgagtagcaattctcctgcctcaacctcctgagtagctgggattacaggtgcccaccactacacctggctaattttttttttgtatttttagtaaagacgggggtttaccatgttggctagggtggtctcaacctccctcctgacctcaggtgatccgcctgcctcagcctcccaaagtgctgagattacaggcgtgagccatcacgcccagacagttttgtttttaaaaaacagatttaactcaaagattcaaatttggaaccagaatcccatttaaagaaagcagttgtggtttctacaagtgttctaagacagtcctgtggtggtttttttttt

SEQ ID NO: 24638 - protein, 137 aa, Homo sapiens [sequence omitted]

SEQ ID NO: 24639 - DNA, 1783 bp, Homo sapiens
cgccaggcagtcgtcggtaacgtggccgcagcccgagagcgtgacggacgccaggttggggcacctgtgaggagagtgcggtgacccggggctcactggcttgttaaagctacccaaccgccccatgggaccgagtggactcatttaccgaggaggactcgggccctgcgaggtcacttcatcctggcccaggtactgcagctccaaatcgtggggattctgtaagagcttgctacctgttgactgaggaggcccacgagttgagagccatgtgactcagcgcgaggccctgcctcagcagaagctctgagccagaagccacatatattgctggagacaacatggcacaagggaaaagccctgaagaggacaaaagatcagctttcaaaataggaagaactagcaagagtggtacaaaactgcaggtcattgggctggccaccaggtattcccacccaccagaagctggctgttgtactcacccggaaccatggtgcaccaccacagcggcgaggtcatacaggcagctctccgggccactgttctcaggctacagaacaaggaagaaggagcagtggtcaatgacatcagtatctcgatgacctctaccctctccatgtgatgacaatcttactgaagagccattttttcaccatgctaaaaaggtaaccaccttacctctagtaagtagcatttcatgtctaggcctctcagtggaaattctacgtatgtatcaactttatttcttaaatatgctgtccaatgaaatcttttcaaatgtaagcatagcacctggaggacagagatgcggtcaaagattgtgaacacctaatttacctttcagtcaaagtttgatactactatcagttcagtaaataacattttagctgccctatcaatcattcttccatgcataccttatgcattcattctgtaaggggtttagcttttactgaaaatcctagagaaaaatacagaacagttcacatagtgtaaagttatagacatggtcttagcagtcaagcactttcccattgaaattgcttcataactcaaaattcaacactcaccttgggtagtttttgaatccaaaacttttttgtggacttttgtttctttttgcatttatggcacatatataactctgtctcatcaagttcttctaagtcggtaaaactgcgaagacaatctaaacaaattgattttggcagcattaaaacaagatgccttttgtagaggcaatgtactgtagaaaaaagacccaggtttaaaatctcagctttattagctatacgaccttagaaaagttaacctttctcaattgcaaactggagacaaaaaataatacctactttgaagaactattataaggaagagaaataatgtgtagagcacctggcatcatgcctgacatctggtgatgatcaattgtgttggttttactattaatgataattcatctggataattctgataaaatggtttcctgatgaatttaaagtttcaattgtagttttctgtcaatatgttacattatacaggacaaagctccaaactcataaaaaaaagtcaaatttagataatttaaaaataaacatagatcacagaaggctacactatcaaccttctctgtccagacgctgtactctcagttcctagataaatcacagctacattttttttcatttaaagatgtaattgtgtaacctggggtttagtaaactacagtcctaaaacatccagccagccacctggttttgtaaataaagtttcattggaacag

SEQ ID NO: 24640 - protein, 86 aa, Homo sapiens
MAQGKSPEEDKRSAFKIGRTSKSGTKLQVIGLATRYSHPPEAGCCTHPEPWCTTTAARSYRQLSGPLFSGYRTRKKEQWSMTSVSR

SEQ ID NO: 24641 - DNA, 1444 bp, Homo sapiens
agcgcagcaggcgcgccaggcagtcgtcggtaacgtggccgcagcccgagagcgtgacggacgccaggttggggcacctgtgaggagagtgcggtgacccggggctcactggcttgttaaagctacccaaccgccccatgggaccgagtggactcatttaccgaggaggactcgggccctgcgaggtcacttcatcctggcccaggtactgcagctccaaatcgtggggattctgtaagagcttgctacctgttgactgaggaggcccacgagttgagaagaactagcaagagtggtacaaaactgcaggtcattgggctggccaccaggtattcccacccaccagaagctggctgttgtactcacccggaaccatggtgcaccaccacagcggcgaggtcatacaggcagctctccgggccactgttctcaggctacagaacaaggaagaaggagcagtggtcaatgacatcagtatctcgatgacctctaccctctccatgtgatgacaatcttactgaagagccattttttcaccatgctaaaaaggtaaccaccttacctctagtaagtagcatttcatgtctaggcctctcagtggaaattctacgtatgtatcaactttatttcttaaatatgctgtccaatgaaatcttttcaaatgtaagcatagcacctggaggacagagatgcggtcaaagattgtgaacacctaatttacctttcagtcaaagtttgatactactatcagttcagtaaataacattttagctgccctatcaatcattcttccatgcataccttatgcattcattctgtaaggggtttagcttttactgaaaatcctagagaaaaatacagaacagttcacatagtgtaaagttatagacatggtcttagcagtcaagcactttcccattgaaattgcttcataactcaaaattcaacactcaccttgggtagtttttgaatccaaaacttttttgtggacttttgtttctttttgcatttatggcacatatataactctgtctcatcaagttcttctaagtcggtaaaactgcgaagacaatctaaacaaattgattttggcagcattaaaacaagatgccttttgtagaggcaatgtactgtagaaaaaagacccaggtttaaaatctcagctttattagctatacgaccttagaaaagttaacctttctcaattgcaaactggagacaaaaaataatacctactttgaagaactattataaggaagagaaataatgtgtagagcacctggcatcatgcctgacatctggtgatgatcaattgtgttggttttactattaatgataattcatctggataattctgataaaatggtttcctgatgaatttaaagtttcaattgtagttttctgtcaatatgttacattatacaggacaaagctccaaactcat

SEQ ID NO: 24642 - protein, 40 aa, Homo sapiens
MGPSGLIYRGGLGPCEVTSSWPRYCSSKSWGFCKSLLPVD

SEQ ID NO: 24643 - DNA, 1807 bp, Homo sapiens
agttctccaggcgcagtgcgcgcaggcgtgggcagcagcgcagcaggcgcgccaggcagtcgtcggtaacgtggccgcagcccgagagcgtgacggacgccaggttggggcacctgtgaggagagtgcggtgacccggggctcactggcttgttaaagctacccaaccgccccatgggaccgagtggactcatttaccgaggaggactcgggccctgcgaggtgaagacacttggctgcgatgacactgcagggttccaagtcggctttctggccggcccattttccctcctctttctgcccctgcaccccaccgtaccttcatctgcgtgggttcttggctcgtagccttgggagcccctagtgggaagccccgaccccggcccagcagagtcctggggcggctgtggacagagggaatgccggttccaggagccacaacccttgactctttgtttcgctctggatgtgctgccttgcaggggagcggtgcttggcgattgctccagtctagcttcaagctgaggcccctgaatgtcccggcgggacgtcacttcatcctggcccaggtactgcagctccaaatcgtggggattctgtaagagcttgctacctgttgactgaggaggcccacgagttgagaagaactagcaagagtggtacaaaactgcaggtcattgggctggccaccaggtattcccacccaccagaagctggctgttgtactcacccggaaccatggtgcaccaccacagcggcgaggtcatacaggcagctctccgggccactgttctcaggctacagaacaaggaagaaggagcagtggtcaatgacatcagtatctcgatgacctctaccctctccatgtgatgacaatcttactgaagagccattttttcaccatgctaaaaaggtaaccaccttacctctagtaagtagcatttcatgtctaggcctctcagtggaaattctacgtatgtatcaactttatttcttaaatatgctgtccaatgaaatcttttcaaatgtaagcatagcacctggaggacagagatgcggtcaaagattgtgaacacctaatttacctttcagtcaaagtttgatactactatcagttcagtaaataacattttagctgccctatcaatcattcttccatgcataccttatgcattcattctgtaaggggtttagcttttactgaaaatcctagagaaaaatacagaacagttcacatagtgtaaagttatagacatggtcttagcagtcaagcactttcccattgaaattgcttcataactcaaaattcaacactcaccttgggtagtttttgaatccaaaacttttttgtggacttttgtttctttttgcatttatggcacatatataactctgtctcatcaagttcttctaagtcggtaaaactgcgaagacaatctaaacaaattgattttggcagcattaaaacaagatgccttttgtagaggcaatgtactgtagaaaaaagacccaggtttaaaatctcagctttattagctatacgaccttagaaaagttaacctttctcaattgcaaactggagacaaaaaataatacctactttgaagaactattataaggaagagaaataatgtgtagagcacctggcatcatgcctgacatctggtgatgatcaattgtgttggttttactattaatgataattcatctggataattctgataaaatggtttcctgatgaatttaaagtttcaattgtagttttctgtcaatatgttacattatacaggacaaagctccaaactcat

SEQ ID NO: 24644 - protein, 60 aa, Homo sapiens
MPVPGATTLDSLFRSGCAALQGSGAWRLLQSSFKLRPLNVPAGRHFILAQVLQLQIVGIL

SEQ ID NO: 24645 - DNA, 1376 bp, Homo sapiens
gacttagaagaacttgatgagacagagttatatatgtgccataaatgcaaaaagaaacaaaagtccacaaaaaagttttggattcaaaaactacccaaggtgagtgttgaattttgagttatgaagcaatttcaatgggaaagtgcttgactgctaagaccatgtctataactttacactatgtgaactgttctgtatttttctctaggattttcagtaaaagctaaaccccttacagaatgaatgcataaggtatgcatggaagaatgattgatagggcagctaaaatgttatttactgaactgatagtagtatcaaactttgactgaaaggtaaattaggtgttcacaatctttgaccgcatctctgtcctccaggtgctatgcttacatttgaaaagatttcattggacagcatatttaagaaataaagttgatacatacgtagaatttccactgagaggcctagacatgaaatgctacttactagagcctgagaacagtggcccggagagctgcctgtatgacctcgccgctgtggtggtgcaccatggttccggggttggttctggacattacacagcatacgcaactcacgaaggccgctggttccacttcaatgacagtactgtaacactgactgacgaggagactgtggtgaaggcgaaggcctacatccttttctacgtggaacaccaggccaaagctggatcggataaactttaatacctcctccaaatcatcattcaccaaccataccagagaaacatttccagttttccacaaatacttgatacaagatttaatttcattatgcacttttcaatttcctattttggatttagttttgtcaatggtagtgacttactgaacatgggcaccaactaattttgttgttgttctaccagaaaacctcagcagatgttttgatttgctgctttagttgtaataattcaatttttataggtagttgtaagaacttagtcttatttgacttttttattttatgttaatgttttcagttctcactttgaggcacatttacatcaatgcttttgttcctctcacatgctgaaagcaagatgtgttccttattgtgaagagcgacacaactgcctgctgcctttccacagctataatggacatcaggttgactctaaatcaaggatcatgtgtgcacaatacttgtggcccacaaaatttcacaatgactgctgaggaatcattctttttgcctgtaaaatataacaaagggcatcattaagtagaccaggtaattactgcttgtctctcaaggctgctgtctttatcagcactaactaaataaatttgttggttcagttgtacttgtcctgcaaatacaagaattactctctt

SEQ ID NO: 24646 - protein, 84 aa, Homo sapiens [sequence omitted]

SEQ ID NO: 24647 - DNA, 2242 bp, Homo sapiens
gacttagaagaacttgatgagacagagttatatatgtgccataaatgcaaaaagaaacaaaagtccacaaaaaagttttggattcaaaaactacccaaggtgagtgttgaattttgagttatgaagcaatttcaatgggaaagtgcttgactgctaagaccatgtctataactttacactatgtgaactgttctgtatttttctctaggattttcagtaaaagctaaaccccttacagaatgaatgcataaggtatgcatggaagaatgattgatagggcagctaaaatgttatttactgaactgatagtagtatcaaactttgactgaaaggtaaattaggtgttcacaatctttgaccgcatctctgtcctccaggtgctatgcttacatttgaaaagatttcattggacagcatatttaagaaataaagttgatacatacgtagaatttccactgagaggcctagacatgaaatgctacttactagagcctgagaacagtggcccggagagctgcctgtatgacctcgccgctgtggtggtgcaccatggttccggggttggttctggacattacacagcatacgcaactcacgaaggccgctggttccacttcaatgacagtactgtaacactgactgacgaggagactgtggtgaaggcgaaggcctacatccttttctacgtggaacaccaggccaaagctggatcggataaactttaatacctcctccaaatcatcattcaccaaccataccagagaaacatttccagttttccacaaatacttgatacaagatttaatttcattatgcacttttcaatttcctattttggatttagttttgtcaatggtagtgacttactgaacatgggcaccaactaattttgttgttgttctaccagaaaacctcagcagatgttttgatttgctgctttagttgtaataattcaatttttataggtagttgtaagaacttagtcttatttgacttttttattttatgttaatgttttcagttctcactttgaggcacatttacatcaatgcttttgttcctctcacatgctgaaagcaagatgtgttccttattgtgaagagcgacacaactgcctgctgcctttccacagctataatggacatcaggttgactctaaatcaaggatcatgtgtgcacaatacttgtggcccacaaaatttcacaatgactgctgaggaatcattctttttgcctgtaaaatataacaaagggcatcattaagtagaccaggtaattactgcttgtctctcaaggctgctgtctttatcagcactaactaaataaatttgttggttcagttgtacttgtcctgcaaatacaagaattactctctttgttggtttttttggttttggggcatacttgtttgcggggaggtaagatgggagtaaagaccaaatacatgtaatgtttaaaaaaaatgctgtgactcactgacatggtataggtgttaccagtgaggtaaagccatggcgtctgcctccttttgaatcagtatctcattcccccttagttgtaccactggaagtcacgacatgtccattatagacttacttactgcttgtgtttggcatctgagtctgaggtgtgaccctctgggatttacttggatcatcacccgcacttcagtttatcactggggggtgtgcttccacaggaggaaatttagaatcttcgctgctctgggttttaacacctctctctggcctatcctgattgataggacaagttgaaaatactgttggagtaagtaagtggagttttcgttttgttttttgggggtttttggagacaagagtctctctctgttgcccaggctggagtgcagtggcacgatctcagctcattgcaacctcggcctcccgagtagcaattctcctgcctcaacctcctgagtagctgggattacaggtgcccaccactacacctggctaattttttttttgtatttttagtaaagacgggggtttaccatgttggctagggtggtctcaacctccctcctgacctcaggtgatccgcctgcctcagcctcccaaagtgctgagattacaggcgtgagccatcacgcccagacagttttgtttttaaaaaacagatttaactcaaagattcaaatttggaaccagaatcccatttaaagaaagcagttgtggtttctacaagtgttctaagacagtcctgtggtggtttttttttt

SEQ ID NO: 24648 - protein, 84 aa, Homo sapiens [sequence omitted]

SEQ ID NO: 24649 - DNA, 562 bp, Homo sapiens
gtgcgcccctgcttcccctcctcctgcttcaccgagatcaccaccggggctcctggaggtggcggtccccaggacactccgggagccggcggggtctcgctgggtcgctccgcccggaggctccccagacccctgcgcgcggcagccctggcccccgtcacccccgagcgcaagtcggcgaactccgagtggtcaggtcctccccaccgaggtgatttcggtccaacggcgatcggagtccccgaggacggtgcaggcgcctcccgcctccgtggggagcgcacagcagaaagcctggggcggaagcaagaggggaaaggcggtggtgttgagtcacttcatcctggcccaggtactgcagctccaaatcgtggggattctgtaagagcttgctacctgttgactgaggaggcccacgagttgagaagaactagcaagagtggtacaaaactgcaggtcattgggctggccaccaggtattcccacccaccagaagctggctgttgtactcacccggaaccatggtgcaccaccacagcggcgaggtcatacaggcagctct

SEQ ID NO: 24650 - protein, 186 aa, Homo sapiens
VRPCFPSSCFTEITTGAPGGGGPQDTPGAGGVSLGRSARRLPRPLRAAALAPVTPERKSANSEWSGPPHRGDFGPTAIGVPEDGAGASRLRGERTAESLGRKQEGKGGGVESLHPGPGTAAPNRGDSVRACYLLTEEAHELRRTSKSGTKLQVIGLATRYSHPPEAGCCTHPEPWCTTTAARSYRQ

SEQ ID NO: 24651 - DNA, 1022 bp, Homo sapiens
tgaggagagtgcggtgacccggggctcactggcttgttaaagctacccaaccgccccatgggaccgagtggactcatttaccgaggaggactcgggccctgcgaggtcacttcatcctggcccaggtactgcagctccaaatcgtggggattctgtaagagcttgctacctgttgactgaggaggcccacgagttgagcaaaaagaatgattcctcagcagtcattgtgaaattttgtgggccacaagtattgtgcacacatgatccttgatttagagtcaacctgatgtccattatagctgtggaaaggcagcaggcagttgtgtcgctcttcacaataaggaacacatcttgctttcagcatgtgagaggaacaaaagcattgatgtaaatgtgcctcaaagtgagaactgaaaacattaacataaaataaaaaagtcaaataagactaagttcttacaactacctataaaaattgaattattacaactaaagcagcaaatcaaaacatctgctgaggttttctggtagaacaacaacaaaattagttggtgcccatgttcagtaagtcactaccattgacaaaactaaatccaaaataggaaattgaaaagtgcataatgaaattaaatcttgtatcaagtatttgtggaaaactggaaatgtttctctggtatggttggtgaatgatgatttggaggaggtattaaagtttatccgatccagctttggcctggtgttccacgtagaaaaggatgtaggccttcgccttcaccacagtctcctcgtcagtcagtgttacagtactgtcattgaagtggaaccagcggccttcgtgagttgcgtatgctgtgtaatgtccagaaccaaccctgtaaaggcaaaagaccaaaggaaaaaagaacctcagaaatcacaaaaagacctgtacaactatataatgttagatttaaattttaataagaatacatcctagacttttgatttaagatgcttgttaaattaatgtttttaccttcctc

SEQ ID NO: 24652 - protein, 40 aa, Homo sapiens; identical to SEQ ID NO: 24642

SEQ ID NO: 24653 - DNA, 1517 bp, Homo sapiens
ggaggcaggtcagccgtcccccggctgcagctgcactcacatgtggccactgctcaccatgcacataacccagctcaaccgggagtgcctgctgcacctcttctccttcctagacaaggacagcaggaagagccttgccaggacctgctcccagctccacgacgtgtttgaggaccccgcactctggtccctgctgcacttccgttccctcactgaactccagaaggacaacttcctcctgggcccggcactccgcagcctctccatctgctggcactccagccgcgtgcaggtgtgcagcattgaggactggctcaagagtgccttccagagaagcatctgcagccggcacgagagcctggtcaatgatttcctcctccgggtgtgcgacaggctttctgctgtgcgctccccacggaggcgggaggcgcctgcaccgtcctcggggactccgatcgccgttggaccgaaatcacctcggtggggaggacctgaccactcggagttcgccgacttgcgctcgggggtgacgggggccagggctgccgcgcgcaggggtctggggagcctccgggcggagcgacccagcgagaccccgccggctcccggagtgtcctggggaccgccacctccaggagccccggtggtgatctcggtgaagcaggaggaggggaagcaggggcgcacgggcagaaggagccaccgagccgctcctccttgcggttttgcccgcacgcgcgtctgcccgcccacctttcctggggcggatgcgttcccgcagtgaccgcactcgcgattgtagaaaattcgctcccaattgttgaatgcttacataaactgcatagttacccatattttctactgttctcataagggaaaaagaaatgatttggaagaaaaaaaaagcctcaaactaaacaaaaacaaaaccagcagccctggctaagcttttgataatggaaccattataagctgacaagctagatttttcacctgttggatttgctggacatgagcacaagcctaggcttccaatttgaatttcagggctgtagtcactgatgtgtcacatttagtgaaggctctcggccccccggcagccgcctggtcctgggtcactggggagaattctgggtgggtggaagaggcgaggagcactgtgatgggcgctgttcacactccggctccacccagcgccagctgcgacaaagccctttacccctcccaggccaggtgtttcttctgtgtgaaagaggagcttgatccctactcacaggttccttaattcattgctcaaatagggaaacggcaaggaaaaagacaaattctgttctcatgaagcttaccttctagtgggggaagagacaacaggtaactggtatataagagggtagaagggccaggtgcggtggctcaatgcctgtaatcccagcactttaggaggccaagatgggcgattcacgaggtcaggagatcgagaccatcctggctaacaaggtgaaacccccgtctgtact

SEQ ID NO: 24654 - protein, 247 aa, Homo sapiens
MWPLLTMHITQLNRECLLHLFSFLDKDSRKSLARTCSQLHDVFEDPALWSLLHFRSLTELQKDNFLLGPALRSLSICWHSSRVQVCSIEDWLKSAFQRSICSRHESLVNDFLLRVCDRLSAVRSPRRREAPAPSSGTPIAVGPKSPRWGGPDHSEFADLRSGVTGARAAARRGLGSLRAERPSETPPAPGVSWGPPPPGAPVVISVKQEEGKQGRTGRRSHRAAPPCGFARTRVCPPTFPGADAFPQ

SEQ ID NO: 24655 - DNA, 3562 bp, Homo sapiens
ggaggcaggtcagccgtcccccggctgcagctgcactcacatgtggccactgctcaccatgcacataacccagctcaaccgggagtgcctgctgcacctcttctccttcctagacaaggacagcaggaagagccttgccaggacctgctcccagctccacgacgtgtttgaggaccccgcactctggtccctgctgcacttccgttccctcactgaactccagaaggacaacttcctcctgggcccggcactccgcagcctctccatctgctggcactccagccgcgtgcaggtgtgcagcattgaggactggctcaagagtgccttccagagaagcatctgcagccggcacgagagcctggtcaatgatttcctcctccgggtgtgcgacagggtaagaggattaaatgacacagtggcacctggcacatagtaggtactgatgaacgtctactgaatctggttcttctggcactcagctcaggtcgggaggaatggctgaggatggctgggcagggggacagtccgctctttgttttttccctgtatcagaattattccaaagattcttagaagaaaagatcacccaacacctttgaggcttaaacacctaatccttataaccaccttgaaggtaacaattcctcccacttgacaaatgaggaagtgacgcccagcaaggttcagacatctgtcctgggtctgacagcaaataagtcaccagccagtcacctgagctgccggagccagtttcttcatgtacaaaactgggggtgcagaggttgacggggtgactaatgagggcacacaaacctgaaggaggcccgggctcggtgtgacacctggctgcacccaacatatttaagttccttacttccctcccctggcacaaaggagccgagctggcacagccaggggcagtcacggagctgcgggggaggctggcagggaaagggaaacgcttccccagcccagactctagctccctctggctgcggggagccaaggccccggcccattagtcggtccttctggactggaagcaggctggtcccgtttgtttccagggaaagcgggttaggactgcctgtggaaggccccgttgcaggctcctcacaaccccagtggtagacattattccccccacgcagaggaaatgaaggctccgtgagtgactgacacggcgataaaccaagtctaacttggctcaagatcttttctttgctgggaggggctggtgaggctgcagcagagggtcccccaagctttctggccaagcgacctgggtgggtgtccgtgactgtacctgctcagggcttgcctctagctgcctccgaaccctacccttttccaggctggtggcccaggggatgcaggaacagctctagtctactaagctgaacccggactcaatgctaacgcgtgcccccaccgccttgagggttgggatgggcctgtcactaggccacctccaaggaaacaaatccctcttcccactcacgtcccgccgggacattcaggggcctcagcttgaagctagactggagcaatcgccaagcaccgctcccctgcaaggcagcacatccagagcgaaacaaagagtcaagggttgtggctcctggaaccggcattccctctgtccacagccgccccaggactctgctgggccggggtcggggcttcccactaggggctcccaaggctacgagccaagaacccacgcagatgaaggtacggtggggtgcaggggcagaaagaggagggaaaatgggccggccagaaagccgacttggaaccctgcagtgtcatcgcagccaagtgtcttcacctcgcagggcccgagtcctcctcggtaaatgagtccactcggtcccatggggcggttgggtagctttaacaagccagtgagccccgggtcaccgcactctcctcacaggtgccccaacctggcgtccgtcacgctctcgggctgcgggcagagcacagcgccgccatgctgcccgaccagcccccgcgcccgcgcgcgcccgccgcggccctcggcaagctgctgcagcgctagacgccgccccgccgctgcccccggggaaggagcgcagccccagaccgtcctggcttcgaacccagctcttccaccttcagaccaccaccgcatattctgagcctcattttccccgtctgcacagtggggataagaaagcctacctcacgttacgattttatacataggataaacgcaagattaaatggatatttggaaaacactcggctggttctcactcaacaccaccgcctttcccctcttgcttccgccccaggctttctgctgtgcgctccccacggaggcgggaggcgcctgcaccgtcctcggggactccgatcgccgttggaccgaaatcacctcggtggggaggacctgaccactcggagttcgccgacttgcgctcgggggtgacgggggccagggctgccgcgcgcaggggtctggggagcctccgggcggagcgacccagcgagaccccgccggctcccggagtgtcctggggaccgccacctccaggagccccggtggtgatctcggtgaagcaggaggaggggaagcaggggcgcacgggcagaaggagccaccgagccgctcctccttgcggttttgcccgcacgcgcgtctgcccgcccacctttcctggggcggatgcgttcccgcagtgaccgcactcgcgattgtagaaaattcgctcccaattgttgaatgcttacataaactgcatagttacccatattttctactgttctcataagggaaaaagaaatgatttggaagaaaaaaaaagcctcaaactaaacaaaaacaaaaccagcagccctggctaagcttttgataatggaaccattataagctgacaagctagatttttcacctgttggatttgctggacatgagcacaagcctaggcttccaatttgaatttcagggctgtagtcactgatgtgtcacatttagtgaaggctctcggccccccggcagccgcctggtcctgggtcactggggagaattctgggtgggtggaagaggcgaggagcactgtgatgggcgctgttcacactccggctccacccagcgccagctgcgacaaagccctttacccctcccaggccaggtgtttcttctgtgtgaaagaggagcttgatccctactcacaggttccttaattcattgctcaaatagggaaacggcaaggaaaaagacaaattctgttctcatgaagcttaccttctagtgggggaagagacaacaggtaactggtatataagagggtagaagggccaggtgcggtggctcaatgcctgtaatcccagcactttaggaggccaagatgggcgattcacgaggtcaggagatcgagaccatcctggctaacaaggtgaaacccccgtctgtactaaaaaaaaatacaaaaaattagccgggcgtggtggcgggcacctgtagtcccagctactcaggaggctgaggcaggagaatggcgtgaacccgggaggcggagcttgcagtgagccaaga

SEQ ID NO: 24656 - protein, 130 aa, Homo sapiens
MWPLLTMHITQLNRECLLHLFSFLDKDSRKSLARTCSQLHDVFEDPALWSLLHFRSLTELQKDNFLLGPALRSLSICWHSSRVQVCSIEDWLKSAFQRSICSRHESLVNDFLLRVCDRVRGLNDTVAPGT

SEQ ID NO: 24657 - DNA, 1680 bp, Homo sapiens
ggaggcaggtcagccgtcccccggctgcagctgcactcacatgtggccactgctcaccatgcacataacccagctcaaccgggagtgcctgctgcacctcttctccttcctagacaaggacagcaggaagagccttgccaggacctgctcccagctccacgacgtgtttgaggaccccgcactctggtccctgctgcacttccgttccctcactgaactccagaaggacaacttcctcctgggcccggcactccgcagcctctccatctgctggcactccagccgcgtgcaggtgtgcagcattgaggactggctcaagagtgccttccagagaagcatctgcagccggcacgagagcctggtcaatgatttcctcctccgggtgtgcgacagggtaagaggattaaatgacacagtggcacctggcacatagtaggctttctgctgtgcgctccccacggaggcgggaggcgcctgcaccgtcctcggggactccgatcgccgttggaccgaaatcacctcggtggggaggacctgaccactcggagttcgccgacttgcgctcgggggtgacgggggccagggctgccgcgcgcaggggtctggggagcctccgggcggagcgacccagcgagaccccgccggctcccggagtgtcctggggaccgccacctccaggagccccggtggtgatctcggtgaagcaggaggaggggaagcaggggcgcacgggcagaaggagccaccgagccgctcctccttgcggttttgcccgcacgcgcgtctgcccgcccacctttcctggggcggatgcgttcccgcagtgaccgcactcgcgattgtagaaaattcgctcccaattgttgaatgcttacataaactgcatagttacccatattttctactgttctcataagggaaaaagaaatgatttggaagaaaaaaaaagcctcaaactaaacaaaaacaaaaccagcagccctggctaagcttttgataatggaaccattataagctgacaagctagatttttcacctgttggatttgctggacatgagcacaagcctaggcttccaatttgaatttcagggctgtagtcactgatgtgtcacatttagtgaaggctctcggccccccggcagccgcctggtcctgggtcactggggagaattctgggtgggtggaagaggcgaggagcactgtgatgggcgctgttcacactccggctccacccagcgccagctgcgacaaagccctttacccctcccaggccaggtgtttcttctgtgtgaaagaggagcttgatccctactcacaggttccttaattcattgctcaaatagggaaacggcaaggaaaaagacaaattctgttctcatgaagcttaccttctagtgggggaagagacaacaggtaactggtatataagagggtagaagggccaggtgcggtggctcaatgcctgtaatcccagcactttaggaggccaagatgggcgattcacgaggtcaggagatcgagaccatcctggctaacaaggtgaaacccccgtctgtactaaaaaaaaatacaaaaaattagccgggcgtggtggcgggcacctgtagtcccagctactcaggaggctgaggcaggagaatggcgtgaacccgggaggcggagcttgcagtgagccaaga

SEQ ID NO: 24658 - protein, 139 aa, Homo sapiens
MTQWHLAHSRLSAVRSPRRREAPAPSSGTPIAVGPKSPRWGGPDHSEFADLRSGVTGARAAARRGLGSLRAERPSETPPAPGVSWGPPPPGAPVVISVKQEEGKQGRTGRRSHRAAPPCGFARTRVCPPTFPGADAFPQ

SEQ ID NO: 24659 - DNA, 1637 bp, Homo sapiens
ggaggcaggtcagccgtcccccggctgcagctgcactcacatgtggccactgctcaccatgcacataacccagctcaaccgggagtgcctgctgcacctcttctccttcctagacaaggacagcaggaagagccttgccaggacctgctcccagctccacgacgtgtttgaggaccccgcactctggtccctgctgcacttccgttccctcactgaactccagaaggacaacttcctcctgggcccggcactccgcagcctctccatctgctggcactccagccgcgtgcaggtgtgcagcattgaggactggctcaagagtgccttccagagaagcatctgcagccggcacgagagcctggtcaatgatttcctcctccgggtgtgcgacaggctttctgctgtgcgctccccacggaggcgggaggcgcctgcaccgtcctcggggactccgatcgccgttggaccgaaatcacctcggtggggaggacctgaccactcggagttcgccgacttgcgctcgggggtgacgggggccagggctgccgcgcgcaggggtctggggagcctccgggcggagcgacccagcgagaccccgccggctcccggagtgtcctggggaccgccacctccaggagccccggtggtgatctcggtgaagcaggaggaggggaagcaggggcgcacgggcagaaggagccaccgagccgctcctccttgcggttttgcccgcacgcgcgtctgcccgcccacctttcctggggcggatgcgttcccgcagtgaccgcactcgcgattgtagaaaattcgctcccaattgttgaatgcttacataaactgcatagttacccatattttctactgttctcataagggaaaaagaaatgatttggaagaaaaaaaaagcctcaaactaaacaaaaacaaaaccagcagccctggctaagcttttgataatggaaccattataagctgacaagctagatttttcacctgttggatttgctggacatgagcacaagcctaggcttccaatttgaatttcagggctgtagtcactgatgtgtcacatttagtgaaggctctcggccccccggcagccgcctggtcctgggtcactggggagaattctgggtgggtggaagaggcgaggagcactgtgatgggcgctgttcacactccggctccacccagcgccagctgcgacaaagccctttacccctcccaggccaggtgtttcttctgtgtgaaagaggagcttgatccctactcacaggttccttaattcattgctcaaatagggaaacggcaaggaaaaagacaaattctgttctcatgaagcttaccttctagtgggggaagagacaacaggtaactggtatataagagggtagaagggccaggtgcggtggctcaatgcctgtaatcccagcactttaggaggccaagatgggcgattcacgaggtcaggagatcgagaccatcctggctaacaaggtgaaacccccgtctgtactaaaaaaaaatacaaaaaattagccgggcgtggtggcgggcacctgtagtcccagctactcaggaggctgaggcaggagaatggcgtgaacccgggaggcggagcttgcagtgagccaaga

SEQ ID NO: 24660 - protein, 247 aa, Homo sapiens; identical to SEQ ID NO: 24654

SEQ ID NO: 24661 - DNA, 8192 bp, Homo sapiens
gcctctgcggagccgggctcgggtcgccggagccgcgccccaccccgccagctccagagccacgactaatggctgaaggataaatcaacatggcaactatgattccaccagtgaagctgaaatggcttgaacacttgaacagctcctggattacagaggacagtgaatctattgctacaagagagggagttgctgttctgtattctaaactggttagcaataaggaagtagtacctttgccccaacaagttttatgcctcaaaggaccacagttgccagactttgaacgtgagtctctttcaagtgatgagcaggaccactatttggatgcccttcttagcagccagctagcattggcaaagatggtatgttcagattccccatttgccggggcacttagaaaacgactgcttgtactccagcgtgtcttttatgcactttctaataaataccatgacaaaggcaaggtgaagcagcagcagcattctccggagagcagttctggttcagcagatgtccattctgttagtgaacgcccccggtcaagcactgatgcacttatagaaatgggtgttcgaactggtctaagtttattatttgcgcttctaagacaaagttggatgatgcctgtgtcaggacctggtctcagtctttgcaacgatgtcattcatactgcaattgaagttgtgagctctttgccaccattatcattagcaaatgaaagcaagattcctcctatgggcttggactgcttatcgcaagtaacaacatttcttaaaggagtcactattcctaattctggggcagacactttaggtcgtagattagcttctgagttgctgcttggtttggcagctcaacgaggctcattgcgatatcttcttgaatggatagaaatggctttgggggcttcggcagttgtacacaccatggagaaaggcaaactactctcaagccaggaaggaatgatcagctttgactgctttatgaccatattaatgcagatgaggcgttctttgggttcatctgctgatcggagtcagtggagagaaccaaccagaacatcggatggcttgtgctccctttacgaggcagcattatgtctctttgaagaggtttgcagaatggcttctgattattcgagaacatgtgctagcccagatagcattcagactggtgatgctcccattgtctccgaaacctgtgaggtttatgtttgggggagcaatagcagccatcagttggtagaaggtacacaggagaaaatactgcaacccaaactggctcctagtttctctgatgcacagaccattgaagctggacagtactgcacttttgtcatttctacggatggctctgttagagcttgcgggaaaggcagctatgggagactgggccttggagactccaataatcagtcaactttaaaaaagttaacattcgagcctcacagatccattaaaaaggtttcatcttctaaaggatctgatggtcacactttagcctttacgacagaaggagaagtcttcagttggggagatggtgattatgggaaactggggcatggaaatagttcaacacagaaatatcccaagcttattcagggacctctacaaggaaaggtagttgtttgtgtgtcagctggatacagacatagtgctgctgtcacagaggatggggaattatacacatggggtgaaggagactttggaagattaggtcatggtgacagcaatagtcgtaacattccaacattagtaaaagacatcagcaatgtaggagaggtttcttgtggcagttcacatactattgctctgtctaaagatgggagaactgtatggtcttttggaggaggagacaatggtaaacttggtcatggtgataccaacagagtgtataaacctaaagttattgaagctttacaaggaatgttcattcgcaaagtttgtgctgggagccagtcttcacttgctttgacatcaacagggcaggtctatgcttggggctgtggagcttgtctaggttgtggttcttcagaagctactgctttgagacccaagcttattgaagaactggctgccacaagaatagttgatgtttctattggagacagtcattgtttggctctttctcatgataatgaagtttatgcctggggcaataactcaatggggcaatgtggtcagggaaattccacaggtcctattactaaaccaaagaaagtgagtggcttagatggcatagctattcagcagatttcggctggaacatcacatagtctggcatggactgctcttcctagggacagacaagttgttgcatggcaccgaccttattgtgtagatcttgaagagagtaccttctcacacctgcgttcttttcttgagagatactgtgataaaataaacagtgagattcccccactccctttcccttcatcaagagaacaccacagttttctcaagctgtgcctgaagctactttcaaatcaccttgctcttgcacttgcgggaggggtagctaccagcattctcgggaggcaggcaggtccacttcgaaatttgctcttcagactgatggactcaactgtcccagatgaaatccaagaggtggtaattgaaactttatcagtgggagcaaccatgctgttacctccattacgagaacggatggaattacttcattctcttttacctcaaggacctgatagatgggaaagcttatctaaaggacagagaatgcaactggatatcatcctgacaagtttgcaagatcatacccacgtagcctccctacttggctatagttcaccctctgatgctgctgacctatcttctgtgtgtactggctacggaaatctgtcagatcaaccttacggcactcagagctgccatccagatacccacctggctgaaattttgatgaagaccctcttaagaaatttaggattttatacagatcaagcatttggagagctagaaaagaatagtgataaatttctacttggaacatcatcatcagaaaacagtcagcctgctcatcttcatgaactgctatgttcactacagaaacagctgctggcattttgccatatcaataacattagtgagaactcaagcagtgtggcattgcttcataaacatcttcagcttttgttgcctcatgccacagatatttattcacgttctgcaaatttgctcaaagaaagtccttggaatggcagtgttggagaaaaattaagagatgtgatatacgtctcagctgctggcagtatgctctgccagattgttaactccctgctgttactccctgtgtcagtggctcggcctttattgagttacctcctcgacttgttgccacctcttgattgccttaatagactcctgccagctgctgatcttttagaagaccaggagttacagtggcctcttcatggagggccagaactaattgatcctgctggtctgccattacctcagccagctcagtcctgggtatggcttgtggatctagaaagaacaattgctctccttattgggcggtgtcttggtggcatgcttcagggctcccctgtgtctccagaggaacaggacactgcatattggatgaaaacgccactgttcagtgacggtgtagaaatggacactcctcaattggataaatgtatgagttgcctgttagaagtagcactttctggaaatgaagaacagaagccttttgattataaattgcggcctgaaattgctgtctatgtagacttggcattgggttgttctaaagagcctgcccgaagcctttggatcagcatgcaggactatgctgttagtaaagattgggacagtgcaactttaagtaatgagtcactcttggacactgtgtctagatttgttcttgcagctcttctgaaacacacaaatttacttagtcaagcatgtggagaaagccgatatcaacctggtaaacacttatcagaagtgtaccgttgtgtatacaaagttcgaagtcgtttacttgcttgcaagaaccttgaacttattcaaacaaggtcatcatcacgggacagatggatatcagaaaaccaggactctgcagatgttgatcctcaggagcattcatttactcgaactattgatgaagaagctgaaatggaagaacaggctgagagagaccgggaagaggggcatccggagccagaggatgaagaggaggaacgggaacatgaagtgatgacagctggcaaaatctttcagtgtttcctctcagcccgtgaagtagctcgtagccgagaccgagatagaatgaacagtggggcagggtctggggctcgagctgatgatccacctcctcagtctcagcaagagcgaagggtcagcacagaccttcctgagggtcaggatgtgtacactgctgcatgcaactccgtgatccatcggtgtgccctgttaatattaggagtaagtcctgtgatagatgagcttcagaagcgaagagaagaaggacagttgcagcaaccttcaacaagtgcctctgaagggggtggacttatgaccaggagtgaaagtcttactgcagagagccggctagtccacacaagcccaaattatagactgatcaaatcgaggagtgaatctgatttgtctcagcctgaatcagatgaagagggttacgcactgagtggcagacgaaatgttgatttggatttggcagcatctcacagaaagagaggtcctatgcacagtcaattggaatccctgagtgactcttgggctcgcctgaaacatagcagagactggttatgcaactcctcctattcctttgagtcagattttgatcttaccaagtctttgggagttcacactttgattgaaaatgttgtaagctttgtgagtggagatgtggggaatgccccaggttttaaagagccagaggaaagtatgtctacaagtccccaggcctccatcattgcaatggaacagcagcagttaagggcagaacttcgtttagaggcacttcatcagatcctcgttctattgtctgggatggaagaaaaaggtagcatctcactggcaggaagcagattgagttcaggcttccagtcctccacactactcacgtctgtgaggctgcagttcctagcagggtgttttggtttaggcactgttggacacacaggaggcaagggagagagtggccgattgcatcactatcaggatgggatcagagcagctaagagaaatattcagattgaaatccaggtagctgtgcataaaatttatcaacagttgtctgctaccctggaaagagccctgcaagcaaacaagcatcacattgaagcccagcaacgtctgcttctggttacagtttttgccctaagtgttcattatcaaccagtagatgtttctttggcaatttccactggtctgctaaacgtattgtcacagttgtgtggtacagacaccatgctaggacagcccctgcagttgttgccaaagacgggtgtttcccagcttagcacagctttgaaagtggccagtacaaggttgctccagattctagccatcactactgggacctatgctgataaactgagtcccaaagtagttcaatccttgttggatctactctgtagtcagttgaagaatttattgtcccaaactggtgtactacatatggcctctttcggagaaggggagcaagaagacggtgaagaagaagaaaaaaaagttgactccagtggagaaactgagaagaaagatttcagagctgctcttaggaaacaacatgcagccgaactccatctaggggattttttagtttttcttcgcagagttgtatcttcaaaagcaattcaatcaaaaatggcttccccaaagtggaccgaagtgcttctaaatatagcatctcagaaatgttcttcaggtatccctctggttggtaacttaagaacaaggctccttgcacttcatgtccttgaagctgtgctgccagcttgtgaatctggtgtagaagatgatcaaatggcccagattgttgagcgcttattttcccttctctctgattgtatgtgggagacacccattgctcaggccaaacatgctattcagataaaggaaaaagaacaagaaataaaactacagaagcagggcgagttggaagaagaagatgagaatcttcctatccaagaagtatcctttgacccggagaaagctcagtgttgcctagtggagaatggacagattttaactcacggcagtggagggaaaggatatggattggcatctacaggagtaacttctgggtgctatcagtggaagttttatattgtgaaggaaaacagaggtaatgaaggcacgtgtgttggagtttctcgctggccagtacatgactttaatcaccgcactacctcggatatgtggctctatagggcctacagtggtaacctctatcacaatggagaacagactctcacattgtccagctttactcaaggagatttcattacctgtgtgttagacatggaagccaggaccatttcttttgggaaaaatggagaggaacccaaattagcttttgaagatgtggatgcagcagagttgtacccatgtgtgatgttctatagtagcaatccaggggaaaaggtgaaaatttgtgatatgcagatgcgtggcacaccccgagacttacttccaggagaccctatttgtagtccagtagcagcagtgctggctgaggccactattcagctcatccgtatccttcaccgaacagaccgttggacttactgcattaacaaaaaaatgatggaaaggcttcacaaaattaagatatgtattaaagagtcaggtcagaagctaaagaaaagccgctcggttcagagccgagaggaaaatgaaatgagagaggagaaggagagcaaagaggaagagaaaggtaaacatactaggcatggcctcgctgacctctcagagctgcagctgaggactctttgcatagaggtgtggcccgtgctggctgtgataggaggagttgatgctggtcttagagttggaggtcggtgtgttcacaagcaaactgggcgccatgccacgctgctgggagtggtcaaagagggcagcacgtctgccaaggtccaatgggatgaagcagaaattactatcagcttcccaactttttggtcgcctagtgatactccattgtataatctggaaccctgtgaaccattgccgtttgatgtggcgcgattccgaggcctgacggcttctgtgctgctggacctaacatatctcactggcgttcatgaagacatgggcaaacagagcaccaaacgacatgaaaagaaacaccgacatgaatccgaggagaaaggggatgttgagcagaaacctgagagtgaatccgctttagatatgcgaacaggcctaacatctgatgacgtcaaaagtcagagtaccacaagctccaaatcagaaaatgaaatcgcttcattttctttagatccaacactgccaagtgtggaatcccaacatcaaataacagaagggaaaagaaaaaatcatgaacacatgtccaaaaaccatgatgtagcccagtcagaaatcagagcagtccagctgtcctatctttacctcggtgctatgaagtcacttagtgcccttcttggctgtagtaaatatgctgagctgttgctgataccaaaagttctggctgaaaatggccacaactcagactgtgcaagttctccagttgttcatgaagacgtggagatgcgagcagccctgcagttcttgatgcgacacatggtgaagcgagcagtcatgcggtcacccataaagagagcattgggattagctgatctggaacgagcgcaagccatgatctataaattagtggttcatgggcttttggaagaccagtttgggggcaaaattaagcaagagattgatcaacaagctgaagaaagtgaccctgcccagcaggcacagacaccagttactactagcccatcagcctcaagcacgacctcctttatgagcagctctctggaggacaccacaactgccaccactccagtcactgacacagaaacagtgcctgcatccgagtccccgggagtgatgcctcttagtcttctcaggcaaatgttctctagttacccaactaccactgtacttcccacacgtcgggcacagact

SEQ ID NO: 24662 - protein, 4000 aa, Homo sapiens
MATMIPPVKLKWLEHLNSSWITEDSESIATREGVAVLYSKLVSNKEVVPLPQQVLCLKGPQLPDFERESLSSDEQDHYLDALLSSQLALAKMVCSDSPFAGALRKRLLVLQRVFYALSNKYHDKGKVKQQQHSPESSSGSADVHSVSERPRSSTDALIEMGVRTGLSLLFALLRQSWMMPVSGPGLSLCNDVIHTAIEVVSSLPPLSLANESKIPPMGLDCLSQVTTFLKGVTIPNSGADTLGRRLASELLLGLAAQRGSLRYLLEWIEMALGASAVVHTMEKGKLLSSQEGMISFDCFMTILMQMRRSLGSSADRSQWREPTRTSDGLCSLYEAALCLFEEVCRMASDYSRTCASPDSIQTGDAPIVSETCEVYVWGSNSSHQLVEGTQEKILQPKLAPSFSDAQTIEAGQYCTFVISTDGSVRACGKGSYGRLGLGDSNNQSTLKKLTFEPHRSIKKVSSSKGSDGHTLAFTTEGEVFSWGDGDYGKLGHGNSSTQKYPKLIQGPLQGKVVVCVSAGYRHSAAVTEDGELYTWGEGDFGRLGHGDSNSRNIPTLVKDISNVGEVSCGSSHTIALSKDGRTVWSFGGGDNGKLGHGDTNRVYKPKVIEALQGMFIRKVCAGSQSSLALTSTGQVYAWGCGACLGCGSSEATALRPKLIEELAATRIVDVSIGDSHCLALSHDNEVYAWGNNSMGQCGQGNSTGPITKPKKVSGLDGIAIQQISAGTSHSLAWTALPRDRQVVAWHRPYCVDLEESTFSHLRSFLERYCDKINSEIPPLPFPSSREHHSFLKLCLKLLSNHLALALAGGVATSILGRQAGPLRNLLFRLMDSTVPDEIQEVVIETLSVGATMLLPPLRERMELLHSLLPQGPDRWESLSKGQRMQLDIILTSLQDHTHVASLLGYSSPSDAADLSSVCTGYGNLSDQPYGTQSCHPDTHLAEILMKTLLRNLGFYTDQAFGELEKNSDKFLLGTSSSENSQPAHLHELLCSLQKQLLAFCHINNISENSSSVALLHKHLQLLLPHATDIYSRSANLLKESPWNGSVGEKLRDVIYVSAAGSMLCQIVNSLLLLPVSVARPLLSYLLDLLPPLDCLNRLLPAADLLEDQELQWPLHGGPELIDPAGLPLPQPAQSWVWLVDLERTIALLIGRCLGGMLQGSPVSPEEQDTAYWMKTPLFSDGVEMDTPQLDKCMSCLLEVALSGNEEQKPFDYKLRPEIAVYVDLALGCSKEPARSLWISMQDYAVSKDWDSATLSNESLLDTVSRFVLAALLKHTNLLSQACGESRYQPGKHLSEVYRCVYKVRSRLLACKNLELIQTRSSSRDRWISENQDSADVDPQEHSFTRTIDEEAEMEEQAERDREEGHPEPEDEEEEREHEVMTAGKIFQCFLSAREVARSRDRDRMNSGAGSGARADDPPPQSQQERRVSTDLPEGQDVYTAACNSVIHRCALLILGVSPVIDELQKRREEGQLQQPSTSASEGGGLMTRSESLTAESRLVHTSPNYRLIKSRSESDLSQPESDEEGYALSGRRNVDLDLAASHRKRGPMHSQLESLSDSWARLKHSRDWLCNSSYSFESDFDLTKSLGVHTLIENVVSFVSGDVGNAPGFKEPEESMSTSPQASIIAMEQQQLRAELRLEALHQILVLLSGMEEKGSISLAGSRLSSGFQSSTLLTSVRLQFLAGCFGLGTVGHTGGKGESGRLHHYQDGIRAAKRNIQIEIQVAVHKIYQQLSATLERALQANKHHIEAQQRLLLVTVFALSVHYQPVDVSLAISTGLLNVLSQLCGTDTMLGQPLQLLPKTGVSQLSTALKVASTRLLQILAITTGTYADKLSPKVVQSLLDLLCSQLKNLLSQTGVLHMASFGEGEQEDGEEEEKKVDSSGETEKKDFRAALRKQHAAELHLGDFLVFLRRVVSSKAIQSKMASPKWTEVLLNIASQKCSSGIPLVGNLRTRLLALHVLEAVLPACESGVEDDQMAQIVERLFSLLSDCMWETPIAQAKHAIQIKEKEQEIKLQKQGELEEEDENLPIQEVSFDPEKAQCCLVENGQILTHGSGGKGYGLASTGVTSGCYQWKFYIVKENRGNEGTCVGVSRWPVHDFNHRTTSDMWLYRAYSGNLYHNGEQTLTLSSFTQGDFITCVLDMEARTISFGKNGEEPKLAFEDVDAAELYPCVMFYSSNPGEKVKICDMQMRGTPRDLLPGDPICSPVAAVLAEATIQLIRILHRTDRWTYCINKKMMERLHKIKICIKESGQKLKKSRSVQSREENEMREEKESKEEEKGKHTRHGLADLSELQLRTLCIEVWPVLAVIGGVDAGLRVGGRCVHKQTGRHATLLGVVKEGSTSAKVQWDEAEITISFPTFWSPSDTPLYNLEPCEPLPFDVARFRGLTASVLLDLTYLTGVHEDMGKQSTKRHEKKHRHESEEKGDVEQKPESESALDMRTGLTSDDVKSQSTTSSKSENEIASFSLDPTLPSVESQHQITEGKRKNHEHMSKNHDVAQSEIRAVQLSYLYLGAMKSLSALLGCSKYAELLLIPKVLAENGHNSDCASSPVVHEDVEMRAALQFLMRHMVKRAVMRSPIKRALGLADLERAQAMIYKLVVHGLLEDQFGGKIKQEIDQQAEESDPAQQAQTPVTTSPSASSTTSFMSSSLEDTTTATTPVTDTETVPASESPGVMPLSLLRQMFSSYPTTTVLPTRRAQTPPISSLPTSPSDEVGRRQSLTSPDSQSARPANRTALSDPSSRLSTSPPPPAIAVPLLEMGFSLRQIAKAMEATGARGEADAQNITVLAMWMIEHPGHEDEEEPQSGSTADSRPGAAVLGSGGKSNDPCYLQSPGDIPSADAAEMEEGFSESPDNLDHTENAASGSGPSARGRSAVTRRHKFDLAARTLLARAAGLYRSVQAHRNQSRREGISLQQDPGALYDFNLDEELEIDLDDEAMEAMFGQDLTSDNDILGMWIPEVLDWPTWHVCESEDREEVVVCELCECSVVSFNQHMKRNHPGCGRSANRQGYRSNGSYVDGWFGGECGSGNPYYLLCGTCREKYLAMKTKSKSTSSERYKGQAPDLIGKQDSVYEEDWDMLDVDEDEKLTGEEEFELLAGPLGLNDRRIVPEPVQFPDSDPLGASVAMVTATNSMEETLMQIGCHGSVEKSSSGRITLGEQAAALANPHDRVVALRRVTAAAQVLLARTMVMRALSLLSVSGSSCSLAAGLESLGLTDIRTLVRLMCLAAAGRAGLSTSPSAMASTSERSRGGHSKANKPISCLAYLSTAVGCLASNAPSAAKLLVQLCTQNLISAATGVNLTTVDDSIQRKFLPSFLRGIAEENKLVTSPNFVVTQALVALLADKGAKLRPNYDKSEVEKKGPLELANALAACCLSSRLSSQHRQWAAQQLVRTLAAHDRDNQTTLQTLADMGGDLRKCSFIKLEAHQNRVMTCVWCNKKGLLATSGNDGTIRVWNVTKKQYSLQQTCVFNRLEGDAEESLGSPSDPSFSPVSWSISGKYLAGALEKMVNIWQVNGGKGLVDIQPHWVSALAWPEEGPATAWSGESPELLLVGRMDGSLGLIEVVDVSTMHRRELEHCYRKDVSVTCIAWFSEDRPFAVGYFDGKLLLGTKEPLEKGGIVLIDAHKDTLISMKWDPTGHILMTCAKEDSVKLWGSISGCWCCLHSLCHPSIVNGIAWCRLPGKGSKLQLLMATGCQSGLVCVWRIPQDTTQTNVTSAEGWWEQESNCQDGYRKSSGAKCVYQLRGHITPVRTVAFSSDGLALVSGGLGGLMNIWSLRDGSVLQTVVIGSGAIQTTVWIPEVGVAACSNRSKDVLVVNCTAEWAAANHVLATCRTALKQQGVLGLNMAPCMRAFLERLPMMLQEQYAYEKPHVVCGDQLVHSPYMQCLASLAVGLHLDQLLCNPPVPPHHQNCLPDPASWNPNEWAWLECFSTTIKAAEALTNGAQFPESFTVPDLEPVPEDELVFLMDNSKWINGMDEQIMSWATSRPEDWHLGGKCDVY

SEQ ID NO: 24663 - DNA, 984 bp, Homo sapiens
aaaatgggatgttagtatctgtttcataggtgctatgtgaaagtagaaaatgagataatccatgtaaagcatttataggagtggctagagcatagccagtcattaatgactgtaactattgctgtcatcctcgttttccttgtcatcaccattattttaggtgactattcgcagttttgctaggttatggctacaaattcaatttaaaactaaagaaattaggccggttactgtggctcatgcctgtaaacccagcgctttgggaggccgaggtgggcggatcacttgaggtcaggagttcatgaccagcctggccagcatggtaaaaccctgtcttctacaaaaaatagaaataaatagccaggtgtggtagcacatgcctgtagtcccagctacttgggaggctgaggtgggaggattgcttgagcccaggagtttggggctgcagtgagctgtgatcacaccactgcactccagcctaggtgacagagcaagacactgtctctttaaaatttaaaaaaaaattaaaaaaaaaaatttttaaaagcattggtctttgaagatccagttttcagtgaagtttatgtaaagtttattgctatattaataccaaaaatggcagatttacttttttcttagtttcccttcttaaaaattttctttctccttggttctgtcttagatgtcttgtggcttcaagcactcagcagtggtcacttcagatggcaaactgttcacctttgggaatggtgactatggtcgtctgggtcttggaaatacctctaacaaaaaacttccagagagagtgactgcactggagggatatcagattggacaggcatggaataaatcaataagatattctagctgatcattgtttctcatttcttctgtgttcgcttagacaccctcaggaagatcaggatcaccagttgtacctaacctcatgtacattttgctatggtctaattgataattttaact

SEQ ID NO: 24664 - protein, 62 aa, Homo sapiens [sequence omitted]

SEQ ID NO: 24665 - DNA, 3338 bp, Homo sapiens
gacgcttgccgtagggaactcattggcgcccagggcaccaccccctcgccttcgcctcacgtagcttcaccagctcgcaaacacggcgcgtgcccacgccctccgccccctccccgggcctagggcgcaggcgcgcgcaagctccccgggcccagtaggctgggggtgggggtagaaggagaaggaggggaagggaggggggggttgggtgtctactctggtgaatagacggctgtggggcagagaagcgtgaaggcctggctgccgggcaggtgaactctccacggggtctagggcccgcgaaagggttcggaaccgagtcagcgcgccttgcgggcaggattcacgccgctgtgacccggaggtcctcagggggcgaagccccggcctaggcctcgcggagatgcccagctgcggtgcttgtacttgcggcgcggcggccgtccggctcatcacctcctcactcgcctccgcgcagagaggtatttctggtggtcgcattcatatgtcagttttaggaaggcttgggacatttgaaactcagattctgcaaagagctcctcttagatcctttacagaaacaccagcatactttgcctcaaaagatgggataagtaaagatggttctggagatggaaataagaaatcagcaagtgagggaagtagtaagaaatcaggctctgggaattctgggaaaggtggaaaccagctgcgctgtcctaaatgtggcgacttgtgcacacatgtagagacctttgtatcatccacccgttttgtcaagtgtgaaaagtgtcatcatttttttgttgtgctatctgaagcagactcaaagaaaagcataattaaagaacctgaatcagcagcagaagctgtaaaattggcattccaacagaaaccaccacctccccctaagaagatttataactacctcgacaagtatgttgttggccagtcatttgctaagaaggtgctttcagttgctgtgtacaatcattataagagaatatataataatatcccagctaatctgagacagcaagcagaggttgagaagcagacatcattaacaccaagagagttagaaataagaagacgggaggatgagtacagatttacaaaattgcttcagattgctggaattagcccacatggtaatgctttaggagcatcaatgcagcaacaggtaaatcaacaaatacctcaggaaaaacgaggaggtgaagtattggattcttctcatgatgacataaaacttgaaaaaagtaatattttgctgcttggaccaactgggtcaggtaaaactctgctggcacaaaccctagctaaatgccttgatgtcccttttgctatctgtgactgtacaactttgactcaggctggatatgtaggcgaagatattgaatctgtgattgcaaaactactccaagatgccaattataatgtggaaaaagcacaacaaggaattgtctttctggatgaagtagataagattggcagtgtgccaggcattcatcaattacgggatgtaggtggagaaggcgttcagcaaggcttattaaaactactagaaggcacaatagtcaatgttccagaaaagaattcccgaaagctccgtggagaaacagttcaagttgatacaacaaacatcctgtttgtggcatctggtgctttcaatggtttagacagaatcatcagcaggaggaaaaatgaaaagtatcttggatttggaacaccatctaatctgggaaaaggcagaagggctgcagctgctgcagaccttgctaatcgaagtggggaatcgaatactcaccaagacattgaagaaaaagatcggttattgcgtcatgtggaagccagagatctgattgagtttggcatgattcctgagtttgtgggacggttgcctgtggtggttccattgcatagcctagatgagaaaacacttgtacaaatattaactgaccaccacacccggccttatttaccatctttaatccattttagtactatgggtgagtacatggaattgaagtctggcttaaatcttcagaaagttatatatctattttattttatttttttgagacagagtctcgctgtgtcacccaggctggagtacagtgccacaatcttggctcactgcaacctctgagtcccaggttcaagcgatactcatgcctcagcctcctgagtagctgggactacaggcgtgcaccaccacacctggctaattttttgtatttttagtagagacggggtttcgccatgttgcccaggctggtctctcctgagctcaggcaatcggccaccttggcctctgaaagtgctagaattacgggcatgagccaccgcatccagccagaaagatacatatctaattctagaaatagcatgcagtatcagtcatagtaacagccatgtgctgacctaaataaaatttcttgatattgtgtatttaacctgaagtattgagctagtttttttgttttgttttttggtgctgaacattttggtctaattctttggcttcttagaacattttaaaaaatctatgttttgctatcagccaaagtaaatgtgttcacactaacatataagttactaaccttcattatacagcaaagctaaaaagtggtgggatatttggggtcttaatgaaaattgtatcatttaattccataaatattaaaatatttgggtaccttttaagctttttttctttccttctataatggtggtacaagttctatattcattcagtttaatctcatttgaaattgtttaaatcagagtacatgtaaatatttgtgggtttttttttttggtttatagactcgagctttccttttacacagttttttttagggaaaaactaaagctattaggaaattctaaatcttgttgatgaagagttgggctttctttgatataattaataaaagggatgtatggtatttatggctgggtaggaccagaaatgcactttgtattacagagtgttaaggctggttgctatagtatggaacagaaacacctctccttggtctccctagtaatggttcaagttcttcccaggaagtcttacatattataactttgttcattatctttcccttatagcatcattttcctttttgtagagtggaaatcagactagctgctaaacatattaaggttaatcctccagaaatgtactggggaggcattttagtcacaacaacttacatttggctttggaagttgttaacaaagcatagtcgatgtttttaaatcaaacataatttgtatcttggaacttacattttgacatttgaataaaacaaaaagactaaatgaaa

SEQ ID NO: 24666 - protein, 582 aa, Homo sapiens
MPSCGACTCGAAAVRLITSSLASAQRGISGGRIHMSVLGRLGTFETQILQRAPLRSFTETPAYFASKDGISKDGSGDGNKKSASEGSSKKSGSGNSGKGGNQLRCPKCGDLCTHVETFVSSTRFVKCEKCHHFFVVLSEADSKKSIIKEPESAAEAVKLAFQQKPPPPPKKIYNYLDKYVVGQSFAKKVLSVAVYNHYKRIYNNIPANLRQQAEVEKQTSLTPRELEIRRREDEYRFTKLLQIAGISPHGNALGASMQQQVNQQIPQEKRGGEVLDSSHDDIKLEKSNILLLGPTGSGKTLLAQTLAKCLDVPFAICDCTTLTQAGYVGEDIESVIAKLLQDANYNVEKAQQGIVFLDEVDKIGSVPGIHQLRDVGGEGVQQGLLKLLEGTIVNVPEKNSRKLRGETVQVDTTNILFVASGAFNGLDRIISRRKNEKYLGFGTPSNLGKGRRAAAAADLANRSGESNTHQDIEEKDRLLRHVEARDLIEFGMIPEFVGRLPVVVPLHSLDEKTLVQILTDHHTRPYLPSLIHFSTMGEYMELKSGLNLQKVIYLFYFIFLRQSLAVSPRLEYSATILAHCNL

SEQ ID NO: 24667 - DNA, 2854 bp, Homo sapiens
gacgcttgccgtagggaactcattggcgcccagggcaccaccccctcgccttcgcctcacgtagcttcaccagctcgcaaacacggcgcgtgcccacgccctccgccccctccccgggcctagggcgcaggcgcgcgcaagctccccgggcccagtaggctgggggtgggggtagaaggagaaggaggggaagggaggggggggttgggtgtctactctggtgaatagacggctgtggggcagagaagcgtgaaggcctggctgccgggcaggtgaactctccacggggtctagggcccgcgaaagggttcggaaccgagtcagcgcgccttgcgggcaggattcacgccgctgtgacccggaggtcctcagggggcgaagccccggcctaggcctcgcggagatgcccagctgcggtgcttgtacttgcggcgcggcggccgtccggctcatcacctcctcactcgcctccgcgcagagaggtatttctggtggtcgcattcatatgtcagttttaggaaggcttgggacatttgaaactcagattctgcaaagagctcctcttagatcctttacagaaacaccagcatactttgcctcaaaagatgggataagtaaagatggttctggagatggaaataagaaatcagcaagtgagggaagtagtaagaaatcaggctctgggaattctgggaaaggtggaaaccagctgcgctgtcctaaatgtggcgacttgtgcacacatgtagagacctttgtatcatccacccgttttgtcaagtgtgaaaagtgtcatcatttttttgttgtgctatctgaagcagactcaaagaaaagcataattaaagaacctgaatcagcagcagaagctgtaaaattggcattccaacagaaaccaccacctccccctaagaagatttataactacctcgacaagtatgttgttggccagtcatttgctaagaaggtgctttcagttgctgtgtacaatcattataagagaatatataataatatcccagctaatctgagacagcaagcagaggttgagaagcagacatcattaacaccaagagagttagaaataagaagacgggaggatgagtacagatttacaaaattgcttcagattgctggaattagcccacatggtaatgctttaggagcatcaatgcagcaacaggtaaatcaacaaatacctcaggaaaaacgaggaggtgaagtattggattcttctcatgatgacataaaacttgaaaaaagtaatattttgctgcttggaccaactgggtcaggtaaaactctgctggcacaaaccctagctaaatgccttgatgtcccttttgctatctgtgactgtacaactttgactcaggctggatatgtaggcgaagatattgaatctgtgattgcaaaactactccaagatgccaattataatgtggaaaaagcacaacaaggaattgtctttctggatgaagtagataagattggcagtgtgccaggcattcatcaattacgggatgtaggtggagaaggcgttcagcaaggcttattaaaactactagaaggcacaatagtcaatgttccagaaaagaattcccgaaagctccgtggagaaacagttcaagttgatacaacaaacatcctgtttgtggcatctggtgctttcaatggtttagacagaatcatcagcaggaggaaaaatgaaaagtatcttggatttggaacaccatctaatctgggaaaaggcagaagggctgcagctgctgcagaccttgctaatcgaagtggggaatcgaatactcaccaagacattgaagaaaaagatcggttattgcgtcatgtggaagccagagatctgattgagtttggcatgattcctgagtttgtgggacggttgcctgtggtggttccattgcatagcctagatgagaaaacacttgtacaaatattaactgagccacgaaatgctgttattcctcagtaccaggccttattcagcatggataagtgtgaactgaatgttactgaggatgctttgaaagctatagccagattggcactagaacgaaaaacaggtgcacgaggccttcggtccataatggaaaagctgttactagaaccaatgtttgaagtccctaattctgatatcgtatgtgtggaggttgacaaagaagtagtagaaggaaaaaaggaaccaggatacatccgggctccaacaaaagaatcctctgaagaggagtatgactctggagttgaagaagaaggatggccccgccaagcagatgctgcaaacagctaaactgtcatattgctgtcttgtatatacagcttttccttcttttgtttaggatcataattgtctctacagtctgatattaaaggcattggatctatcttggatatcatacatggtcagagaagcctttaggagaagaatcagatcatgtatataattgtaacatcacattgattttacggaagatgttatatggactttaatgacacaatgtttagagataaaatgtacattattttggttcagttttttaaaaaaaatatgctttaacaaaattcttaggaattcttttaagcaatgcaggtattgcgataactgtagattttacaataatgttactctacaaatgggaaaataaattctttaaaattgaatattgagataccattctttagtgttaccttttttacccacatccggccttatttaccatctttaatccattttagtactatgggtgagtacatggaattgaagtctggcttaaatcttcagaaagttatatatctattttattttatttttttgagacagagtctcgctgtgtcaccc

SEQ ID NO: 24668 - protein, 633 aa, Homo sapiens; identical to SEQ ID NO: 3287

SEQ ID NO: 24669 - DNA, 415 bp, Homo sapiens
aaatggaaaatatattgggctttatattctatacgaatttgtgtagactttagacatgtgagttaaaattccaggcagtttggccggcctcccaaagtgcagggattacagccgtgagccaccaagcccggcaggagttggttaatattaattcaccaaccatttcatttctattcactaaaaacttaaaaaatttaccccaggttccaagctgttggcaataaccaactgtagaatagagctttagctactattaagaataaagtttttagggctgagcttggtggctcatgcctgtaatcccagcactttgggaagccaaggcaggaagattgcttgagccccaggagttcaagaccagccttggcgacacagtgagaccctgtatcaaaaaaagaaaaaaatatatttttag

SEQ ID NO: 24670 - protein, 40 aa, Homo sapiens
MPVIPALWEAKAGRLLEPQEFKTSLGDTVRPCIKKRKKYI

SEQ ID NO: 24671 - DNA, 1928 bp, Homo sapiens
tcctggtgggcaacctggagattcgtgagaggaggctctttaacctggatgttcctgaaagcaggcggtgctttgttaaggtgagggcctaccggagtgagaggttcttgcctagtgagcagatccagggggttgtgatctccgtgattaacctggagcctagaactggcttcttgtccaaccctagggcctggggccgctttgacagtgtcatcacaggccccaacggggcctgtgtgcctgccttctgtgatgaccagtcccctgatgcctactctgcctatgtcttggcaagcctggctggggaggaactgcaagcagtggagtcttctcctaaattcaacccaaatgcaattggcgtccctcagccctatctcaacaagctcaactaccgtcggacggaccatgaggatccacgggttaaaaagacagctttccagattagcatggccaagccaaggcccaactcagctgaggagagcaatgggcccatctatgcctttgagaacctccgggcatgtgaagaggcaccacccagtgcagcccacttccggttctaccagattgagggggatcgatatgactacaacacagtccccttcaacgaagatgaccctatgagctggactgaagactatctggcatggtggccaaagccgatggaattcagggcctgctatatcaaggtgaagattgtggggccactggaagtgaatgtgcgatcccgcaacatggggggcactcatcggcagacagtggggaagctgtatggaatccgagatgtgaggagcactcgggacagggaccagcccaatcgagcgagcaggggtggccagcgccagggtggagtggtggcctctctgagatttcctagagttgctcaacagcccctgatcaactaagttttgtggtacttcaccctcttctgccctcatttcatgtgacagccattgtgagactgatgcacaaactgtcacttggttaatttaagcacttctgttttcgtgaatttgcttgtttgtttcttcatgcctttacttactttgtcccatgctactgattggcacgtggcccccacaatggcacaataaagcccctttgtgaaactgttctttaaatgaaacacaagaaattggccactggtaaaactctgcagcttcaactgtacttcatttaatgccattaatgcaaatatacttcctcttctttttgcatggttttgcccacctctgcaatagtgataatctgatgctgaagatcaaataaccaatataaagcatatttcttggccttgctccacaggacataggcaagccttgatcatagttcatacatataaatggtggtgaaataaagaaataaaacacaatacttttacttgaaatgtaaataacttatttatttctttgctaaatttggaattctagtgcacattcaaagttaagctattaaatatagggtgatcatagttcctctaccaagtctggaaagaacatctcctggtatccacaattacaccaggttgctaactgtatttgtacatttccctttgcattcgcttctgttcttgctagaaacccagtgtagcccagggcagatgtcaataaatgcatactctgtatttcgattctgaggccactgtcctgtcttaactattaaagtgagccagcttctcagaggagtacaggggactctggaaagcagtcacaggtggtgtaagtcctcgccccctaagttacagggcagggcaacataggcacacactccagcagtcaaatttgttctcatggatcacattttccgtttgcagaaaagagcagattcctggagttgtgagcatgttctgggctcctgagcaagactaaaaacacgtcccgatttttttctttccttctttccaatactttggagcttatacaatggcttgg

SEQ ID NO: 24672 - protein, 151 aa, Homo sapiens
MAKPRPNSAEESNGPIYAFENLRACEEAPPSAAHFRFYQIEGDRYDYNTVPFNEDDPMSWTEDYLAWWPKPMEFRACYIKVKIVGPLEVNVRSRNMGGTHRQTVGKLYGIRDVRSTRDRDQPNRASRGGQRQGGVVASLRFPRVAQQPLIN

SEQ ID NO: 24673 - DNA, 2700 bp, Homo sapiens
aagcatgactggctacaagggcactttcaccctccatgtcccccaggacactgagaggctggtgctcacatttgtggacaggctgcagaagtttgtcaacaccaccaaagtgctacctttcaacaagaaggggagtgccgtgttccatgaaatcaagatgcttcgtcggaaaaagcccatcactttggaagccatggagaccaacatcatccccctgggggaagtggttggtgaagaccccatggctgaactggagattccatccaggagtttctacaggcagaatggggagccctacataggaaaagtgaaggccagtgtgaccttcctggatccccggaatatttccacagccacagctgcccagactgacctgaacttcatcaatgacgaaggagacactttcccccttcggacgtatggcatgttctctgtggacttcagagatgaggtcacctcagagccacttaatgctggcaaagtgaaggtccaccttgactcgacccaggtcaagatgccagagcacatatccacagtgaaactctggtcactcaatccagacacagggctgtgggaggaggaaggtgatttcaaatttgaaaatcaaaggaggaactgcaagcagtggagtcttctcctaaattcaacccaaatgcaattggcgtccctcagccctatctcaacaagctcaactaccgtcggacggaccatgaggatccacgggttaaaaagacagctttccagattagcatggccaagccaaggcccaactcagctgaggagagcaatgggcccatctatgcctttgagaacctccgggcatgtgaagaggcaccacccagtgcagcccacttccggttctaccagattgagggggatcgatatgactacaacacagtccccttcaacgaagatgaccctatgagctggactgaagactatctggcatggtggccaaagccgatggaattcagggcctgctatatcaaggtgaagattgtggggccactggaagtgaatgtgcgatcccgcaacatggggggcactcatcggcagacagtggggaagctgtatggaatccgagatgtgaggagcactcgggacagggaccagcccaatgtctcagctgcctgtctggagttcaagtgcagtgggatgctctatgatcaggaccgtgtggaccgcaccctggtgaaggtcatcccccagggcagctgccgtcgagccagtgtgaaccccatgctgcatgagtacctggtcaaccacttgccacttgcagtcaacaacgacaccagtgagtacaccatgctggcacccttggacccactgggccacaactatggcatctacactgtcactgaccaggaccctcgcacggccaaggagatcgcgctcggccggtgctttgatggcacatccgatggctcctccagaatcatgaagagcaatgtgggagtagccctcaccttcaactgtgtagagaggcaagtaggccgccagagtgccttccagtacctccaaagcaccccagcccagtcccctgctgcaggcactgtccaaggaagagtgccctcgaggaggcagcagcgagcgagcaggggtggccagcgccagggtggagtggtggcctctctgagatttcctagagttgctcaacagcccctgatcaactaagttttgtggtacttcaccctcttctgccctcatttcatgtgacagccattgtgagactgatgcacaaactgtcacttggttaatttaagcacttctgttttcgtgaatttgcttgtttgtttcttcatgcctttacttactttgtcccatgctactgattggcacgtggcccccacaatggcacaataaagcccctttgtgaaactgttctttaaatgaaacacaagaaattggccactggtaaaactctgcagcttcaactgtacttcatttaatgccattaatgcaaatatacttcctcttctttttgcatggttttgcccacctctgcaatagtgataatctgatgctgaagatcaaataaccaatataaagcatatttcttggccttgctccacaggacataggcaagccttgatcatagttcatacatataaatggtggtgaaataaagaaataaaacacaatacttttacttgaaatgtaaataacttatttatttctttgctaaatttggaattctagtgcacattcaaagttaagctattaaatatagggtgatcatagttcctctaccaagtctggaaagaacatctcctggtatccacaattacaccaggttgctaactgtatttgtacatttccctttgcattcgcttctgttcttgctagaaacccagtgtagcccagggcagatgtcaataaatgcatactctgtatttcgattctgaggccactgtcctgtcttaactattaaagtgagccagcttctcagaggagtacaggggactctggaaagcagtcacaggtggtgtaagtcctcgccccctaagttacagggcagggcaacataggcacacactccagcagtcaaatttgttctcatggatcacattttccgtttgcagaaaagagcagattcctggagttgtgagcatgttctgggctcctgagcaagactaaaaacacgtcccgatttttttctttccttctttccaatactttggagcttatacaatggcttgg

SEQ ID NO: 24674 - protein, 306 aa, Homo sapiens
MTGYKGTFTLHVPQDTERLVLTFVDRLQKFVNTTKVLPFNKKGSAVFHEIKMLRRKKPITLEAMETNIIPLGEVVGEDPMAELEIPSRSFYRQNGEPYIGKVKASVTFLDPRNISTATAAQTDLNFINDEGDTFPLRTYGMFSVDFRDEVTSEPLNAGKVKVHLDSTQVKMPEHISTVKLWSLNPDTGLWEEEGDFKFENQRRNCKQWSLLLNSTQMQLASLSPISTSSTTVGRTMRIHGLKRQLSRLAWPSQGPTQLRRAMGPSMPLRTSGHVKRHHPVQPTSGSTRLRGIDMTTTQSPSTKMTL

SEQ ID NO: 24675 - DNA, 3246 bp, Homo sapiens
actggactgctggagaggcgaaggcttggacccccagctgaggagtcctgctcaagacacggtcactggatctgagaaacttcccaggggaccgcattccagagtcagtgactctgtgaagcacccacatctacctcttgccacgttcccacgggcttgggggaaagatggtggggaccaaggcctgggtgttctccttcctggtcctggaagtcacatctgtgttggggagacagacgatgctcacccagtcagtaagaagagtccagcctgggaagaagaaccccagcatctttgccaagcctgccgacaccctggagagccctggtgagtggacaacatggttcaacatcgactacccaggcgggaagggcgactatgagcggctggacgccattcgcttctactatggggaccgtgtatgtgcccgtcccctgcggctagaggctcggaccactgactggacacctgcgggcagcactggccaggtggtccatggtagtccccgtgagggtttctggtgcctcaacaggtgtgaccttcctggatccccggaatatttccacagccacagctgcccagactgacctgaacttcatcaatgacgaaggagacactttcccccttcggacgtatggcatgttctctgtggacttcagagatgaggtcacctcagagccacttaatgctggcaaagtgaaggtccaccttgactcgacccaggtcaagatgccagagcacatatccacagtgaaactctggtcactcaatccagacacagggctgtgggaggaggaaggtgatttcaaatttgaaaatcaaaggaggaacaaaagagaagacagaaccttcctggtgggcaacctggagattcgtgagaggaggctctttaacctggatgttcctgaaagcaggcggtgctttgttaaggtgagggcctaccggagtgagaggttcttgcctagtgagcagatccagggggttgtgatctccgtgattaacctggagcctagaactggcttcttgtccaaccctagggcctggggccgctttgacagtgtcatcacaggccccaacggggcctgtgtgcctgccttctgtgatgaccagtcccctgatgcctactctgcctatgtcttggcaagcctggctggggaggaactgcaagcagtggagtcttctcctaaattcaacccaaatgcaattggcgtccctcagccctatctcaacaagctcaactaccgtcggacggaccatgaggatccacgggttaaaaagacagctttccagattagcatggccaagccaaggcccaactcagctgaggagagcaatgggcccatctatgcctttgagaacctccgggcatgtgaagaggcaccacccagtgcagcccacttccggttctaccagattgagggggatcgatatgactacaacacagtccccttcaacgaagatgaccctatgagctggactgaagactatctggcatggtggccaaagccgatggaattcagggcctgctatatcaaggtgaagattgtggggccactggaagtgaatgtgcgatcccgcaacatggggggcactcatcggcagacagtggggaagctgtatggaatccgagatgtgaggagcactcgggacagggaccagcccaatgtctcagctgcctgtctggagttcaagtgcagtgggatgctctatgatcaggaccgtgtggaccgcaccctggtgaaggtcatcccccagggcagctgccgtcgagccagtgtgaaccccatgctgcatgagtacctggtcaaccacttgccacttgcagtcaacaacgacaccagtgagtacaccatgctggcacccttggacccactgggccacaactatggcatctacactgtcactgaccaggaccctcgcacggccaaggagatcgcgctcggccggtgctttgatggcacatccgatggctcctccagaatcatgaagagcaatgtgggagtagccctcaccttcaactgtgtagagaggcaagtaggccgccagagtgccttccagtacctccaaagcaccccagcccagtcccctgctgcaggcactgtccaaggaagagtgccctcgaggaggcagcagcgagcgagcaggggtggccagcgccagggtggagtggtggcctctctgagatttcctagagttgctcaacagcccctgatcaactaagttttgtggtacttcaccctcttctgccctcatttcatgtgacagccattgtgagactgatgcacaaactgtcacttggttaatttaagcacttctgttttcgtgaatttgcttgtttgtttcttcatgcctttacttactttgtcccatgctactgattggcacgtggcccccacaatggcacaataaagcccctttgtgaaactgttctttaaatgaaacacaagaaattggccactggtaaaactctgcagcttcaactgtacttcatttaatgccattaatgcaaatatacttcctcttctttttgcatggttttgcccacctctgcaatagtgataatctgatgctgaagatcaaataaccaatataaagcatatttcttggccttgctccacaggacataggcaagccttgatcatagttcatacatataaatggtggtgaaataaagaaataaaacacaatacttttacttgaaatgtaaataacttatttatttctttgctaaatttggaattctagtgcacattcaaagttaagctattaaatatagggtgatcatagttcctctaccaagtctggaaagaacatctcctggtatccacaattacaccaggttgctaactgtatttgtacatttccctttgcattcgcttctgttcttgctagaaacccagtgtagcccagggcagatgtcaataaatgcatactctgtatttcgattctgaggccactgtcctgtcttaactattaaagtgagccagcttctcagaggagtacaggggactctggaaagcagtcacaggtggtgtaagtcctcgccccctaagttacagggcagggcaacataggcacacactccagcagtcaaatttgttctcatggatcacattttccgtttgcagaaaagagcagattcctggagttgtgagcatgttctgggctcctgagcaagactaaaaacacgtcccgatttttttctttccttctttccaatactttggagcttatacaatggcttgg

SEQ ID NO: 24676 - protein, 574 aa, Homo sapiens
MVVPVRVSGASTGVTFLDPRNISTATAAQTDLNFINDEGDTFPLRTYGMFSVDFRDEVTSEPLNAGKVKVHLDSTQVKMPEHISTVKLWSLNPDTGLWEEEGDFKFENQRRNKREDRTFLVGNLEIRERRLFNLDVPESRRCFVKVRAYRSERFLPSEQIQGVVISVINLEPRTGFLSNPRAWGRFDSVITGPNGACVPAFCDDQSPDAYSAYVLASLAGEELQAVESSPKFNPNAIGVPQPYLNKLNYRRTDHEDPRVKKTAFQISMAKPRPNSAEESNGPIYAFENLRACEEAPPSAAHFRFYQIEGDRYDYNTVPFNEDDPMSWTEDYLAWWPKPMEFRACYIKVKIVGPLEVNVRSRNMGGTHRQTVGKLYGIRDVRSTRDRDQPNVSAACLEFKCSGMLYDQDRVDRTLVKVIPQGSCRRASVNPMLHEYLVNHLPLAVNNDTSEYTMLAPLDPLGHNYGIYTVTDQDPRTAKEIALGRCFDGTSDGSSRIMKSNVGVALTFNCVERQVGRQSAFQYLQSTPAQSPAAGTVQGRVPSRRQQRASRGGQRQGGVVASLRFPRVAQQPLIN

SEQ ID NO: 24677 - DNA, 1634 bp, Homo sapiens
tcctggtgggcaacctggagattcgtgagaggaggctctttaacctggatgttcctgaaagcaggcggtgctttgttaaggtgagggcctaccggagtgagaggttcttgcctagtgagcagatccagggggttgtgatctccgtgattaacctggagcctagaactggcttcttgtccaaccctagggcctggggccgctttgacagtgtcatcacaggccccaacggggcctgtgtgcctgccttctgtgatgaccagtcccctgatgcctactctgcctatgtcttggcaagcctggctggggaggaactgcaagcagtggagtcttctcctaaattcaacccaaatgcaattggcgtccctcagccctatctcaacaagctcaactaccgtcggacggaccatgaggatccacgggttaaaaagacagctttccagattagcatggccaagccaaggcccaactcagctgaggagagcaatgggcccatctatgcctttgagaacctccgggcatgtgaagaggcaccacccagtgcagcccacttccggttctaccagattgagggggatcgatatgactacaacacagtccccttcaacgaagatgaccctatgagctggactgaagactatctggcatggtggccaaagccgatggaattcagggcctgctatatcaaggtgaagattgtggggccactggaagtgaatgtgcgatcccgcaacatggggggcactcatcggcagacagtggggaagctgtatggaatccgagatgtgaggagcactcgggacagggaccagcccaatcgagcgagcaggggtggccagcgccagggtggagtggtggcctctctgagatttcctagagttgctcaacagcccctgatcaactaagttttgtggtacttcaccctcttctgccctcatttcatgtgacagccattgtgagactgatgcacaaactgtcacttggttaatttaagcacttctgttttcgtgaatttgcttgtttgtttcttcatgcctttacttactttgtcccatgctactgattggcacgtggcccccacaatggcacaataaagcccctttgtgaaactgttctttaaatgaaacacaagaaattggccactggtaaaactctgcagcttcaactgtacttcatttaatgccattaatgcaaatatacttcctcttctttttgcatggttttgcccacctctgcaatagtgataatctgatgctgaagatcaaataaccaatataaagcatatttcttggccttgctccacaggacataggcaagccttgatcatagttcatacatataaatggtggtgaaataaagaaataaaacacaatacttttacttgaaatgtaaataacttatttatttctttgctaaatttggaattctagtgcacattcaaagttaagctattaaatatagggtgatcatagttcctctaccaagtctggaaagaacatctcctggtatccacaattacaccaggttgctaactgtatttgtacatttccctttgcattcgcttctgttcttgctagaaacccagtgtagcccagggcagatgtcaataaatgcatactctgtatttcgattctgag

SEQ ID NO: 24678 - protein, 151 aa, Homo sapiens; identical to SEQ ID NO: 24672

SEQ ID NO: 24679 - DNA, 2406 bp, Homo sapiens
aagcatgactggctacaagggcactttcaccctccatgtcccccaggacactgagaggctggtgctcacatttgtggacaggctgcagaagtttgtcaacaccaccaaagtgctacctttcaacaagaaggggagtgccgtgttccatgaaatcaagatgcttcgtcggaaaaagcccatcactttggaagccatggagaccaacatcatccccctgggggaagtggttggtgaagaccccatggctgaactggagattccatccaggagtttctacaggcagaatggggagccctacataggaaaagtgaaggccagtgtgaccttcctggatccccggaatatttccacagccacagctgcccagactgacctgaacttcatcaatgacgaaggagacactttcccccttcggacgtatggcatgttctctgtggacttcagagatgaggtcacctcagagccacttaatgctggcaaagtgaaggtccaccttgactcgacccaggtcaagatgccagagcacatatccacagtgaaactctggtcactcaatccagacacagggctgtgggaggaggaaggtgatttcaaatttgaaaatcaaaggaggaactgcaagcagtggagtcttctcctaaattcaacccaaatgcaattggcgtccctcagccctatctcaacaagctcaactaccgtcggacggaccatgaggatccacgggttaaaaagacagctttccagattagcatggccaagccaaggcccaactcagctgaggagagcaatgggcccatctatgcctttgagaacctccgggcatgtgaagaggcaccacccagtgcagcccacttccggttctaccagattgagggggatcgatatgactacaacacagtccccttcaacgaagatgaccctatgagctggactgaagactatctggcatggtggccaaagccgatggaattcagggcctgctatatcaaggtgaagattgtggggccactggaagtgaatgtgcgatcccgcaacatggggggcactcatcggcagacagtggggaagctgtatggaatccgagatgtgaggagcactcgggacagggaccagcccaatgtctcagctgcctgtctggagttcaagtgcagtgggatgctctatgatcaggaccgtgtggaccgcaccctggtgaaggtcatcccccagggcagctgccgtcgagccagtgtgaaccccatgctgcatgagtacctggtcaaccacttgccacttgcagtcaacaacgacaccagtgagtacaccatgctggcacccttggacccactgggccacaactatggcatctacactgtcactgaccaggaccctcgcacggccaaggagatcgcgctcggccggtgctttgatggcacatccgatggctcctccagaatcatgaagagcaatgtgggagtagccctcaccttcaactgtgtagagaggcaagtaggccgccagagtgccttccagtacctccaaagcaccccagcccagtcccctgctgcaggcactgtccaaggaagagtgccctcgaggaggcagcagcgagcgagcaggggtggccagcgccagggtggagtggtggcctctctgagatttcctagagttgctcaacagcccctgatcaactaagttttgtggtacttcaccctcttctgccctcatttcatgtgacagccattgtgagactgatgcacaaactgtcacttggttaatttaagcacttctgttttcgtgaatttgcttgtttgtttcttcatgcctttacttactttgtcccatgctactgattggcacgtggcccccacaatggcacaataaagcccctttgtgaaactgttctttaaatgaaacacaagaaattggccactggtaaaactctgcagcttcaactgtacttcatttaatgccattaatgcaaatatacttcctcttctttttgcatggttttgcccacctctgcaatagtgataatctgatgctgaagatcaaataaccaatataaagcatatttcttggccttgctccacaggacataggcaagccttgatcatagttcatacatataaatggtggtgaaataaagaaataaaacacaatacttttacttgaaatgtaaataacttatttatttctttgctaaatttggaattctagtgcacattcaaagttaagctattaaatatagggtgatcatagttcctctaccaagtctggaaagaacatctcctggtatccacaattacaccaggttgctaactgtatttgtacatttccctttgcattcgcttctgttcttgctagaaacccagtgtagcccagggcagatgtcaataaatgcatactctgtatttcgattctgag

SEQ ID NO: 24680 - protein, 306 aa, Homo sapiens; identical to SEQ ID NO: 24674

SEQ ID NO: 24681 - DNA, 2952 bp, Homo sapiens
actggactgctggagaggcgaaggcttggacccccagctgaggagtcctgctcaagacacggtcactggatctgagaaacttcccaggggaccgcattccagagtcagtgactctgtgaagcacccacatctacctcttgccacgttcccacgggcttgggggaaagatggtggggaccaaggcctgggtgttctccttcctggtcctggaagtcacatctgtgttggggagacagacgatgctcacccagtcagtaagaagagtccagcctgggaagaagaaccccagcatctttgccaagcctgccgacaccctggagagccctggtgagtggacaacatggttcaacatcgactacccaggcgggaagggcgactatgagcggctggacgccattcgcttctactatggggaccgtgtatgtgcccgtcccctgcggctagaggctcggaccactgactggacacctgcgggcagcactggccaggtggtccatggtagtccccgtgagggtttctggtgcctcaacaggtgtgaccttcctggatccccggaatatttccacagccacagctgcccagactgacctgaacttcatcaatgacgaaggagacactttcccccttcggacgtatggcatgttctctgtggacttcagagatgaggtcacctcagagccacttaatgctggcaaagtgaaggtccaccttgactcgacccaggtcaagatgccagagcacatatccacagtgaaactctggtcactcaatccagacacagggctgtgggaggaggaaggtgatttcaaatttgaaaatcaaaggaggaacaaaagagaagacagaaccttcctggtgggcaacctggagattcgtgagaggaggctctttaacctggatgttcctgaaagcaggcggtgctttgttaaggtgagggcctaccggagtgagaggttcttgcctagtgagcagatccagggggttgtgatctccgtgattaacctggagcctagaactggcttcttgtccaaccctagggcctggggccgctttgacagtgtcatcacaggccccaacggggcctgtgtgcctgccttctgtgatgaccagtcccctgatgcctactctgcctatgtcttggcaagcctggctggggaggaactgcaagcagtggagtcttctcctaaattcaacccaaatgcaattggcgtccctcagccctatctcaacaagctcaactaccgtcggacggaccatgaggatccacgggttaaaaagacagctttccagattagcatggccaagccaaggcccaactcagctgaggagagcaatgggcccatctatgcctttgagaacctccgggcatgtgaagaggcaccacccagtgcagcccacttccggttctaccagattgagggggatcgatatgactacaacacagtccccttcaacgaagatgaccctatgagctggactgaagactatctggcatggtggccaaagccgatggaattcagggcctgctatatcaaggtgaagattgtggggccactggaagtgaatgtgcgatcccgcaacatggggggcactcatcggcagacagtggggaagctgtatggaatccgagatgtgaggagcactcgggacagggaccagcccaatgtctcagctgcctgtctggagttcaagtgcagtgggatgctctatgatcaggaccgtgtggaccgcaccctggtgaaggtcatcccccagggcagctgccgtcgagccagtgtgaaccccatgctgcatgagtacctggtcaaccacttgccacttgcagtcaacaacgacaccagtgagtacaccatgctggcacccttggacccactgggccacaactatggcatctacactgtcactgaccaggaccctcgcacggccaaggagatcgcgctcggccggtgctttgatggcacatccgatggctcctccagaatcatgaagagcaatgtgggagtagccctcaccttcaactgtgtagagaggcaagtaggccgccagagtgccttccagtacctccaaagcaccccagcccagtcccctgctgcaggcactgtccaaggaagagtgccctcgaggaggcagcagcgagcgagcaggggtggccagcgccagggtggagtggtggcctctctgagatttcctagagttgctcaacagcccctgatcaactaagttttgtggtacttcaccctcttctgccctcatttcatgtgacagccattgtgagactgatgcacaaactgtcacttggttaatttaagcacttctgttttcgtgaatttgcttgtttgtttcttcatgcctttacttactttgtcccatgctactgattggcacgtggcccccacaatggcacaataaagcccctttgtgaaactgttctttaaatgaaacacaagaaattggccactggtaaaactctgcagcttcaactgtacttcatttaatgccattaatgcaaatatacttcctcttctttttgcatggttttgcccacctctgcaatagtgataatctgatgctgaagatcaaataaccaatataaagcatatttcttggccttgctccacaggacataggcaagccttgatcatagttcatacatataaatggtggtgaaataaagaaataaaacacaatacttttacttgaaatgtaaataacttatttatttctttgctaaatttggaattctagtgcacattcaaagttaagctattaaatatagggtgatcatagttcctctaccaagtctggaaagaacatctcctggtatccacaattacaccaggttgctaactgtatttgtacatttccctttgcattcgcttctgttcttgctagaaacccagtgtagcccagggcagatgtcaataaatgcatactctgtatttcgattctgag

SEQ ID NO: 24682 - protein, 574 aa, Homo sapiens; identical to SEQ ID NO: 24676

SEQ ID NO: 24683 - DNA, 1139 bp, Homo sapiens
cacagcatctgatgagactccttgcaacccagttcctgagagctatcttatccggctgccccatgattgctttcagaatgccaccaactccttctactatgacgtgggacgctgccctgttaagacttgtgcagggcagcaggataatgggatcaggtgccgtgatgctgtgcagaactgctgtggcatctccaagacagaggaaagggagatccagtgcagtggctacacgctacccaccaaggtggccaaggagtgcagctgccagcggtgtacggaaactcggagcatcgtgcggggccgtgtcagtgctgctgacaatggggagcccatgcgctttggccatgtgtacatggggaacagccgtgtaagcatgactggctacaagggcactttcaccctccatgtcccccaggacactgagaggctggtgctcacatttgtggacaggctgcagaagtttgtcaacaccaccaaagtgctacctttcaacaagaaggggagtgccgtgttccatgaaatcaagatgcttcgtcggaaaaagcccatcactttggaagccatggagaccaacatcatccccctgggggaagtggttggtgaagaccccatggctgaactggagattccatccaggagtttctacaggcagaatggggagccctacataggaaaagtgaaggccagtgtgaccttcctggatccccggaatatttccacagccacagctgcccagactgacctgaacttcatcaatgacgaaggagacactttcccccttcggacgtatggcatgttctctgtggacttcagagatgaggtcacctcagagccacttaatgctggcaaagtgaaggtccaccttgactcgacccaggtcaagatgccagagcacatatccacagtgaaactctggtcactcaatccagacacagggctgtgggaggaggaaggtgatttcaaatttgaaaatcaaaggaggaacaaaagagaagacagaaccttcctggtatccacaattacaccaggttgctaactgtatttgtacatttccctttgcattcgcttctgttcttgctagaaacccagtgtagcccagggcagatgtcaataaatgcatactctgtatttcgattctg

SEQ ID NO: 24684 - protein, 234 aa, Homo sapiens
MRFGHVYMGNSRVSMTGYKGTFTLHVPQDTERLVLTFVDRLQKFVNTTKVLPFNKKGSAVFHEIKMLRRKKPITLEAMETNIIPLGEVVGEDPMAELEIPSRSFYRQNGEPYIGKVKASVTFLDPRNISTATAAQTDLNFINDEGDTFPLRTYGMFSVDFRDEVTSEPLNAGKVKVHLDSTQVKMPEHISTVKLWSLNPDTGLWEEEGDFKFENQRRNKREDRTFLVSTITPGC
